United States Patent Application Publication US 2006/0134663 A1 - sequence listing, part 102

SEQ ID NO: 312479 - DNA, 2230 bp, Homo Sapiens
  misc_feature (2220)..(2220): n is a, c, g, or t
attattaaaaaggtttaattggcttatggttctgcaggatgtacaggaagcatggtgctggcatctgctcagcttccagggaggcctcaggaagcttatgaccatggcaaaaggtgaagggggatcagacatgtcacatggtgaaagcaggagcaagaagggggcagggggaggtgccacacaattttaaatgaccgtatcttgcaataattcaccatcaagaaaacagcaccaagccatgaaatacccgtccccatgatccaaatcactctcgtaaccagagccccaacctccagcactgggtgattacaagttcaacatgatgatttggctggggacaaatattcaaactatatcgcctccttatgcagctgagggaaacagacttggggtcactaaggggaggagctgggattcagggtggagccagtgctcatggcataggctatgggtgctaaggtcgtttgtctgagcctcatctctaaggcagggaggacaagttgccagcacgatgacatgaaaccatccacatgaacgtcctgagcatggcatctgccacggcgagctcagtaaagatcagctccaagtcacagacccctcttccagaaaccaggtaccagtcttccatagaaaataggatttattttcacatttaaggtgaacacaaatccatgttccagaaatgttttatgcataacacatcatgagtagattgaatttctttaacacacagaaaaatcaaagcctaccaggaaatgcttccctccggagcacaggagcttacaggccacttctgttagcaacacaggaattcacattgtctaggcacagctcaagtgaggtttgttcccaggttcaactgctcctacccccatgggccctcctcaaaaacgacagcagcaaaccaacaggcttcacagtaaccaggaggaaagatctcagcgggggaaccttcacaaaagccctgagttgtgtttcaaaagccaagctctggggtctgtggcctgtgtcaccaactcaggtcacaccacagcacggggaagttagtgttgcagtttcacttctagtcaatcttgttaattaaattatcccaattaggaagacaatattaaacaggtattagagtccttttgcaaaactgactgtcccccttggtcaaggaaaagactttcacttggatggcaacccatcaccatcaccatgtccaaggcacagatgaatctgggctgggcaatcacaggcaatgcttgacaaggggtgggtgacatcatgtccacaaagatgcccagaaatgaggtcgtgaggaagggtgggtattaggaagcaatgtggtgggtcctggccgaggtctaacatccctagcagccttcctcaggcacactgtgacagtggagtgggcacacgtatcgtttcaggcaccttggctgacagcccaacgcggccacctgggtgcatggacatttgcagctgccaccatgccagcaccctggccacagattagctcaactggccacagtctgtgatgacaatcttcttggatgtcctcccactcttagagccgaaagattctattttcttcacgacgtccatgccctctttgacgtgaccgaacacaacatgcttgccatccaaccagtctgtctttatggtgcagatgaagaactgggagccgttggtgttaggaccagcattagccatggacaggacacctggccccacgtgcttcagtgtaaagttctcgtcaggaaagcggcttccgtagatggacttcccgcctgtgccattgtggttggtgaagtcgcccgcctggcacatgaaggaagggatcaccctgtggaaggtggagcctttgtagccgaagcccttctcaccagtgcacagggctctgaagttctcagctgtctttgggacgacatctgccttcagctccagcaccacgcggccgagcggcttcccgttggcgtccacgtccaggtacacgagcgggttcccggaggaggaggaagaggacgggtcgccggagcccttgctgcaggcgcgggccgcggggaggcgcagcggcacggagcgcgggacggagagcaggccgagccagcgggagccgcagcgcagcgccagcatcgcgggcgcgggtcgggcgggacacgggcggggagaacacagaactcaaactgacgtcgcgcgcgcccagatcccgggaattccggaccggtaccagcntgcttttttg

SEQ ID NO: 312480 - DNA, 981 bp, Homo Sapiens
  misc_feature (6)..(6): n is a, c, g, or t
  misc_feature (12)..(12): n is a, c, g, or t
  misc_feature (15)..(15): n is a, c, g, or t
  misc_feature (18)..(18): n is a, c, g, or t
  misc_feature (23)..(23): n is a, c, g, or t
  misc_feature (41)..(43): n is a, c, g, or t
  misc_feature (50)..(50): n is a, c, g, or t
  misc_feature (56)..(57): n is a, c, g, or t
  misc_feature (61)..(61): n is a, c, g, or t
  misc_feature (63)..(63): n is a, c, g, or t
  misc_feature (66)..(67): n is a, c, g, or t
  misc_feature (86)..(86): n is a, c, g, or t
atgatntggctnggnatnacagnatgttgacaagggtggtnnntcattcnacaaanngccnanaannaagtcgtgagaagggtggntattagaagcaatgtgttggtcctggccgaggtctaacatccctagcagccttcttcaggcacactgtgacagtggagtgggcacacgtatcgtttcaggcaccttggctgacagcccaacgcggccacctgggtgcatggacatttgcagctgccaccatgccagcaccctggccacagattagctcaactggccacagtctgtgatgacaatcttcttggatgtcctcccactcttagagccgaaagattctattttcttcacgacgtccatgccctctttgacgtgaccgaacacaacatgcttgccatccaaccagtctgtctttatggtgcagatgaagaactgggagccgttggtgttaggaccagcattagccatggacaggacacctggccccacgtgcttcagtgtaaagttctcgtcaggaaagcggcttccgtagatggacttcccgcctgtgccattgtggttggtgaagtcgcccgcctggcacatgaaggaagggatcaccctgtggaaggtggagcctttgtagccgaagcccttctcaccagtgcacagggctctgaagttctcagctgtctttgggacgacatctgccttcagctccagcaccacgcggccgagcggcttcccgttggcgtccacgtccaggtacacgagcgggttcccggaggaggaggaagaggacgggtcgccggagcccttgctgcaggcgcgggccgcggggaggcgcagcggcacggagcgcgggacggagagcaggccgagccagcgggagccgcagcgcagcgccagcatcgcgggcgcgggtcgggcgggacacgggcggggagaacacagaactcaaactgacgtcgcgatcccgggaattccggaccggtaccagcc

SEQ ID NO: 312481 - DNA, 1128 bp, Homo Sapiens
  misc_feature (31)..(31): n is a, c, g, or t
  misc_feature (125)..(128): n is a, c, g, or t
  misc_feature (132)..(132): n is a, c, g, or t
  misc_feature (250)..(250): n is a, c, g, or t
  misc_feature (276)..(276): n is a, c, g, or t
  misc_feature (282)..(282): n is a, c, g, or t
  misc_feature (310)..(310): n is a, c, g, or t
ctctgtaaaagtcaatctcacgtattatctnttcttctctattgaggttgactgtgaagtggttcatgttctcatagccatgttctattttctccatctgaaatgcctttgatgcttccgagatnnnntttngcagggttttggcattctgcagaaacactgccatttctggctcatccataaactgaattcctgactcaaccaactttgagacgttctccaaatgatcagaatactttttgatcagagnacggacatgttccagtttctcctctngggttngggtaatgacttgggtcatttcattctncctctcctccaaaatgccatacaggtaatcaaacttctcacaaagctcttgtttctgttttctgcaacattcctcgatagttttgcgaggtgtcttccagctggctgatcactccctggactcgatcgttgctgcccacgaggatggcggatgccatcactgagctcagacttctgtctctggaacacatgagtgaggggagccacctggcagtctttgtgtgcaccaaacacccttgcacagagagcaggtgggtacttcgcagttcagacagtagatgttgatgcgctcctcttcatgttcctcgcacatgggctggtcggatttcttttctggcctggtggactcctgcttgtagatgtcaatgatattttccaccagcaggttcctctgaagtccatataccccatgtctatccaaaaccacttcatgtctacaggatgggcagcggaatcggccccctgatgccatggtggtacctcctcttgtgggcaaatacgggttagaggcctggaaaatatcactggcacatttcctacacaggttgtgctgacaagggagaatcaccacaggtttcgtgaacatctctaagcagatgggacagatgagttgcttctctaagttatccatggtctgctgctctttggaaaaagatttgtaattcagagatgcgctcatctcctcgctgtccccaagtgtgctgccagggaagggtgctgcgagtggctccagcaagtgtttcctggatattattccagggattgtggatcaagtgtcctttacgtttctctcggtggaggacattgtttcaggccctc

SEQ ID NO: 312482 - DNA, 810 bp, Homo Sapiens
gggcgaagatccggactctgggtgttttgctaccgtgaccgtttagaacagaaactgttcatacttggtgcgctgtggactcttgtgataattaaccaagagtagctctatttgtccaacctcacacctaaagaagaaagaaaatggcttgtgctgagttttcttttcatgtaccaagtcttgaagagcttgctggagttatgcagaaggggttaaaagataactttgctgatgtccaggtctctgtagttgattgccctgatttgactaaggaaccctttacctttcctgtaaaaggcatctgtgggaaaactagaattgcagaagttggaggtgtgccttacttattgcctcttgtaaaccaaaaaaaagtttatgatctgaataaaattgcaaaagaaatcaagctgcctggagcctttattcttggagcaggagcaggtccatttcagactctcgggttcaattctgagtttatgccagttattcagacagaaagtgaacacaagcctcctgtaaatggaagttactttgcccatgtgaaccctgcagatggagggtgcctactggagaaatacagtgagaaatgtcatgattttcagtgtgcattactggctaatctttttgccagtgaaggccaaactggcaaggtaattgaggtgaaagccaaaagaagaactgggaccacttaacctttgtgactttgtatggaaagagacccttggaaaaaacattatgggaaataaacccctataggaaatggggaagtacctttccctaaattccaaaaggggaaaaagtggaaatcca

SEQ ID NO: 312483 - DNA, 1243 bp, Homo Sapiens
aaggctttccctgtttccctgaggaccccttcaggggtttttgcggacttgggccttctgggttcaacactgggcacgtccagaccccaggtactctgggttctctgccgtaggtgtccctttgaaggtgctgggtggagccccccgcttctggtgggtcctggtcccagtaatagaggttgtcgaaggctgggctgaaggcaggaggagggtggggctgaggggcagcttcttccctggggtgtcaagtactcggggttctccacggcacccccaaaggcaaaaacgtctttgacgaccccattcttccctggggagagagtcttgggcctttccagagtggcaccagcaggtcgggcagcaggcagagggccctctcggggcgaagggggctggggccgaacatctggctggttcacatattcaggctgggggctgcaggtcaggggggcaacgtagccatcagtctcagagggcaggggtactgtggggtcctcactgtaccgctgtagagggctggggtcatgtgtggggaggctttgcagccccttggctgcccccattcccaggtcaccatcaaatacatcggagccagccccttcggagggtgccagtggagacctgggggcctcctcttcagagggctccagccctagtgtcaggtccccaccgccactcctggtagatgagctgcggtgcctgtggtggaccatgcccccagcgcccggggcagggtctggacagaagaagccctgctggggtaccagatactcctcagcatccaccaggtcccccatgtcatcgtcctccagcagtgagcggtagaaggtgctgtccaagggactggctgggcccaagtcctcattctggatgaccacaaagcgctgggggtccctggccatgcgggagaattcagacaccaactcccggaatcttggccgacattcagagtcaatcatccaacatttgaccatgatcatgtagacatcaatggtgcagatggggggctggggcagccgctcccccttttccagcaggtcagggatctcccgggctgggatcccatcgtaaggtttggccccaaaagtcatcagctcccacacagtcacaccataactccacacatcactctggtgggtgaaccgccggcggagaatggactccagcgccatccacttgatgggcaccttgcccccatctgcaggtactcttctcgtcccgggaatccggaccggtccagcct

SEQ ID NO: 312484 - DNA, 1106 bp, Homo Sapiens
  misc_feature (105)..(143): n is a, c, g, or t
ccaaaatatatttgcaaatggacaaagtgggtgtggagaaggaccccccacacttgcctccccatacaacacccattctccccctgggtctttatttcatctttnnnnnnnnnnnnnnnnnnnnnnnnnnnnnnnnnnnnnnngcactctgtacaaagcctggatactgacaccattgctgttccttcctcatggggggcagtactaggtttcagggacagtctctgaatgggtcgcttttgttcttagacactcccttagggccgcttcccctctcaggccagcttccctaaggctttcagtacccaggatctggaaggaaagggccaagctgggctgtggcatccactggaccctagagtctcattgggcagggcctcagaatccacaaagactccccagtgctgttcctcttccaacgaggctggaccccttccagccatctgggaactcaagcaggaaggaaggttccttaggacaggttcctggcatggcaggttcccctggaagtggtcggagggccctcccacctcttgatgccagcagaagtcaggccttccctgctccctgaggacacatcagggcttctgcggacttggccttctggttcacactggcacgtccagacccaggtactctgggttctctgccgtaggtgtccctttgaaggtgctgggtggagccccccgctctggtgggtcctggtcccagtaatagaggttgtcgaaggctgggctgaaggcaggaggagggtggggctgaggggcagctcctccctggggtgtcaagtactcggggttctccacggcacccccaaaggcaaaaacgtctttgacgaccccattcttccctggggagagagtcttgggcctttccagagtggcaccagcaggtcgggcagcaggcagagggccctctcggggcgaagggggctggggccgaacatctggctggttcacatattcaggctgggggctgcaggtcaggggggcaacgtagccatcagtctcagagggcaggggtactgtggggtcctcactgtaccgctgtagagggctggggtcatgtgtggggaggctttgcagccccttggctgcccccattcc

SEQ ID NO: 312485 - DNA, 1916 bp, Homo Sapiens
  misc_feature (147)..(147): n is a, c, g, or t
  misc_feature (1310)..(1310): n is a, c, g, or t
attggcccccaattcccagggttcacgcgtgcagatgccattcggagcccagcccctttcgggggggttcccagtggaggacctggggggcctcctctttcaggagggctccagcccttagtgtcagggtcccccaccgccacttcntggtagggtgagctgcggtgcctgtggtggaccatgcccccaggcgcccggggcagggtctggacagaagaagccctgctggggtaccagatactcctcagcatccaccaggtcccccatgtcatcgtcctccagcagtgagcggtagaaggtgctgtccaagggactggctgggcccaagtcctcattctggatgaccacaaagcgctgggggtccctggccatgcgggagaattcagacaccaactcccggaatcttggccgacattcagagtcaatcatccaacatttgaccatgatcatgtagacatcaatggtgcagatggggggctggggcagccgctcccccttttccagcaggtcagggatctcccgggctgggatcccatcgtaaggtttggccccaaaagtcatcagctcccacacagtcacaccataactccacacatcactctggtgggtgaaccgccggcggagaatggactccagcgccatccacttgatgggcaccttgcccccatctgcatggtactctgtctcgtcaatgtccagcagccgagccagcccgaagtctgtaattttgacatggttgggactcttgaccagcacgttccgagcggccaagtccctgtgtacgagccgcacatcctccaggtagctcatccccttggcaatctgcatacaccagttcagcaggtcctgggagcccaggcgtccgcggttttcccggacatggtctaagaggcagccatagggcataagctgtgtcaccagctgcaccgtggatgtcaggcagatgcccagaaggcgggagacatatggggagcccacaccagccatcacgtatgcttcgtctaagatttctttgttggctttgggggatgtgttttccctcaacactttgatggccactggaattttcacattctccccatcagggatccagatgcccttgtagactgtgccaaaagcgccagatccaagcaccttcaccttcctcagctccgtctctttcaggatccgcatctgcgcctggttgggcatcgctccgctaggtgtcagcggctccaccagctccgtttcctgcagcagtctccgcatcgtgtacttccggatcttctgctgccgtcgcttgatgaggatcccaaagaccacccccaagnaccacgaccagcagaatgccaaccaccgcagagatgatggacgtcagagggctggctctctgctcggcggggcagcccttgtcatccaggtccacacaggagtgggtgcagttgatggggcaaggctggcatgcgccctcctcatctggaaacttccagatgggcatgtaggagaggtcaggtttcacaccgctggggcagcgggccacgcagaagggagggtccttatagtgggcacaggccacacactggtcagcctcctggggggggcagaaaagatttgtggggggctggcactgacacccccagggcagtaggatcaggcccttagttgggtcccctttgtgcttcccaaggccacccagcagcaattttcgccatgctcctgggacaaacacccttgctcttcacccagtctctgtggcccctccctcggggccctcctccaagcttgatcctgggcagggacttgagccagaaaatgggaggcacccagagaggaaaacgcattacctaaggtgtaacagcgagtaacaacagtcactgctctgtagaaagcctttcccgtgcttcactgtgccaagccctgtttaatttcattcttgc

SEQ ID NO: 312486 - DNA, 1066 bp, Homo Sapiens
  misc_feature (218)..(218): n is a, c, g, or t
ggtaaccccaggattctggaaagggaaaggggccccaagttggggcctgtggccatcccaactggacccctaggagttttcccttggggccaggggcccttcagaatccccccaaaggacttcccccaggtgcctgtttcctctttccaagcgagggctgggccccctttccagcccatctggggacctcaagcaggaaggaaggttcctttaggacnaggttccctggcatggcaggttccccctggaagtggtcggagggccctcccaccttcttgatgccagcagaagtcaggccttccctgctccctgaggacacatcagggcttctgcggacttggccttctggttcacactggcacgtccagacccaggtactctgggttctctgccgtaggtgtccctttgaaggtgctgggtggagccccccgctctggtgggtcctggtcccagtaatagaggttgtcgaaggctgggctgaaggcaggaggagggtggggctgaggggcagctcctccctggggtgtcaagtactcggggttctccacggcacccccaaaggcaaaaacgtctttgacgaccccattcttccctggggagagagtcttgggcctttccagagtggcaccagcaggtcgggcagcaggcagagggccctctcggggcgaagggggctggggccgaacatctggctggttcacatattcaggctgggggctgcaggtcaggggggcaacgtagccatcagtctcagagggcaggggtactgtggggtcctcactgtaccgctgtagagggctggggtcatgtgtggggaggctttgcagccccttggctgcccccattcccaggtcaccatcaaatacatcggagccagccccttcggagggtgccagtggagacctgggggcctcctcttcagagggctccagccctagtgtcaggtccccaccgccactcctggtagatgagctgcggtgcctgtggtggaccatgcccccagcgcccggggcagggtctggacagaagaagccctgctggggtaccagatactcctcagcatcca

SEQ ID NO: 312487 - DNA, 1247 bp, Homo Sapiens
  misc_feature (111)..(209): n is a, c, g, or t
ctaggcacaagagatcctccctcctcagcctccctagtagctggggctacaagtgtgtgccaccgtgcctggctaatttttttaaatcttttatttttgtagagacaggannnnnnnnnnnnnnnnnnnnnnnnnnnnnnnnnnnnnnnnnnnnnnnnnnnnnnnnnnnnnnnnnnnnnnnnnnnnnnnnnnnnnnnnnnnnnnnnnnngcacctggacctcaagtttttgtgaaaatctttggggtaggagcttttggtggctcataaatgagctttgggaagatgacagggttatcacgccaagcaagaggccaggcttcgtgcaaagaagggcagcatctcgccccgagcgccaacaccgcctggcacgtctctgtgctggaggtaatcgccactcaagtctctgcccatcttcctgggaaactgtcctgtctctcagaatataggcatcttccacattcattccccaagcttgccccaggagccaaaatgattttagtgtgtggaggttgaacctttcccagcgtctccccagctctagggcagcagtggggggacgttgtccccactcaagacaggttccaagacatgctctgccacgctggcagagcttagtgaccttgctgagtagatgctgccaacggctgggtgcaagaggctgtgagcggtgcccaggcacacacctgaggctgcccctccaagctccgggatggaacggctccagcaagatgctggggctggaaatgcagaggtgtgacagtgcgtccatcctcagcccttcagagggtcatctcacattgcacctccaagtccacgaccagcagaatgccagccaccgcagagatgatggacgtcagagggctggctctctgctcggcggggcagcccttgtcatccaggtccacacaggagtgggtgcagttgatggggcaaggctggcatgcgccctcctcatctggaaacttccagatgggcatgtaggagaggtcaggtttcacaccgctggggcagcgggccacgcagaagggagggtccttatagtgggcacaggccacacactggtcagcctccggtccaaaacaggtcactgagccattctggggctgacactcagggtggcacggcaaacagtgcctggcattcacatactccctggggagcccctgcagtactcggcattcctccacgcactcctggccccgaaggaacatggctgcagcctcgtgccgaattcgccacccaggc

SEQ ID NO: 312488 - DNA, 834 bp, Homo Sapiens
  misc_feature (59)..(61): n is a, c, g, or t
gcgcgcccaaagaaaggtctagaaaagcttctggaggcccgaggcgggcccacaagggnnngggtttgtgttgtgtggttttttccctggtagcgccactttactgccaatagctgacattgccctgggttaggggagaataaataaaatctgtggcatcagacaggtattaccgaggcgaagagtggactgggctttcgtgggcacttaccctgggaagggggtatgaggtggctggagaagtgttcatggagagtgtctctctcctgcccccaaggccacggaatcttctattccttctttgtacccaaagggcaaagtggaggccagggtctctttgctaaggagctaagtaggggaaagaggcagggggagctcccagcaggaccaaagggagaccaaggtttggaccccagaacagagcaggaacccagagtcctgtgcagtcacaggatgacgcagggaggacggctgttggtgatcttttctagggtttctccattactggctcttcggatggcctcaatgagatctttctcatagggaaagcccccattctccagcttggagaacaccagctgtccatttatctctatctcaaaagcacctgtgcccccgaggcgcgactcgatctcgatgcccggatactgctccttcacagcactggccagctccaggtaggtcgcctcgaagccgcagggttcacagtactccaccacgatgcggaccccactgcccggctcgacctcctcgggagggggcgctacggacgtctgccccggctccccgctcatcgcggccggctccgctcgggcccctgcttccgggtgtccc

SEQ ID NO: 312489 - DNA, 565 bp, Homo Sapiens
  misc_feature (322)..(322): n is a, c, g, or t
  misc_feature (337)..(337): n is a, c, g, or t
  misc_feature (476)..(476): n is a, c, g, or t
gcggccctaagggagtgtctaagaacaaaagcgacccattcagagactgtccctgaaacctagtactgccccccatgaggaaggaacagcaatggtgcctctgtgacaccccctgacctatggaagggaactcatgttggccggacattttaccatgtgccaggcactgcgggcactttacataaagcagccaatgtcagaactagaaagcgggagagctgggattcagagcacagactgacccagcaggtgttctgcgagcctcacctgtgcccccgaggcgcgactcgatctcgatgcccggatactgctccttcacagncactggccagctccnaggtaggtcgcctcgaagccgcagggttcactggggagtcaagagatggggctgggctggggattcgggggtggggcctcccgtggacccacctccgtccggcccgcgggaccagggtgcgggtcctccagccggggcngcttcaccagtactccaccacgatgcggaccccactgccctgctcgacctcctcgggagggggcgctacggacgtctgccccggctccc

SEQ ID NO: 312490 - DNA, 536 bp, Homo Sapiens
  misc_feature (116)..(154): n is a, c, g, or t
  misc_feature (309)..(309): n is a, c, g, or t
  misc_feature (402)..(402): n is a, c, g, or t
  misc_feature (470)..(470): n is a, c, g, or t
  misc_feature (491)..(491): n is a, c, g, or t
tttgctgttttccaaaatatatttgcaaatggacaaagtgggtgtggagaaggaccccccacacttgcctccccatacaacacccattctccccctgggtctttatttcatctttnnnnnnnnnnnnnnnnnnnnnnnnnnnnnnnnnnnnnnngcactctgtacaaagcctggatactgacaccattgctgttccttcctcatggggggcagtactaggtttcagggacagtctctgaatgggtcgcttttgttcttagacactcccttagggccgcttcccctctcaggccagcttccctaaggctntcagtacccaggatctggaaggaaagggccaagctgggctgtggcatccactggaccctagagtctcattgggcagggcctcagaatccacanagactcccccagtgcttgttctctttcaacgagggctgacccctttcagccatctgggaactcagcangaagggagggtccttagacangtttctgcatggcagttcctcggaaatggccgaaggccctccact

SEQ ID NO: 312491 - DNA, 725 bp, Homo Sapiens
gctggagagtggatcactgtcaatcagacgacaacagccaaccgttatttaaaggtctctgacctgcagcagggtaagacctatgtcttcagggtccgggcagtcaatgcaaatggcgtggggaagccctcagacacgtcggagcctgtgctggtagaggcgagaccaggcaccaaggaaatcagtgctggtgtcgatgaacaaggcaacatctatctgggcttcgactgccaggaaatgacagacgcgtctcagttcacctggtgtaaatcctacgaggagatttcagatgatgagaggtttaaaattgaaaccgtgggggatcactccaagctgtacttaaagaatccggataaggaggatttagggacttactccgtgtctgtaagtgatacagacggagtgtcctccagttttgttctggacccagaagagctcgagcgtttgatggcattgagcaatgaaataaagaaccccacaattcctctgaaatcggaattagcttatgagatttttgataaggggcgggttcgcttctggctccaggctgagcacttatcaccagatgccagctaccgatttattattaacgacagagaagtctctgacagcgagatacacagaattaaatgtgacaaagctactggcattattgagatggtgatggatcgatttagtattgaaaatgaggggacctacactgtgcagattcatgatgggaaagc

SEQ ID NO: 312492 - DNA, 628 bp, Homo Sapiens
  misc_feature (512)..(574): n is a, c, g, or t
tgttaatgacaattccatataccaaaagacacattttttacttcaaagttttgtccttgtgttaggcagtctgagcagcgagtgatccagagcgcagccaacaaagcagcagatagcagtgtacagaaagcaaaaaaggaactgtatgtgaggcacttgtttctgttaatatccatattcctgttaacacacaccctttctcatgtaaaaagaaaaataaataaatggtctgaactttgaaaactttgtgctgctaaaacatagattttggagacaaataaatagatgctttgctgtcactttcatagctaaacatcaacagaaaccatctccccttgcccccaaagtgtgaaatccttcttcccttcgttttcttccttatgtttcaaaagggaactttgaagactgtgaatacaggttccattggtcacctttcgggcttctttccccagtgctgaagccactcatcgactttgcaaaagactggagcattccaagatctgaaaatggannnnnnnnnnnnnnnnnnnnnnnnnnnnnnnnnnnnnnnnnnnnnnnnnnnnnnnnnnnnnnnaatgaaatagtagatcctgaaatgttgtacatatttctaactaggctgatgcac

SEQ ID NO: 312493 - DNA, 914 bp, Homo Sapiens
  misc_feature (87)..(147): n is a, c, g, or t
  misc_feature (278)..(298): n is a, c, g, or t
cctcctcagttcttcatatttctctcaaattacctttcaacaatatgttcatatctcagccataaagcgatggttgatccacatgcnnnnnnnnnnnnnnnnnnnnnnnnnnnnnnnnnnnnnnnnnnnnnnnnnnnnnnnnnnnnnatgaaatagctcagaagagacataatacttatgaaacctgagaaagtgatctttttattttcacccaagataattcaattcataaattgttgctgtattagcaacttggaacttgaaattggcaccagggnnnnnnnnnnnnnnnnnnnnncaggtatacttctatccttgaaatgtcatttatatttctttctgcaagttgatgcggacattgctgaatattttcccaacagcttcaaagagtgggtcacagacggtgtggacgtagatggaatagacacggctgatgcactgaatctcaatcaggaagctcttaatgcatggtacaactgcccagatgtgcaggaaagagagaatggcgaagtaaatgccccagatgagtgccatcgggatgccaaagagggcagacagcaagcggtaaaaccagtatttcgtcacagtgaaggtggtgaagctggccttccaaatgccgtcaaaactgtgtgtcccttctggttctgcaatcacatcttcaaagtcaatcttgaccacgtcatcgttgaggtgtttagggtcgcggttgaccaggtcgatctccttggtgtgcgcgtcgtacacttgcttctcgctcagctcgtctgccatggccttgttgttgggcttgtagatgttgccctgttcccggatgggaacggtgtagagatgtccctccgagtctacgtatttgcccccagacatgctggcccgtggctggatgaaaactgtgaggaggtttccctgggctgtgc

SEQ ID NO: 312494 - DNA, 1875 bp, Homo Sapiens
  misc_feature (76)..(85): n is a, c, g, or t
  misc_feature (134)..(285): n is a, c, g, or t
  misc_feature (705)..(713): n is a, c, g, or t
gtgggggatcccaccctttttctttcccgggttttctttgggaccactttggccccttttcctttcctttgggggnnnnnnnnnnaaaggaagggtttaaaaaattttttggggggggggggggcccccaaggnnnnnnnnnnnnnnnnnnnnnnnnnnnnnnnnnnnnnnnnnnnnnnnnnnnnnnnnnnnnnnnnnnnnnnnnnnnnnnnnnnnnnnnnnnnnnnnnnnnnnnnnnnnnnnnnnnnnnnnnnnnnnnnnnnnnnnnnnnnnnnnnnnnnnnnnaaccgttaaacatttttattgtgcaggcttgtaacctttacaggacatgcatgataaaaaattgtaaaatatatcagtaagcatataaaatttcagcaatcttttggaccagtaattgatttgcatgagggactaagcatctatgtagaacagacatgtcttggaatacacagtttacagattgaatcacaaagccatttcctaagtgattttcttcatataaagataaaaatatctttacatttaaaaagtatgcagtatagcacattttcagttatgtacacagtttaaaagtaaaactatatccatgccagtgtctgttttaaatgcaaaaagtcaaagtaggtaacaggttggtaattaaagtgtcaggaagactggaagaggcaaaaatcaagcagagttccaataagtgtatgnnnnnnnnntcataactgaaggtttaagaaaagtccccaaaggcagaatcacaatatgagcaggaggaataaaaagcttttggatataccaggcagctttctgtacgactcaggtttacaggtgaaattcctcagtttgagttcagaagaatttgaacttattccagcaaaatacttcaatctttttattactgcctcctcccccatcttctttctgggcaaagggatgcttggattaggtccaaagctcctggcagggggaggggccatgtgtcacagcataacagacggttgcaagtgctttactgagcaggggtcaggtttgcagcaactctgataggctcacacaatggcctccattttacagcccctccttggaggcccactgatcagctgaaatgggaacacaatgttgagccactaaaccaccccggtgatggattagtttggattcaggaaagcgtgattattcttgaaaataaacgaagctgaatagacatgctgacctcattcagttgatgagaggcagggaaagctggcttccaggactgccagcccacagagagctcagccctattggtccactttaattcatttcattgggctagtgtcaaccatacccactacggataaagatgttgccagatgaagcccagaagtgagcttcaccagactctgtagctcagagtcagaaacacgcatggaaaactaggtcatggatattctaattttggtcttcagggaggctgctgacctaaagcgagttgctgagttagaccctatttgaaaaggaaaatgtgaaaaacaggaaggcactgaggtcttgttatctacataacaaatattcaggcacagaaaatatcataggttaaaatttcaagaagagtaaggcattagttggatcatgagaaggcagaagattatgttttctaacttgtaaggatcactggatcctactggattatgaagtgaatggcagtaatccactaactccttaaacagtgggaaaagagtttgctgaaaatctgcccacatacttgtacactccatggccatacctggaattcttcccttaacataaaatgaccaacattttggagtaggcagttgaggttgttggttccgacgcgtgggtcgacgatatcccgggattcctgaccgtaccagcctc

SEQ ID NO: 312495 - DNA, 1001 bp, Homo Sapiens
  misc_feature (278)..(298): n is a, c, g, or t
cctcctcagttcttcatatttctctcaaattacctttcaacaatatgttcatatctcagccaataaagcgatggttgatccacatgcaaataaaaaggtaaggaaaaaaatttaaatgggttttaaaaattcagactgccaaaaatagatgaaatagctcagaagagacataatacttatgaaaactgagaaagtgatctttttattttcaaccaagataattcaattcataaattgttgctgtattagcaacttggaacttgaaattggcaccaggnnnnnnnnnnnnnnnnnnnnncaggtatactttctatccttgaaaggtcatttatatttctttcggcaagttgatgcggacattgctgaatattttcccaacagcttcaaagagtgggtcacagacggtgtggacgtagatggaatagacacggctgatgcactgaatctcaatcaggaagctcttaatgcatggtacaactgcccagatgtgcaggaaagagagaatggcgaagtaaatgccccagatgagtgccatcgggatgccaaagagggcagacagcaagcggtaaaaccagtatttcgtcacagtgaaggtggtgaagctggccttccaaatgccgtcaaaactgtgtgtcccttctggttctgcaatcacatcttcaaagtcaatcttgaccacgtcatcgttgaggtgtttagggtcgcggttgaccaggtcgatctccttggtgtgcgcgtcgtacacttgcttctcgctcagctcgtctgccatggccttgttgttgggcttgtagatgttgccctgttcccggatgggaacggtgtagagatgtccctgcagagggcggagggcggacggccaggacggggagggcggcaacggcggtgggaggaaaaatgcaaaaagaaaaacaagcgatgagaagtcagcctggcggcgggggaaacctcgagctcgaaatcgaactaaccgctccgacagctacggctccgtgcacccc

SEQ ID NO: 312496 - DNA, 523 bp, Homo Sapiens
  misc_feature (503)..(503): n is a, c, g, or t
atccaactaatgccttactcttcttgaaattttaacctatgatattttctgtgcctgaatatttgttatgtagataacaagacctcagtgccttcctgtttttcacattttccttttcaaatagggtctaactcagcaactcgctttaggtcagcagcctccctgaagaccaaaattagaatatccatgacctagttttccatgcgtgtttctgactctgagctacagagtctggtgaagctcacttctgggcttcatctgggcaacatctttatccgtagtggggtatgggttgacactagcccaatgaaatgaattaaagtgggaccaataggggcttgaggctcttctgtggggctgggcagtcctggggaaggccagcttttccctggcctcttcatccaacttgaattgagggttcagccatgttcttatttcagctttcgttttattttttcaaggattaattcacggtttttccgggaattcccaacttaatcccntcaccggggtgggttttggt

SEQ ID NO: 312497 - DNA, 394 bp, Homo Sapiens
  misc_feature (301)..(301): n is a, c, g, or t
  misc_feature (346)..(346): n is a, c, g, or t
  misc_feature (364)..(364): n is a, c, g, or t
  misc_feature (378)..(378): n is a, c, g, or t
ttttaaccagttaaacatttttattgtgcaggcttgtaacctttacaggacatgcatgataaaaaattgtaaaatatatcagtaagcatataaaatttcagcaatcttttggaccagtaattgatttgcatgagggactaagcatctatgtagaacagacatgtcttggaatacacagtttacagattgaatcacaaagccatttcctaagcgattttcttcatataagggtaaaaatatctttacatttaaaaagtatgcagtatagccacattttcagttatggtacacaggtttaaanggtaaaactatatcccatgcccggtgtctgttttttaaatgccanaaggtccaaggtgggggnaccgggttgggggnattaaggtgtccgggg

SEQ ID NO: 312498 - DNA, 614 bp, Homo Sapiens
ggcaatggcaacactgccatctttgttgtatttgatgggcgatcctccttcttgtaccagggtcccataccctgttggggtgtaaaatgcaggaactccagccccgcctgcacggatcctctctgcaagtgtgccctgtggtgtcagctccacttctaattcaccagataagtactgtcgttcaaattctgcattttctcccacatatgaagagaccatgcgttttatctgcttggaccgaagcaaaagccccaaaccaaaattgtcaacccctgcattgttgctgactgcagttagtccttttactccagttttcagtaaagcatctataagattctctggaattccacatagcccaaaaccaccaaccaaaaccgtggcaccatcagggatgtcttttacagcttctactggatctgtataaaacttggtatggcgatgagcactggtggaaaaggaacaaacacatcccttgtaccaggttgccccagatccgcgggcagaggcgcagagccgaagcccggaggagaggagtttgagagccgccatcttcgggcggtgaggcaggaggaggctgcgggttggagcgcgcgtttgagcgtcggtgcgcgact

SEQ ID NO: 312499 - DNA, 364 bp, Homo Sapiens
ggccggggatggcaaaatgtattaagacaggacatattgttggtgagataatatcttaataggtataaaatggtaaaatacctagttttctatttagaggaatttacaaatgggtttttaacaaatgcctcatctagtacaggaggcagtcgttttgtaaagttttcaactgcatctgagtaagataagattttctaaaagactattttgataaactatacatacataatttggaattgtttaagtctatttcagtgaaggagaacaagcatactgcccatactctaaaatatccccagctctcacaccacccttgttttttaacccataggtttgagtgtgcctagtgccaatattttgtaat

SEQ ID NO: 312500 - DNA, 1193 bp, Homo Sapiens
  misc_feature (1016)..(1062): n is a, c, g, or t
gtgttccgttgtgaggcgtctgtggtgcctctgtctcgcgtcgccagggcattcgcgagtcttcagtgcctcggggtcaatggccgtgtttccggatgcgaatgtgtcgcttgttgccaggagaagcggtaaaatctttcaattgggtagactcgccgaggtggtgtgcccttccgggttctacccgatgttctactgccttgccgccgggcgtgccgtaggagtggcccctcccagttccccgcaggcggacagctgctcggtggtgaaattgttgtctgtttagcatttatacttcatgcagttggtaactataaggttaaagtcctcctcagactcctccaaggtgcggtacaggtgggactccagccttccgcctcatagtagaaaaatccattggcttggatatgaattccaggtaatctggaacctaaacatataaaacctcactcaagttgactggttctgcgaagatgtgtgcaggatccttctcctgcagcaggtccagtgttgtcctcaacagaacattgaatggcatcagctccagctccatggcagcctgctggactttgacctgctctcgtttgagcttctctctcttccgaatcagctcaatcagcagccgcgcccgctccaagtcatgccggagcttctgccaatacttcagctcctccttcactgcacttgtcttctcatcctgctctcgctgctcagcgtttctttgggactgcagatgggagtgcaagcgccggataagagggacaccattccgtgcctgccgcttcaacagccaataattgtgaagccgctgcataaactggtttttcctctgaaaggagagaccactacagatcttgttcaacctgtaagagggtatctgtgggaccagcaagcatggggagagtggagggtgtgtcttggcctgcttcctctggctccttcttgatcttctgcttcaaactcatcttgcttttcttgggcactcccttgagggagccactcaccccgccttgagnnnnnnnnnnnnnnnnnnnnnnnnnnnnnnnnnnnnnnnnnnnnnnntcaccctccttcagcccttcctcatcgccagtctcactgatgcttctaggggagtcgcccttcctcctagcagtggccgcacctggtggcgagtgggcctcacagtaggcagtcttgcgcactgtaaagat

SEQ ID NO: 312501 - DNA, 802 bp, Homo Sapiens
tccagtatgagggtggtcctccataaaaaagacacagacacaggggaagagaccatgtggacatggagaccaagactggaatgatatatccacaagccaaggaacacctggggccagcagagccaggatgggtctcttggtgaatttctctctccaccagccagggctcttctcccttctccaaccggaggatcacatctggcttagtaagctgataacccaaggaaaccaggttcttatagttctccagcatcacatttctgtacacgatctgctgagcagtgtccagcagcttccactcctccctggtgaagtccgcagatacatccttgaaggtcaccagtgtccgggaccaggcagttagtgacttagcatccatgccctccttgttcttgatgatacttccttgagtgacagcagagtgctgaggagacaaagcaccaccgccgcccactctgcgtcaatctccaggtgcagccgttattctccacagaacaagaacgtccgccgtgaacgccggggccgcgcgagggacagaaagtgactgaggcaaggggtgacgatcaccgttaaattttttcattgacgaaattaccgtctacctagaaatacgaagctaatacactgctacattactaaagggctcaacacgcgcctgatgacgatgcaaacacaaaattcagcactttcgtatatacctgcaataagcaactagaaggttcgatgggagaaagcgatcccgtcacaaaggcagcagcaacagcaaaacagagaacgcgactccattcaccagccccggccg

SEQ ID NO: 312502 - DNA, 780 bp, Homo Sapiens
actatgatatcaatgaatgtgggttaagtaatagatttccagctaaattggtctaaaaaagaatattaagtgtggacagacctatttcaaaggagcttaattgatctcacttgttttagttctgatccagggagatcacccctctaattatttctgaacttggttaataaaagtttataagatttttatgaagcagccactgtatgatattttaagcaaatatgttatttaaaatattgatccttcccttggaccaccttcatgttagttgggtattataaataagagatacaaccatgaatatattatgtttatacaaaatcaatctgaacacaattcataaagatttctcttttataccttcctcactggccccctccacctgcccatagtcaccaaattctgttttaaatcaatgacctaagatcaacaatgaagtattttataaatgtatttatgctgctagactgtgggtcaaatgtttccattttcaaattatttagaattcttatgagtttaaaatttgtaaattttctaaatccaatcatgtaaaatgaaactgttgctccattggagtagtctcccacctaaatatcaagatggctatatgctaaaaagagaaaatatggtcaagtctaaaatggctaattgtcctatgatgctattatcatagactaatgacatttatcttcaaaacaccaaattgtctttagaaaaattaatgtgattacaggtagaggccttctaggtgagacacttttaaggtacactgcattttgc

SEQ ID NO: 312503 - DNA, 669 bp, Homo Sapiens
cggccggcaggaattaaacatatatgcaaatttgtatataaaaatagcatggccatcatttgaatgcttgtaaatgaaaggattatcttttttgagatctatatataaatagaaatagaaaatccagctggactgattaggattcttttttaattcatttgtgtataacatttttattacaattacacatcagttttgacacagtcatagcaacattaatattttcccatgatgcagatcctttttgtaatgggcttgttctttgagatctctgtaaagaaccctgtgaactagaaaacataactcacagagatacttttttaaaaaatttatttactggaactgaaagttccagttgggatgaagcatttcatctcacttcataacacctctttgactgcacttcagtgaattgttcttatgtgcactgtgtagcaacttacattataacaaagcagataagggctgtaagctgctgcttatgttgaaaagtggttcttcagattttctctcataaaatccagttgaagataaataatttttttatactttatcactgaacccaagtgtttatttaaatgtcaacagtacttctaagaacgttgcctgtcatcgtggtctttggtcttggataactaaactgcctttccagagaaccaaatgtcagag

SEQ ID NO: 312504 - DNA, 546 bp, Homo Sapiens
  misc_feature (495)..(504): n is a, c, g, or t
  misc_feature (536)..(536): n is a, c, g, or t
tttcagaagggaacatttccaactaacagatccctgatctacaactatccagccacagattaatcacaggagtgttaagttagaaagtgcaaatgacaaattcatgtgaattttgaatgtgcacaaaaatatttggagactagtgtgggattatagtagcagtgttggtgtcaacactaaaactaacagcttatatctgttggtcttctagttcttccacatagaaagtcttgcttagttctataagcaaacatacctctgttggcctagatttatctggctctgattcatcagcgtgacacctgcttcccaacgacaggtaatctttggttatgggctatcctcaattgtttgcttgacaaagtgtcaaatgtcatgcaggagaaaacaatccagaaataacaggaaaagaaatgacctaatttttgaaatcctcattcaataaagtgttttcaataataacatgtattttatttccaaacttctgacacaatnnnnnnnnnngttataggaggtggggcttataatccacctcnatgccggccg

SEQ ID NO: 312505 - DNA, 475 bp, Homo Sapiens
  misc_feature (395)..(395): n is a, c, g, or t
  misc_feature (411)..(411): n is a, c, g, or t
  misc_feature (433)..(433): n is a, c, g, or t
  misc_feature (452)..(452): n is a, c, g, or t
ctagttctataaagaatgatgatggtacattgataggaactcattgaatttggagactgcttttggcagtatggtcattttcacagtattgagtctacccattcatgagcatggaatgtgtttccttttgtttttgtcatctatgatttctttcaacattgttttgtggttttccttgtaggggtctttcacctccttggttggttatattcgtaagtattttatttttacagctattataaaagggtttgatttgattctcagcctgggtagatgttggtgtatagcaccgctactgatatgtgtacatagattttgtatcctgataaataggattttttgtgtatttctaaataggcaataaggatttggaaatattccccaacacaaagganatggtccaatgtatgngggtgattaatatccctaaagncccctggatttggtccttnacaccttggctggctgtacccgg

SEQ ID NO: 312506 - DNA, 562 bp, Homo Sapiens
ggtacagaaatgacagcattggcaactggcattccaagatatgcctctgccatttcctttaacttcaacaatagtcgagagccaacatattctggggacactgtgatggtctcattacttgtcacagaaaactcaaccattccatttttgtttaaaaccttaaatgggtatctgccaatttcagcctccaactcttctgcggtaaaaatcttgcctatgaatcttttggcatcatatattgtgttttgaggatttgaatctgccagctctacgctttcatatcccacatatacatcattgtcagtaaaagacaccatgctgggtatgctgatatgcccattttcatctggaatcacctttacttttcctgtgccaggaaaaaacaccccaacagaacaataggtggtgccaagatcaataccaatcactttaggagtaggcaatggtaaatactgttgtgccaaatagccggccaacaggagagtcaaaacagccgatcctaagatcgtcatctctctggccatcacagtcccgccgaacaggcttgtgatccccggccgta

SEQ ID NO: 312507 - DNA, 588 bp, Homo Sapiens
  misc_feature (115)..(146): n is a, c, g, or t
tttggggcttctcattgcatttatttaaatttttttaaaaatgtacatcacttatttattgaatacataaaatgccagtgctttgcaacagttttgttactgcatctctaaactnnnnnnnnnnnnnnnnnnnnnnnnnnnnnnnntacattcaaaaggccaggctgttctgcttatgcatgggcagtggctgtggaaagctacagcctgctctgtgacagttcagaagcattgccaaacatcagcccactatcaatgaaaggttgcacataaagcattaaaggatacaaagaacaacttgacagagagcaggagaaaaataggaaattaagaaaaatgccacttatgccatgggtaggggtggggctggtagactgaggtggaagtaagcacaaatgctgatgtctttggaaactagatttacggtgaaagatggaagaaaacaaagtaacatgtttggcaagctacattgcagtgtgtgtgtccacttccaattttctactttactttccaagagaaatgtaacaaaactgaggtagaaataaagcaggagcacctcgtgccgaattacttgggccgcgtagggcc

SEQ ID NO: 312508 - DNA, 574 bp, Homo Sapiens
  misc_feature (64)..(64): n is a, c, g, or t
  misc_feature (100)..(123): n is a, c, g, or t
aaatttttttaaaaaatgtacatccacttatttaattgaaataccataaaaatgcccagtgctntgacaacagttttgttactgccatcctcctaaactnnnnnnnnnnnnnnnnnnnnnnnnccccgggaaaataccattccaaaaggccccggctgttcctgcttatgccatggggcagtggctgtggaaaagctacagccctgcctctgtgacagttccagaagcattgcccaaacatccagccccactatcaatgaaaaggttgcacataaagcatttaaaggatacaaagaacaacttgacagagagcaggagaaaaataggaaattaagaaaaatgccacttatgccatgggtaggggtggggctggtagactgaggtggaagtaagcacaaatgctgatgtctttggaaactagatttacggtgaaagatggaagaaaacaaagtaacatgtttggcaagctacattgcagtgtgtgtgtccacttccaattttctactttactttccaagagaaatgtaacaaaactgaggtagaaataaagcaggagcactacagcccagatttc

SEQ ID NO: 312509 - DNA, 2038 bp, Homo Sapiens
  misc_feature (27)..(28): n is a, c, g, or t
  misc_feature (101)..(101): n is a, c, g, or t
  misc_feature (129)..(129): n is a, c, g, or t
  misc_feature (1707)..(1707): n is a, c, g, or t
cccgtcaccccactccttctcagcccnntggtactcgatgtattgtagattcatgccggcgatgagcatggccaccagggcatagtaccaggaggagacanacataagggccaggcagagactcatgcncaggaaggacagcgcccagtgatagtacttgaaccggggccgccagttggggtccctcaggagtgtctgcaccgcacaggcgaggttcacgaacaggtagcacatcagaaagaacatggataagatggggggccaccatgtcgagggaggcgatgaggatgcccagctcggcgatgagtgccgtcaggagggagtgcccatgtggggttcaccattcaccttccccgtggccaaccacccggaggaaaggggatgatgttgtccttggcaatggcctgcaataggcgtggtgcccctgtgaggctctggaggccagcgccacacgttgaaaagaaggagccgatgacgatgacccagggtgaaggccaggccagtgtgcccaccaccaagttcctgctgacaccatcgccatacttgtcccggagaaccacaccctcaatgcaggcaccaaagagaaccacactgctgaagtacacgagggaagttgtaatgatggccagaatggtccccacagggatagacttctgggcgtcacgaaggtccccagagcggtttgagccagccatgatgcctgttacagaagggaagaagatgccgaccagcacggtgaaggatgtggcgatgtcagcgaccacgtacagaggcaggctctccttcaggctcggggcatctgcggagggcagcccatgcttctccacgatgtcacccttctccaggtaggcgctccacaggttttcctggagcacaccagcagctgccccggggatgccagggatctcggtcacattgttgagcatgaagtaggggtcacaggagtcggtcgtaaggttggggctgtggcagaagaaactccatagctgggtggccactgtctcattgtccactacagctgtcttggcacagatgtcaaactggtcccgggacagggtcctgttgcccagcatgcataccggaaacacgggagggtcaaatatagactttatgcccccagcatagatggagaggatggagatgatcacacaggccaggaagagcgaggcaaatttgttcacatacttgacccccacaaacaccaccagggtcatgaaggtcaggaaaatggtcccatacacacgcatattgttcaaagtggcattcgacgtgtcatgagcacccgatgggtaaaaaatggcagctggtggggcaatgtaggtcagcaagatctcgatggcccccaggatgtacatggctgctgcgaatgttgttccccaggtagaagcacaggcccacagcacctccaaattctggccccagtgaacgagagatcatgaaataggagcccccagctggaaccacaccgttggtggcgatggcactcatggagatggccgtcagcagggtacaatagcagcagataagcacgatgaggagggcctgtagcacacctgctgtgcccaccatccaggtcagccgcaggaagaggataaccccaaagatattctgcaggcagggcaggtacacccccatgagggtgcccatgctgggtgcctcggctgccctccggcgggtgccctccccactctcggcctcctcatgctntttggcgccctgggtgaggttggtgtagctgacgagctttcccagaagagacgatacctttgggcggatgtccagctcttcctcaaacagtgccaggttcctgtcatagtagtcaattcctctggaagcctccaagggggaaagaaaagggctgctctctctgtggttgccatgtccgtccgagtcatccagctcggcgcgctccccgtagtccacccaactgagcccctcgaggttgtcatagtcgccgcgcctcggcccgtccactggcaccacggtgaagtgaggcatcgtgcgggctcggccccgccgcacccgccgtcccccggcc

SEQ ID NO: 312510 - DNA, 672 bp, Homo Sapiens
atgaagtatctgcatgtagcccctgaggctactatccaacatgcagggtggagaaaaggatgtgagagggtattatgtgcttaaaaaaggacaggggtaggactagatgttcaccttaaatccagccactgctccagactgcaaatcggattcaatatttcctggatccaggtaggcaatgctcataagaaaacctggtccggtgaaagcccagagtttacgaaagctaaaacaagagtactcctcctcaggaatggagatcttctcattaaagtaagtggcgaagtactcctctgagtccccaggggactgtgaaagagagggattactataggcagggttgatgttaccaagactggcagactccccatgatctccagaaacactgtcatctgacatcttctgttcaggacccagcaccatggtggatacctgagtggctgagttcttagaatatgattcagctccgcaaccacctgacacgccgcccccgcgcccagggctccatattccgggagccagcgccaagctggctaacgcctctcccctccccgcgattggtcgacaggacggcagccgcacatcctctattggctggagtccctgcagcggccgggatgcgtggcccgcagaccagggacctaggctccgcccacgcggagtccccggccg

SEQ ID NO: 312511 - DNA, 562 bp, Homo Sapiens
gtaacccatgttgaatgaaacaggtctgctaaaaatcaggggctctccaacagagccgatatgcaggggacattctcagcattctctaattggacacttgtcaaaaggaacagaatgttagaatcatctttgcctaggaattggtagtttaaaatttttacatttatgcggggagtgtgtgtatacatatatatacagcaaaccaaaaataaattctaaatcccccaaccggctgaaatggacccctgtcttggcccaggggatctcaaaggaacctgaaaaactagtccatgatgggaagacagggtgcctcatattatggtcagattacagggtgcctcatattaccctcttccctttggaatttaaatacaactgaccagcattaacattaaaacagagatcttaagactaaccaaacagaccctttgtggcaataaaataccaaatcccaacctgactctggtatagcatcacatgacagcaggccccaaaggaaatttaccccccaatatatttatttgacgtattttgaaatggccctacaaagctgtctcttgtg

SEQ ID NO: 312512 - DNA, 381 bp, Homo Sapiens
  misc_feature (21)..(21): n is a, c, g, or t
  misc_feature (30)..(30): n is a, c, g, or t
  misc_feature (35)..(35): n is a, c, g, or t
aaacgctctccacatccctcntctgttggncatcntcttgtaggttcacaggactgtgtttcaaaagcatttccaacacaaggctggcctccatactgcccatacacagcaactgaccgcctgcgagtctgagtcttggtacagccattgcattctgaccaaggggcatagaagtcccactggcagttgactggagaggaggcacttgaaaaactttggaactctcctataaatcccaccaaaatgaataagcttatcaccttcatgtttgggaaaacattcagggcagaagagaggaggaagatttcctctgtaagggccgggtaagttttcaacagcaggaagagcccagcaggctgcctgcctctgtgcctctccctc

SEQ ID NO: 312513 - DNA, 883 bp, Homo Sapiens
  misc_feature (653)..(653): n is a, c, g, or t
tatctggaatgtggatgactttttatactgtcatgatttgagtttgttttggggtgtttccaatttggatttttttccctgcatctatcctctaagttgtttcggtttgactactttgttctttggttaagatccaaaagaaaacagaaaacaattccacgaggccaatctaaagggaaaaaatcctacactacttttactacttttgattatttctcatttttgggaaaagaattcctaatgtgctactagaattccttcttcagttttaacgagtaattggataaaccctgagggaaaacggaggtagattcagcacctaacaatcctgtatgcttttgagatcacgtttagtgctacgtcctagtcttgaatattttcatataccttgcagtaaaacgactttgtggcaggacagtctcttgaggggttttgtttctgtttcctaaatactcctaaataatatttctaatcagccattatgctggggcatctctgatcccagtaggtacctctgaatataccaggtgtctggagttagaagcccatagccctttcccagcctttttggtttttttaattgaacacatttcatctaagtaaagctcagttctttatcacaattttactgaccaaatacctagcaccagttncctgctgccactttttaaagtgccatatgactttctacgaacaggtaccttgctgtcttgacaaatcctaatgtcacgcctacagccccaacacaagctccagtcttcctcttcggcatgccctggaagcttcttggcctcagctccccttccccgctcagcaccctgttaggatcagtgtgtgtggatgggatagccctgggatggaaaggactagcctctactgatgc

SEQ ID NO: 312514 - DNA, 863 bp, Homo Sapiens
  misc_feature (265)..(277): n is a, c, g, or t
tgagtgcaacggaaagggctatcagatatctgcacgtttgtgcaatttatagctcctccattacagttcttcataagcaatgctttccaacattgatgagtggatttaataacttcaagagcaaaagccttgtttttgaattctccattaaaagcaaactggttttctggttttccatctggtaccttatataatctaaaccaattaagagtagcttccaggtaacccggtttgaacttcttaacatcatcaatatctgtaaagnnnnnnnnnnnnngatgttttgttaagaaccaaaattaattccctttagtggcagagcattggactgagggagccaggaaacatggggcccagtctaaccagaagcacaattgattgtgatacctagagcagcatcatcattgatatgtatatcaccttcagacttttgtgttttcatatgtataatactattcctgcactctacaaacatttacaaagcatcttcagacaatgtgctatgtatggggaataaatggatggatacaacaaagttcttttcatcaagatactcagtttttaactcagggaaagagacaaatagataacctgcaattaaaatgcaatgaggttttaacagagataaacagaagcaatggtaatgtcatagaagagggagtaaaagaaagcattataaaagtgagaagtacatcactaactggacaagaggggaaaaggtagaaggaacagcacacataaaagcaagggactatattttagaatatacaaagatggttctgcatggatagaacatcactgttaggaggcaggggagagggaggagacacctaggaaaagccagtcactgaggatcatataca

SEQ ID NO: 312515 - DNA, 1190 bp, Homo Sapiens
aaaattcttactgtttatttatatattgcatagctcaaaaagtttgaaaaaatgaagttttaacaggaagtcagtaaatgctcatagacccccttgtctctagcacttggggaaaaagagtcttggagtccttagagatgggaatcttgacagcagaatttcagatgtttcaatcacttgccaaggaagtgccacacttgctcttcttcattactttctttatttggtgaagatgataccgattcaactaatgatcttgcttcctcttgagtgcaacggaaagggctatcagatatctgcacgtttgtgcaatttatagctcctccattacagttcttcataagcaatgctttccaacattgatgagtggatttaataacttcaagagcaaaagccttgtttttgaattctccattaaaagcaaactggttttctggttttccatctggtaccttatataatctaaaccaattaagagtagcttccaggtaacccggtttgaacttcttaacatcatcaatatcatgaaactttgaggcttcaggatcattcgcattgatagcaattaatttccaatctgtttcaccttcatcaataagagccaaaattccaaggatcttcacatgaataacttctccacaagaaagaatctttgagcctatttcgcaaacatcaataggatcattatctccaaagcagttcgtgctcttatctttttcatggggatcttcccaagtctgagggagggtaccataattccatatataacccttgtaagggaagatattcgccacatagcgtagctttccatcctttacatattgtttaatgggattcattggctccttggtggcaatctccattttagcatttgtccaccgaggtatttctacaatcatattaaacagattctcatattcatcatttcgtgctttcttcataggaatgccattttcctctttagagttcaccttcagaggaatatcatgaaagggggaaatgtagtgaccagttacattcttaaagaagaggcggtaattctgcgagcagggctggccgcgctcctcagtgtggtacagggccatagcacggcgcgacccggtccctgcactggtccccaaccgcaggcacgcagcggctggggcacccgtgcgcagcagccgcagcagcgcgctcatggcgtcaatccc

SEQ ID NO: 312516 - DNA, 635 bp, Homo Sapiens
gccgacacgattttatttggtctggtttgttgtttgtcctagtttaagattcttactgtttatttatatattgcataactcaaaaagtttgaaaaaatgaagttttaacaggaagtcagtaaatgctcatagacccccttgtctctagcacttggagtccttagagatgggaatcttgacagcagaatttcagatgtttcaatcacttgccaaggaagtgccacacttgctcttcttcattactttctttatttggtgaagatgataccgattcaactaatgatcttgcttcctcttgagtgcaacggaaaagggctatcagatatctgcacgtttgtgcaatttatagctcctccattacacttcttcataagcaatgctttccaacattgatgagtggatttaataacttcaagagcaaaagccttgtttttgaattctccattaaaagcaaactggttttctggttttccatctggtaccttatataatctaaaccaattaagagtagcttccaggtaacccggtttgaacttcttaacatcatcaatatcatgaaactttgaggcttcaggatcattcgcattgatagcaattaatttccaatctgtttcaccttcatcaataagagcccc

SEQ ID NO: 312517 - DNA, 502 bp, Homo Sapiens
  misc_feature (13)..(13): n is a, c, g, or t
  misc_feature (39)..(39): n is a, c, g, or t
  misc_feature (80)..(80): n is a, c, g, or t
  misc_feature (89)..(89): n is a, c, g, or t
  misc_feature (280)..(281): n is a, c, g, or t
  misc_feature (289)..(289): n is a, c, g, or t
  misc_feature (390)..(390): n is a, c, g, or t
  misc_feature (485)..(485): n is a, c, g, or t
ggtctccgtcttnaataaacatgagcattataatggggncttctctctaaagtttaccgtgagggattaaatgtgataantatacccanttgaataccaaaatatttaccactattgaaaaaaggggaggcatagcattctgctcaccacatgccacagcacagctcaggactgcatcctttatgctgctcaaatcgtccacatctcgcccgtacacttcagtgaggctgaagggcccggggaccaatctctggccacggaaggattcctcaaaagcctnnctcagtanatctagggcaatgggagaatgtaggcccaggagaacggtagaaagactggcccaaccacagagattcactgccagactctgcccctgctgcaaagaccctngcaggggctcccaggcagccaggaggaaggcctcaaacagagggaattgttccagaaggcgctcacactcccgggcttatctctctgccaccagnagaccctgtgccgaaat

SEQ ID NO: 312518 - DNA, 949 bp, Homo Sapiens
  misc_feature (147)..(147): n is a, c, g, or t
  misc_feature (167)..(167): n is a, c, g, or t
  misc_feature (192)..(192): n is a, c, g, or t
  misc_feature (281)..(281): n is a, c, g, or t
  misc_feature (288)..(288): n is a, c, g, or t
  misc_feature (297)..(297): n is a, c, g, or t
  misc_feature (304)..(304): n is a, c, g, or t
  misc_feature (311)..(311): n is a, c, g, or t
  misc_feature (317)..(317): n is a, c, g, or t
  misc_feature (319)..(319): n is a, c, g, or t
  misc_feature (365)..(365): n is a, c, g, or t
  misc_feature (370)..(370): n is a, c, g, or t
  misc_feature (372)..(372): n is a, c, g, or t
  misc_feature (375)..(375): n is a, c, g, or t
  misc_feature (382)..(382): n is a, c, g, or t
  misc_feature (384)..(384): n is a, c, g, or t
  misc_feature (393)..(393): n is a, c, g, or t
  misc_feature (402)..(402): n is a, c, g, or t
  misc_feature (404)..(404): n is a, c, g, or t
cggggtttgtatgaaaacaccgggcggcgggcggcgagggatccgccgtgatccaggtgccgagccgggtgctgcggctctgcgcggtccccgccagcgccccatcctgagccgattatctgcaattatgaaatgaagtaactcaanatgagcaagttaaaagtganaccagaaaaaagccttaccaataantctaggatcgtaggactcctggctcaactggagaagatcaatgctgagccttcagaatcagacactgcccgatatgttacatcaaaaantcttcanctggctcanagtcaanaaaaaanaaggananaaatgacagccaaaggttctacaggaatggaaattctgctgtcaanattananaanacaaaanancttcaaacnacacttaanancttaagcattcttgttgagctggtgtcagctggtggaggtcgaagagtgagtttcttagtcaccaaaggtggttcacaaatattgttgcagttacttatgaatgccagcaaagaatctcccccacatgaggacttaatggtacagattcattctattcttgcaaagattggaccaaaagataaaaaatttggggtaaaggctagaattaatggggctctgaatataaccctgaatttggtcaagcagaatttgcagaatcatcgcttggttctaccttgccttcagcttttacgagtatattctgccaactctgtgaattcagtatccttagggaaaaatggagttgtggaactgatgtttaaaatcattggaccatttagtaagaagaattccagtcttataaaggttgctttagacactcttgctgcattgctaaaatcaaaaacaaatgccaggagagctgtagacagagggtatgtccaagtgcttttaacaatttatgtagattggcaccgccatgataaccggcatagaaacatgctca

SEQ ID NO: 312519 - DNA, 529 bp, Homo Sapiens
cttaaggccaccaatgcttttatttatcgctttgcgtggagacaaagcacaagctccgagtgtgctgggagctctccattaactagagctcctggttggggtggagctctgggaaaagaagaggaccctgccagggagatatttcattggccagaatccagaggatggagcccattggttggaactctggttgaaactggaactctgagaagggtggagagagcccccaggtgggactctgggccagggggcggggcgaggagtgagggagcaggactctggtgggccaggccctcccactggctgggttccagcagtcggtggcaggtgggcaggcgcctacttctgggcggggatcatgtcgtcgatggactggcctttctccaacttcttctccatttccaccatgagcttcacaccatccaccaccagctgcacctgttctacttcggacgagcccagccgatcagcgttggacacgtcaaatactgagcccacggcagctgtgtccacgccacctgtacccctc

SEQ ID NO: 312520 - DNA, 678 bp, Homo Sapiens
  misc_feature (22)..(22): n is a, c, g, or t
  misc_feature (356)..(356): n is a, c, g, or t
  misc_feature (576)..(615): n is a, c, g, or t
gccgggtatgctcagttccaanaagtcaggaccaaataacttcacagctactctgcaagggcaaattataatgtcattgatataatttccctagtagcatttaccctgttgcatgtcatgtagattcaagcttctgtaacataggcagctgcactgcgcgttcctattattgaagcaaaaagggtgactgatacctagaagccctttcttcctctagtcgccagctcatcagaaaaacatactttgaaaagatgcttgagattttcctgctgcatcgcactctagttttgaaggatttacatcttaggaaataacatgtatactctagtaaatatgcgatttaggtgttccattgnaacagctttgattaacttaatgccaccattgatttcaaagtgaagaaaatgtgacagaagccagtgaagcaatggaagctggagtgtgactggaaaaatactcagcaaacaaagttaccaattccatacagagatgatctggtgtcttcttttggaaaatggtattcaaattctggaatggaaatctagccaccaaaacgggttaatcaaaagacgtccnnnnnnnnnnnnnnnnnnnnnnnnnnnnnnnnnnnnnnnnaagggaatgaaacaggaatgtcatcagagattttttagtacaggcccaagagcctgttctcta

SEQ ID NO: 312521 - DNA, 532 bp, Homo Sapiens
gcagctcgaattttactgtgggagtggacttcactggctccaatggtgacccaaggtctccagactcccttcattacatcagccccaatggcgttaatgagtatttgactgctctctggtctgtgggactggtcattcaagattatgatgctgataagatgtttccagcttttggttttggcgctcagatacctcctcagtggcaggtatcacatgaatttccaatgaacttcaacccatccaatccctactgcaatggaatccaaggcattgtagaggcgtatcggtcttgtcttcctcagataaaactctatggaccaactaatttttctccaatcataaatcacgtggccaggtttgctgctgcagccacgcaacagcagacagcttctcaatattttgtgcttttgattattactgatggtgtgatcacagaccttgatgaaaccagacaagctatagttaatgcctccaggctcgcctatgtccatcataattgttggagttggaggtgctgacttcagcgccatgg

SEQ ID NO: 312522 - DNA, 1889 bp, Homo Sapiens
  misc_feature (541)..(541): n is a, c, g, or t
  misc_feature (684)..(684): n is a, c, g, or t
  misc_feature (690)..(722): n is a, c, g, or t
  misc_feature (1831)..(1831): n is a, c, g, or t
  misc_feature (1856)..(1856): n is a, c, g, or t
aaaattacttaagtgcaatattaactgatctgtattttataaattttaatccataaaaatataaataagaatggtaaatttttaagaaaaaaaatatacatttagtgcaagttatgaattacatttcttcttcagtgtcagccatgagatatcttgagaaaagaaaagaatgactgatctaatttcaattttaaaaattccagtgttttaacatgcaattaataccagatacagctaatcagaatacttccttctctttactgtcaaagcagcagcattttatttaattatgctcaacagcacttgtatatcatagtagtagttttagaaatagaaaatttgcataagacccggtcacattatccataaagtctgagaggaaaacaaaaaagaaaactttatcctttaaaaccaagcttcattgttttcggttttgagccacacggcacacaatgagagatttcgttctcgcttccttcgagactttacctgtttgatgaggcctttgttgtgggtgcatgtgtactgttccaggcatttnggtgatgggtacaaactacatggttaatggcacaagaaacactcccttcttgtgatgaaacctcagtaaaatcacagtacatctcaatatgagaaaggactgcttcaaaaggatacaccgatttaaagaggctttgttacagntcagtnnnnnnnnnnnnnnnnnnnnnnnnnnnnnnnnnaataaaggctcttctggaatgtagaaaggtaatgcttaactatacaattcatgaattaaacagaacagttttgattaaaaaaaagggcaagaccttgcagttttatagatggctcaattcaaagtaatccctctagaaatagggactgataatgtgtctttgcaatgttggagcaacaggccaggtgctcgaggactctgctgtcatctctgttgaggcgcaagcctgcactatcaggcacatcctcagctgaatgcatccagtgcagaacaataggagttgatacgctgctttctgttagacgggaaatacctcactcctttccttctctctcctttccctccccaaacaactcctccattccaccagcattatttgcaaaccatgttgcaaaaacccggcttttatatttcctttctttttttgtaaaggaggaaaaaaaagtagatgactccctcaggttaaagagttgtgctattcaacaaataaacttcctcttccgtttcttctctctcctcatctgtgagattcagttgaacattattgaagcggggtcttggtttgccgtctgggccatatgccggaggatatctttttttgttataatgccaaggaggcgcccattgtgagttacaaggcactgcctcagtcccagctttcggaaaatatccaccacaatctccattggggtgtggtctgtcactgtaaaagggctcatgtcaagaatgcttcgaagcttcaatggccgaggactttctgctggaagagatggggtgtgctgtgcaaaacacacccgagaactgccaacgataccttcttgttttttcctggcactttctattgcaattgtcaggtctcttctgagggcaaatcccactaatctctgagattcttttgacattatgacaggaaatccattgtagctggtttcattaatcatgttttctatatcatccactgtcatattgtcctgtgtcaggacagctaagggaggatcattccttcgaggtctcataacgtcagcagccagggtggtatgagtgaattcttcttttgcatccaagaaagggtatccatttaatcggatgtgtgcttcataaatgccttcncctccaaaggcatctccaacccatntactggtcatgactgcagccataaggggaacaa

SEQ ID NO: 312523 - DNA, 454 bp, Homo Sapiens
ctagtatttctatcttactgctaaaatacaggaaaagtgccgtatttttaatgcatttagtggttttctttggcgttatctgttccatttttctttttcatacattgaagtgtgtctccttttcagccaaaataatgaaatagtggagaccatgaaattgttgtgcctggctaattggcaaattaatttaccaatataataagtgtagcgccttgtttgaataccctttttgagaaggtatgatgagaatgggcaagggtgtcagcatctcttcttcttaataattaattgttttcagttttggttcacgaagaatgcttagttaatctgtaatgttgcctagagctgtatttatctgtttttatttatactagtgtagtaaagctgcatatcattacagtaaaaacgactactgtgatgagttaatcagaaaatctattaaaatctatatgac

SEQ ID NO: 312524 - DNA, 795 bp, Homo Sapiens
  misc_feature (173)..(184): n is a, c, g, or t
attaggggaagaattcccaagcctacttgttccaggagcccgagatttttcctaaggaaaaccagctaaggggccaagttccactttaccttagggggccccgcgggggccaaaagaaatggtcttagaaaatcttcttgaggggccgagggcgcccgaacaagaagttatannnnnnnnnnnnagaaagaagggggtttttaatattgtttattagcacagtaacaaatgcagacttaagtagtccacaacatagaaccaatccactgagcaactcctattccacgccttacagttagttaacagcttaaggtatttcactacaggttttcacaagtcctgattcagaccttttttaaacaaagtagattggcatataaaataaaacgcactactcatctcttatatggtgttttatagccacgtgtccattttatatatatgagatgacaatctctaaaaactctgttaaatatcaatgttcccttccaagaagggaaaacaaattccaattttgttttaaacaaaaagtatgtagtcttagagggactttacataaatggccatatgtgtaacctgtaccaaattaagctgttttaaatttacagactacaagcaactgaacccaaatgtctaaatgtacattcttttctgtactacatttcagctaatattgcagaactaatgacaattttaaaagttgctattaccaattctgtctactgtagcaagataccttaagttacaacaaaatcttaggaaataagactgaataatatctgttatagaaatacc

SEQ ID NO: 312525 - DNA, 1127 bp, Homo Sapiens
  misc_feature (1098)..(1098): n is a, c, g, or t
atgatattaagcctttaacttcctttaggcaaaggaaaggtggctcaacttccagttccccttccagacgccgagggagtcgatcaaggtcacgctcccgatcccccggtcgaccacctaaaagtgcccgccgatctgcttctgcttcccaccaggccgacattaaggaagcaaggagggaagtggaagttaaattgactccgctgattctgaagccatttggaaatagcatcagcagatataatggggagcctgagcatattgagagaaatgacgcacctcataaaaatacacaggaaaaattcaatttgtcacaagaaagcagttacatagcaacacagtatagccttcgtccaagaagagaagaagtcaaattaaaagaaatagattctaaggaagaaaaatacgttgcaaaagaactggcagtgagaacctttgaagtgacccccatccgggcagaggacttggagtttggaggagtacctggtgtgtttctcatcatgtttggcctgcctgtgttcctcttcctgttgctgttgatgtgtaaacagaaagatcccagtcttctgaatttccctcctcctttgccagctttgtatgagttatgggaaaccagagtatttggggtctacctcctgtggtttttgattcaagtcctgttctacctactgccaattggaaaggttgtagaaggaacgcctcttattgatggaagaagactcaagtatagattaaatggattctatgcttttatcctgacatctgcagtcatcggaacatctctcttccagggcgtagagtttcattacgtgtacagtcattttcttcagtttgcacttgcggccactgttttttgtgtggtcttgagtgtgtatctctacatgcgctctttgaaagcgccccggaatgacctgtcgcctgccagctctggaaatgctgtctatgatttcttcattggccgtgaattaaaccctcgaattggtacttttgatctcaaatacttttgtgaattgcgccccggattgattggatgggtgggtattaacttggtgatgcttttggcttgaaatgaaaatacaggacccgcgctgttccatncttgggcatgattttaggtaataggtttc

SEQ ID NO: 312526 - DNA, 927 bp, Homo Sapiens
  misc_feature (15)..(15): n is a, c, g, or t
  misc_feature (93)..(93): n is a, c, g, or t
  misc_feature (230)..(246): n is a, c, g, or t
  misc_feature (809)..(865): n is a, c, g, or t
  misc_feature (874)..(874): n is a, c, g, or t
aatgaggaaatcatngacagcatttccagagctggcaggcgacaggtcattccggggcgcttttcaaagagcgcatgtagagatacacactcnaagacccacacaaaaaacagtggccgcaagtgcaaactgaagaaaatgactgtacacggtaaatgaaacgtctacgccctggaagagagatgttccgatgacgtgcagatgtcaggataaaagcatagaatcctttnnnnnnnnnnnnnnnnnggaagtggaaaattaatattaacccaaggctcacatgaaacttacgccactatgaaacaatgcaatgttcatttttaaagtcttaatttcattattcagactaaatacacacaaatatgcaaataagcaatgtctgaggtataattttcaatatacataccattatctcttgtagaactttccaaatagtttaacatattgattctttttcagttcaaatggtcattatttgcttttaattaagggaaaacagacaagaagtgcaacctgaaaattcccacaatccaaactctcaggcacaaagtcaaatggctaattattaacagagctgggccaaacacatattttaaagtctaatgccattacctaaggggagggtattatgcacctaccaggggtcaggcaccgagccaggttggtagttacaaaattataaatatttatacttaaccaagttgccaataatggtttcaaaagattctagtaaaactctatcatccagaacagagatcttaacatgccacccgcaggaaaaggatgccacaacacaaatgcccgaggcnnnnnnnnnnnnnnnnnnnnnnnnnnnnnnnnnnnnnnnnnnnnnnnnnnnnnnnnnacatttcanggtggcaatggcccaaggtttaaaaaggcacccgccctgtggacggttccaca

SEQ ID NO: 312527 - DNA, 687 bp, Homo Sapiens
tcatcatcaccaggaaagggagactcaccaacaagcatttcatatataagcacgccaaggccccaccaatctacagcccttgtataagaagtttctgttaatacttctggggcaagaaattcaggagtgccacaaaatgtgcttgttctatctccatatcccattccttctttgcaaagaccaaaatcagcaattttcacaaagccctctgtatctagcaataagttatccaatttcaaatctctataaacaattttgtgttcatgtaaatactgcaacccaagaactacacaagcagcataaaatacagctcttggttcagaaaagacatcagtatgaatgtgcatcattaggtccccaccggcagcatattccattacaaagcaaacatgctctttggtttggaaacatgcaaaaaggttcaccaaaaagggatgccttacactattcacagtttcaaaaattcttttttcacacatcaggctgtctacttcatctcgagccacaatatctcctttctttaaggcttttatagcaaacatctcatttgtgtttttatattcagctaaaagcacctttccaaaatgtcctcttcccaagacagcacaacacctgaaatcttgtagattaaactgaaacctttgctgagatcttctgtcctcaagttcttgaataccactatattct

SEQ ID NO: 312528 - DNA, 662 bp, Homo Sapiens
  misc_feature (555)..(555): n is a, c, g, or t
ttcatcactttcacatacgtatttataaaatacagggtagaattattaaagttctctgttagtggcttgcatctcctgttccaaacatttccatattaaaataaagatttatagttcaaaaagtacattgtgttaaccaaaacatattatgctttatactttaaaacagcacattagcaaacccatttatcacacacatgttcagaggtgtattgcctgggaagaaaaaaacaaaatataattcccaattatggtttaattgtactctgtgtagtatatataatgccttctgctttaattcgctccaatattggtccatagatctcctttgaaaagggccccattaggcctttggctccaatttcaccatcaagcaacattttggctgccatggcggtgggtaaccccacggttttagccatggctgaaaagccattgatgtccccataagccacaagatcaatcgttttatgttctaaatgtccagaaggatgtctgattccaaagctgtctctcatcacaatcatatctttttcttcaggaccataggaaagnttcatgaccaaatccttggagagggcatccagaatggactctgcctgaggaacttgatcatccccaagtaagcccaaccattcagcagcctccaactgggtcttgtc

SEQ ID NO: 312529 - DNA, 1046 bp, Homo Sapiens
ttcgtgaaaaggctaaggcgtatgtcacctgcctactttaggaatgcttgaggtccggtactgtgggggtctaagggtctggttaaaagtctaaaagcactaagctgggtacgcggacaatacagctaaaatcttccctgtcctctagtggtacgcggatctgacgcctgacgtaattgtgtagacgccattttagccggtcagacaagcactggacgtggcggccattttgttttggacaccgagcaggagctggcggccgctgcagacgaaaggcaggaaagggcaggccgggtgagcagacggatcggccgactagacagccaaccagcaacaacgaactgagctcgcatactaccgcttacgcatctaaccaaccgcccatctagctaacccgagcccctccaccgtcaactcaggttcggccggtccccggcccgcctgccggagccgtggtggcagccccgggaggagcactggcgtctgtttccttcgattctcgggattcgaagatggctgcacagtcagcgccgaaagttgtgctaaaaagcaccaccaagatgtctctaaatgagcgctttactaatatgctgaagaacaaacagccgacgccagtgaatattcgggcttcgatgcagcaacaacagcagctagccagtgccagaaacagaagactggcccagcagatggagaatagaccctctgtccaggcagcattaaaacttaagcagagcttaaagcagcgcctgggtaagagtaacatccaggcacggttaggccgacccataggggccctggccaggggagcaatcggaggacgaggcctacccataatccaaagaggcttgcccagaggaagactacctgggggaacgtgccaaccagacccctacttaaggggcggggatggtacctcccaaggtccgggttatgataaggtccgggggaaaaaagggggcttttggaagggccaaggccccaaggcccccgggaaccaaaggggaaaaggtgcccccttggcctccggcccttggtaattggaccca

SEQ ID NO: 312530 - DNA, 326 bp, Homo Sapiens
ctgtacagtctgatccaaactgttgctgtattgattcctcctcttgcttactgcctgctgacttctgagatgatagtttccttccccattctcagtatatccctaattcatccttcattgagcatcttttatcataaagctgtattctctttgtattaatatccttaccgtgtttcacagggcagaaacagctgggcttataaacaggcatagtccttttgaaggatgtggttgatcctacaacaacacactttcctaaggatgacaacaactcaccccacccctagaatggctggtatgaaccgagtttccacacagtctagctg

SEQ ID NO: 312531 - DNA, 241 bp, Homo Sapiens
gtccaataacttaatagtttattagtcagtccacaatattacaaatatttaaaaattacttaatataaatagttgggaggaaactattccattacagagttaaattacccgtacaacagacagactggagatttagacacctggaagataaccataaaataaactaaaatatttaacgaaaaatttaagctgaaggggtgtacctagtgtccataaaagcatgggttctctttttatttag

SEQ ID NO: 312532 - DNA, 594 bp, Homo Sapiens
  misc_feature (202)..(211): n is a, c, g, or t
acaaactgtagtccaactaaagttctctgtctcctcacgcagcagaggcattatctccataaggtgtgtgtggtccaggaaaacacttccccgagcagatcctgccagatttggttcattccatgatgtcgactctgcttggagcaccacactaactttagggtcattacagatctgatgccttggtcttctgctgtttgannnnnnnnnncattcatcttcatcatcctcatcttcctctccatcagacagggatgtacacggccggatctgtcggtagcggtcaagccatttttctaccatctgagtgaccagggggtgatttcgccgccgagaactcttctgcatggcaaccagaactcccccctccgtcacacagcagtccagccactccctgagcagtttttcttgctgttcctcattacctagctcctgagcagaaaggaagtgcacatggagtagcttcctttcactgtcaaccagaggcaaaaatgtgatggtgacatcatcatcggtattgagattagcaccagcacctcggttgccatagccatcattttccatggcaaccaaagcagagaagtggcccctcgt

SEQ ID NO: 312533 - DNA, 1695 bp, Homo Sapiens
  misc_feature (187)..(187): n is a, c, g, or t
  misc_feature (1549)..(1559): n is a, c, g, or t
  misc_feature (1577)..(1577): n is a, c, g, or t
  misc_feature (1597)..(1597): n is a, c, g, or t
  misc_feature (1601)..(1601): n is a, c, g, or t
  misc_feature (1669)..(1669): n is a, c, g, or t
cgggatggcccttctgcctctccctgctcttcagatggcccagggagagagcccttggctgggacctcagagttcctggggcctgatggggctggggtagaggtggtgattgagtctcgggccaacgccaagggggttcgggaggaggacgccctgctggagaacgggagccagagcaacgaaagtnacgacgtcagcacagaccgtggccctgcgccaccttccccgctcaaggagacctccttttccatcgggctgcaagtactgtttccattcctcctggcaggctttgggactgtggctgctggcatggtgttggacatcgtgcagcactgggaagtcttccagaaggtgacagaggtcttcatcctagtgcctgcgctgctggggctcaaagggaacctggaaatgaccctggcatcaaggctttccactgcagccaacattggacacatggacacacccaaggagctctggcggatgatcactgggaacatggccctcatccaggtgcaggccacggtggtgggcttcctggcgtccatcgcagccgtcgtctttggctggatccctgatggccacttcagtattccgcacgccttcctgctctgtgctagcagcgtggccacagccttcattgcctccctggtactgggtatgatcatgattggagtcatcattggctctcgcaagattgggatcaacccagacaacgtggccacacccattgctgccagcctgggcgacctcatcaccttggcgctgctctcaggcatcagctggggactctacctggaactgaatcactggcgatacatctacccactggtgtgtgctttctttgtggccctgctgcctgtctgggtggtgctggcccgacgaagtccagccacaagggaggtgttgtactcgggctgggagcctgttatcattgccatggccatcagcagtgtgggaggcctcatcttggacaagactgtctcagaccccaactttgctgggatggctgtcttcacgcctgtgattaatggtgttgggggcaatctggtggcagtgcaggccagccgcatctccaccttcctgcacatgaatggaatgcccggagagaactctgagcaagctcctcgccgctgtcccagtccttgtaccaccttcttcagccctgatgtgaattctcgctcagcccgggtcctcttcctcctcgtggtcccaggacacctggtgttcctctacaccatcagctgtatgcagggcgggcacaccaccctcacactcatcttcatcatcttctatatgacagctgcactgctccaggtgctgattctcctgtacatcgcagactggatggtgcactggatgtggggccggggcctggacccggacaacttctccatcccatacttgactgctctgggggacctgcttggcactgggctcctagcactcagcttccatgttctctggctcataggggaccgagacacggatgtcggggactagcttggtcactcaacattttccccatccctctgcactttctatttgaaannnnnnnnnnngttcccctgtcccttctncaccccacactttccacctntttntaggacttcactttgataccaaattctcattattttcaatgggaattttatacattgagccagtttgnatagcaagaatttggaaacacagatg

SEQ ID NO: 312534 - DNA, 706 bp, Homo Sapiens
  misc_feature (159)..(198): n is a, c, g, or t
gcagatgagacatgatgacttcccgctggggagctgttctccgtatcaggtgaacgctgtttctgaataattccgtctttcctcattggaaaccttcttgaattctaaaacgttacaggtaaccaaaaacgaaaaaaggtatgaagctctttatacatnnnnnnnnnnnnnnnnnnnnnnnnnnnnnnnnnnnnnnnnctgaacccactgtcttttatattactgatgtactgagctcccaaatctgtttatttctcaggaaagaaaaagtgagtgctatggaatttgccatcgttctctgtgactctatcttgaggcgctgttgaaagttcctgcacagaggagcacatgtggatccctgagaaggcagtggagggctccctaactcccacgccaggtcctgccccagttttctgcttctaagtagtttcgtgctgctgggcaaattctcgaacaagtccgtgtgttccctcatccaccccgcttagccacaggattagatggaataccctccaggctcctcccgggtgatagggccattcagcctctgagctgttcgtacccggatggcatccccttcaggatgtggagctggcctgcactgactcctgcaaacagttcctaaagcaggtgtcagggtcgcttgccctttaagagggctcttagctgctcgggtggatgagaaacgtgcagaactatgggagga

SEQ ID NO: 312535 - DNA, 750 bp, Homo Sapiens
aaggttgatgggcatgtgtactgctgattccctctagcagaagtctggtaatctctgcttgacgatcaaattcactttgagttattcttaattcctgttcagatgaatttctagtttctgcagcttttgccttttttagtctcgtttttgcagcatccaaatccagtctcttattttgcaatagtttcctttctttagcaattgttttgtaatctccttctataaagtttccttaaaggagtaagaaaatttaaggctgacgtttgaatcagttctctgtctgctgttccaattcttttttgggtttctccacatttaataagggcattaccataagctgttcctgggccaaactcagtccctgcatcaatcatatattgtcccaaaagttctgggttgtttatacgacttggagcttttctatccagtttctcataaacaaattcttctatcctggcatttggatttggctgcaataacacttcagtttgtttcattatttttttctgtccatattttggtacattcagctttgctaaggaggttctctaagtgagcatccaattctgtcttctcagcctggccaagcttttcttctgtgaactgcacggcgcgactgaggaaggtgcctgcgtcggccgccagcttcttcacgttgaagtccatgatattcatcctaggcggcagccgggcggagccggccgacctagcggcggcgaggcggaggtgccgcggccgggctggggcccc

SEQ ID NO: 312536 - DNA, 1340 bp, Homo Sapiens
  misc_feature (1201)..(1201): n is a, c, g, or t
ttttcaattcacaatagatttattttacataaaagaaaaagcttgctgttaatgaaaaatccagtagaaaacagttctgctttaagttgaggctcaaaagtagaagctgcttattagtgaaacctcaataaaaagagaattttgtaagaaaacattcttggcatgaaagctctaacataaattctgtaatgaaatatttaccatgcaactttattggcagaaaggccagtttctgatggctggtattttcagtctcttaacacattaacatggaagatacttaacctgctttatttagagttaattgtatataaatacaaagtcatgatgggcaacctttccatagtccacctacttaattgagcagttctaagtaggtaattggcaccttgcccttctggtttcccctttcccccattagccagtctgaatccattccaacaacactgaacacagtgatcacctcatctgccagaagtgataattcagtactgtttgctgcatcataatcatagagaaccctggcctttctgctgccactacactccttaaggtcactgaggttggaaggagaggtgattactaggccacttgttgaagccatggcagaagaaccaatcgcatttggtaaaactgatggtacaggtgtcacagaagtctgattgttgttactaagataattggatggaaaacttcccagttgtttctggaggtccaacatatactggtaacactgtgcatagtaagtcatctgggcttctacaaagtcattcagacagcgaaggtgatgggcatgtgtactgctgattccctctagcagaagtctggtaatctctgcttgacgatcaaattcactttgagttattcttaattcctgttcagatgaatttctagtttctgcagcttttgccttttttagtctcgtttttgcagcatccaaatccagtctcttattttgcaatagctttcctttctttagcaattgttttgtaatctccttctataaagtttcttaaaggagtaagaaaatttaaggctgacgtttgaatcagttctctgtctgctgttccaattcttttttgggtttctccacatttaataagggcattaccataagctgttcctgggccaaactcagtccctgcatcaatcatatattgtcccaaaagttctgggttgtttatacgacttggagcttttntatccagtttctcataaacaaattcttctatcctggcatctgcacggcgcgactgaggaaggtgcctgcgtcggccgccagcttcttcacgttgaagtccatgatattcatcctaggcggcagccgggcggagccggcc

SEQ ID NO: 312537 - DNA, 637 bp, Homo Sapiens
agcgcggtgttgcccgccccgcactcggagcccagagccgccgcccaggaaggggatgcggaaacccctggctcggtggagcggagaggcaggcgggcaggagccgaggacggcatgtcccaggccccgggagcacagccgagcccacccaccgtgtaccacgaacggcagcgcctggagctgtgtgctgtccacgccctcaacaacgttctgcagcagcggctctttagccaggaggctgccgatgagatctgcaagaggttggccccagactcccggctgaaccctcatcgcagcctcctgggcaccggcaactatgatgtcaatgtgatcatggccgctctgcaggggctgggcctggccgccgtgtggtgggacaggaggaggcccctgtcccagctggccctgccccaggtactggggctgatcctgaacctgccctcgcccgtgtcgctggggctgctgtcactgccgctgcgccggcggcactgggtggccctgcgccaggtggacggtgtctactacaacctggactccaagctgcgggcgcccgaggccctgggggatgaggacggagtcagggccttcctggcggctgcgctggcccagggcctgtgcgaggtcctgctggtagtga

SEQ ID NO: 312538 - DNA, 425 bp, Homo Sapiens
  misc_feature (120)..(120): n is a, c, g, or t
cctatggccctcttgtccgttccccccctattggcctagggtttagacctgccacaggcctaaacctaattccagttggcctaatttaaagagagtgatgggatgagtggtttggcgggnaaaatggttatggcagagcaggaaatcggaatgagtcagggtggagagggtaatcaggaaatcggttgctttacgaggaagttaagtttaaaagtagaaggcaaagaattgaacatactgacatattgattctttgaagagaaatttaggactcatatctaacatattgattctttgaagagaaatttagagctcatatctaatggaaattaattactgactgaatgtagggataagaaggaatgtagtcatcagtaggtgttcttgagtgggctattttgtagcagctttagtgaggaataact

SEQ ID NO: 312539 - DNA, 771 bp, Homo Sapiens
aaagtcactaattgattcctgaactctcagaaggtagtctacagtggagataattatgttgacagttgtattattgccagtctgagttctcagataattctgaaaatctgagttgtgtccctcacagagtagttgcaggaatcggaagaggtcacaggtgaactcatcgtcctgcagaaccttttctcctgatccttcctctgtcaccatcccaagaccttcagctttgttttgtcgctcaaatgcatttaggtcaaggacactacatgactgcatcaggccggccaggctctgaaagaagcccacatcctttttctccttgaggtagtcaagcattttctgctgtactgtggagttcccaccatttaaaatagcaattccaagtttcagagtagctgctaccattggtccagtttcacctttgctggcactgattgtctgtagcaccatctcagccgcgccacgatcgtggagtcgggcttgctggtatagaagcttttgcttttccatttctttttcttcaaaactcttcacttcctcttcaccatcgtcatcttcctcatcatgacaactctttgccataatatctgcataggccatatataaaaaatcttcctccagtttgcatttctctgttaaagctgtccggctaaacagaaggatcagctgatgtagaggatcaactctcttagtgccttcatcttcttctggaggttcagccccaggttttgctaaatcttctatcagtttatcttcaaagtaatgttcttc

SEQ ID NO: 312540 - DNA, 567 bp, Homo Sapiens
tctacagctgctttttaaatttatttgtctttggtattacgcatttcactatgatatggggaggtagaccaaaaaacaaaaacattcttttagtggtaagtgcattgaaggaaatgagcaaagcagtggcaaggaggtcttctttaggctagtcagggtttaaccctgacctagtcacctagtgacctggtcaccaggcatgacttttctctttgctctcttgtttgggacagtatgaatctgtggactcatgtttttcattagtgttcaaaaacctgcagccattctctcttaaaatatatctcctcaaaaatctggtccattacctatttttcataaataaagttttatttgaacacagtcatgctcattcatttacatattctctatggctgctttcacgttacaatggcgagttaataacagaaaccatatgcggcctttatgctcaaatgtttacaatctgtctctttagtggacaacctctgcttagtggtggcttgttcccttatgtttattctctgacgttagcttaaactaattttaagctatttttacccccggccg

SEQ ID NO: 312541 - DNA, 676 bp, Homo Sapiens
  misc_feature (44)..(44): n is a, c, g, or t
  misc_feature (569)..(569): n is a, c, g, or t
  misc_feature (578)..(578): n is a, c, g, or t
gagccccaaccgccaaatcctggtgctattctgccctgtctctntgcatctcttcgggcctgttgtaattccgctttacgacgcatttcagccttagcttcacgttcttgagtctctctgacggctctgaacaccttctcctcatgagaatccatttctgtgaaggttctgatctgtgccaagttaacattctcccggtatcccagtgcgacaatttcatcaaaagcaaaaatcaaatcaaaacagtgctcagatatttcattctcttctaaggctcggcaatattcagggatggtagtgatcagtaccatatacagtttctccataggctggtatacatgtcttacactctctgtttcagccaacgtatgttgttttccagtgttcatgagctttggaaaagctgctaataagccctcaatccgagttcgggtcatttccacaaactgtcgagaaacaatagcctttcctgcttttgtgcagaccgctgctgccaacagcaccatggtgaggtgcggtgagtggggcgcgcccgcactccggctgccactggggataggggtagggtntggggaacngggagcaccagcagctctggacctgcgtgcccccttgacaggagactcgctgccgtcttcgcctcttgccaagatgcgcgtgccccaagcccccggcc

SEQ ID NO: 312542 - DNA, 705 bp, Homo Sapiens
aagtgcaccaagggtgtatctaccaccatcttggcgcccatgtgtagcccttgtgctacaagctctctgaaaagacaatgcccagctgagacaaatgtgcataggctaaggataagcttcgattgcatatcaccattttttacttttggaaggcccgcagcctgcttccccagtgtgctccagggcagaactaatggatagaagacagtcaaaggcaccttctctccattcccctctccaaggactcccttttagtaaactccccctctagctggaggacccatggttcccttctacctcttccctcctttataaattaaggcaagtccatttactctaagtgcctgctacataggcactgtatgtccacatggaaaccatagcattggcttgaaactgccttttgtctaacaaggtttctgggtgcatatcattagcagcagtacaaagctttccctagttaaaaaactgcacaattattcaaaagcttcatcatgtttgtttttttccagaacccagttgacaaataggacaaagttaattctaagcaaacactatgagaaagtatctaggttcaagaaaatacaacatagttacctctatattttattcatgatatgatgaaaaatctgttttccattatatttataaaattaaattcatgtgtcattgcaaatattctggctaagatcctcctcccggccg

SEQ ID NO: 312543 - DNA, 925 bp, Homo Sapiens
cccccccagttgggggaccaggcccccgttggtttttcagggcacaaggcgggtaggcccggctttccaggcaaccttaaaccaggctggggttgttgccctttttcctccttcctcagcccagagggtctccccaggaccctgaggggccatccacagaaggaagtgggccaggttgcgggtcaggcctcggtcgaaggggttgctggggcgctggcggagataggcgatgcggtgtgaggagatgaattcccaggtggtggtgttgctggccaccaggtagaggtgcgagacgaggagcaggctggccaccaacgagaagagggacagcagcaggaaggtggcgaacaggagcccgctggaccgcaaccacagaccccagggctggaagaaccggaggcctgaccatgccaggtacaggccccacagaagcaccaccagctgcagcgccaggtagaccacaaagagtgggtggttgcgctctcccacacagttctccatccaggggcagtggtggtcgtagcggcggacgcaacggcggcactcacggcagtgccgagccctcaggggctgcagcaccaggcagtatctgcagcgccgaagagggatggctggaggaaccatggctgtctgctcctctttgagctcctcctgaggctggggctgcacattcacgtagccagggtccatgagtgacacagcgaggtagagcagcagggagcccagcaccaggagcaggaaggtgaggggcaggagcagctccccctgctcctcccattgccgcagctcggtatcgtgcaggaagagcaccagcgtgattccccaggtcagcacggtgtgcccggtccgcaccaggaccccagggctgaggagcgcccagggcgccatcgcctcggcccggggccccacccggaagaagcgcccc

SEQ ID NO: 312544 - DNA, 395 bp, Homo Sapiens
tgagccaccgtgcccggcctacaaatgttaacaaagcaattaccaatggcctttttacatattttttctttaatgaggaataatatgcatgtagataacttatatatgttgttggaatggttacatttttgcagccctttgtattttgtggtagtttaaattgtatcacttctaaacagcaaactgtttttgtttttaattagcagatatctgaagtactatttttgcagggtttgcacaggcccgtaactgtctactactttgatataatgtgtatacatcctgtatgctgagctggtaaaatacattgtaaattacatattaaatattttatctgcttttacaagcgcaaggtgcaaaaatatatacaataggtctcattgatgactgtaaag

SEQ ID NO: 312545 - DNA, 384 bp, Homo Sapiens
  misc_feature (322)..(322): n is a, c, g, or t
ttgtggttggaatcttattttcaagatgattcagaattcaactgtggaccccttctggagggtggggagaagtggctaagtgttataaggtatactggacaacacggggtgtttcaaagaggacgacaaggcactgtcacaatcagtccaactgtaattctttcctttcttgtgattatgtaaattttaaagaaaagaggtttctcacaagctatatacagcagcttaaaacctcagtgtttctttttcacttgatacacaattaaaattaatttacggcaaatacttgtcacaggaaatgtatggtagggccccatagganacctcttaccagcttttactgggagggggccgagggtcttccgtgggggatccatggattct

SEQ ID NO: 312546 - DNA, 1160 bp, Homo Sapiens
  misc_feature (957)..(973): n is a, c, g, or t
  misc_feature (979)..(1095): n is a, c, g, or t
  misc_feature (1101)..(1109): n is a, c, g, or t
ggagaagatcagaaagttacccaatactctgttaaggaaggacaaggatgttgctcgactccaagatttccaggagctggaactggttctgatgataagtgaaaataattttctgttcagaaatgctgcatccacactgactgaaaggccttgctataacaggagagcttcaaaactgacttactaatgcagcagggacttttatcactgagtattatgacagtgtgcatcacctctgggccaaggacaagccattgatctaaatgcctcagatgcccgggagggcctctggtgccactgcatagtatatactaacatcattctgccaaggtaggaagcccctgacccccaagcagtggtgccactcttccaagcctcttggtgcacagtaaacctattgcttgaagctttgaacagctgagaagtggtctggagaggcagaagctgaaggttctatatccagtgtgttttatgtccagaatgtaagagagttgtctaagcagcagctgagagagagcggagcctatttctagccactcctgttgacagtgcacctgaagggctgggatgcgtattcttggtgttgcatgctcacaactctgctgacattgggaacttatgagagaggaagactcgggacagcacagatactggacagatggattctggtgtggggaaagcacagatactggacagatggattctagtgtgacttgtgactgtgaggtttcctataacatatttataaatgtctactcaggttaaaagtatttaagaatacagttaactaattgtaaatatgctgttaaccaaaagagctttccctccctcactttttcctttgtaaacactcatgactgcttctctgtctcgagtcatctctgcattaactccccttcgtggtcactagagggctctctgatgccttctaaaagaacaactgctttttaccaatgnnnnnnnnnnnnnnnnngcccannnnnnnnnnnnnnnnnnnnnnnnnnnnnnnnnnnnnnnnnnnnnnnnnnnnnnnnnnnnnnnnnnnnnnnnnnnnnnnnnnnnnnnnnnnnnnnnnnnnnnnnnnnnnnnnnnnnncccacnnnnnnnnnactctgaagtgattccagtcatatgtgtgtgtaactgcatcctatgagaag

SEQ ID NO: 312547 - DNA, 2477 bp, Homo Sapiens
  misc_feature (965)..(965): n is a, c, g, or t
ttttctgtgctttcaaagttaaatttattatgcacagtaatgggtaccatggagacagggaaagggctagaaagtggcatcatctatacagagggaacatataaagactgtcccggggtgtacccccctaactgtgctgtcactccaactctgtcagaaagaaaaagtagtgtgaggtgtatttgtttgcaagaaacaaggtggaaactagatggacccgctgagcagggaggccaaggtcatttccatctatccctaatggtgttcagtatagccctctccttcctgagacctaagaacagaagatacgcttccacaacagagatttttgattttttaatggcagcactctcataactacattcacggaccaaccaaagccatctccaagcctagaaaggatacatactacacgcagcgaaaatgccaaccactgatccagaattttcaagatggcacctttccccaaacttctataccattcattaaacatagactgcaaactgctagcctgtagaccaaattcaacctctaagtattatttgcttaggtgcctaagcatctttaaaaatttgatttagttggcaatacactgggaggtttcacataaatatctaggtttccagcttctctgaagaaatgagaaaatccattcccacatggcaacaaccagctggagctaacagctgttagacagcatgctgctccccgctactgccttacacccagccagcttcatgtgtgcatgttatctgcctgccattcacatcggttctccttgctcagcaaatgtcccacctcaacctcacactcaatacccttatacaggttccctaatcagagttcagtagggcacccacactatagctgggcaatccctggatgctgtgatatttgttaaccattatgttctttccaaccacgggaaccttcctaagagctcaagagcttcactgctggataanaacagttcctgatcccggattctgacctttagttttccttttccagtcactgccccagtctgcctggccctgggctctgttccatattggcaatgagagcccacggcagggagacttccagcaggcttttccatagtgcagccaaactatccagtaaatagactttgttctccattaaaagcccctgtagcagctgagttgctttaccttatcccacctggctcttacgcagtctgttccaagtgagaagttagcagagtcctgtaaacaaagaacagttcaggggccaacctgcgctcccaggtgccaggatgctctcagggtcttcactgtgctcccaggtgccagggtgctcccatggtcttcactgtgctcccagacacttggcttcattgttctcattttgatcctcatttggcatctctaaacgcaggcggtgcagggaatgcacaaagaagcgaggaagtttgcagaccaagttgagttcctccttcccggaccccagggcaggcaggatcagctgccgggcgtgcaggtgaagggggatgtagcgggccttcgactgttctagccccagcttcttcagggtgcccacagacagcttactggggggccaacctattccagtctgatgtacttgtgatcaccaaggattggacagatccaatccaaaagacaagtgatactcgaagactgatgttttattccagtgatgggctggagctccacgagggcggaggagagagtgctgctgagcacctggtactgagttacagcaacttgcgcgaatttcggctgcgccgcactttcaccattttcccatcgtccatgcggtagctcggggacaatgtcatcttgtggtgttgctgctggccttgcgcctccttctccacaatggggatgtccacgactcctgctgagggcatggggacatgcacagtgatggcccagtacttcttcaccacctgacgggttctaaacaactcttggacttgatgtgccatgtccttgtcccaagccaacaccattacacctgtggtttccttgtccagccggtggcacagatgcaagggctctgccttgtggccatgaagcatctttgccaggataggtagtacatcagtgatgcagagctggaccccagggccaccatgcacagggagaccgtagggcttattgatgaccacaaggttcttgtcctggtggagaattcctcgggtcagtgccttagcaagcacgttggggtggactcgctgcagctgccgtgtgaaccgcactatttcttgcactctccgctgaacagcgtttgtggacaccggctccttctttgtgtcttgttcccgtttctgggctcggagcttctccgctaatctccgggcatttatggccgtagaggcagcggcagcggcacaaaatggctttgagacgagagtgaagagactcccgcaaccttggccgtttccccggatccaggggcccgacgcgctccacctgggcgccgccatcttacaa

SEQ ID NO: 312548 - DNA, 511 bp, Homo Sapiens
tggaaggaaaatgagcagtctccaacccagggggtaccaagaatctgaggaagaagtgggtaagacggaagtggagtcttggtagagggaaaggtggccaggtgccagtccaagagtccaggttttgaagatgggctgtttgggagggaagaggccaaacatctctaaagcgaaggcgagcccaggccgtaggagcgacctcagctttggatgcctggtgtggcgaaccacggccgggcaacgggtcagacgggaggagacggggaacggatggaatgggatcggatcggatcgggtcgcgtcgggtcgggccggggccgggtggggtcgatgtaagctgggcgcaggctctcagtccagctacgcaggtgcccctgtccccgcccggcccccgtcttcccgctagcggcgctttgcacccaaaaggggagtgggagaggcagccagcttcagcaaaccccaagcgcagcccctactccgctgggcgccgccatcttgtgtgtccccggcc

SEQ ID NO: 312549 - DNA, 418 bp, Homo Sapiens
cccgctcctcccgtttctttctttctttctcctggtcagctctgagagaggccaggtaggcctcatcctgctgttgtctcagcacttgggtctggtttctttcttccctttctaggcgttctgacaccaggtaagtctggttaacatccatgataaatgtcagttggttaatgaggtcatcaggttgaatgaggccttctagccgtcccaccacagtcatccttcgatccttcagcataatcatggcccaggaatggataggtgttctctcgtaaagcctgtgagaccctgtatccctcaggtttgtttgtagagcatgcccagaagagcatcctagtgtttattagtgaaataacttcaggtgcacagagtgtgttgcgacaaaactcatcagagtcctggtgatcatctccatgaa

SEQ ID NO: 312550 - DNA, 2165 bp, Homo Sapiens
tgagaattttaattttactcttgagctttttcatgtcctttggagtaacacagcttagattgctcctagaccatctttggggctatgtatcctgcaacatttgagcagagccaatagaggaacccaaccagccctcagccatacagtccagcaccctaaagcgccacacacacaaatccagtgttctgccacttctaggtttatttcatcctcgcatgcataatgcagtcaagaggaccacttttcatgccaaagcaaaatttatacttttggataaaaatagaatgatggcaattttatcatttttattattataaccattattactgtcacaacaggaaaccacggagtcctggccaggcaccctaagcatcttacatgcgttacattacttaatggtttacaacaaaatattaggtcagaaacgttcattaaagataaaacacagccaaagaatctgccggggaattaactgtgggctactcgcatggtactgtgaatagcacaccttctgcttttatgagctgaagggcaagtaagccttctccttaccatgcaaaaatgcggacacctggggcaggacaccaggctgctccccgacattaagacaatgaaacatgagggctgatgctctatagaagcaactgatgcagaggttggtgtacataacctgattacagtatccccttggtccggggccttggatcaaaagggttaaatggttcacaataatactgtaaatggtatttttttctaaaaatttactgtatctagtgtcataataaaactgtttagtaaaaaaggatagaatcaaaacttcttcctgcctcttatgttggaaattagtgtagtatctacaatactgaatatatctcactggcaatgagaacagctgatgaggactcctcctaacgtgtgctgttagtttgtttctgagggtagcgacgctgatattttccacaaaagtccagtaagttacaaactagaggagaagcaactctaacagggccaccccttccgtgcaaagccctgctgcagctctggacagcccccaactaaagggactgcctttcaacttgaaatctaacattgaccactggaatatgaacgtgtttctattatgagatgaatgtgacgggattaaatggccttgattagttatcttacccttggtcttaaaaatttgttatctgttttcttcattgtatgtgtttattaataccagtaaaaacagattatcacacatcttccataaaatgattgtgatagaaatgtcactgagtgtgtacgatgatacgccacctgcagcagcatcctggaatattacatcattctaagtgcagtacagagcagctgggttcaaatccaacttgactggtgtgggctcccacaaaagctcattctcagttaaggatgcagaaggagatgaacttttgctaaacccaagagctgaagatgctgccgtggaagcccgatttcgcttcttcagtggtttacatgcatcagacagatttttcgttgctgcctggctcttgagcgaggaggctgcctccatggccttgtaagagcttgttctggccgttttgtcagtgattgtgtctctcttccgaagactgtgcttgtccgtcctgagtcttttcctgggtgtgtcctcagcttcagcatcttctgtagggtcctgtatcctctttgtgtggtttctttttttcccatttacattaccagagtcttcttcagcctggacaggggccaccagggcaaacttggtgttgtagcgtgctctctgcttctcactcagcagactccactgtgacctgagcagctcttcaatctcctcacctgaagcatctgggtgctcagctaccacctcatccctgtgtttttgacagaagaccaaaaactgggatgctgcatctcccttcctgcttcgtggcatggagactgtggtcttcttcctcccaggaggagaccctactcctcttctggggtcagcctctgccgtcttttgaggagtactcttccctatgtcggggtgactctccagggtctctgcagagctacacagtttggccctccgccttctcttcatgggaatgcactcttctctcacagacttggggttttcagcagcttcttcactgactcctgaggattctgccatttct

SEQ ID NO: 312551 - DNA, 692 bp, Homo Sapiens
gcattgcaacattttctcattgttcattgagggaatataaatgcattattttaattataaacgatttcactgtctttaatcaaggcctagttgtaggtatgttaaagtatgtttgaccatgagtttccaagtgttggtgcttaagccgtttatttagtttaagctaagaatgcatatgtaacccatgcaacataaccagtagctactatactattctggttgagcatgaactgatcaagatatcaaactttatcaaaactagcctgaagctgatgaaactgttaacccactaattgccttaatcttaaagctgttttttaagcatacttaaataatgtatgaaagtatgtataaagtttgaaggataagttattagtgttctgcagagcaataatgcctttttctattcatcaaatcaaggtcaaaattcatcttttcaagattaaaaagctctcttaatggaaatatttaatttgcttatataaagcactatagccatgttttccaaaaagtataaaaatatacacttacctttcattcagtgaaatataggaagtgctgaattacaatgtgaagttaatgacttctgtttacaaatgagacactctaacgagttttcagtctctctgtatgcctttgctatttaggggtccaccccaagaaagccaaatacaacataaaccgtcctgacc

SEQ ID NO: 312552 - DNA, 1477 bp, Homo Sapiens
  misc_feature (25)..(25): n is a, c, g, or t
  misc_feature (292)..(306): n is a, c, g, or t
taaaaatgagatgtttaatgaaggncccctaaaacccgcacatttccacctcagtaggttttccaataaacagtaccctatcctaagtcctgccgttagtgttggagggtattaaatacagcagccctttcccaagttcctaagtaagaaagaagcctgttaggataatggaagcaaattgaattaagagctgggtagaatgacagaatgcgaggtcaggttggcatcttagaaaccatctgaaccactctctttgcttaaaggtgaaggaacggtcatgtgtggcaatagnnnnnnnnnnnnnnncaagaaaagatgtccctttaattttacttttgtcaaaacattttcaagattactttaatttttacaatatcatttaagggaaaactagtgagtttgttgaagaaaacaagaaacagatttttttaaagccattgaccacgaaataagcattatgtttcaaagaccatgaaaaagttatttgtctctttttggtctcaactagcgagggaggtgagaccaaactgctcaaccgctggacaatctcagcaaacacacccactgttgagacttattgagtgactcaatgttggctagaattgtccatttagctggaggggaaaagggagggaaggatggatggaggagtgaagtatggaagcagggatcaggccacttcccgtacctctcccaaactccaaaggcaatgatcacattggagggtcagctaaacacaaagggaagtgaagaaagaagtttgaagattttcctgtttcccaaaaatcacatactttcctcttttgagtattctatagaataactctctacatttcctagtttgtggaaattttctctacggcataactactctaaattgtgcaattttcctcatatcagacttatttttctctatacctggttccctagcaaacctgagctttatttatatatctgatatgcaccccatctccacagctggcattcaattgcaactctaaattctaaagtgctcagagtcaatataatgcactgacgattcagacctgactgggcattttcactgcataaatctaaaaagtaaacaatctcattatgtttgagaggatggatggggagaagactgatctatatttccactaaggtagcccaagaaatattccacatgaagggacaatgggagaggagctggcaagagtttgggcagtactttagaaggaagatgcattcccttatcatatagattacatatggcagtgaattgacagaggattcactgggacatcttcagaaagtaagtaatgtgtttcaacaccactaaagtgttaaaataggcttcttttcttctcgccagtatgaaaagttagacaggagtcactcccaagaatagtaaaggacactcactggggacagtcatgatgggtgaagaagggatacatatttttaaggcagcaggaataaatttcatcatccttcc

SEQ ID NO: 312553 - DNA, 777 bp, Homo Sapiens
  misc_feature (139)..(139): n is a, c, g, or t
  misc_feature (160)..(160): n is a, c, g, or t
  misc_feature (397)..(423): n is a, c, g, or t
  misc_feature (432)..(477): n is a, c, g, or t
  misc_feature (580)..(600): n is a, c, g, or t
agcaagcagcacccagtccaactgaaattgcaaagcatacccccaaagcccttgccttattagggaatttctgcttttataaatctggacccagaagaccaaagtaatgccctatgcaaaaagagccaaccaaaagccnccaaaggaaaataattaagancagccttttattattttctttattctcaagctgttttgttaaaatgtgaccacgaactaggtcttaacctagcaaattcacaaatttattcagatagccaaattatcaaggaagtggaaaacttccatttttaattaatgctgtgtaattcttttggtcatttcattacatttttttcccccaaaacagcaccttaagaaaaaaaaggaggaaaggccatctccttatagttaaccnnnnnnnnnnnnnnnnnnnnnnnnnnnatcagaggnnnnnnnnnnnnnnnnnnnnnnnnnnnnnnnnnnnnnnnnnnnnnngtcacttgataaacaactaattaatgtctttttatctcttcccacctggaggaaaagtctccttagagcactctcaatcccccctcccaccttgaggaggacnnnnnnnnnnnnnnnnnnnnngaaaccacgccatttccagaccaagaagccatttacagacaaatgtcattctccagttttatctgatttgtgaatgtctttgttttttcttttcacaaagcactctcaatgtggccagccagcaggaaaatgtgttttttttaatggtttattaaaatagtgttgggggcgcgctgc

SEQ ID NO: 312554 - DNA, 789 bp, Homo Sapiens
  misc_feature (747)..(747): n is a, c, g, or t
aacattttcacccagaaccaacctatggccatgatttcgccagcctcgaaataacccctcattaaaggaacaaaaacctgaagctccaccccgttgccgcccgctctagacctagtgattcccccgggctgcagaaattcggcacgagctccacgagggttcagctgtctcttacttttaaccagtgaaattgacctgcccgtgaagaggcgggcatgacacagcaagacgagaagaccctatggagctttaatttattaatgcaaacagtacctaacaaacccacaggtcctaaactaccaaacctgcattaaaaatttcggttggggcgacctcggagcagaacctaacctccgagcagtacatgctaagacttcaccagtcaaagcgaactactatactcaattgatccaataacttgaccaacggaacaagttaccctagggataacagcgcaatcctattctagagtccatatcaacaatagggtttacgacctcgatgttggatcaggacatcccgatggtgcagccgctattaaaggttcgtttgttcaacgattaaagtcctacgtgatctgagttcagaccggagtaatccaggtcggtttctatctacttcaaattcctccctgtacgaaaggacaagagaaataaggcctacttcacaaagcgccttcccccgtaaatgatatcatctcaacttagtattatacccacacccacccaagaacagggtttgttaagntggcctggggggtgctgaggggaacagataggagtgagaaga

SEQ ID NO: 312555 - DNA, 498 bp, Homo Sapiens
ctttaacatggggtcatggtaggcctgtcagaggggagaaatgtgtcacagagagatcatgtgaggaaaacatgagggatctatacttggaaacaaagagaattaattacataaaagctagcgtggattctgtttgctacacataaaataaattagtatgtattaatccccaaataaactctcttactaatacttgtatttgaggatgtgtctagacctcacctaaaaaaaatgtattcaccagtagatattttctattcttctacttctaaaggttaagaaaactatcctttagattttgtgaaatgtaatttttaaaaactagggcatctgataaaaagttatttactgacctttcttgcaagtttgagatcctcaattaaatcctgttcacctcgggacatttcatatattgcctaaaaacatccagcaaacatcagagatcaataccttcgagaaaggaaaattatatacaactgataattacattatttgatg

SEQ ID NO: 312556 - DNA, 1252 bp, Homo Sapiens
agccgtttcgtttcccgtggggaacggggccgagtccaagaaccccaggatgttcttgaaaccaggaaaaaggtaaaggtttatgtccccttctggctccggcagctcccccatggcaccagcagcactttgctcggctcgattttggggttccctctgcttttcatccaggtactccagctgtcggatgtaatactggcactcggattccactttttttcaagttgatatcagagaggactccctgtattatcaatatagcatcctccagaagctgaacatcagggtgctcttttggagtgtgtttaagaatttcttttaacagtaaagggtatttgactaggcgacttcgagggatatctaggaaactcccaagatctagtttctcgactgaagggagactcgagacatcgctggaaggaattcgttggactcttggatcctgtgttcttttgatccagaaagagctttggctgccagctggttactacagtaacctctgtaggcattcaagcgcggtaaccagctcacgagaatgtgaccaatctgctccactgttccatcaggcttggttgcttctcctattcttgtcaacaaatcttcatgcagaggtatgtaagagtccagatcaccaaatatatgtgtgagttcctcttctgacatgatggacaactttaacatggggtcatggtaggcctttcttgcaagtttgagatcctcaattaaatcctgttcacctcgggacatttcatatattgcctcctgccgtctgatctccctggtggtgagagactccttcatggtgatgtccagcatctctgaccacagtgcactgctccttctcttggcgggtgttgggactgttgacctgctagaaaacttctgggcagaggctggggatctgtggtcaccacgaagggtaaatgactgtattgtttgaccaaaacgtctgacagctccatttcttacaggagagattaaatttgccaaggacgtgacacgagccagaggtcgaactcttttattgcttggctcctcttgttctctgaaggactggttattgacatctaggactcgtatggtccttttaataggtaggagacctccagtctcatcatgttgtatcatgctttttaattactccctcaaacctttccaatcaatccacaccgagtcagcgctgtagcgacgctatgcagaggcacacgggcttttcttcccagagctcggccaccctcggcgacgcgtgggt

SEQ ID NO: 312557 - DNA, 2088 bp, Homo Sapiens
tttttctcaaaggcattaggcctgtgccaggcacatagtggggtccagagaatgtaggccgcagggcttccaaaggccagggcagcaaaggctttgtgccaagaaaggtctgggaaaggagcccactgggtctgggccagccctttgattcctgtgatctccagtgagtcactgcccctctctgtgccagtacaatgcacacttggcccacacttggccactgagtttgcacttcactgaagggctgtgggaacgacggcaaggatagaggaaagccagattagggaagacactggctctcagaaccttagggatctcggtcttgggccactcatcccacttctgcccagcatctaaggagcttgagagggtgaagcgagagtaagagggttccatgctcacccccaacagggtcccaatgtcttctcgatgccctggtccttctgggcctaaaacatccacttctggggctctgtcctctggtggctacaaggataaagaatctgaggtcctgaaagccaaagacctaagaggaatcgaacaagaaacctgggagaggagcacagagcagcgcagttgggggtgtttacacggcaagcagagtccaggcagggaggccacaggatacctgacaggcacctccaagaaggatcttcatgggagtactcagggaccaagacaagtccaaagggactgtggagaaggcccctggcttctggccatcagcacagccaaggccccagtacacaactaaaggcttttattgggaaagggaaattgactgaaaaatggcctccaatttcctcggtgcctgagacacttggtgcctcctccacaaagtccaggaaagaagggcccaccaaactgggcccccaggcagggctcaggtgtagaggtcaaagtcaatgcgtttggagttgtagaactgaccaccaggggggtccagcttccggcaataaacaccgtccgggaagtagccttcactcacccaggtctgcatctgggcgctggtgaagggcccatacagctcggcatcccccgtgttctcccacttatattcccacatcacatccaccagaccatctccccgcgactctgcttctcctctctgggtaggggttggggtctccagttcctcctccgccaactcctcagcgaacatgtccagggagggtgggggtgtgggattgtggggtcctagggtctgacaccccaaaccctttcagacgcatagccaaccgttccccttgtttcctggtacacaccaaggttgccccgggccaccatctggtcggccaacccggagagccggtccaggcgctgaggggaactgggttgcccaggcccctttctccctttgcctcctcctcgggcccccagacgcctcagtgccccagccactgtctctctaggcaataggagctccaaaagtccctccaagagggcttgggcactcattgaggtctggcccaagctgtcctcctcctccgagtctgaggcctggcgctggccaggtggccgctcccggatcttcacccagtcaatgttgtccagccagctgtctcggatctgagcatcccggttcaggaagtagttgccatcggcatcaaagtggccttcctccatctcctcctgcaggttaaagggtgtgatccgaacacccccctcgctggggagtgtggctgcctcctgaccttctacatcctctgaggccaagatgtcatatttgctggaccccccatcatcatcatcctcctcctcatcgctatccaaagagtgtttgcctttaaagcggctcccaggaccccctgacccagccacagggtccaccagcttcttcttggggacaatgatttcatcctcatcctcctcatctcccacgccttggaaggtcactttcctctttggcatgacggggcaaagaggtgtttctcaagctgggaatccgcggaaggcgaggtggaaaaaagaagagatgcttgcgccagggctacatccggggcacccggccgccatcacccggaagaggactgcggaaggcgcccgggaagcccggaagtggcttcactcgggttagggaactaactc

SEQ ID NO: 312558 - DNA, 629 bp, Homo Sapiens
  misc_feature (538)..(546): n is a, c, g, or t
acatagagcaagtctgtaaaagaaaagctacagaaaccctaatccttagcacaagccatgacagagtaagccaacataactcaagacgtgtctcatgatcttcaatctcgtgagacacaagtattctgtcatatgtatatgtgccacacttttctactgtggcacagaatttatctgtgcaagtttctgtgataacaagtgctgctatttggagtctgtatacattatctccaggctccagtgtgagttgaagaaaagtttcattaaaaccagtaccttgaatttgttccagcagggaacagattcacagctttaattagtaattgtagatcatcttctgaccaatttttacttccatttccacctccaccagttgatttctctgtgttcttagatgcttgtcgcatacgagcctcagcttcctctttctcttttctgatttgctcatttatttcttctatctgtttttccaaagcagcctttcctacttcttttgtgcatgatgtgagtgtttcattcaagcactgtaagctaaagnnnnnnnnngaagaaatgaaactttatcctaagctcaagtgaagacttcaatagcagttccataggtataccttgccagttcaagccgatca

SEQ ID NO: 312559 - DNA, 2750 bp, Homo Sapiens
  misc_feature (2056)..(2056): n is a, c, g, or t
cttcatcctctaccttccttctagcagaaatggcggctgcggcggctcgagtggtgttgtcatccgcggcgcggcggcggctctggggtttcagcgagagtcttctaatccgaggcgctgcgggacggtcattatattttggagagaacagattaagaagtacacaggctgctacccaagttgttctgaatgttcctgaaacaagagtaacatgtttagaaagtggactcagagtagcttcggaagactctgggctctcaacatgcacagttggactctggattgatgctggaagtagatacgaaaatgagaagaacaatggaacagcacactttctggagcatatggctttcaagggcaccaagaagagatcccagttagatctggaacttgagattgaaaatatgggtgctcatctcaatgcctatacctccagagagcagactgtatactatgccaaagcattctctaaagacttgccaagagctgtagaaattcttgctgatataatacaaaacagcacattgggagaagcagagattgaacgtgagcgtggagtaatccttagagagatgcaggaagttgaaaccaatttacaagaagttgtttttgattatcttcatgccacagcttatcaaaatactgcacttggacggacaattttgggaccaactgaaaatatcaaatctataagtcgtaaggacttagtggattatataaccacacattataaggggccaagaatagtgcttgctgctgctggaggtgtttcccatgatgaattgcttgacttagcaaagtttcatttcggtgactctttatgcacacacaaaggagaaataccagctctgcctccctgcaaattcacaggaagtgagattcgtgtgagggatgacaagatgcctttggcgcaccttgcaatagctgttgaagctgttggttgggcacatccagatacaatctgtctcatggttgcacacacgctgattggcaactgggatcgctcttttgggggaggaatgaatttatctagcaagctggcccagctcacttgtcatggcaatctttgccatagctttcagtctttcaacacttcctacacagatacaggattatggggactgtatatggtttgtgaatcatccactgttgcagacatgctacatgttgttcaaaaagaatggatgcgactctgtacaagtgtcacagaaagtgaggttgcacgagccagaaatcttctgaaaacaaacatgttgttgcagcttgatggttcaactccaatttgtgaagatattggtaggcaaatgttatgctataatagaaggattcccatccctgagcttgaagcaagaattgatgctgtgaatgctgagacaattcgagaagtatgtaccaaatacatttataataggagtccagctattgctgctgttggtcccattaagcaactaccagattttaaacagatacgcagtaacatgtgttggcttcgtgattaaaatgctcctaatcaagattgtttgaacacatgtatttataaaacagagctagagaaaaataaaaatgaacatgtatatacatttggaaatttgaattaaatactgtatcatactttcaaaggataaaaagactacccctctgaaggttgttttgtattaatggtcagtctttgttctctgagaaattatgttggaagcagcatactttcaaattattaccatgagtataattttaagaatgaaaatgtttacagtattttcagttttattataaaaatgcacacacaacaaagattgtcatttcttggctctacttgcattcagcacttgttcttgagcagctttctttgcttttaccatctcgacaagttccttgtatcgtttcatgcagtccttctttgtcctgccaggcaccgcttctgctattttttcccatctttcaggtgtatttactgggtatgttttcaaagcttgttccaaaagcttctgttcttctgttgtccaaggggtgaagtctgtatatggaccttcaaatcgttctgaaggcgttgcgttgnctgcttgaggtaccactccatgttcttttttgaacttatcaaatgcgtttttatttatgtcatctttttgatgagggtcaagtttttggagactctttgctttgccaataacatctttggcagttcttttgactccagaggaagaatgtatgttcatgtaattagcaataacttcccatcttgaatttgttccagcagggaacagattcacagctttaattagtaattgtagatcatcttctgaccaatttttacttccatttccacctccaccagttgatttctctgtgttcttagatgcttgtcgcatacgagcctcagcttcctctttctcttttctgatttgctcatttatttcttctatctgtttttccaaagcagcctttcctacttcttttgtgcatgatgtgagtgtttcattcaagcactgtaagcttgccagttcaagccgatcacaaagtttttccacttcttccatcattttaacccgctctgcctcattatcagaaaaatgattccaggtcttgcatgagtttcgaagtttttgcctttccttcttaatggcttttttctggatatctttttccttctttgccagcaatgcttgctgtctgacttcctcctcttctttctccttagctaaccgagcagcttctaattcagcttgtctttgtttttctttagcttcttgctc

SEQ ID NO: 312560 - DNA, 609 bp, Homo Sapiens
gagatggagttttgctcttattgcccaggctggagtacaatgtaatgaggcctgatagttaaaaaatcaaaatagagtcctggtgtgcattttaactttgcagttaatgggactggtgattttttccttgttaataagcatgttatataatgttaatcttaactagaggtcctcctgctttatcttaactagattcgtgtgagggatgacaagatgcctttggcgcaccttgcaatagctgttgaagctgttggttgggcacatccagatacaatctttctcatggttgcaaacacgctgattggcaactgggatcgctcttttgggggaggaatggtaagtgattttaaaagaaattttccataacagatggaagattatcatgttttcttaaatataagttctttgtaagaatccttttttaaagtggcagaatagagtcttgtactgtgaattctgacttaaaaatataaactgatcctggattgcatgtgggccagaaaaagtttctttttttctttgccacaaagtttattagtggcaaaatttgaataaggacagaattagctagaagtactatgtcaatgttaatatcctaattttaatagt

SEQ ID NO: 312561 - DNA, 440 bp, Homo Sapiens
  misc_feature (40)..(40): n is a, c, g, or t
  misc_feature (186)..(186): n is a, c, g, or t
ccaccatgaaaaaaaccaccatccattaccaagtgatggntaacccccccgggaaattagaagaccgcatccaagtggagaccagtaaaacagggaaacacctgcctcagtttgggggtggggtggggatgtcctggttgtcctgtgaactggggtcattggcattcagacaattccagatgtgtncccatgaagcattagttctctgggatgcttgtaagtcataagaggaaaaaaatggttagatgggtttgggaaatactgagttaaacagttaatataggaagtctcaaagctttatgtcactgtagatcactgaaaaggccatctgtaatttgctgtattcctcaagtgtatttgaccagtatatcttttgagttgcatcttgaaggaccaggagtcttggattaaatcaagcaatatatgcgtgaactgtaatc

SEQ ID NO: 312562 - DNA, 1039 bp, Homo Sapiens
  misc_feature (113)..(154): n is a, c, g, or t
  misc_feature (279)..(312): n is a, c, g, or t
  misc_feature (387)..(395): n is a, c, g, or t
ggggaatgcgtaggggggaataggagggggaacccgaagaagaggggcggaatcgcaaaaggagcaggcgcaacaggtttgggagccgcgatgcccgcgggaggaatcacaannnnnnnnnnnnnnnnnnnnnnnnnnnnnnnnnnnnnnnnnnacgcgccggtccgcctgtagaagggagaaggcggaaaatgagaagggccccggggcccatttattggggaagaaggagggtattgggcccccgccccccgggaaaggtgggagcccagcttggtnnnnnnnnnnnnnnnnnnnnnnnnnnnnnnnnnnactaagggagagggtaggccaaacccgttagcgggattggagccatccaagaaaggagggggtcccagggaatannnnnnnnnagcgcaatgccgtacggagcagatcccttgtcggtaggggggaaaccaagggagtggccccatgtggagcgtagaactcagcgagccaatcccttaatggagggaatgtgtcgctaggcggagagagacggcatacccaatcgggaaacgggacagatcgcgctcctcggcgcggcaggtcgtgggctggaaggacggcggggattggcaggaggcgggacaatcttgggaatgggagacgcaaggagtccggtcccggatcggcctcagattagcaggccccgggagtggggcgggggcgtagtgtgggacggggcggacgcggcccggggcgctccctccctggacttcaatatttccgcttcagcttctggaagtcgctggtgttaagccgcggccgtggcaggtccccgaagacctgggtgtcctcggcctctcgcagcaccagcgcgcgcatgctcgccgcgatgcggtccaggtcgggcgaagagggctgcggggacggcgacggggcgaggtcagcgccggcagggcaatccccctgcacccacacgcggtccaggggtgcacccgggctccaagcccacttctagcacgtccctgccctgccacctgtgccctgcgatgcccactgccagcagtgc

SEQ ID NO: 312563 - DNA, 877 bp, Homo Sapiens
  misc_feature (34)..(34): n is a, c, g, or t
tcttgcttcggtttgcccaggcttcaaaaatggngctcagcccgctttctcgcgacggtgactcaagaaattcgtccggggccgcttcgtttctgggggcactgacggcttcatcccgttatcctgagtcccctcagtgcctcttgtgttgtacagctcctctcacctccttttcttttatccgttcggcttttctcagctgtcgcgccccgcagagagatggggacagccccgtattaacatggccttagctgaccggcttagcccatgccctcgagcaaaatggtacctccttggcttcaattccagtatacaatatggagaaggaagtgggcgtttcaaggcgtgcttgccccaggtggtgcagctctcagaccctcccacttgtttacttcgtggcgagagggcgaacactgcgcctgcgcactctccgtagccggatccaccttcagcgtctgcgccacgtgactccgatccaccctcgaggttccagtggaataacccccttctgaaaaatggtttcacccgctccgtctctagaacgggtcgggccgctaccactgtccggcccggaggggaactgttttctccggaagtgacaacacgctgactaggaaaaggaggaggcggggcagtggggccttcggcggcgactatggaaggagccggctacagggtaagcactgaggacgcattccctcgcttcagtgtatgcgaaacgccccgtctagtgatcagctcttctctcaggccttggctctcgagaatccggcacggccttggcaaacaccgatctcttataaacgcgccgtcaccctcccgtccaccgccccagggaagaacctcccatggcccctcgtgccgaaatcgccaccca

SEQ ID NO: 312564 - DNA, 380 bp, Homo Sapiens
  misc_feature (37)..(37): n is a, c, g, or t
  misc_feature (40)..(40): n is a, c, g, or t
acgtcatgcaggtcatctacacggacgacgccggcanccncagactgcctacctgcagtgcaagtgtgtgaatgagcttaaccagtggctgtctgcgctgcggaaggtgagcatcaacaacaccggactgctgggctcctaccaccctggcgtcttccgtggggacaagtggagctgctgccaccaaaaagagaagacaggtcagggctgcgataagacccggtcacggttgaccctgcaggagtggaatgaccctcttgaccatgaccttgaggcccagctcatctaccggcacctgctgggcgtggaggccatgctgtgggagaggcaccgggagctgagcgggggtgcagaggcaggcacggtgcccacgagccctg

SEQ ID NO: 312565 - DNA, 622 bp, Homo Sapiens
  misc_feature (557)..(557): n is a, c, g, or t
  misc_feature (589)..(589): n is a, c, g, or t
gaatcagaaagatgagttttctatcctaatcactgctatgtgtaatgtaacagacttagttttaacttccactgatacacaattatgtggggagcaatgaattaatagcgagagaaatgattttaaaaggcttagatccataaaacaaatatttgaacagaaaaaattcacatgagctctctgaatattttttccgtgagcctaaccctcattctcagcattgggatttgcttcacctgctatataagtcataatttctcaaggactagtaagcatatttgttcctttgttcagttataaggaattaatattatttcagttagtcagttattcattatcaaacatttattgggaattaactatactccagtcagtagaaagaaatgatccctgtgtttaagaagccatggaaaactcatttactcccaaacacacataaattagaaatcacccaaagaaaacaagtagagaaactagggtaggttaaatccatatttagcccactgtctgatttgaatgtgctttggacttcaggataatgttggttttcttaattnatttttaatatccaatagtctacaggattttnattgctactagtggcaaagccgtctcactagtc

SEQ ID NO: 312566 - DNA, 854 bp, Homo Sapiens
aacggcttcctgaaccttcattttgagggtgttctcatctcacccacctctgggctaggtatcctctgttaattgctaacaatttcctaccaaaatagtgcaatcaggactgcccatcacagcaaattactccaattaatgccctttcctcttctgtgaaccaaaaatatctctctcctgtctctcatctctatcccaggtataaattgactaataaattttacagagttttagtcaaaattatgaattttaatttccagcaacattattcctttagtctttctattccccaaaacattcttaaattttggtatcaaatgttcatttctgtcctagagattgtggttcccatggctacagatttttgtatagtggtagtatgagtggaataagatctgagacttttcctggtgatatccaccattctcttgtgaactcattgcggaataaacagcctctttcactttcattgtaagtagttctttaggttggcaaagcaggcaccagaatctgaatttgaatgaaatctgtactttcttttgttggcctattttttgccaagacagcctgcctattgtatatttaggaatcaaatattcattttttctgtttgtaaagccagaaatatttcagttaaaaagaatataattttatattattttaataattctttttaagtaaagtaagaagatttctgccacctgagatgttactgtttttatttatatgaaaattccatttttttctttatgactcttttcccataccattatgatatgttcagcattagtattttccattttaccactaaacaaataagccaggactaataacaatagcagtttgagagtttt

SEQ ID NO: 312567 - DNA, 509 bp, Homo Sapiens
  misc_feature (51)..(51): n is a, c, g, or t
  misc_feature (94)..(94): n is a, c, g, or t
  misc_feature (138)..(189): n is a, c, g, or t
acccaaacaatataggctataggggattaaaaattttaaacttttaaaacntttccagggtaaccccaaagatatatttaatagctgttttttnccttttcctttttccatttccaaaaagtagtaggtaagtagccnnnnnnnnnnnnnnnnnnnnnnnnnnnnnnnnnnnnnnnnnnnnnnnnnnnncacttaaagtatttaattttccagtgttgatttttcttgcaaactatttaaattaaatgtgaataatcgcttaataatctgaggatgagctagttggtaacaactatgaccctggtacgatgtcaccttctttgtgagatctttctcctctacatgttccaaacatgactatttcaaaggacctcacacaggctagcagtaccaagtcctgctctcacatcgaattctcttagcaaaatcaggccagaggtgtatctgcctgacaaaccaagaaaggctctataaccaaattacttgaaacattctagcatcattaagca

SEQ ID NO: 312568 - DNA, 626 bp, Homo Sapiens
  misc_feature (78)..(78): n is a, c, g, or t
gcagggtaattcctagggacacagcaccaccagccagctttataaagacaacccaaaagacgggaatatggaaatgantctccaataataaatttgccatatcaaaaaaaattaaaacccctaactgtttaggtcaacagagtccagtggattccaaacccaatgaaatagacactggtgtgtgcattagtgcaaaggtaccaaatctcttgcacactggctgtacaactggcctgagcaaacacactaatcctcaaagtcaatggatatctctgagtcaagtcatagggttatgtttgagttaacacctccaccctccagattaccccaagaggcaatttaggcagtgcccattcacagctgctctcccaaaatgcagcattggttttgagagaagttggcaagctcagtaggtgagccaaggggcacatgatgtaggtgggaatgttgaaaggagggaagtttgctcattgctcatgccatttaagaaggaagatgatggctctaacactgacactgccagagaaaaaccaaccattgacaatacaaagacgtctaaccagcctttcccctcaaaccaataaattcagaaatgtgggacctcatcatattcatccaaagagcac

SEQ ID NO: 312569 - DNA, 1039 bp, Homo Sapiens
  misc_feature (68)..(68): n is a, c, g, or t
  misc_feature (234)..(234): n is a, c, g, or t
  misc_feature (571)..(581): n is a, c, g, or t
cctaaattcaagtttttaaaaagaaacaaaggcccggtggaagaactgaaaccagaaataacaccctnatttcctgtaattggtccactgttccacgaagactatctggccttgggaactgttgggtcatccagttggcaaaggactcccctccccccggattaactgtaaaaggaggcagaaatcctagatgctttcccatcatgggcgagtttgtgcccatgggggaagggntttcaaggaggttttgtctgccaatgaaaagctgctgccatctactggcctaggactaaaaacttcttttcaacccaaagcacaaacccaaatcccacaaaggctacattgtcatgggaaacaacggcttttgcttttcagctgctcaagttttgaaaaccagtccactaaagtcgtctttggttgtctaacttttgccaagataatttcagtctatttcaatggcactatatgaggaaaaggtaagaactgcacaaatgtaacttctgaaaactttaacttcacaatgtctctctatataaacttgtttactcacaatacctaaaatcaaatttcnnnnnnnnnnncacatttgagattggatgatcatgatattgagggggtaatggtaaagcagaccctctcaaacactgcttataaacagttttacacaaataatggagattttaaaatattaccagctcagatacatgtttagaatctttataaagcaaagatattgaaaagttccataaagataatacctgataggtaatgattcaatattaggagtttatgtgtagtccaaataattatctaaccagcaatgcattttgacatatgttaaggctacattggtatctcataggtattttaaacacctctgatttcaaatatacatgaaaaggtaattatatgattctacaaatcttgctcaggcagcacagagtataactcaaatgtcaggctaacactacctaaaacaattcatctttgtcagcctggtccccagtctccactatgcaccctcacacattgaccttcc

SEQ ID NO: 312570 - DNA, 1016 bp, Homo Sapiens
  misc_feature (1)..(2): n is a, c, g, or t
  misc_feature (20)..(21): n is a, c, g, or t
  misc_feature (23)..(23): n is a, c, g, or t
  misc_feature (32)..(32): n is a, c, g, or t
  misc_feature (34)..(35): n is a, c, g, or t
  misc_feature (43)..(43): n is a, c, g, or t
  misc_feature (69)..(69): n is a, c, g, or t
  misc_feature (77)..(77): n is a, c, g, or t
  misc_feature (933)..(933): n is a, c, g, or t
nnatttatgagtttccatanncntgtcaagtntnncacccagngatttctcattagtgccacaacttcnagacaccntttcaatgtgagagagacacatcgaagttccgccacccaggtcaaacaccaggatgttctctccccctccctcttatccaggccataagcaatagcagctgccgtaggctcgttgatgatcctcataacatttaggccagcaatagttccagcgtctttggttgcttggcgttgggcatcattaaaataggctggtacagtaacaactgcatgggtaaccttctttcccaaataagcctcagcggtttctttcattttagtgagaaccatggcagaaatttcttcaggagcaaatgtctttgtttgcccacctccaatatcaacttgaatgtatggtttagttttcttttcaaccaccttgaacggcaagaacttgatgtcctgctgcacagacgggtcattccacgtgcggccgatgagccgcttggcgtcaaagaccgtgttctcggggttggaggtgagctggttcttggcggcatcgccaatcagacgttccccttcaggagtgaaggcgacataggacggcgtgatgcggttgccctgatcgttggcgatgatctccacgcggccgttcttgaacacgccgacgcaggagtaggtggtccccaggtcgatgccgaccaccgtgcccacgtcctccttcttgtcctcctcctcggcccgcgccgcgctgagcagcagcagcatcgcggccaccagggagagcttcatcttgccagccagttgggcagcagcaggcagtccagccacaggccgtagcacaggagcacagcgcaatttccgacttgcaggcggcaggggcccggggtcacaaggcgccacgaaccaggcgaagggcaggtctagaaatacaggnccgcggcgcttccctctcacactcgcgaaacaccccaataggtcaatctgtctgtgctgtcttggccggcgtcccccggccgt

SEQ ID NO: 312571 - DNA, 904 bp, Homo Sapiens
  misc_feature (55)..(72): n is a, c, g, or t
  misc_feature (786)..(799): n is a, c, g, or t
ggggaataaactaacagctttattaatgaaggcaaacatcagatcattggatgannnnnnnnnnnnnnnnnnaaaagaaatccaaactaacagcattggatttcaaaagtactggacttctgtttcttttaaagaaacttggcatctgtttttataaaacaaaatgggtactcttctcctaaaaaatcctggaaaaatgaaatagtcaatttcaagctgatgaattgaacacacctttctttaaatgcagactattgctaggaagcaaataaagtcaagcctcaaaaagaaaatgtatgaaaaatgcctgaaagtcagagaaaagggatgtagtgaaattactgctaatctttcccccctatattcaaagaccatccaaaactggtctttcataccaatataaaataactataaagagagggaatttgaaaccctacccatctgaaatccttcatgatgcttttgtaatagttctgattctcttaccaaaaaggtcaaagttaaagatgtaggaagtggaagggaatgaagacgtttagttttaaatgtacaagtaaggcacaatataaagccacatcataatctgtcatgaaggatataggaaaggacaagaatcatacatggtacagtagaacaagcaattatattgactggaaaagtgtggcacccaattcaaaactcagacaagatcttaacaagagcgactggacagcatgctttcatatggagacaaactctataaagaatccagtgtatctgaaactaggaaaaaaggtttttgttggnnnnnnnnnnnnnnaaatcatagtagtactagagtcaaagttataattgctttggaacaatgggtttacttgaggtgaattcacaatgccttcacttaaaagtaagattcggccggccg

SEQ ID NO: 312572 - DNA, 2137 bp, Homo Sapiens
  misc_feature (32)..(32): n is a, c, g, or t
  misc_feature (62)..(109): n is a, c, g, or t
  misc_feature (488)..(500): n is a, c, g, or t
gttggagaaacatggtttaattaaaggcaaanctgattttcaacagctcaggtcttcacagnnnnnnnnnnnnnnnnnnnnnnnnnnnnnnnnnnnnnnnnnnnnnnnngaaagtttactacacaaaaccagtttctgataaagattctcctccccctcattactccacagtgaggatgataaggcgaggaatcccgccccaagagtcagaaaacattccaaacaccaaattctcatgcagaatggggctttagataggagctgggtattactgggagtgagatggtaaacctggttagcttgtctagggcgcaagaatcagtgacagttcaaacactggaatgttgcagctgcctgaattgcagagttcaaacacacaaactgggtaatggtggagcggcggcagggggcttcaccttttcagacctttcaaaaaaacaaaacccaaacaccatgtcaaactaaaagagcaataatgtaagcatacnnnnnnnnnnnnnctccaaccactctctctgaagagcaatgagcgttatctcaccccttttcattgctggggttgcccagactgcagtgacaactggggctcctggatgtgctttgctctacagctgtcttccagctcttaagttccacactaactccatacactcgcacacacaacccctcccctctgggacagcagatgggcacgtgtgtgtacacaacatacagacacacaaaggagagacctcccagaaaataaaccctaccactagcacagcaattgaacaattagattgtttccataatttccccttaaaatattacttttccaggaaatgactaacagaaatgctgtccttctgtttctacacaagagcattttcagtcctctttcctcctaataaatatcatacaaagagtttattttcctttctttcgtctcttccaaaatggacgacgtcgtgttttcttctgtgcctgatgggcacatgtccgtgctgccttgaatttcactctgaaagtggaggctgggagactgcagctgggcaggggcctgggccctctgtgggctacgcagatactgctgcttccttcctcttcagactgtcttttgggccccaactgctggaccccatgctgttgcttcttggggagatgtgatgttgcacacattaggaataaaaacaattactagcatacagcattgggtaaaagaagggatggagatggggcaggagggtgggaagtagaatgggggcacaaaaaccaaccaaagaaaaaataaccacactgaaagcttctacctattagaacgtgtcaggctgtgaatggactagcctgccttctgtgagactgcttgctgtgcgactgtaaaatgtacaggaatcaaaaacgtaatttgaaatcctacagcagtctacctgctagtccagcccagcaccaccacccacactgtatcctcgattggggctcgagcacctacagagtgaagggcattccctgctggagtctcctggccagaggaaggcctaccagagccttctgacaggccttgaactctcccttatggaacatttccactggctgaagaggtcggttccccatcctgtcaccaccaacctctcacaggagcagtgaacggggctttccttgctacacactgactagaagcacacctgtgtatggaagaattcagtgtgatattttactactgagagtaataataataaaagatgtttaagaataatttcaactacattctcagtcagcaaagcaatcattaatggattcctattttattccccaaagaggaaaaaaggactgagaagttcccattggcttctcccatctgccttcccttctcagctttcacttcccatgtggctggggacatgcacgatggagaaggtgagaggcggtgataccaagtaactgagtgagataaacagcagttcctctctctctccctccggaaggccccggggggacggagagttcctgatggatttttctttttgttgcactgcgaacatttcgtgcacactcagcgggctggtggaatacttacaccctcttgacagcgagaaacagaaaagagggctgccacctgcaggggactgtgtgcgccagtcctgcaaaccccccggccgaa

SEQ ID NO: 312573 - DNA, 2132 bp, Homo Sapiens
ttttaagaaagtgtacaaactttattgaaacgcacacgcgcacacacacaaacacccctgtggatagggaaaagcacctggccacagggtccactgaaacggggaggggatggcagcttgtaatgtggcttttgccacaacccccttctgacagggaaggccttagattgaggccccacctcccatggtgatggggagctcagaatggggtccagggagaatttggttagggggaggtgctagggaggcctgagcagagggcaccctccgagtggggtcccgagggctgcagagtcttcagtactgtccctcacagcagctgtctcaaggctgggtccctcaaaggggcgtcccagcgcggggcctccctgcgcaaacacttggtacccctggctgcgcagcggaagccagcaggacagcagtggcgccgatcagcacaacagacgccctggcggtagggacagcaggcccagccctgtcggttgtctcggcagcaggtctggttatcatggcagaagtgtccttccccacactccacgtccttcacacccacgtgagggctacgggccaggaaggtggcaggctgggcagagaccacttccttctcgcaggatcgagccttcacgttgcaggtgtagccagccgggcagcagtgctggcgatcctcgcagcacacagcatggggcaactggcagcaggcccagctcccacccaggctcgggcagcaggtctgccccaccgggcagctggtgtgctggtcacagccgatgtctctggggtgggataaggaagcccggcgggcaggcatcttctccagtccagccacgatctcgcttcctcgctgacactgcccctcagctacacacgtgtagccctgggggcagcagtgctggtggtccgagcagcagacagcctctgggattggacagcagccccactccccagacgtgagttggcagcaggtatcggaggagggacagctgctgacattatcacaggggacatctctcttcaaggcttgtgggtctggcaggctgaggtgagctggggccttctccatccagggcacctggtggggcccctgttcacaggtacccttctgcgtgtcacacgtaaaccccgcgggacagcagtgtatgtggtcctcacagcacacagcctgggtaaaagggcagcagccccaggcccccgactgtagacggcagcaggtatagccatctgggcagctcacctccatgtcacatttcacatcccccactgtgtgcgcaggcagcttagtgaggaggtccgtggtagcgttctccttggagaggcacttactctggatcaggtcacacacagtgtcttgggggcagcagtgcaggtgatcggagcagcaggtggcgttgggcattgggcagcagccatacttcccactgggcagctcacagcaggtagaaccatcagggcaccgggaccgtgcgtccggacacatgaccgagctggacaaggccactgccctgttagtcctctgggcagggagcttctttgccagggggtgggtgcccgtgggtgtgatgcagcgggtgtgaaccaggtcgcagaaggcaccgtgcggacagcagtgcaccctgtcttcacagcaggaagcctggggcatggggcagcacccccaggagccatcgaccataacacagcacgtggagaagtccgggcattcgaactgactgtcagggcactggatggcacccacggagttgttacctgatctttggaagcaggatccgcccgtctgcactgcagtggaagccccgtgggcagcagtgatggccatccccgcatgccacggcctctgggaaggggcagcaactggaagtccctgagacggtaaagatgcaggagtggccggcagagcagtgggcatcaacctggcaggggccacccagatgcctgctcagtgttgtgggccatttgtccagaaggggacggcagcagctgtagctggctcctccggggtccaggcagcaggccacagggcagaactgaccatctgggcaccgcgttccagccaccagccctgctgttaaggccacccagctcaccagggtccacatggtctgcctgcgatcccgggaatccggaccggtccagcc

SEQ ID NO: 312574 - DNA, 1009 bp, Homo Sapiens
cccacctttgtttgcggcaggccagcttaaggtgagggaaggttcccgtgggtagcgttttctcccttgggaggagggcactttacttctggaattcaggtccccacaccagttttcttggggggcaggcagtgcagggtgatccggagcagcaagggggcgttgggcattgggccagcagccaatacttccccactgggcagctcacagcaggtagaaccatcagggccaccgggaccgtgcgtccggacacatgaccgagctggacaaggccactgccctgttagtcctctgggcagggagcttctttgccagggggtgggtgcccgtgggtgtgatgcagcgggtgtgaaccaggtcgcagaaggcaccgtgcggacagcagtgcaccctgtcttcacagcaggaagcctggggcatggggcagcacccccaggagccatcgaccataacacagcacgtggagaagtccgggcattcgaactgactatcagggcactggatggcacccacggagttgttacctgatctttggaagcaggatcgcccgtctgcactgcagtggaagccccgtgggcagcagtgatggccatccccgcatgccacggcctctgggaaggggcagcaactggaagtccctgagacggtaaagatgcaggagtggccggcagagcagtgggcatcaacctggcaggggccacccagatgcctgctcagtgttgtgggccatttgtccagaaggggacggcagcagctgtagctggctcctccggggtccaggcagcaggccacagggcagaactgaccatctgggcaccgcgttccagccaccagccctgctgttaaggccacccagctcaccagggtccacatggtctgcctgcgtccgactccgcggtccttgggcagcagcaaccgggtagcgctcagactacagaccccagcgcgatctagaactagtcgacgcgtggtcgacgatatcccggaattccggaccagtaccagcctg

SEQ ID NO: 312575 - DNA, 865 bp, Homo Sapiens
  misc_feature (770)..(770): n is a, c, g, or t
  misc_feature (779)..(779): n is a, c, g, or t
tgaaagtgtacaaactttattgaaacgcacacgcgcacacacacaaacacccctgtggatagggaaaagcacctggccacagggtccactgaaacggggaggggatggcagcttacgataagtcttgtagttgttaaagaaattataatccggattctggtaccactttgggatatctgagtggtatacagatgggtcccatacaattaggattccttcattgtacaaactgtctttgaggaagcgcttctctgtggtaaccaactgagagttcatcaggcgaatggtagtttttgtgcccacatcttgttggaagttggctgtgggtgccccattaaacctcaggactgcgtcatgatcatcgatttctctgcctagttgggaggacttcagagatcccgctgacgacacaacagcacacctgccccaaggcccagccttggtcctaatgctctccttgggcagataaccctcccattcagaggtattgaagggaaaatctgtgacctctaccatggatacattcacatggtctccggagtgggcagcgcagggcctctgcactgaacttgatgcctggtcctggccccttgtaggacactttgtacttgttcatgcttaggtaattcttccagatcttttgcagcctagggataaaggtttttgggaagagctgtccttgtttccacacctgggaaggagggcctctggtttgggccttggttagggcttctggagaattgccgagggtctggcggccctgtggggtncctggggtnctgcttgagggtacagattgggaatcagaccccatggccattttcccagattttttaacaactgggaattccttgggttgcaattt

SEQ ID NO: 312576 - DNA, 1258 bp, Homo Sapiens
gagaacatatattcgacggagttggagggcatctatagtcgggcatacaataaaattttgtaactgtgtatttagaatgccggtttttccccgttgccctcaggggaggaccttttggagtagggcccctgttttttgaaagttttgcgcgctactagaaccctttctctggccggtcctggatttggaattgacttgcctctgtctttgtaaagatctttagactgggatccagcagaggttaagtgacacctttgggcaacccactttatcccccaggtataagtagtaggttgggggtaaaaatgaatgtgtcggagagacatggtcacgttccctgctttataacaggatacccgggctgtaattccattcctgatggtgcatctgtcttggattgatttctctttgcacttctcatgctaaacttctccttcatttcttttaaaattatcttcaggttcttttcttcaggtgttcctaagtatttttggttcacatgaagatagcaatgccatttagctgattcagagccccagtggcaagttcttttgtcaggtgatctgtgagaatgcatcacaaacgtctggggtgcaaacattccacaacactccagacattgaatacacggagcatcaggctgaacataaaactggggtgcaaataggccctgacatttgcctaggcattcatgctccacttcaaaggcactgccagtttcctttaactgggccaatgagcttttagcaggaagtacgctaccattttgaggaaaagttcgtggccgcaataaggcattacataatctttgtgcatcagttaatgtaatcagcccacaggatggggcattgaatggaagtatgcccagtacctttaagatatgaagctggtctgaagtacaccttgaacaatatatgtacagttcatcacacactgtatttatttgctggagtgtaaattctcggagaacagaatttaagacttggggcaaacagggtctcttttctcctccaacttgaaaacaagaaatagattccccttccaacacagtctgagtgagttctgtggagctatctgaagggatgagcaatgggccaggaagaacctgaggtgatggaagaggcagaaatacagtaggcgacatgctttcttgggaatgccgagcagaaaatgctgctggtccacccagcgagctctgactacttaaatggaattgtgccaatgtgtgtttcaaactgggatttagatgccccggccg

SEQ ID NO: 312577 - DNA, 1025 bp, Homo Sapiens
  misc_feature (53)..(69): n is a, c, g, or t
  misc_feature (333)..(333): n is a, c, g, or t
gctgtttcccccggggggcggaagagaaacaccggcccccccaaatcccttannnnnnnnnnnnnnnnnccaagcccctaaaagctcccccccaaagaaagggtgtttcccgggggaaagagttgggaagcccttttcccggggccctttcggggcaagccagcccccagggtgcccccgaaattccaggggcgtcaaggttccgggcccaaggggggtgggccccggggcctcccctcaaagggggcccccgttatttttgtttccccaggccaatcaggttccggccccccagcccggtgggtggggcccttgcaggccccaattaggaantgcccgcaggaggttgtgggaggggacccaagtcccccccaacaatggtcatcttctttttcctactggggcaggttggctccgcctcttagcaccagttgggctgggatctcacctgatgcttcgcttgcgctcccatccgggggggtgcctactccccagggtccgtctggcccccctagcccggcccagcagcacgtgttcccgtggtgagcacgtcctgtctaccacctcagtgctggtgacctccaggcctcggatcagcacagctcttgggggcctgccctctgcttctggagccagctcagggccctcttcctcatagtcctctccacatggggccagggagcaatgggatggggctggccgtggcccagggctgctggggagcagcaaggagctgaggctgggcgaggggctgcggggcccccactgggcccctccactgctggcaccgtctgcccgccgtcgtcggtagccccgtgggctcgcctcctctcccaggtgttgctggatcctcctctctagctcttggcagcgggcctggcagcggccccattctcgcagggctgctgggctgcccaggtccagggccagggcccgcatctcctggaaggtgccggcactgggctctggggcccgccgcagggccagtgcagccagccctcgtgccgagaatcgccacccaggcc

SEQ ID NO: 312578 - DNA, 2023 bp, Homo Sapiens
  misc_feature (899)..(909): n is a, c, g, or t
  misc_feature (1449)..(1470): n is a, c, g, or t
gcagcacctcacatttgatgtggaaacggatgaagaacctcaggggtgggagctgccctttgatgccggacaagccactgagcgcaaatgtacccaatgataagttcccccctccatctgccatcagtcccggggagaacagcaagagcaggttccccccacagtgctacgccacccagtaccaggactacagcctgtcgtcagcccacaaggtgtcaggcatggcaagccggctgctcgggccctcatttgagtcctacctgctgcccgaactgaccagatatgactgtgaggtgaacgtgcccgtgctgggaagctccacgctcctgcaaggaggggacctcctcagagccctggaccaggccacctgagccaggccttctacctgggcagcacctctgccgacgccgtcccaccagcttcactctctccgtctgtttttgcaactaggtatttctaacgccagcacactatttacaagatggacttacctggcagacttgcccaggtcaccaagcagtggcctttttctgagatgctcactttattatccctatttttaaagtacacaattgttttacctgttctgaaatgttcttaaattttgtaggatttttttcctccccaccttcaatgacttctaatttatattatccataggtttctctccctccttctccttctcacacacaactgtccatactaacaagtttggtgcatgtctgttcttctgtagggagaagctttagcttcattttactaaaaagattcctcgttattgttgttgccaaagagaaacaaaaatgattttgctttccacgcttggtttgtggcgtctccctcgcagagcccttctcgtttcttttttaaactaatcaccatattgtaaatttcagggnnnnnnnnnnngtttaagctgactctttgctctaattttggaaaaaaagaaatgtgaagggtcaactccaacgtatgtggttatctgtgaaagttgcacagcgtggcttttcctaaactggtgtttttcccccgcatttggtggattttttattattattcaaaaacataactgagttttttaaaagaggagaaaatttatatctgggttaagtgtttatcatatatatgggtactttgtaatatctaaaaacttagaaacggaaatggaatcctgctcacaaaatcactttaagatcttttcgaagctgttaatttttcttagtgttgtggacactgcagacttgtccagtgctcccacggcctgtacggacactgtggaaggcctccctctgtcggctttttgccatctgtgatatgccataggtgtgacaatccgagcagtggagtcattcagcgggagcactgcgcgctatcccctcacattctctatgtactatgtatgtatgtattattattattgctgccaagagggtctgatggcacgttgtnnnnnnnnnnnnnnnnnnnnnnaagtgctctaacttttcttaaggttttgttgctagcccttcaagtgcactgagctatgtgactcggatggtctttcacacggcacatttggacatttccagaactaccatgagatggtttagacgggaattcatgcaaatgaggggtcaaaaatggtatagtgaccccgtccacgtcctccaagctcacgaccttggagccccgtggagctggactgaggaggaggctgcacagcgggagagcagctggtccagaccagccctgcagcccccactcagccggcagccagatggccccgcaagccttccagggatggcccctagccacaggccctgggctgaggtctctgggtcggtcagtgacatgttaggtagggaagcacttgaaaattagtgtttcccagagcattttgcaacttccctggggttaagaagggacgacacctctggttttttccattaccaatttacattggaactttttctgttaatggggttacaattgaaggaagtttttttaaaaaacacacaccaaaggcactttggggccaatt

SEQ ID NO: 312579 - DNA, 1635 bp, Homo Sapiens
gagactgcatagggctcggcgtgggcagaggtgctgcccaggttagaaggcctggctcaggtggcctggtccagggctctgaggaggtcccctccttgcaggagcgtggagcttcccagcacgggcacgttcacctcacagtcatatctggtcagttcgggcagcaggtaggactcaaatgagggcccgagcagccggcttgccatgcctgacaccttgtgggctgacgacaggctgtagtcctggtactgggtggcgtagcactgtggggggaacctgctcttgctgttctccccgggactgatggcagatggaggctgtggcagcggcagatgtctcaggggatggcccaggcccctcatggggttttgggtgaacttatcattgggtacatttgcgctcagtggcttgtccggcatcaaagggcagctcccacccctgaggttcttcatccgtttccacatcaaatgtgaggtgctgccaccaggtgggtcccccccgctcaggtcctggaaggcttgctcttcatactccagctgtcgcttcagcttcagcttgttggagagggctaccatggccggactcagcacgtctgggcctcgagccccaaaaccctttgcagaccttgtcttgaaggtggagacatggggtggagagacagggggccccaacggcgctgctcccaagaactctgtgcgctgatccccgacggcccactttgtgggcccaaaatgtaatgggggatctgggggccactgggtgttggatctgccccccatggaagagagaggggtgctggcctggccacagcacggtggcagggatgctttgcttccggcatcaaagaagatggaggacatgggccggtgctcgggctctgtcttcttgctctccagctgctgctgaaacttgtccaggaggaagggactgtgcggggctacaggggccagtggctggaagatgtttgtcatggcactgaagcagtgctggggggtggactgtgggttctccgccaagagccgctcctcggggcagatggggcttagctggaagtcttccccgtccatggggatatagggtgccagtgtctccaagtccagctcattgaaatccgtctgggtactgcattggtccttggcctctgtgtccatggcgaagagcttctcaatcacttcaatcttcaggtcgttatccaaagatgtgtaatagtcttcagggctattgggcgtggagcagctgctgctgctgctggtggcactgggggtggtgctgcccggggcagctgcctggggcacggtgaaggcaggcaggctcccagcctcgctctgggtgctgtggctcctcaactccgtggcccatggctggctcgggggcaggatggccttgccataggctgaggactcctcgaagttctgattcccgaaatccagagagatgatggcgtctcctggggtgggagccagctgggccagctcctcgggctcctcctttagcttggtgaataggaagttactcttctcagacacagcccccttgccactgctatcaaagatgctgttcatggccatcaggtggggcttgaacagggattcagtctggcctcgtgccgaattcgccacccaggcctcgctcctt

SEQ ID NO: 312580 - DNA, 829 bp, Homo Sapiens
ttttttttaggatcagaatactttaataagataccagtgtcaaaatacatttccttataaagttaagctcccatacagttataatgttgtcagtaggaattcgacaatataataacgttcatgaaatcgttacgttgacaggtagggttaatatgaagcttggaatatttttcagtgttttagtaaaactgcaagggtaaaatgcccttaatgccagggcaacacacacaggaaatcaaataccagcatttacacgtcagtaacccttcaagttctgccaccctgtgtgggggtaatgccgtgcagctaaaatatgatttacggcaacaccatgactaagggatttctcataggaacttaaatttcttttgaaagctattttttgtttttggcaataagtctatccgggcttactaaatagttggcccaatgtgctttgtgtgtgtttttagaaacttcttcattgtacccattacagaaaagttccatgtaattggtattgaaaaaccagaggtgtcgtccctcttacccagggagttgcaaagtgctctgggaacactattttcagtgcttcctacctacatgtcactgaccgacccagagacctcagccagggcctgtggctaggggccatccctggaggccttgcggggccatctggctgccggctgagtgggggctgcagggctggtctggaccagctgctctcccgctgtgcagcctcctcctcagtccagctccacggggctccaaggtcgtgagcttggaggacgtggacggggtcactataccatttttgacccctcatttgcatgaattcccgtctacc

SEQ ID NO: 312581 - DNA, 731 bp, Homo Sapiens
  misc_feature (183)..(209): n is a, c, g, or t
gatcatggatcagtaataggctacttaaatccctgactgctaaaaaggatttccggtgatctaaacactacttgctaatgtttaaatgaattttaatgaatgcattctgcatttctggaccactagaatttagtaatgtgaaatgaccctttttacagaatatttgcacaattgcttaaaatnnnnnnnnnnnnnnnnnnnnnnnnnnnacattttataaatcatgtcaatatgaaacatctttgatctggttgtcacactgcatttaaatatttagtactgtactttaaatcgctttccattaaatcaaatccaactttattttctttcttacaaaaataccagttatacctttgtggaaatgaactggcattactatttcagttcaataacagctaatcctaaaaccaccctttctcctagccagtagttcctctagatactggtctctgaaaatgcatttgttaaaaacaaaacaaaactaacacataagaaccttccctttgtgttgtgaaacaaccacataatctccacaaccttagtgggatgactgcttgctatgataattcctcgaagacccaattaggaagattttcatcatcagttaaagagagaccacgggaggaaaaaaatatcctcctgttgggcagtataatttgttttgtttgtttatctagggggatcctcaggatgctttggtgctaggggttaatccgggggttaatccgtcg

SEQ ID NO: 312582 - DNA, 1163 bp, Homo Sapiens
cctgataggggcaaatgtccaacatggtataaggattaaatcttaataatagcttatcttaccccaccaaaatggtgagaaattttacatatctgcctttatttagatcatgatgaaggaaaagcgacatgatgatatctctagaagcaaatgagcctaccactttggaatgtgggtttggtctgttctgccagatgttatgattctgagtagaccttaaattctaaacaaattaacaactattctctcaatgcagtgatgttgtctttcatgaaatctcttctccaacttctgtgcctaaaaacatcagtccatgccaggtaccatctatgtacattcaagccaagcctctatttttacaactctcttaggagtcatggaagaacctgccttagccagaggcataaaagacgatcctttgcttcttagggggaatctggggctcttcacttgatcatctgagtctcttcatctgcatcataaaattcttccttttcctcactctcactccctaaagagctctccttgtccacacactgttgggggtccaaagcctgtaaagataatgcttcttctcccagcctgcgatacgaatacacctgaaggtcggagaatgtttctagcagcggactgttaagggtctccggcaataacaaactcaggaggccggaggtcagacccgtggctccgaagacaatgaatggtaaagaccattgcacatatttcagtgaggggatgaagggagcaataatcccaccaactcgggagaacatggaacaagttccaagcccaacattcgtgatgactgtagggtaaagctcagaggtgtagatataaacaatgttaaaggcagcactgatggtcagcttccccagcaaggacaaggaatggctgttcaccactgcaaacacacctgtgtctttcttttctggaagaaacattacaataagacaagccagtcctcctaggcacagaaatgctgataatgttcgcttccgaccaaaccatttttggttaatcaagtagatacagagagggtaagatggaatctctatgaggccagacagggccaggttggcatcaatacttccacctagatcacgcgcactcagagttaggccataacctcccacagctcctcggggcgcgcagacgccatccgc

SEQ ID NO: 312583 - DNA, 725 bp, Homo Sapiens
  misc_feature (337)..(385): n is a, c, g, or t
cgtatgcttgtagatatatagatgttgcagtttgtgtgaaggacaaatctatgctatttatacggtactgatagttgcataaaggtaatttaagatatcatgttaatttcgtgaattgacagcatctttcgatctccaatacaagattactgttcaagatagatgccataaaaggaatagatggcacagaagcaaattctaacacttttgccaaagagtgactttctatccaacatattttcagaaatgactgttagctaggtggtaaaacctgttagggtaaaatttgttatagactaacttactgattggtggcaggctacacttggccctaggnnnnnnnnnnnnnnnnnnnnnnnnnnnnnnnnnnnnnnnnnnnnnnnnncttactgcatatgattaagctctttcaagctactaataaaaatctatactccaagacccattacttttgaaattcactaaagctaaaatagaaggttttgtctagagtcctaccttgtatacctcaactaaatgtgctcctattttacgaatatattctcaagattagctcagtcaacttgtgcatgaaattatgagatatggcaagataaatttcaatcatttttaaaacagcagcagaaatacgtcaatctatattaagggaaatatttatcattacctaatgaggacatgcagtttaaagagtctattaacactctccatttcctaatgtacaagca

SEQ ID NO: 312584 - DNA, 1259 bp, Homo Sapiens
cagcaggaagcactgtcccagatttttgttcatcttttatttctgtgcctttaatcgaaacagaatcgttcttgtcacttgtatccttcaaggccggttgtttctgagaagacactgtcccagatttttgttcatcttttatttctgtggctgtgttcgaaacagaatcgttcttgtcacttgtatccttcaaggccggttgtttctgagaagacactgtcccagatttttgtccatcctttatttctgtggctatattcgagatagaatcttccttgccacttgtagccttcaaggctggttgtttctgagaagacactggattgctatttatagaaagctcttcatgtttctttctttcatattcataaattagttcaaaaatgactctgttcttagcctcgctggcataatcttctgcaagctttccatacacatctcgagaaaacacatcaatattgtgctgcagaagaagaatgactatatctttttctccaagagtaacagcatgtatgagggctgatctgccaagataatcaacggcatttatatttgcttttttctttaataaaaattccaccattttcacttttctttgactcacagcaaggaacagtggcggatattcatcctcgctgcattcttcaatatttgcaccatatgaaagaagtttttctatcatggatgtatcttcattatacacagcgtagtgcagagcagtccttccaaagacatccgtaatatttggatcggcgccattttgcagcagaagagttgcacaagcctcctgcctcagttgtacagccttgatcagaggtgtcctgtcttcacggtcgcagaggttaagctcacatcttctggacaccaggagatgtaccatttccggttggccagtggcacaggccaaatgtagggcggtcctttccttcctgtctctcttattgatgtcataacgcgtgagcagaacgaacttcagttcctccagatcacgatagaagacagctctgtggatccccttcagatgatacggtttaatggggtattggggaaataagaagccatccgagcacaagcggtccctgagggtgggccacctcttcggcttgttgtcttccataatggtcggctgcaaattgtagcctgcagccgtatttcagctcgccttcggggatcgccgcctccgaagagcaacaacaggcaaagcagtctgtccacggaccttcgcacagactctcggcgcctcccgcctcccccggccg

SEQ ID NO: 312585 - DNA, 618 bp, Homo Sapiens
aatggcttgttccccagggagattgatagtacttagggacagctgtggtgttgaatttttcaggaggaatttccttcagtggtccagaatatcctggagcaatgttgtctggatttggagggcttcgtggatctggggtgttgggaggagtcaagggggcttgctgcgaaccaccttccaagttacttccatccactttcccattctgcatagcaatactgtgatttatttgtgctctagattgatactggaaattttcaaatgtgtatttgtcagatcttctttgacgcatcttaaatagcctggcaccacggttactgagatgggataattcttccaacatgatgtctctggggatgctgacctttttgcccaggtccatgccatcaacatcatttccatggacttccttcatgatggctgttgcttgctgttttctctgcttcatcatagtattatgtgatagcatggtttttttgttcccttgctgttagattgtgctttttcagcggggatgaatcccagtttgtggaggaagactctggagatggactatggatggcacttgggcctgatggtttttatccttgaacctgggacagcatggtccctactctc

SEQ ID NO: 312586 - DNA, 1098 bp, Homo Sapiens
  misc_feature (907)..(977): n is a, c, g, or t
cgtggggggtggaagggtctctgcatttgtgggaagcaagaagtctgaggctgtgttcatcattctgaaatctctttccaaatgctatgctccatctccatcgcagaatacctgtctgtgacccaaggattcttcttcccaggggcctctccaccaattctatctgcaatagcagtcacctcctccaagctcatctctcacctactggctttatctgcctctcctctgctggtcaacagccccagaaactggtccctcagaactaaaggtttatgtcgcagttttcagtctgagacctgagcctttcacaagactgctgggagccatttaatcgagcgctcctcccgtgcccgtcacgggtgctggaagctctccctgcccatctttaattccctttgccctccccattttccctctcatggctctgctgagcctcctttgatgctgattgtttccatttgcagcctcttttcctcctgagtcttacgtggacttgcactccaccgtccaggtcctggcagaacacgtgctttctgcttctcatcctctggatccttagcaaaatcagcaccgccctccgcggcttccaactcacatcacttggtaccatctcttcacctttgcttcccattttacagtcggcttcaacactcctttcctcgacttctcaacagtctgccactgttcacttttcagttttgacttttcccacctataattttcccttgtaagacaattatttcaatgcttgtggcatttcattttatgtgaactcctccaggtttgagtgagctattcaggtcctgcttttctatttgtcatcactccttagaagggaaccaatatgtgctgagcccccctcatggacctgttcacacaatcccattcattccttccccgccaaggnnnnnnnnnnnnnnnnnnnnnnnnnnnnnnnnnnnnnnnnnnnnnnnnnnnnnnnnnnnnnnnnnnnnnnnacctcacgctcttcccaggccctgctcctctcctagagctcagggaccacttctgacacttttcttgttttgagatggagtctctgtcacgcaggctgaagtacagtgggtggatctaggc

SEQ ID NO: 312587 - DNA, 1093 bp, Homo Sapiens
  misc_feature (157)..(191): n is a, c, g, or t
tatttttaaaaatacaaaaaggaaaaatttaaatcttcttctttgatgtaactctaaaatgttaactactgtggtcagataactcccatcttctacaatagtaacagaaaatctgtaatctctctagttctaaaattcacaaatctaaactcataannnnnnnnnnnnnnnnnnnnnnnnnnnnnnnnnnnaaaactaatgtgatgtctttagtggcaatagagggtacttctatgctaaatgcaaaactaaaaaggcaaaataatgaaccccaaattattttatttaaaatagcagtggattataaaattagcttgtgtttacatttatgccatttttggtgatagattggctttacattttaaaaaatttatttaaaaatttatcaaatgctttaaaatatgactcctactttttttattttgcaactcctctgttctgtcagagttgttatatacaggagtgtcttatgttactaaaacattccagccaaagaatttcagatgtgagataatgatgtttcatcaataaaaagctataatggttagttactcagaaggagaaacagtgagtgtcttcaagtgaattgttcacctatacaattttattttcatattatccacataactttttctatgttatatttatatatgaatggcaaattttggtttttagcttttacattttattatcttaattttataaatgctaatatttcttttgtgataagttatagcatctcatacagtttgttctatttgaagttttttagagtacttgagaaatgaatttagtctgcaggtagtaagtatgctactaaaatacgttagatctacatccttttatttggtatacacatgcaatattgagaatcacaacttgtttttaagagaactatagattctacacaacctgatttcaagtaattattcatagtatttatagttgtcttggcaaagtgattgtaaaattctgtaggacctattcacacttcttccttcttccatatacttctctggttttccccatagttcccctataatttcaagtttgttgaaacctgttaatttagtgggggattagaagaaaaact

SEQ ID NO: 312588 - DNA, 423 bp, Homo Sapiens
  misc_feature (239)..(239): n is a, c, g, or t
  misc_feature (247)..(247): n is a, c, g, or t
  misc_feature (315)..(315): n is a, c, g, or t
  misc_feature (339)..(339): n is a, c, g, or t
  misc_feature (342)..(342): n is a, c, g, or t
  misc_feature (351)..(351): n is a, c, g, or t
  misc_feature (357)..(357): n is a, c, g, or t
  misc_feature (405)..(405): n is a, c, g, or t
ccagtggtatcagtctctttattggatgtgagggccaaaagggactgtaactcctgtctcaggaatggggatagatgggaggttcttgaagccccaggcgaagctgggtacctctggctacagcttgctctctgagacctggggcttcactcggatcacgccctcctgggcacaggtcacagctaggactccatcctgacgccacagccgcccatggaccagcccccgagagccaccgncccagggntcttcgcattcatagagcatccagtggtcagctcggaagggggcgtggaaccacatggaatggtccantgagaccatgaagtgcaccttgtntgnccactggtnaggcanagttgcagtgcccaagaaggcatagtcggagatataggcggccacagncagtgcatcttcatgtcg

SEQ ID NO: 312589 - DNA, 913 bp, Homo Sapiens
  misc_feature (838)..(839): n is a, c, g, or t
  misc_feature (845)..(845): n is a, c, g, or t
aaaaaggggggtggactttattcttttaaaattcccaatttctctttccaaaggcgcgaatagcctattttacccaatttccgggtgtaaaaataagaattttcaagaaaaattttaattttcaaaatcccccagtttaaaatgaaaggggagggaaaaaatttttaaagaccagggtcttgccagtttcacaaatttattcttttttcagggtggtaaaataaaaattagccttttggttttcattaaagattagagttttcaaataaagtaaggtatattcggaaaaacccaaaggtacccggggagtttgatttttggataggttgagccccaaaattcctgggcaaatcataccacttgcagctttcatctctttcccaccgcttttcctctttggtctctttccctacatctattgagtcttcaattactgagtctggctctagttctatcaattccttttcatttggcttttctggacaaagataggctgggcgggtgagagaggtttcatctcatatatttctgctttggcttgacctgaagatgttttttcaaggaaaggagatgctactggttctggcttgtgttttacttgctggttgtggcttctgttcagctgtgtgacatacatgcgtttgaggaagctaaagtgctgaaatgtaatccactgcttattgacattcctgagaagatgtaagaacttgtgaggggagtcctgtatagttcttctttcaagataccagacagagcctcctacgcaacctgtcaggaggcgtgaggagagagtgtgcggagatgcggccataatttacgagtctggggccgctccccnngggatnccctgatgtcctctctcctcacgggacgctgggcgccgccatcttccttccccgcccccctgtgtccc

SEQ ID NO: 312590 - DNA, 584 bp, Homo Sapiens
  misc_feature (137)..(172): n is a, c, g, or t
  misc_feature (563)..(563): n is a, c, g, or t
ttttgaaactgaaatgaattttaatacagaaaatgaaggcagccattttgcaaatttatcactcaaagggggtatctctatttgaggaaatcagcgtgttacactttgaaagatgaaatgttacagcttgtacaccnnnnnnnnnnnnnnnnnnnnnnnnnnnnnnnnnnnnggttaccaaggtaatgcaggtcaggggatcaaaggtgaaagggtccacacattattaaaaagaaatccaaaaggacggctgccatcatggatctctcattaagtgttcccagcggtgcctctcttttggtaaacttgaacatttcggcagacattcaagcagctttttcggtaaaaagatttttacatgactactattgctgttcccatgatcatcttctataggtggcacggtgttgagaacacagtaggtgctagttccgcagaatacactttgggaaacgctcttcacagcactgagtcccagctgaaatttcatatggcatcttgattaatgtccgtctcccccttagctccataaggacagagactgggtctgtccttcctctcgngtccggcttgttttcggcagc

SEQ ID NO: 312591 - DNA, 546 bp, Homo Sapiens
ataaggatgaaaacacagattacactttattttaaaactgaaatgaattttaatacagaaaatgaagacagcattttgcaaatttatcactcaaaggggtatctctatttgaggaaatcagcgtgttacactttgaaagatgaaatgttacagcttgtacaccaaaatgaagaagtgaaattgaattagaaaatgaaatggttaccaaggtaatgcaggtcaggggatcaaaggtgaagggtcacacattattaaaaagaaatccaaaaggacggctgcatcatgatctctcattagtgttccagcggtgcctctcttttggtaaacttgaacatttcggcagacattcaagcagctttttcggtaaaaagatttttacatgactactattgctgttcccatgatcatcttctataggtggcacggtgttgagaacacagtaggtgctagttccgcagaatacactttgggaaacgctcttccggcttgttttcggcagccatttcccctccgcgcgccacatcctcctcctcctcgcgaccggga

SEQ ID NO: 312592 - DNA, 401 bp, Homo Sapiens
  misc_feature (132)..(167): n is a, c, g, or t
  misc_feature (381)..(381): n is a, c, g, or t
taaaactgaaatgaattttaatacagaaaatgaagacagcattttgcaaatttatcactcaaaggggtatctctatttgaggaaatcagcgtgttacactttgaaagatgaaatgttacagcttgtacaccnnnnnnnnnnnnnnnnnnnnnnnnnnnnnnnnnnnngggttaccaaggtaatgcaggtcaggggatcaaaggtgaagggtcacacattattaaaaagaaatccaaaaggacggctgcatcatgatctctcattagtgttccagcggtgcctctcttttggtaaacttgaacatttcggcagacattcaaggcagctttttcgggtaaaaaggatttttacatgactactattgctgttcccatggatcancttctatagggtgggcacgg

SEQ ID NO: 312593 - DNA, 877 bp, Homo Sapiens
  misc_feature (512)..(522): n is a, c, g, or t
aatataggtcgggtacatatatgcgcgagttattcagagctgaatgtcgtggttaaggagatatggtcgggtggggatgcagtccactattgcgattattgaccatctggcctatggtgggcttgtggaaattgtgatttacgatctccttcccgggtcgcactgcacgggctatctatggggcatagcttggttttataggcggcaataattcgtgtaataaaacggggtgttgcgtcgtcggtaaggggggagattggcgggttggtcttatagggtttattgattgtgtagttttgtatcgcgtcggggtttggcgtggtcgctactccgtaagtgacgttcttgcacgcagtgtgacttatacagaaagaaaaagcatcggtcctaaaaagccaacagtattcatttaaaggcaggtactatactcactgtgttccataatatatgctccataaatatatttcctcctcattcctggacttcacttagaaccctagaactctggcacnnnnnnnnnnnaatccgagaggtggtcgtctcatttttacacatccttgtttccatctcaccaaatgcctctgccttccgtgatccaaggataagtttccttttagctttcgacaacgtacaacatgtagaaaaaaaaggaactcagaatatctatacaaataaaaaagggtatctgagcaactagcaaagtgcaatactacacctgccatttttaagtattcaaagttttcaaaacattttctgcagaaaatcttgaaatcgaaaagtctagtgaggcacactgactggatttcagagtgtcatttttaagctcaaattttgaaatcattatgttcagacaaggtcctgtgtcatcatgaacccc

SEQ ID NO: 312594 - DNA, 313 bp, Homo Sapiens
aaagcatttgcagaaaatatatcatttcattttattcccatctgttttcaaactcgtgatcttaaaaggcattctgatgataaatttagaattttcatctataaaatttagaactctaatccataaagttagaattgagctaatagagtggtatgacatggcactaaaaatataaatttttgttgtaagtcaggattggagtaagctggaaaagtatgtttaggcaaatcttggagaaaaccaaccataaacttacagctctaaaattcagaaagccctaaaatttcaaacactgtttgaaagaagaggcggg

SEQ ID NO: 312595 - DNA, 709 bp, Homo Sapiens
attattggaggctccatcaaacaggttctccttcctttgattaatggaaggagcccagtctttcgggtgtttctcctttgaagtatatcttactaaaatgtcttacctcatgaagttcatttgcaacctcatatgcgactcttgctaatgtatatctgctcactaggtgtctagtttgaggggatgacaagagcatcatttactccctatgctcattcctgaaaccttattttattgcagtggaaactgagatctggccaaagtttgatgatttgcccagggctggcattaaaatacagttctcttctaccacccttttctgtcttcatgctatactccttgagatgatgaccacaagtttgaagtttagtattggccataaagtttggggttgggggctttgcatgcaatggaaatgttactaaacatccaaagtttactgtcttctggatagcatagtaaacaagtaaaatactcatggagcaggaagaataacattttagctattagtaaaaagcattttgttatacaacttctgaataattttcttttaaaattatatttataagggcctttgttttttggttaaatttacaatatatgttagaagaaatctgattaattttatttttacttctttttgcagcagtaagattaaggaaattgtgcattcaattgtatcatcctttgcatttgggtatgtgagaca

SEQ ID NO: 312596 - DNA, 887 bp, Homo Sapiens
  misc_feature (7)..(7): n is a, c, g, or t
  misc_feature (179)..(203): n is a, c, g, or t
ttcaganacataattcagaaatttattttaagcttttcagttaagcggaaagtggggtgggcacatttgtttcttgtttttgttgcacctgctaagtcaaataacaagtgaaagtaaacctaaagttagaaaccaaggtgaaatgaatgatccaggaagggataccatctgtcaaaggnnnnnnnnnnnnnnnnnnnnnnnnngaggcaaagacttggaaagagactaagaaaatgtacaaatattagttaaaaaataaggaatgcttttaattcattaatgtttcctctatttatgaattgccatggtttagctaaggtcaatgacaaggagggcccttgtgttaaagagggaaaattctttattctagaagatattgggagtcatagatttttctgtgctgttattcccagtgtctacaccagactgcagaaccatgattctccctcgcaattatgctcctattaataaggtcttcacttctagccttacagcaagtgtgtggcatggtgcagagccttggagctcagggctgcacacctgaagttaccctttagtaggggtcccctagagtgaatgacagttttgtggctgaaacctacacaaagaggaagaggaatgaggcaggaagacccgtacctaaccataccctctttggactgcagaaaactgatggcaacatctcggggagtggctgcccaccaaagaggaccctgagaaagaaaagagcataacctgggaaatgggctacatgggggcaagggacatggtgagcgggcaaagttgagatggtgttttccttgagtgaatgtctttcaaaactaacaacatactgtgtagttgtctaacatgctgatggaggaacactgctgggccctgaaatccta

SEQ ID NO: 312597 - DNA, 710 bp, Homo Sapiens
  misc_feature (17)..(17): n is a, c, g, or t
  misc_feature (34)..(34): n is a, c, g, or t
  misc_feature (201)..(201): n is a, c, g, or t
aaaaacctgtagggacncagaggaaggagagtcnaggggagtgaggaatagtattgacttggatgaccttttaagccctaaatcaccagtcgtttcgttaaattggctggttcagtggtcagttggttggtgtcaggtgttctgttggtggtcagctgggggacttccagctacagcctatctctgcattgacaacagaanactggtttggcatgatcgtagaaagggaggtcctgtgacactttaacagcatctctgcaaaacacagagtacatgactgctccctcacccagccacggccacctgatctgtttaacgagcacctcagttagccacaggaagtccgctttgccagccggggcatactttatcactgtcatgctttaaatgccccttgatcagtaaaatgttttattttttaatgacctaagaagcagtacaaataacctctaaaacatgaaaaacatttgaaccatatttatatgttaatcttcatataataaaacattatttcaagcaatccccacatacagttgtgtttcagtataacaaatgaatttggatggtccccttggcttttactgtaatagcatttgattcatacaacataattgttaggataagcataattcagatgcctctggaattccatttcaaatttgtaaattgctgagacaactcaatgaacatcaatgataatggactacccg

SEQ ID NO: 312598 - DNA, 1081 bp, Homo Sapiens
  misc_feature (42)..(50): n is a, c, g, or t
  misc_feature (414)..(448): n is a, c, g, or t
  misc_feature (1014)..(1014): n is a, c, g, or t
  misc_feature (1016)..(1016): n is a, c, g, or t
  misc_feature (1021)..(1021): n is a, c, g, or t
  misc_feature (1026)..(1027): n is a, c, g, or t
  misc_feature (1032)..(1032): n is a, c, g, or t
  misc_feature (1037)..(1037): n is a, c, g, or t
  misc_feature (1039)..(1039): n is a, c, g, or t
  misc_feature (1042)..(1042): n is a, c, g, or t
  misc_feature (1060)..(1060): n is a, c, g, or t
  misc_feature (1065)..(1065): n is a, c, g, or t
ttttgagccctactaggaagttctttaatagtttttcttagnnnnnnnnntttccagacacttaacatttcacaacatttcaacagcaaagtattagttgagagaggggttttcaggagttggagattatagaatattaggaagaaatgttggtatcctccattatagatggatggcataggtcacaaatgggagactggcagctaagccaatatcaaaacccagtggaatgacacttctatggagtttacttttcttcctgctatcttccctatcccacggaaatgtctgtcaccatgtaaagcccagtagcaggcagcttaggctccagtcttcccccttgggtaggaaaaggagtgaagggaatgtcactcctgagtttccatgctttcttcttcctctccttgaggtggnnnnnnnnnnnnnnnnnnnnnnnnnnnnnnnnnnntcttctctggtggcttctcataagccttttctgaaggtgttactatcactccatcccaggtagatatttcagaagcaagatagctggcatcaccctcctggccaaggatcttcctaaagccaccatgtgagaggattcggacgagagtctgagctgtatagcagaccatgtcctgctgttctagggtcatgactgtgtgtactctaaagttgccactctcacaggggtcagtgatacccactgaacctggcaggaacagtcctgcagccagaatctgcaagcagcgcctgtatgcaacgtttagggccaaaggctgtctggtggggttgttcatcacagcataatggcctagtaggtcaaggatccagggtgtgaggggctcaaagccaggaaaacgaatcctcaagtccttcagtagtctgatgagaactttaactgtggactgagaagcattttcctcgaaccagcgggcatgtcggatggctgctaaggcactctgcaatactttgatatccaaatggagttctggatccagttttcgaagattgggtggcactgttgtaatnanatctnactgnngcatngaagnanttntttcaaagcagtttcgtnggcanatggtaaaacttagaa

SEQ ID NO: 312599 - DNA, 857 bp, Homo Sapiens
atcccaagccataatggccctaagtagggtcaagggaatccagggggtgtgagggggttcaaaagccaagggaaaacggaatcctccagttccttccagtaatgtggaagagaaccttttacctgtggacttgagaaagcattttccctggaacccagcgggacaggtcgggatgggctgctaagggcactctgcaaatacttttgatatcccaaatggagttttgggatcccagttttcgaaagattgggttggcactgttgtaaatgagaatcttcactggtaggcatcagaaagaaactgattttcaaagcccagtttcgttggtcagcatggttaaaacttcagaaggatcctgtgctcttaggcttttccacgacttttttccccagggcagcaaacagcttccaacgttggcagaatcttgagtatcaccaccaggtcagccacattgtgtcctgtagtcattgtcccctttttataggatcccacctgtcgaacttcttcaatttgcacttcaaatgtccctggagccacaatcagattatcaatcacattgtttatttttgtcaccagagaaaggatagatgcctgttcagcagaattgggagccaggtcctgattcctcttcagcaaggcctcactgaaggaagtttcatcaggtgctggcttgacccggggaaaggccatttcacacaaatagaagtcaaatgggatatgtggtacaaagggcctgaaccctcctcctgggcctcctctggaaccaaagcgcccaccacgaccacggcctctgtcacccctcatggcgccttaaaacacgaacaatggaggccgcaccaaccgccccttcctctccc

SEQ ID NO: 312600 - DNA, 1396 bp, Homo Sapiens
  misc_feature (182)..(182): n is a, c, g, or t
gggagtttactttttttcccgggtatctttccttatcccccggaaaagtttttcccccatgtaaagccccagtagcaggcagctagggttccagtcttcccccttgggtaggaaaaggagtgaggggaatgtcactcctgagtttccatgcttcttcttcctcttcttgaggggggtcttcngtatcctcctcttcttcctctccttcctttttctctggtggcttctcataagccttttctgaaggtgttactatcactccatcccaggtagatatttcagaagcaagatagctggcatcaccctcctggccaaggatcttcctaaagccaccatgtgagaggattcggacgagagtctgagctgtatagcagaccatgtcctgctgttctagggtcatgactgtgtgtactctaaagttgccactctcacaggggtcagtgatacccactgaacctggcaggaacagtcctgcagccagaatctgcaagcagcgcctgtatgcaacgtttagggccaaaggctgtctggtggggttgttcatcacagcataatggcctagtaggtcaaggatccagggtgtgaggggctcaaagccaggaaaacgaatcctcaagtccttcagtagtctgatgagaactttaactgtggactgagaagcattttcctcgaaccagcgggcatgtcggatggctgctaaggcactctgcaatactttgatatccaaatggagttctggatccagttttcgaagattgggtggcactgttgtaatgagaatcttcactgtagcatcagaagaactgatttcaaagccagtttcgttggtcagcatggttaaaacttcagaaggatcctgtgctcttaggctttccacgactttgttccccagggcagcaacagcttccaacgttggcagaatcttgagtatcaccaccaggtcagccacattgtgtcctgtagtcattgtcccctttttataggatcccacctgtcgaacttcttcaatttgcacttcaaatgtccctggagccacaatcagattatcaatcacattgtttatttttgtcaccagagaaaggatagatgcctgttcagcagaattgggagccaggtcctgattcctcttcagcaaggcctcactgaaggaagtttcatcaggtgctggcttgacccggggaaaggccatttcacacaaatagaagtcaaatgggatatgtggtacaaagggcctgaaccctcctcctgggcctcctctggaaccaaagcgcccaccacgaccacggcctctgtcacccctcatggcgccttaaaacacgaacaatggaggccgcaccaaccgccccttcctctgagtagcagacaactgaagaggcgtcttgccggcgtgtccccc

SEQ ID NO: 312601 - DNA, 1038 bp, Homo Sapiens
  misc_feature (976)..(976): n is a, c, g, or t
  misc_feature (986)..(986): n is a, c, g, or t
tggtacggcccggaattacgggatatcgtcgaccacgcgtcggggcggttggtgcggctccattgttcgtgttttaaggcggccatgagggagtgacagaggccgtggtcggtggtgggcgctttggttccagaggaggcccaggaggagggttcaggccctttgtaccacatatcccatttgacttctatttgtgtgaaatggcctttccccgggtcaagccagcacctgatgaaacttccttcagtgaggccttgctgaagaggaatcaggacctggctcccaattctgctgaacaggcatctatcctttctctggtgacaaaaataaacaatgtgattgataatctgattgtggctccagggacatttgaagtgcaaattgaagaagttcgacaggtgggatcctataaaaaggggacaatgactacaggacacaatgtggctgacctggtggtgatactcaagattctgccaacgttggaagctgttgctgccctggggaacaaagtcgtggaaagcctaagagcacaggatccttctgaagttttaaccatgctgaccaacgaaactggctttgaaatcagttcttctgatgctacagtgaagattctcattacaacagtgccacccaatcttcgaaaactggatccagaactccatttggatatcaaagtattgcagagtgccttagcagccatccgacatgcccgctggttcgaggaaaatgcttctcagtccacagttaaagttctcatcagactactgaaggacttgaggattcgttttcctggctttgagcccctcacaccctgggatccttgacctactaggccattatggctgtgatgaacaaccccaccagacagcctttgggccttaaacgttggcattacagggcgctggcttggcagatttctgggctggcagggattgtttcctgccagggtttcagtggggtattcaattgacccctngtgaggagtnggcaaattttaggagttacatacagttcatggaccttaggatcaggagggac

SEQ ID NO: 312602 - DNA, 817 bp, Homo Sapiens
cttttggtatttaaatccatattattaaatatcccttgtttttcatccaggagataccagaagggcccaggtcctgtgcccagcaaagcttctcattctggaagcagagaacctggcacccaaacctagggccagaggtctgtctgccagaccccacagcccaggcccagaactggaaattcctgactccttccagaagggcaacaagcgaggtttcaaacttgctcaattaaggtgccaaggcttgcattcaaattcagctccactcctcactaggtgtattaacacaggcaggcctcatccctgcacaggttccaaggaacagcctggcagccactgaaggtatcttctctcaggtcaggtcccctctagctccagcatcttgggattgctgctgtagaaacactgacggatggcaggcactcttgtgccatgtgctgggtcagggacacagagtgaagccactggtgagaggtggctgtcaggaactggcagctaacacggtcgcctcccagtttcatggacaaagactgcttgaacatgagactcaaggagggacctcagcaggcctggggtgttcagcaactattcctggccggggcatcttgcaaaggagttgctgtgacagtaagctcttccactttgagaccgtcacctcagccacggctcccacctgggctcaggaatggtcaggcaacacgtggggcccaggatggcggtggatgactagactgccgaagaccgcgccgctgcgactacgaagtacggagtacggagtacaggtctgccagccaagactgacgccgcgcgctgcccc

SEQ ID NO: 312603 - DNA, 778 bp, Homo Sapiens
  misc_feature (91)..(91): n is a, c, g, or t
  misc_feature (555)..(555): n is a, c, g, or t
cttcccagaagggcaaccaggggaggtttcaaaacttgctcaattaagggggccaagggcttgcattcaaaattcagttccactcctcaantaggggtagtaacacaggcaggcctcatccctgcacaggttccaaggaacagcctggcagccactgaagggatcttctctcaggtcaggtcccctctagctccagcatcttgggattgctgctgtggaaacactgacggagggcaggcactcttgtgccatgtgctgggtcagggacacagagtgaagccactggtgagaggtggctgtcaggaactggcagctaacacggtcgcctcccagtttcatggacaaagactgcttgaacatgagactcaaggagggacctcagcaggcctggggtgttcagcaactattcctggcggctcagaaatcacttctgaaggagtaagtagaccaggcacatgaagtagatttcattttctccatgaaataatggttcagagaaaacgcaggcctagttccaggaaggcagagttggggtctctgcaacgtgatttaccnggggcatcttgcaaaggagttgctgtgacagtaagctcttccactttgagaccgtcacctcagccacggctcccacctgggctcaggaatggtcaggcaacacgtggggcccaggatggcggtggatgactagactgccgaagaccgcgccgctgcgactacgaagtacggagtacggagtacaggtctgccagccaagactgacgccgcgcgctgcgccccc

SEQ ID NO: 312604 - DNA, 534 bp, Homo Sapiens
cagctctaggacacctactgccaatgccaacagctttgggttcatgaagcagagtggttccgccgccggcctggccatgatcacagccagcggggtgactgtcaccagcaggtcagccacactgggcaaaatcccaaagtcatctgcactcgtcagtcggtctgctggtcggaagtcaagtatggatggggctcagaatcaggatgacgggtatctagccctaagctcccggacaaaccttcagtaccggagtttgccgaggcccagtaagtccaacagccggaacggggctgggaacaggtctagcaccagcagcatagattccaacattagcagcaagtccgcaggcctgccagtgcccaaactgagggagccttccaaaacagccctaggcagctctctaccaggtctggtcaaccaaacagacaatgagaagggcatctcatcagacaacgagagtgtggcttcctgtaactcggtgaaagtgaatccggcagcccagcctgtgtccagtccggctcagaccagtctcca

SEQ ID NO: 312605 - DNA, 563 bp, Homo Sapiens
tatgaaactctcccgcatagtagagccgacagtaaaacttggcattagcatctgaaaattgaagttccacatgaggatttatgagttgcttcttttgcgtatctcctccatctacttcatcttgaggctcaacgccttgattctcggtcccctccttgcctgtctgcccaacctggtagtaagcactatctgctccacgtaaggtctctctcttctgggaagagagatcggggcttttccctgctgtccctctgaagaaggacaacattccagaagcctttttggttggttgtggttctgtttctgttgtacgatttgtctgtcctccactcatttcaggtaatctgatagggctgctactctttggtctgctatctgaagtactatttgttggaagccctttcttgggcactgttccactgagtcgctttagacaattcctctaaggcatttcggtattctttacaactgagagcaaaagcaatgatggagctgggttccttctcgcagactgcaatgggcactcgttcatgttcatacattaagtagtgtttatttggatc

SEQ ID NO: 312606 - DNA, 667 bp, Homo Sapiens
  misc_feature (28)..(28): n is a, c, g, or t
agcatagatttcctcaagtttggaagcnaatgaataatgaggtaatttccaatgagttgaagcatatttttatttatatccttgtgtgtcaacataaatctatcaaaaaagtcttgtgcaagataaaatgtttccctatgaagtgtgtatacttcacatacctctaaaagccagtctagaagtatggacctcatctgtggttccaagtcagaatgcagaacttcaaaatgtttgtcatgaacatatctgctctccttttttaacatgtttagccagacttcttttgaacatccccagcttaaatcaggcaaaggtgaaggattaataaaaagatttttaaatctgtaatttgtaaatctggagaaatcacttgttcctatttctttgtgaggtgtttcaatgataatgcaaggacctgatccccccagataatacaggtggccaacaattcctaatttcatactgatgtttcttggtgacctcctctcttctttttttgacatcctgggtagttttcctcttcttggcctggattatctgggcttcttggggggattccgtctggctgggctggggctgctgcttagcttgtaaacggctacttcgtcttgacattctcttctttcaggtgtataaaacctcgccagaccagctaccgctcggctcc

SEQ ID NO: 312607 - DNA, 551 bp, Homo Sapiens
  misc_feature (201)..(230): n is a, c, g, or t
tttaagtaacctacaaagagcaagataggagatctgcaaataagattttgagtacatagcaggggccagtagtcaccctttcacaatttcattcttggagttccttaacttctggacccagagatcattgaaaacagtgtaagcatgatgatgcacatcttgagaaaaatcttcagaggtaaatccaaacattggattttnnnnnnnnnnnnnnnnnnnnnnnnnnnnnnttcacaaatttaagttacaagaagagtttgcagagaaactatatttgtgacagcaccttttgaggttacatgtatcacactgccctccatccctcccacttccctcactgtatctttttctccattaatgtactctgtattaaagttaagcattgcagtttgccctaagacccaaagattcaagaatgtgacgtgattttgaatgtgtgggtgggtaggagtgtgaaagagtggaaagtaggacagaaaggctcaaaaataaacaaaagaggcagggcacggtggctcactagcagcattttgggaggctgaggcgggtga

SEQ ID NO: 312608 - DNA, 175 bp, Homo Sapiens
  misc_feature (175)..(175): n is a, c, g, or t
aagtggctgttctcattgtcctggcttccccttgagactggggatgaggaaaatcaaacagcaaagaccatatcctgggtgtcctgggtgttgacagcaggccatgtattagggattaacataaaatcgacaattatcaatctcattgaaacttcacaaatacaagtcaaacaan

SEQ ID NO: 312609 - DNA, 728 bp, Homo Sapiens
tttatcaagctttgctgcagtagagtgttccgtatggcttggaagctatttggaaatgtagcaggaacattcaagtttctgacttctgaattagagtaaactgtttccatctcccactgatcaaaatcactggcattaggtgcttttctaacctgaacattgtcaagaatctcctggacacgagtcagtaaagctttcttcctgttaacctgctttcttgcttctacatcaagtgctttctgcttttcttgttgcatttcctttcttttctcaatgttaagcagtggagaaaggatagccactccatgaaagcgaataagtgagatactttcagactgagcagggagaaagctctctgtggatagtgatgcttcttgtattctggcaagacttttttcacagaacttctcatactcctccatcttcccacagtcacacactatctgaaattatcgtgtttatttccttgatttttgtctgtcttcctccaccaaaatgtaagcgccataagtacaggtaccttttcagtcttgttcactgaatccccattacacagaacagtatcagcacacagcaggcactgatcccccacggccccttcagctcctctcccctcgccacgggccttgtcaggaagcgaatggctcaaatggtactgacagagcgcagctcggtccgccgccgccttttcctcctcctccccgccatatcacggatctcccccggcc

SEQ ID NO: 312610 - DNA, 584 bp, Homo Sapiens
atcactccatccccctgggtcgtcttcatcactcttactactatctgaaatcaaatctgtttgttttttcctatagaaggtttgtaaaggccttatacagactcaccactgtgcctcacctgggcattaacacccaagaccctagccctgaaagcccagtgccaggccccagacatgctcccatcccctgccactcagcttacagtcctctttctgtttcctcttctttgtggattcacctttttttgggtgtgagcccagccatggtttaacctttttttggttcttggttatatttaatccagtatttcagatattcagaattgacaacttcagtgttcactcagtctatcacgttactagaaccagaagtgtctccaaccctgtatactatttcttacacacattgacatttgagaccactgagttcaaagaaagaaaagatgatcataatattcatagcagttttggcattcacctcaccctcccatttcctagctgaggatgggagaatgggcggattattttgttgcctttttgttcctccttgcttattgggcgtgcgcccctatttaaatattaag

SEQ ID NO: 312611 - DNA, 508 bp, Homo Sapiens
agaattaataaagtagaatcttttaagaaacatcaaacaagagttgattcccaccattaggtcagaaaagggccattttcaggtcatattcgtctaaatacatatctatgccatgtaatttggtctacaaactcaattctatgccactgtcattaacttttgcaaacaaacttattgatgaatcaaaagaatttgaaaatgtattttcaataatgactcaaattttgtatgggaaattttcacaaggtacatatttatgtctaactgatcactaattatttcaatgtcactagcattctcccaattacagatggtcccctattacaggtggcccaacttactatttttcaactttaggatgagtttatctgagaattgaactcatttgacttatgacatagccccactctaagtcaagaagcatctatcaagttgtgaatcccttacccaaaaatccaattagtcataaagatttaattttcagccgggcacagtgggtcacacctgt

SEQ ID NO: 312612 - DNA, 976 bp, Homo Sapiens
actggttcttctcccaaaaagtgaacaatcccagcaattcccaaaatagggtatgaaaagggatcccacccatatctcccctggcctgtctgcaaatcccccccgtttccttcatcttggacatgctaaaatggaaattacgcagtttctctctatcaattccaatgaagtcttcccaattatctttagggaagcccaggacccacccatgagtagcatacatctggtaacttctccggccttccattgagcccgcctgagggtaattgtcgttcacaaagccaccagccaagtaaatcagaatttacttgatgcaactgacttgtaatagccagaaatcctgtgcaacaatagatctgcccagcatgggattcagaacctggtctgcaaccaaatccaccgtcaaagttcatacaggataaaacaaattcgattgccttttccacattaatagcatcaagcttccccaacaaagccaaagttgccaccgcacaaaaagagaatcttgtgtcaatttctccccaaatatctccagcaaaagaaccatcttctttctgtagacctttaacatattccacaactttatttacgtcaataacattaatactgtcatacagcgtaagaatctggacagcactaagagtgtataaaagatgaggatcatgtccgatactagcacttattccaccacattcatgttggcaagacttaataaatgccagaatctcttctctattcatgcgatgaagttgtcccatgagatccattactgtcagaccccaatagatgccactcattctcaaatactcagacatacagtattcataatcatctttctttgagccataggatgcgatataatctgcatgtttctccaataacaaagtgtccggtgcatctgacttgataataacatccttctgtggagtgcccatgtctaacagggaaaggagagagcagggtcagttcctgggta

SEQ ID NO: 312613 - DNA, 636 bp, Homo Sapiens
  misc_feature (42)..(42): n is a, c, g, or t
  misc_feature (78)..(78): n is a, c, g, or t
  misc_feature (80)..(80): n is a, c, g, or t
  misc_feature (82)..(82): n is a, c, g, or t
  misc_feature (87)..(87): n is a, c, g, or t
  misc_feature (90)..(90): n is a, c, g, or t
  misc_feature (108)..(108): n is a, c, g, or t
  misc_feature (116)..(116): n is a, c, g, or t
  misc_feature (118)..(118): n is a, c, g, or t
  misc_feature (122)..(122): n is a, c, g, or t
  misc_feature (132)..(132): n is a, c, g, or t
  misc_feature (148)..(149): n is a, c, g, or t
tgttattatcaagtcagatgcaccggacactttgttattggngaaacatgcagattatatcgcatcctatggctcaangnangatgnttntgaatactgtatgtctgngtatttgngnatgngtggcatctnttggggtctgacagtnntggatctcatgggacaacttcatcgcatgaatagtgaagagattctggcatttattaagtcttgccaacatgaatgtggtggaataagtgctagtatcggacgtgatcctcatcttttatacactcttagtgctgtccagattcttacgctgtatgacagtattaatgttattgacgtaaataaagttgtggaatatgttaaaggtctacagaaagaagatggttcttttgctggagatatttggggtcccactaagcagctggtctaactggagttaatggtctgctggaacttccagcatgcactgtggtagttatatcagcatatacaggagcactggaacagagggggccagtctaaaagataagggatgaacacagtgcaggccagagagaccagctgcttcatgggatgtgaaaaatctacttttataaagtagggagaaattgacacaagattctctttttgtgcggtggcaactttggc

SEQ ID NO: 312614 - DNA, 957 bp, Homo Sapiens
taattccaaatttcaacagccatttattttgtgcatcatttaattcatgtatgggttctatccactttcatcagttaacattcttgttgacaaaccaatttacatcaacttgctatagaacagatgaaaggtatacatgggggaaaaatcaagtagaaacctagagttattttatgttagctcagttattgaacataacagacacagaagtatacacaaagaactgtagtcagattaacaggacttcagaataaaaagcagaaaataaaataccggtctttattttacaatatgtataattatataatttattaaaattaatttaacacaatatacaaaatattaacagtagtcacttttagattcgataagcacttcaaatacagaaatgttaaaatggcaaaactatactatgcaactttcaattcaatgaatctagctcactagctcaggctgaacattcactctctgaagcacttcttcaggcatgcaaaagacaggattaacaggtttaatctgttcttctcccaaaagtgacaatccagcaattccaaataaggtatgaaaaggatccaccatatctcctggcctgtctgcaaatccccccgtttcttcatcttgacatgctaaaatgaaattacgcagtttctctctatcaatccaatgaagtcttccaattatctttagggaagccaggacccaccatgagtagcatacatctggtaacttctccggccttccattgagcccgcctgagggtaattgtcgttcacaaagccaccagccaagtaaatcagaatttacttgatgcaactgacttgtaatagccagaaatcctgtgcaacaatagatctgcccagcatgggattcagaacctggtctgcaaccaaatccaccgtcaaagttcatacaggataaaacaaattcgattgccttttccacattaatagcatcaag

SEQ ID NO: 312615 - DNA, 987 bp, Homo Sapiens
  misc_feature (152)..(152): n is a, c, g, or t
  misc_feature (909)..(931): n is a, c, g, or t
  misc_feature (944)..(944): n is a, c, g, or t
ccggccccggggttccttgcaccaaaaggtggcggtccccccacaggggggccctgcccagggaggttggtccctgcggaccattggggttccactcaggccgggagaaagggtcccttcccggttggtccgtggggttaccttccgcccgnccgttgggaacgccgggatcatcgtggagccccatccagtccggagggtggagacaacccacgcctttcgatgattctttcggaagctgagagacatcgccaggaaagcatggctgcgccttcttggtggacgaggtccagaccggaggaggctgcacgggcaagttctgggcccatgagcactggggcctggatgacccagcagacgtgatgaccttcagcaagaagatgatgactgggggcttcttccacaaggaggagttcaggcctaatgctccctaccggatcttcaacacctggctgggggacccgtccaagaacctgttgctggctgaggtcatcaacatcatcaagcgggaggacctgctaaataatgcagcccatgccgggaaggccctgctcacaggactgctggacctccaggcccggtacccccagttcatcagcagggtgagaggacgaggcaccttttgctccttcgatactcccgatgattccatacggaataagctcattttaattgccagaaacaaaggtgtggtgttgggtggctgtggtgacaaatccattcgtttccgtcccacgctggtcttcagggatcaccacgctcacctgttcctcaatattttcagtgacatcttagcagacttcaagtaaagaagccatttccactacagtgagaaagcccggatcccaacagttgtcaaattgattagtttgcctaattcatgttttcacttaaaagtatcagaggtgnnnnnnnnnnnnnnnnnnnnnnnctcggactagttnttctctctccctcgtgccgaattcgccacccaggcctcgctcc

SEQ ID NO: 312616 - DNA, 562 bp, Homo Sapiens
gagatagaagcgcgggtgagcgcgctctgttccttaagattagtttaaggtgccttggattgctctgaagagctttgaccacctgatattgcttacatctggaacttcttggcttctcattccccagatgtgcgggtcagagaggattctacaggcaggaaacatcttagaaatcagggttgggcaggcaggatccaggagagtagctacaatgacttcaccagtactggtggacatacgagaagaggtgacctgccctatctgcctggagctcctgacagaacctctgagcctagattgtggccacagcttctgccaagcctgcatcactgcaaatgtcagggagtcagtgatcttgtcaagaaggggaaagcagctgtcctgtgtgtcagaccagcttccagcctgggaacctgcggcctaatcggcatctggccaacatagtgaggcggctcagagaggtagtgttgggccctgggaagcagctgaaagcagttctttgtgcagaccatggagaaaaactgcagctcttctgtcaggaggatgggaaggtcatttgctg

SEQ ID NO: 312617 - DNA, 599 bp, Homo Sapiens
  misc_feature (44)..(44): n is a, c, g, or t
tggcacagtgctcgctgaactccatgagcttcgcgttcttgcgngtttcccaggttgaactcagcttctgctgccggttaacgcggtagcagtagaagatgatgatgacagatatggcaactcccagtggtggcaggaggctgatgcctgtcacttgaaatatgactagcaacaagtcaggattgctggtgttatattcttctgagaagatgatgttgtttttttccttcataatgcactttggagaagcagcatcttccagaataaagtcatggtaggggagcttggggtcatggcaaactgtctctagtgttatgttctcgtcattctttctccatacagccacacagacttcctgtggcttctcacagatggaggtgatgctgcagttgctcatgcaggatttctggttgtcacaggtggaaaatctcacatcacaaaatttacacagttgtggaaacttgactgcaccgttgttgtcagtgactatcatgtcgttattaaccgacttctgaacgtgcggtgggatcgtgctggcgatacgcgtccacaggacgatgtgcagcggccacaggcccctgagcagcccccgacccatg

SEQ ID NO: 312618 - DNA, 600 bp, Homo Sapiens
gcttgtccatgtgggaataacatgaaacaccactcctgaggggcctccaagtgcccgtgaattgtgtagaaccaggaacgagggatgagtcctgtaaacccgagcaaggtgactgatgaattgatccgcaacttggtgggttctagccctctgtcttctctgtatgagacgtttaaagtctcccatcagtagagttattttaggtttacagaatgaaagcatccttcaaatgcattgtagtcttcaagatttgcccagtttacaatggattctctgaagacatctaacagccaggaggaaaacactgcattgtatgataacagttttccgagtatctacttttgggttagttacacatctcaatttcattttgtgttcactattactcctgttcatgtacagatgaaagccactttctgacttcctgatttttgctgtcctgacatgatatttgtagtctagttttaacgcctggccacaagccccgggaagtctccatagcgaaccagattgcagctgctttgtgtggaaaggcccatctgcagaagaggctctgaatccaggaagagcagaagcggctctgaatccaggatgaggacc

SEQ ID NO: 312619 - DNA, 767 bp, Homo Sapiens
  misc_feature (43)..(43): n is a, c, g, or t
  misc_feature (96)..(96): n is a, c, g, or t
  misc_feature (148)..(148): n is a, c, g, or t
taccacggaggtcaggccaatgcctaaacaaggaagagacctnctaggcaccactccttctcctgccgctggcctgccatctccccacaacagctntctttccctgacccactcctgagtatgagtaaagatgaatagaaacactttntaaaacattaaactgttaggaaagctcatttaaactgaaagtcagtggtaatgggcattaactttcctggccccctgcaaaccaagcaaataacagcattgaattataaacagagaatatcccctattttatctcctgactctcctcagcatgccggtctctcactttgggtctttcataaaataaagcaaacaatttccatgtcaatttgagtttgctagaacgtaatcctttttcattatttcatgtattttgttaagctactcaccactgctccttgttttacacaatatcccagctttgataaccgcactatcttgaggtggtttaggagtaaagtaaggaagatggctttgtgaccgtttcagattatttctgtcaatactttcacccacattcatttacttcttctttctgagtgggagtaatgatgggtacgccaccaacaatatcagttctgtaagacacttgctttttcccacattcaccatggcgacttaggttatcagaattaggctgtgagtctgactgctttggtactgtaatttttatagctttgtttaacacatttacccattccactaggtcctgctgatcattggcttgtaggaagtacttc

SEQ ID NO: 312620 - DNA, 683 bp, Homo Sapiens
aaaaaaagggagatgctcttaaacacacacttgtttccactgggtaacagtaagaaatgaggaatttcatttaagccttactgcttcctacaaattgcataatattagattacaccaacatgcaattggccaagtttttaaaaacctgacttgtttttggttgtggaaaacactgttaataaagaagagttatttttgctatgggatggtggctttggagtgttgatttgactgctctgttgactttgaagtaaattcaaagtaaatacattttggttgcatctgagaacaggtgcgttttgagattctccgtgttggtgtagttgggcagggctgcctcacaatgtgctgtgcatgtgacatttgctcccgtgtcacgtttgcctaatgctctgtcacatgaatgccgttcaagctctgttttgctactaagaacttaaaagtaatagtcaacatttgagatgcaatggtcagaggatattgtgctgttgccatctaaaatgttactgtttcttacttttaagactattaacacgtttacaaacgtgccttataacacagtacttattgggtttgtgtattttgtgttaatcacctaatatcattcctttggattaaggtctcttttggaccataaacagaagtatcttaccagctatgcaagtctatttgtgtcagtatcc

SEQ ID NO: 312621 - DNA, 603 bp, Homo Sapiens
  misc_feature (99)..(139): n is a, c, g, or t
tatttccctcaggcacaaacagttttttattaaaagtcaacttagcagctatgcctctgtactctagccggagtggcagagcaaggccctgactctagnnnnnnnnnnnnnnnnnnnnnnnnnnnnnnnnnnnnnnnnngtttaattgccagaagaattccttcactgagaacttgtccatcctgtgtttcagcatcaattcaaccaagagaatgaaggagcagattcaaagtggttatttttattatcttacctccactgggttttcagtcccaatggagattgtgagacctggcaagaccttgagatcagtagcatccctgaggggtaaacacaagactggtccactgtctgctgccctgactttcctacaactcttaagaggtttgcagtccccattcctcatagccagccatagaaatctttccctgaaacaggaaacactttgggcagcagagcttctcatcccattccaggtagacaaccacacccctaaacactcctctccataactgaaggtcagggggtgaagggaatagtctctgctctctgtgaccaggaacttcactcgttcctttccagcatcattcctgctctcaagcc

SEQ ID NO: 312622 - DNA, 1939 bp, Homo Sapiens
ttcagattcctctacagtttattgttatagcagaagttgtgggagacgggagggcaccctccacacatactacagtgtggtcagagccccagggtagccctttccaccctatgccaagccccaagcagcccagcccaagcttagctccctccccagtcccactctagatgcacactgagctaccaaagttagtgcagccaaacggccccaggcccttcctgttgccccagcaccaatccttccccacactcgttcactgcccgccaactcccattccaacttcctttttacactggatgtttctatcacatcctgaggaccactaacccaccagcaagtctccccctgacacacattcacgtaggtccatacccttcagagtcctaaagggttaatgagaagccacctcagctttggtgaatggagccccagccccaaatcccctccccttgcaaatatgggacaagtagggagagtctgatggaggcaccaggacaactacaacaacctcttacccctcagctatagacacctagatcaggacagaggatgcatatgccctctccaccttaacatcaaaatgggggaggaggagaatttaggggtctgggtccctaagagatattaggacatctcttccaggagctggggggaatcacgggttaaaggtcaaggttagggtagcaatcaaagatcaaggtcatctccccgcatgatctgccctttttcccttgcttacggtggcccaatgccccttcagcacctcccaggttagctctgggggaggtgagggctgggtcccactctagggcaacaagggccattcaacaggagacctccatggtgtgccccgggggccccgaagaaagagttccagactcgctgctctgggacagggtgcgagagcgggaccggttgccatcaacggatgctgcactggtcagagaggctgtacgagaccgggacaggcgagtcatgcaggatgaggccatgtagcccatgccttgcaggaagtacttgaaggcctcggtcagcttgcctggctgagtcagctggggctgacctccggagtcagccatcttgaggaacgaggtctgggtggggtccagttttgagttacattccaccactgcatcttcatgaggtgcttggtctcctaccaccagcatcacaggacacctgagggtgatatcacctccacgctcaaagttcaggtctcggcggttgttgtagctgttccagtacaattcaatgttatccaggttgggtgcatgtgtaatgatatttctgtacttttgtatcaactcagaatttccagagagctcttcctggctgaaaagatgtccaaggatcatctccggaatggaagaggtgaggcctgttagcttgtgggctgcccaatccatccaacccttggcattgggatcaatgttgatgaggacaagaccttcaacagtgtccgggtggttaagagcatatctcgccaggatgtaggctccagctccaacaccaactccaattattgtagagaaatttaggtactgcaggacgcaagggatcatgtctgcaagctggtccagagatgggtactgatatcccaaagggaacacaggggctccctcttccattccaggggcatccacatgaacccgcacaaagttctgaatgatttcctgcatgtcctcgaactgaaacagtggctggaagcaagatttatagttgagtcccacatcgtggtaggtaaggatcgctgggcgtttgggtttgggggtgccatagacagtgaaagtgacagagccgtatggtgtctccacagagtgagtctgtacgcctggtaccaggaggattcgggcagactaatctcagcctccttggccgcctcaggcgtctgtcctggcaacagtggcttctcctctgtgatctgcacctcccccggccg

SEQ ID NO: 312623 - DNA, 450 bp, Homo Sapiens
  misc_feature (268)..(268): n is a, c, g, or t
  misc_feature (325)..(325): n is a, c, g, or t
  misc_feature (403)..(403): n is a, c, g, or t
  misc_feature (436)..(436): n is a, c, g, or t
ttcagattcctctacagtttattgttatagcagaagttgtgggagacgggagggcaccctccacacatactacagtgtggtcagagccccagggtagccctttccaccctatgccaagccccaagcagcccagcccaagcttagctccctccccagtcccactctagatgcacactgagctaccaaagttagtgcagccaaacggccccaggcccttcctgttgccccagcaccaatccttccccacattcgttcattgcccgccaantcccattccaacttcctttttacactgggatgtttctatcacatcctgagggaccanttaacccaccaggcaagtttccccctggacacacattcacgtaggggtccattacccttcagaggtcctaaaggggtntaattgaggaaggccacctgaggtttgggggantgggaggccccagg

SEQ ID NO: 312624 - DNA, 937 bp, Homo Sapiens
  misc_feature (893)..(893): n is a, c, g, or t
agaatcctgaaagcatagattttgaaatgtttttttaatgaaaatgaaggtcagagagaataattgccctgaccacatttgcctttcagtaggaggaggctgtgaaatagtaaaattataatcgtttatgccatgataaatacaagattggtaaataaatacattgattggtaaattatgagaatcaaaatgataaaaagagcctgcttttttccctaaccaatatagctatcttaagtatccttaggtttctgtgaagaaccactttcccatgttttcttggcaaaataatgctgtattccactatgtacatgtgaaatgatgttttaaattgataaaagcttaaataagatctacctatacccagtattttcatgatattagaacaaatgggtttttggttatattttatatttgtcaatataatttttgtattcacattctgttacactctgcctattcattgatatatgatattctgtaaatattgtacaatttgatcttttttatggtttaaattagttaattacatacaaattgattggcttatcacaaaaatcatttcatcagtaaaccttgttaacattttgtactggtgacccacctcttaggactttggtcttatccacgtgtatgttgttttcatttggtccaaataatattttatttgtatgggtatcttctaagactaaataggtagttgtgttctttatttttaaaatttctttttagagcaaatgttatgggttcttacccaaagagtcaaaaactatttcttaagaaagagcagagttattcatgactgttctttatacactaaaagcatgcatctaatctaatagtcctcttattatgcttttagttgtatgagtctctttctatgaactgaacancaaactcaggaattggtggcttaattttagatcagtgcttgtac

SEQ ID NO: 312625 - DNA, 572 bp, Homo Sapiens
cggccgggacctttgtcaattttagacataacttttggcatttcccagatttatactatgaacattggggtaatacacttttattttttcacttgctatatgacagctaaggggcaaatgattcaagtatattttaaatcagaagtattcaagttatttttgtataatactgttcagtacttccaagaataagctctgacaacagccattgtttctgcttccactcatattctctacacattttaatacagaaatttttgagagggggttactttattgcttgtgggttagtatgtctcttacttcagttaaggttacttatttggtttgccttaagcattacttttttaactttgtgccatttggtctttactttttatggatgttttcaaggaaactattttatattcaatctagtttatttagtctactgtatttctatttcgtggaagccttttcccctcaaataatatattttatcatttttggacttatataaatgataattaaataaatttttttcttaatactgttggactttgtatatacaagttcaaataactttttcgaag

SEQ ID NO: 312626 - DNA, 647 bp, Homo Sapiens
ggaaaaacgtaatactgctttttattcatgtctttaaagcctttttcagaataagtgccaatcactgatgttgtaaataatggtgccttaactttatatgcttccctggcacttcgtttctgattttttttcctgatttgataaataattagtacatagttttcactcacttgcagcttactaaagacaagaaattatgtacatgtactaatgtttttcccacaaaaaaatcctttacttctgatgtatgaattagttatctaaatagttaagcctaatacctgaataagactcaccaatgtgattgtacaataaattctatcattccattaaaatcctacatttattcccaggaatggtaatttcacctccctacatctatactccactccctcagtaaataagtgaaaattgttaacccatgtgcccattcctgagtagggcagactcttcacaagaggcccatgacaagaattctagggtccagattgaactttaatataggcctttgtctgtgtagaccagtttgtcttgtaaactgtcttacttatgtgtgtaaacattttacattcacatgaaaagttattttcctttatataattggattcagaatcataagggacaggactgaaattattctacagtaa

SEQ ID NO: 312627 - DNA, 863 bp, Homo Sapiens
tctggagtctgggagttcaaaggggagaatctagtaaataacaccggctaaattttgccttcagatgtttggcataaatgatttgtgaggatattggaacctttggctgttttcacaccaatgaaataaattatgctacttgaaaaaaattctacagaacataatgctacacagtcacagtcgactttttgcaaaagtaccagagaatatcttttagaaacagtgcttataaagccccatatactccttagatatttcccaaggatttcttctcttggctagcaggaaaacaatcttaatattttatttattcttcataaatacaatgtatataatataaaacactttgtgcacatgtttccaacaatttcattttctatgcatctttacataaggtagtagctaataactctttctgtggacacgtattttccagttttctaaggtttatgtgttcaagcattgtaaaaacatatttaaaaattgaattaccagtaaaaatattgaatgtacaggtcattatgctcccacaaatacaaaatacattgaaaaattatatcaacagataattacatatgaaatatgaggcatatattttcttctattatttattttctccctaaagagttctaattgattaaatctcaagagacaaaatgtaattttataaaacaactgtattgttcagatttaggagacaacctaagaagatgattctgagtaggtaggatttttgctattactgttatgtgaaaaagactgctcaattaaatgacagattgttacatatctccctaacaagaggggcgaactgatactacaagcagccagaacaacataattagaatagaattccccggccg

SEQ ID NO: 312628 - DNA, 844 bp, Homo Sapiens
tttccaaaatgcagggccgggctctctggattattaagattgaattgccgtactttggttaatggtggcggtgaatctgcgataagtgcattctcaaaattgtcacacagtttacgggattcaagccttacggcgtgtattggaggcagaatttgaaagcttgctgggcaatatcatggtacaggcgctctactctagaattgtttctaagaaaggtccaaacactgcctgtaagactcccacaggaatttaacccatggagttaaaagtaatctgtcagtacgatcctgagtgtcttcaccacttacagcacttaggagaacactctcaggagtttgaatattatctagatcctctatatctaagaccatctgctgagattcttctttagcagcttcagttttttcctctgccattttcaaatatgccctaacaacatcctccagagattttatgttcacctgttgacaaatgttcttatactggtataacccctcctttgccaagtggctcttgcgaagatccacgcaaagttccaagtatttcaacataattggttcgtgtatcttttgccatgttctatgttttttacttttcataacatcataaagaacatccagagcaggctgctttttgccaacctcaagaaattcgttggcgcgtttgagggcattttccggcctctgaaaataggctggcatcttggcggcaggctcagctcacccggcgtcagcgaactctctagtggcccgggccgggagaggagacgaaggggagccagcgtaaggtcccacgcgcctcgccagcagtcgcccgcgcccagccggccagagaccccggccgt

SEQ ID NO: 312629 - DNA, 1690 bp, Homo Sapiens
catgttgtttgcctttttatttggccaaatccatagcgactataactaaaccaaaacatgagctaagtaaatgaaaactactttcttctggaggtttattttggataaaatagttgaagacagactacaatgagacattgtaaaataagactagaaaataatttaagagcgtattttaagcacgggattccgacacactcataaacgtgtttgctcccagctcttacaaaagaaaataaggtttttctccatcaaaaacaacccagttacaccagtaaatcttcccagttctgaaaatctgaagcaactgatactccattaaatgtggaaacactgtctactcaaaatatttgtaatattatgcagtgacaaaaatttcccacacctatatagggttaaccatagttttcagcaaagcaacaagtgctttacttattttgtctttttcagtttatacagagctccaatttcatgaaaccatactgtgccaaaccaggaaataaacagcaacactctagcgaagccacgccagaccaaacggatactatctcctgtcctttttaccagctttcctcttccccagacagcaagtgcttgggcttcatatcaaacacgtgtctatccgcctcccctttcttccccaaccgattcatcttcttctgagcattcttcatcatagtcttggctttcttcaccatcttgacatccctaagaccagaaacgtcacgtggagttcgagagcaactcccactccggggccacagaggacgggggagcagagtcttcccgctttcttttcctagtgatgctccgggatcttcttgcctggactgcgtaatgggcatcgtctttatcgtccatgtcaacaccaagactacgcatctccttctccaaaactgtcctctgaaccttcttagcagttcgcggcatcctgggtccctgtgtattcttttctttggactccagaattttcaacttctttttctctcgaatttgctttgccagctgtcggatttccagcatctcttcgtcttcactctcagatacactgtcatactctccagcagctgttctcagctcttcttctttttctaattcttccaatttcttcatgatggctggatcaatataatcagctatattatggccttcccagatttctggtatcttatcatgtttttcagacaaattcattaaatcccagtacttctgaagatccaaaatataatcatctcccatttccagctcaagatctcgttccctcttcttcctggactcctcagtttccatcctcttcctgcgagccaccactccttcagggatgaaagggggcctctccttatcgtccctcctggttgggatagccaggtgcagtctattcagcacctcattcactttatttcccttcattttggtttccactcgatgagccaaaagcctatcgcaagcctctgttttaactttaataacaccttcctcagtcagggtgctggtctctattacagggaatccttcagactgcaaatctgtaaatattttctgatcatcttcagaaagttcagctattctcttcacatcacatttgttggctacaactatgagaggcttgttgatgaagagaggtccgatgttctggaagagttctaggctgctccctcagcccatgcccacactgctcagaccccggccg

SEQ ID NO: 312630 - DNA, 475 bp, Homo Sapiens
  misc_feature (50)..(50): n is a, c, g, or t
  misc_feature (77)..(77): n is a, c, g, or t
  misc_feature (82)..(82): n is a, c, g, or t
  misc_feature (87)..(87): n is a, c, g, or t
  misc_feature (98)..(98): n is a, c, g, or t
  misc_feature (103)..(103): n is a, c, g, or t
  misc_feature (128)..(128): n is a, c, g, or t
aaagggccccagccatctcccacccaaattcctcggggtgggggggaaanaggtgccaggaaggccacagtccaggnatggnagggnatgccaggaanaatgnaagggccccaagcaccagccagaancccatccccaggggcctggcggaggacacagggtgggggggaaggtggtgcaggaggccacagtcaggatggaggggtgcaggagaatgaagaggcccagcatctccaccagagtctcggggtggggaaggtggtgtagggggcagagtcaggatggagggatgcaggagaatgaagcggacaggcccagctgagccgaagccatgctgctatcttccagcaatactactataataaaaaggaaaacaatccgcaatttaaaaagtgacacaaaccttcatgatggctggatcaatataatcagctatattatggccttcccagatttctggtatcttatcatgttt

SEQ ID NO: 312631 - DNA, 568 bp, Homo Sapiens
gagagatggcgtaacgggaatagttttcaacgtctatttcattccctgcttcagaggacctctttaatctttgattttggtccctgtttctaagaaaagcaactgaaaaggtcgtaataccgcccctgagaaaaaaggagcagcgctaaataatcgagaaaatgcctcctcttgaaacggatatagagatggaaacaagatataagaaggattgagaatcatataatacaggggcttaaacacctatgcgcgatgataaagagggtactattagagcgcttggaaaataccaggaagttgagagagttaacagaagggcgcacgctggattggccacaaaatcgaattactgaagtaagtgcaaaacgacaaattgtcacagaatacggagaaaaggggaaaagaaattaagaggagaaaaagagagatctagagggccggtccaggagatacaatctatgcataataggaatacctgaaactgaggacagagcaagtggagctgaaacaataaaggatctacttgaaaaaattttccagaattgaagaacgaactagatctacaaat

SEQ ID NO: 312632 - DNA, 789 bp, Homo Sapiens
  misc_feature (163)..(163): n is a, c, g, or t
  misc_feature (171)..(171): n is a, c, g, or t
  misc_feature (174)..(176): n is a, c, g, or t
  misc_feature (179)..(180): n is a, c, g, or t
  misc_feature (182)..(182): n is a, c, g, or t
  misc_feature (184)..(189): n is a, c, g, or t
tgggtgggaaatcccaagccacttagttcatggcccgggattttccttaaggaaaacaggctaaggaccatgttccacttacctacctgggccccgcgcgcccaaaacgaagggttctagaaaagcttcttggagggcccgagggcggcccgacaagttttanttttattnttnnnttnntntnnnnnnggttccaaaacaggtttttaattttccccatttctctcggtttataataggtaattgacataaagggggcaaatacagtgacttccacaaaacatgttgacctcaagaacacattacggtagcttcgatcagagaccaggtagatacgtatgaggttgatggcactggaaactagaatgctgcttcagtgctacccacgttctccataagtgtcctaatcagtagtggccttcagtaattcgattttgtggccaatccagcgtgcgcccttctgttaactctctcaacttcctggtattttccaagcgctctaatagtaccctctttatcatcgcgcataggtgtttaagctcctgtattatatgattctcaatccttcttatatcttgtttccatctctatatccgtttcaagaggaggcattttctcgattatttagcgctgctccttttttctcaggggcggtattacgaccttttcagttgcttttcttagaaacagggaccaaaatcaaagattaaagaggtcctctgaagcagggaatgaaatagacgttgaaaactattcccgttacgccatctctgcgcgcctcacgtcccc

SEQ ID NO: 312633 - DNA, 494 bp, Homo Sapiens
  misc_feature (27)..(27): n is a, c, g, or t
  misc_feature (42)..(42): n is a, c, g, or t
  misc_feature (57)..(57): n is a, c, g, or t
  misc_feature (75)..(75): n is a, c, g, or t
  misc_feature (94)..(94): n is a, c, g, or t
ggtccagagggagaaagcccccaagtnccccccagccctccnggccaaccctagccngggtacccagaagccaancccccaggggggaaaatanaaaaagccaaggattgcccctgtaataaatttaattaataaaaataaaaaggggattttaaaccaaccccaacaatccccccaacaccctcaaaagccttgttgccattttttgggtatttgaaggtttttatcctgaaggttaaaagggcaagtgtttggtatagaagagcagtatgtgttaagaaaagaaaaatattggttcgcgtagagtgcaaattagaactagaaagttttatacgattatcattttgagatgtgttaaagtaggttttcactgtaaaatgtattagtgtttctgcattgccatagggcctggttaaaactttctcttaggtttcaggaagactgtcacatacagtaagcttttttccttctgacttataatagaaaatgttttg

SEQ ID NO: 312634 - DNA, 989 bp, Homo Sapiens
ttacaaataaaacattttctattataagtcagaaggaaaaaagcttactgtatgtgacagtcttcctgaaacctaagagaaagttttaaccaggccctatggcaatgcagaaacactaatacattttacagtgaaaacctactttaacacatctcaaaatgataatcgtataaaactttctagttctaatttgcactctacgcgaaccaatatttttcttttcttaacacatactgctcttctataccaaacacttgccctttaaccttcagataaaaacctcaaataccaaaaaatgcaacaagcttttgaggtgttgggaattgttggttgttaaaatcccttttattttataataaattatacaggcaatccttgctttttattaccacactggattgcttctgtacacagctaagttgcctgaagcatggaaacttggacttctccatctgacacgttctggaagcctcaaggcacaagctgacagttctgcttctacagaaaaactctcacactgctctcctctcaacagtactgcctgttcccactactccacatgacacctacgagggcactacatcacgtgagggaagcttcttcatgagggcagacaagaggaggcaccacccaggcactggtctctgcctggcatctattccgagggccacctggcacagtttctaaattaaggcatatctaaaatgcttttctacctttagtttttatttttgctatatttttgcactctactatatgcatatttaataaaaacaactacaaagtcctttactttaattcctttacataatgataaaacacctagatacccaaaatactacatctatatattcaaatctactaatcatgttacaaatgcatgcagcttatttgggggcttagtctaatttttattttcttaggtccatcaataccatgataatgaacattagatgcaaaatcctaacactttctgccttcagttgtac

SEQ ID NO: 312635 - DNA, 783 bp, Homo Sapiens
  misc_feature (33)..(33): n is a, c, g, or t
caaagtcatgagtataaaaatccttggtagagnaaaaatgttgggagattagttgcataaaaatgtggaaatataacattactacccaattacaatagtcaatggtaacctttctccattgtgaaatctctgatgtttaatgaggttggagtattagctaaagaattccccacattcatggagcacacaagcctctcttcactgtggattatctggtgatgaaccaggtgagactttctaataaaggccttctggcattcgctgcactcataaggtctttctccactgtggattttctggtgctcaacaagtatatgcttgtggctaaaggctttcccacactctctgcactcgtaaggcctttctccagtgtgatttctccaatgtttaatgaggttggagttgtaacgaaagaatttcccgcattcgctgcactcataaggcctttctcccgtgtggactctctggtgtctaatgagcctgcagtggtacctaaatgatttcccacattcactgcatttataaggcctttctccagtgtgatttctccaatgtttaacaaggctggagttgtacctaaacaattccccacatacactgcactcataaggcctttctccagtgtgaattctctgatgtctaatgagtgtggagatatacctaaaaaatttcccacaatcattgcacttataaggtctttctccggtgtgacctctctgatgtttaatgagtgtggagctgtccataaagaatttcccacattccctgcactccccggccgaa

SEQ ID NO: 312636 - DNA, 1381 bp, Homo Sapiens
  misc_feature (1086)..(1086): n is a, c, g, or t
gacagttgtgccaggccccttagttttttgagcaaagaaacaaaatcttatggttctcaaatattttcataattctggtaaaatagttattatttaacactggcccctaacaatatttgggaacgctgggagtatcaactcatctgaattaaatacttacatatttaaatatttacacaataaaatttttaagatatacatacattgaaactacagtatgattccatggatgaattagaaacagtctttcaccttttattctgaaacaagacgagatactgcctgcaaagcacttagcatagttctcaaatctaagtggctgttttgtattttaagtcagactgagatatttctagtcaatcatgtgcatacaagttgcaattttacctggacacgaaatgttggaacatgcatcccatgtctagagaaatctttatagccataactagtatcctcaaaatgacgagatacagctcttgctggtgtaacttcttcatcatctgaagagaagacaaacatactctctcttttttctatttcaaaacgtgaagccatctcttcctgacttgcctcttcttcatctcgacattcctgtaactgcctcatcttttccatgagggcttcaacctcaaagaaagaatcacttacagaaacattttctgctgagttgaccggcatctcatccacactgtgattgccatttgtaatgtcacagatgcagtagttgctaacagaaggaggtctgaatgtgtggccaccatcacaatgaatttctggactgattccacagccgaatgtgaatgaggcaagagaatgatagtgtgtgagtaaaactactgcatgtaccaattccgcaagggaccagctgtgctcttcagcttttaaaagtccctcaatgtgttctttggtaataagccaaggtctatgggctaacactttgttaagttctcctaaattctgtagtttttgaggagcattctctaaaccattgagccacttggggtccccaccaacatgaaggaaatcatttacatgcaggttcactaagtaggagcactgatgtcttgccgcagccattattccaantgtagtgacgataatgtaggggtaacggcccatccatttgcagtagatagtgctgagtttttaagaaactttctaaatattgtgggtggaaaaccatcactaacgtaatgttatccaaacggcccaaagcagcaaaagaatctgcaaataaagcatgcatctgtgcgtcttcactccccacttggaggatctccttttctgggatgaatctgcttggtccctgtcctagtggtcgaggaattctaatgccaagttcctcgtcctggtcgcggcccccgccgcactgcttgcagcc

SEQ ID NO: 312637 - DNA, 499 bp, Homo Sapiens
tttacaagactaaagtttattttgcaaacaactcagtcctatcatgatttatttttaacaaaaatgagaactggagagaaattatgtttcaagacttatatatttgtcattatattttagactcattcgttgtttttaagtttttgcctacattttaaacttaccctgcttattcctgtgaaccaaccagcaatctctggctgcagctcagaagcagctaaggggatgagaatgtaaaaatctggatcaatattctagttctgggcaattatcctgcaattcttgtcaggtgattggactaaatagggtgcccatcacctcggaggtttcttttttgggaaagtaagaccaagggagctaacgaaagccaggtcccatgcaccccaatcttagcaggcataactatagctaccagttatctgggtgtgtcacaagacatccttttctctcccttgttggaggaggactcaattccacagcttcacctagcacccggccg

SEQ ID NO: 312638 - DNA, 1339 bp, Homo Sapiens
  misc_feature (39)..(39): n is a, c, g, or t
  misc_feature (42)..(42): n is a, c, g, or t
  misc_feature (45)..(45): n is a, c, g, or t
  misc_feature (67)..(67): n is a, c, g, or t
agcaaattctatccagcatgtttattcacatcactcaantgntancagggctgatagtgcaaatgtncagggtagaccgagctcctttttgccaagtattgtttctttgcataaaggacagaatctaacatagactcaaacagaagaaaatagcccatccactcagatatgataacatctactttttctacaggaagatgaacttcttcaatctttcctttaattagtgtaatagtatcttcaagtttatttagtcttataatatccattgcctggtaaagtatttcagattgatcaactccaagaaccttcttcgccccagctttagcagcaaacatagagagaattccagttccacacccaacatccaaaactaccttgtctttgaagatatgtggattttggtatatgaaatctcggtagctttctgttcgtattttgtcctttagcatttcttcatgtatcccataatgcccgtatgagctgaaataaacaccatcctcatcctcctggaggtccgcaatgacactagtagatgacgagcaggttctgacatctgtgtgcatcacaaaatcctgagcaaattgtttcattttttgcagatcctcacgtgctctggccaatgcggcttcagcagacagtgccctggcttccatatgtttcaatttttcaacaacagatgtattttcactgagtccattggggtatgagaagggtactgacaccggttcataaagatcttctacatcaaattgaagtaaaaggtcatcttctaatactggcttcaaatactcttctttctcccaaggcactgggttgtatatggaattcatgtactcaactgtaggattcttaagtctaataaaatttattagcttaatgtatccataaaattcaagtccatgtttatgaaccatgctgtcaatattaaactgatgctcagacttacagtgtgaaaatgtttcttcagcagatgtgaataacctgttacagaacaggcagggggtctgctgcttgccgtgggggagatctgcatcgtcctcatcctcccaggcggcctcgtccccgctgtccgacagttctggcaggtcctcctcattctccacagcgccccggccgccggtagcgcctgacgctaacgagcacatggctgtggtgccccgagagcccggcgtgtctgggggcggggaccgggttgggcaacgagcgcgcgcagcggccgccgactccaggaacgagcgcgagcacaagcgcgaacccgcggcgggaccggggctccggaaacttcgcagaccgccgggaacgccgaagcgcgcgcgctggctcgcaatcgcttccc

SEQ ID NO: 312639 - DNA, 715 bp, Homo Sapiens
  misc_feature (93)..(93): n is a, c, g, or t
  misc_feature (315)..(315): n is a, c, g, or t
atagtcttagaagccgcatcagtccagtagatgttcttgtacacccaatcaacagcaatggctgcaggattatagacattgtcgatcatttanacatgtctaccaaccttgtcatcaattgaggcactgaagatagccttttggcttagatcggcccagaatagtttctgggcagcaatgtcagcatcgagagccacagtgtttcttagctgttcaactagttggatatattctttcctctctaagccaatcttcctgatgtctcttcgattagtgaagatcagacttgcgctgctttgcactactgccttgcancagcgccagtagcaagatccatttgatagccacgactacattcacacttgtaaccgccttttaagttgatacaaatttgcactgcagattcctggattttggcattcatcaatatctccacaggttttcctatctatcagttcaaacccagctgcacagtcacactcgtagcctataactaggtctttgcagatatgagaacatccaccattatttaccaagcattcgtttatatgacactctttcaggggctcatcactccagtccctgcagtcctgctcctggttacatactttgctgatatctatgcattctccacttctgcacttgattttccagggcccaagcactgattgacatttttgcagttgacttcatcggaaccatcgacacagtctcg

SEQ ID NO: 312640 - DNA, 570 bp, Homo Sapiens
  misc_feature (26)..(26): n is a, c, g, or t
  misc_feature (37)..(37): n is a, c, g, or t
tttgttgtagtcccaaaacttggccntcacagcgtangaccccaaggagcacggcagtctcaggggggcagtagatctcatcgctaaggattccttccttcacttggaggaagaaaagtttctgggtgatgtcctggatgagctcctcagccacatcttcagggtagaacttggcccggaacttgaactggaggggattctccttcctgacctcctgggcagacaccttcttatccagcttcagccaggtaggaaatcctttattaatccacatagtggaggccaaagtaccacacttcccggaggccgatagtctttaccacctgatcaaaaagctgttttccagttgtatttggctggattgcaaactccagctctgcatccatggtggtaactcggacattgattggtttcggcattttcggtttctggtgagtatcctcgatccccgaaaacacgactatccagcagcagcgaagacgctgtcccaacctggagtcagagcagaacccttagagcgcccgcccgccctgcctcgtcctcctgccgcgcccgacactcggcgcccgc

SEQ ID NO: 312641 - DNA, 921 bp, Homo Sapiens
  misc_feature (149)..(157): n is a, c, g, or t
gggcccctggtgctcgcccccttcttaaaatgttaatccctccccgggcgccttccggccccttttttccaaggaggggccaattcttggccagggttttttggcaagttcccggcagcccagggggttccgggcttctttattgggannnnnnnnnggtttttccagtccctcctttagcccggcaggccagcccatacggtcaagcctctaggcgtttggccctccttctgtggccggttccttttttccctccagctgcagggccctcggaatttgctcgaggagctctttctttcccttcttggtcttctcctcatggtcctgcagcggcagcatcactccctccttctcgcgcatcatctggtctttctctctctccgccggtttctctcgttttcttctctgtttcccagctgttgccgctccagctgcttctgatgcttctcctcccgggcctgggccttcatctgctgcacctcgatggtgtcaggcttcctgcggcgcatatacaactcatggttgcccatgcagagctgcaggatccgcttgttgattctcagacgtggggcataaaacacaaagtcaggtgccttcttgtcgatgggtttaatgacaaactttttgtcattgaaagagatgttcctgatttcactccaaggaaagccaatctttggggttaacttatcatctttctcataaatattcagtccaagggcatcaactccaagccaaaggtctgttcctttcttgttttttatctcgaaatagttgattccatacatttccaggtcctgagcaatcttcaggtattccaacatagcattatctttgagcatcccacggtgttccgcatgccacacctggatccggtcctcccactggtccctggtaagtttggcctcgtccgaattgccaccc

SEQ ID NO: 312642 - DNA, 755 bp, Homo Sapiens
ttttatctcgaaatagttgattccatacatttccaggtcctgagcaatcttcaggtattccaacatagcattatctttgagcatcccacggtgttccgcatgccacacctggatccggtcctcccactggtccctggtaagtttgtgctggtccatcactctttgagggatcagccgctcagagctgaggtacccagacttgtgcacttctttgttgtagtccccaaacttggcctgcacagcgtaggaccccaagagcacggcagtctcaggggggcagtagatctcatcgctaaggattccttccttcacttggaggaagaaaagtttctgggtgatgtcctggatgagctcctcagccacatcttcagggtagaacttggcccggaacttgaactggaggggattctccttcctgacctcctgggcagacaccttcttatccagcttcagccaggtaggaaatcctttattatccacatagtggaggccaaagtaccacacttcccggaggccgatagtctttaccacctgatcaaaaagctgttttccagttgtatttggctggattgcaaactccagctctgcatccatggtggtaactcggacattgattggtttcggcattttcggtttctggtgagtatcctcgatccccgaaaacacgactatccagcagcagcgaagacgctgtcccaacccggcgcctgcagtgctccgtgtgctccccgccgcccttgcgtccgccgagtccc

SEQ ID NO: 312643 - DNA, 922 bp, Homo Sapiens
  misc_feature (70)..(100): n is a, c, g, or t
atgcatatatcatcaaggagcattttgagaaagcaattgaactgaccctaaagatgctacttcaattcannnnnnnnnnnnnnnnnnnnnnnnnnnnnnngaaatgccttggtatcaaagaagaattgcctaaaatgcctgtttgcaactccctccctagttcccaccctatgagaaggccttaggctactttcacagggcagaacaagtggatccaaacttctacagcaaaaacttacttcttttaggaaagacatacttgaaactacacaacaaaaagcttgctgctttctggctaatgaaagccaaggactatccagcacacacagaggaggataaacagatacagacagaagctgctcagttgcttacaagtttcagtgagaagaattgagaacttttcagagaagatttatgaaatagctaataaacattgccttttcttttaattctaaacttaatatatgaactataactgttctacggctttttaaatgttgtgaccatttaaccgtgtaaatataaaatattctaggcttcttcacaaataatagggtaaaataaataatcgccataagagtggtagaaataaatctccatggctcaggcaaagagattattttgcatcctggataccagcaatgcaaaatggtatgagatttctaaggattgatcacattgggatgggagatcaagcaaagaaatatttgtagaggaggggaaatgggtctataggggatatacagggggatggattttcaaattggattgattctaagttgaaatcttgaagagaaggtgtggtgacagtggttaggatgttgtgggttcctgacataaagtagttaaatgatatatcttggagctaacctgtgtaagtaaagaactaagtaaggagatgactaaaaatggagtagtttcc

SEQ ID NO: 312644 - DNA, 833 bp, Homo Sapiens
  misc_feature (37)..(37): n is a, c, g, or t
  misc_feature (47)..(47): n is a, c, g, or t
  misc_feature (54)..(54): n is a, c, g, or t
  misc_feature (59)..(59): n is a, c, g, or t
  misc_feature (72)..(72): n is a, c, g, or t
acttggttcctgcccctgtgaaagttagcctaaggcncttctccaanaggtggnaactnagggagggagttngcaaacagcatttttagcaattcttctttgataccaaggcatttcggcaaatgtatagcaccaaataccccataaggtgaattgaagtagcatctttagggttcagttcaattgctttctcaaaatgctccttgatgatatatgcatttgcaattttagccttgatgccttcataatctccaacatcactaaggcagattgcataccacttatgagatgcaaaacttgattcatttttttctagtgctctttttgcatactctagggcttcatacaccaatagctttttctcctcttctgaggttctgctaagctgagctacatcacgtgatgcccgtgccaaacgccacagtaactctgcatcttcactttccttgtattgggttagcaactgataaagtttttctgtttctccgctttcatacaggtagtctgcttgttcaagtatttcttcaactttggctgtggcatgaaccacagcagcctgagagataacctggtaagtttcaaaacccaaatacgacaaagctgagagtaaaaggcctcttttgaaagttcctgggtttcccattacctcgaagccgcggaatcgacaggggccgcaatgcccgcggctgcccgaagtccccgcagggagacgagaccccggggcggctccacgtcggaaaggcagaaggcgccacagtcgagcagccagcgccatgacctgcaacttgcgggctgaccctgcactacttcaggcagctaaggaggcgggcccc

SEQ ID NO: 312645 - DNA, 646 bp, Homo Sapiens
  misc_feature (17)..(17): n is a, c, g, or t
  misc_feature (42)..(42): n is a, c, g, or t
  misc_feature (75)..(75): n is a, c, g, or t
atgcaaccagaagtctnttgtaggactcagggttaccataancatcttaccatcaacaccgtcacccgattcatntgaggggtgttgagactcatagtaactcagtaacaccttatctttcttttcatcttttttcaagtcttcaacatatatctcatacctttcatcctccaaagcaaaagtaatggattgatcattgtatgtgcttagagaagcaagatactctgtaataggtgaaattcctgtgatacttgaatcatgaagtgctctagtatatttctggacccctgatataccaaaggcaaagcactccacagtagactgctgttgacaggcagcgagtaccagatgtcttttgtgctttctacctgttttcagtgaaggccttttggtggtttctctcctaaagtaacaggcctccttttttatcataaggccagagcggagcttcataaagtacatggggcaaacttctttggccttctgttgggattttcccagcttgaaacacaaggctttgcttgctgtgttcttccactttgctgtggaaattttgttggttgaatacttcattttaggcttcatttttcagtattcttgtgatcttgttttgatttcttcccctgaagagctgcagctctgtgtc

SEQ ID NO: 312646 - DNA, 365 bp, Homo Sapiens
aagaaatcataaacacgatcacaggaatactgagaaatgaagcctataatgaagtattcaaccaacaaaatttccacagcaaagtggaagaacacagcaagcaaagccttgtgtttcaagctgggaaaatcccaacagaaggcgcaaagaagtttgccccatgtactttatgaagctccgctctggccttatgataaaaaaggaggcctgttactttaggagagaaaccaccaaaaggccttcactgagaaacaggtagaaagcacgcctttggtatattaggggtccagaaatatactagagcactttatgattcaagtatcacaggaatttcacctattacagagtatcttgcttctctaaac

SEQ ID NO: 312647 - DNA, 527 bp, Homo Sapiens
gtcaataactaaggaaggctttacttcaaccagtctctctattttcatgttttgttcaacgaagttaaaaagcaatttataggtttcatttacttcttttacacagcctgtaatgatgacttcagctgtggtttctgaagttaactcattgatgattacagtgtttggggaggaattttgtttcttaagcaaattgtgagtgagccttttccatttcattgccatgaagaacttctttgttctcaacttcaatgcgcttataatttaaggcactgagcatttgcttttctgcttctaacagggcttcagaagaacagctggttaagagaacagttgtaccctctagctcataaagtgcaagaatcttctgtgctatgaaaagacacttagagaattctttccagtttacctgttgcaaaaactgaaaaatctcaggagaaaccctgaatgtttttctgagccattgtgtacaccttttcctggatttcacactttgctttacacatatctccgggctcgtaatggcc

SEQ ID NO: 312648 - DNA, 719 bp, Homo Sapiens
  misc_feature (550)..(602): n is a, c, g, or t
gaattgcatgctcatatcttttgtatcatctgccattttctcaactgcttcttgttatttccgtattgattttccagtggttctttgtatacagtaatttgcaggagttgtttgttacaaactttataaatatcttctcctagtctctcttaactctgtgctatgatactatttaataacctgggggttttgtgttagtttattatatattgaacatgttccatgtctttaaatatttatttgtttttactacataattttaatggtaataagctggtatttgagaaattgtttcacaaacaaacattaatactgccccctccagcctcatctctcatttccccatctgtggctccagccatccccagggtttcagttgtcttatttgtctgaggaacctcagcctgggtcagaggctcctgtgatctctctgccaaagcactctgtgcttctccctcttgggccttcacacacttatgcttatgtaaataattattaatcatattttcatgatggtggagattcttattcaccactacatcccatcccnnnnnnnnnnnnnnnnnnnnnnnnnnnnnnnnnnnnnnnnnnnnnnnnnnnnnggaaatccacctctgtttcttttaaacacatcctgatagctccataagtttcatcagggtcagtggtttccattgtcctgactgctggccacagtgacctgttctgtgctttatttg

SEQ ID NO: 312649 - DNA, 976 bp, Homo Sapiens
caggcacagtggcagattttctttaatagatatatttcaaacagatacaacaaattaaaaaatctaattcacggcaggtaaacatgggtgctcaaaaagttccacatagacatttacacttgggccatcagtatttccctcacattcccttttgttaagtcccatcttcgcagtggcagtacaggagaaatctccaccgtcaccgcacaatccaccagggcgcattaccacctgaagtgaaggtctcatctcgaaggtgcgctcagccataaaaagaaaacatattacagaaaggaaaaataagtgtgctcttcccacccgcaaagggtacttcaccttcagttctagctttctttacttccaaggtcttctgagtcttccaagcatctctttcgatttgttcccacactaatatgattaggaaatacattctgatgacccccatttaagatgccattgttatagaaatggttcagatgacaattctggaggttcaagagaaactgggcacactcttggaaaccctgggtttgtgcaatgtctgctgctgtcaggccactggcatttctcaggctcaacagtatgcctcgtgtgcagaaaggaagcgatactgaacattcaatgccacaactgtaaggttttcggagaagcgcctgtggcagtttcagcagtttctatatggaatgctccccctttctaggattacttgaaaaaatcaagtcaattcgaattacgtagtcgacgtgagccccattcgccacaagggcactgatgcattctaggctcccagagcgagctgccttgtgaatgggagtttcaccctcacaatccggtttgttaatgttggctcctgcttgaatcagccagaccaggcactgaggatgtcccccaaaggctgcaatgtgggctggcgtctgcgcgtaccgtgtggtggagacgttgagtgtggctcccgctctcaccaactgcactaagc

SEQ ID NO: 312650 - DNA, 630 bp, Homo Sapiens
gagaccgaaattaggcaaagaaatgttttaaagaccccagtgacacaactaggtagtggcaagtaatggtggcaaaagtgatagtgccgagtatcgaactctaattagtaagctggtcagcgagtacaaatacactcctctggacaagaatattgaggctgcctgtgcaattagaccccctcctgtagagatcaatttaatccacgcaattttcctcactagcaccaactgttctaaaaggcaaaattacattactaattttgaaaacaaagttttaggacttttgcctgcttatgtactgcctttaaacaaaacatcctcaactacatctttagctggaaagaataaacgaaagacacttactcgacgtgagccccattcgccacaagggcactgatgcattctaggctcccagagcgagctgccttgtgaatgggagtttcaccctcacaatccggtttgttaatgttggctcctgcttgaatcagccagaccaggcactgaggatgtcccccaaaggctgcaatgtgggctggcgtctgcgcgtaccgtgtggtggagacgttgagtgtggctcccgctctcaccaactgcactaagcactccaacttgccgaaatgcgcggcccag

SEQ ID NO: 312651 - DNA, 910 bp, Homo Sapiens
  misc_feature (851)..(851): n is a, c, g, or t
  misc_feature (889)..(889): n is a, c, g, or t
tcctacttgaatctgagttttagctactgtagaggtctcagacctttcctttttagtactattagccaggtaaaactttggttcttgtgagtggtagggatgagtttttaggacagtattcaaagcctttttaaaggaaccaactactcaaatgctctacaatgccaaaaatacaatactcctgcaggttttcccaagcaaggccaaaacaatcaaaatctgacagaaaaacacagctgttcagctctggaatctgatgataggctactttttaatgtcaggacatccttctaaacttccacttacagtgtcacatgtaagcatgaaggctggctcgttggtgagccattgctttgtttttaggaagacagttatgaatgccatggacaatctcagtacatgttgtttgttatgattttattcacgctaaaggaatgggtattaaaattaagtgcatataatatagaattcagtttcaagtctgaagttagcgtaaatttagattcttcagactaacataaaacatgattttgagaagttaaataggaagatgccttttttagaagtttagcatatttagtttatctcccaaatcttgcttagaaatcaaatgtatataagagaagttagttacagagctagattgattaactacttctttaatgaagatttgctatgaatttgtttactctttcataccaccttcagatagctagtcagttcagcaggagcagagaccaggttagcacgcggatggggtgtaattcagtgtttttgtgttgtacagcctgagaaatgccagtggcctgacagcagcagacattgcacaaacccggggtttccaaggagtnttgcccagtttctcttgaacctccagattgtcatctgnaccctttctattaccatgggc

SEQ ID NO: 312652 - DNA, 1324 bp, Homo Sapiens
gtccgagctgtccgtagtaggaacggtagtagcagcattcatcttctggtaggtgagggtctcgtgctttcttgctctcgtgtacttagtgcatctacgttgctgtgtgtgttacgttagtgtgttcgctctttagtcgtccctcctcaataatatgctactcgtcgctgtggtggaaacaatttcctcgcgatgctcttctcgcgttgttatgggctgcacgagccccttgtcttagtagatgggtgttgcttactcccccggtttgtttctgtggtatctgcctcggggggctcgctcttccagacggcctccattgttctctaaatgggggcacatcacagtgtgtgtggccttgatgccccattttaaagttgggtcccctgccaggctcgcctttaaggggtaaaaccgtgtcttctcggtttctctatggactaattaggctccaaggatacgcctgggccaggaacgcaggagtgggtgatccggcggaaatggcaaagagtttgtttctcacagccctggctgcccgcttggagcccaagcaacaaggatggcacgggtggctctaagctcaggaggttctggtgcaacctggagcacggcgggctgcacggggtccccaatcggagcgctccgcctcctcggatgttagcgcgtagctaccctcatagcgtaccttctgtgcctgttccagggccactgactcctcctcttcatcttccacaatagtcaagtcgatgttgctgtccatccccgagttactccccctggaggtcgccttctcagcagcctcctctgcaatttccccttccaccagagcgctggcgagggacgcttcggaatgaccctctgcaaaggactcctcttcctggtcatttggcatctgctcactgctaggcaggtcttctgacttggtctcattttctgcatggctttctccctctcggactttcttccgcccgaaagtgaggggagaaaccttgaagggggagctttttcctgaggatattttctggtgatttgacgtgagagatttcttaatcttctctctcctctctacagatacgatctttgtccccagcttgttcatctttttctcgatgttctggcgagaaaatgctttcttgaggctatccactttcttcaggctggatctttttattttctctgccctactttcttccaccttttcctcggcactgtcttccagggcctcctcatcgtggggcaaatcatcatctgaggagaggtccacggtgtgcagggtttcctacagggatgtgttttcatccgaaagctcctccttcccttccgcggc

SEQ ID NO: 312653 - DNA, 733 bp, Homo Sapiens
tgaaaaagtaccatcttctatatcttctatcaaatttcctgtaaaatcgagtcttcttaagttaggtatgtctgcaaaatctttggcagtcagctttttaattttgttgaatcgtgcgtaaagataggctgattcctttggtaagggtggtacagcatcaatgtcaacttcttcacagtatacagagccacttaagcaaacacacagcagacacgtgggcatttcatcattttctttcttgggaggtaatggtgttattgcctcatctttttgtaattgaagacttttctcattgggtattatcacagtttctttttccttaatattttttccatccaggtatttatcttcataatcttggctaaatatggattcttccaaaattatctgttcccataatccatagataatgcgtgagtccctgcctgggttggtggtgctggctttatcagaggcacaagcagtaacaggagaagtgtagactgcagagtcttcattttagcaaaaatcaaggtgactggaagttaataaactagtggcctgctgactgtgggacaaaactctctttttcccgttgtagctgttttgaagttttttgtggttttcctcaatagatgttcatgtctgtgcattagccccaagtgggagggtgaatgagaaaagctatgtcttgatttcaaactgctgagtaaaatttcagggcccagcagctttaagaacagtttccatgtgc

SEQ ID NO: 312654 - DNA, 1565 bp, Homo Sapiens
  misc_feature (28)..(28): n is a, c, g, or t
  misc_feature (52)..(53): n is a, c, g, or t
  misc_feature (72)..(72): n is a, c, g, or t
  misc_feature (98)..(98): n is a, c, g, or t
  misc_feature (101)..(101): n is a, c, g, or t
  misc_feature (113)..(113): n is a, c, g, or t
  misc_feature (207)..(207): n is a, c, g, or t
  misc_feature (209)..(209): n is a, c, g, or t
  misc_feature (214)..(215): n is a, c, g, or t
  misc_feature (229)..(229): n is a, c, g, or t
  misc_feature (231)..(285): n is a, c, g, or t
  misc_feature (299)..(300): n is a, c, g, or t
  misc_feature (322)..(324): n is a, c, g, or t
  misc_feature (327)..(327): n is a, c, g, or t
  misc_feature (334)..(335): n is a, c, g, or t
  misc_feature (1071)..(1071): n is a, c, g, or t
ggggccgcgccgcagggaggcgcacganggaacccgggccggggagaggganngaggagccgcgcgaaaagngaagggcggcggcccaaggcggaggncanaaaccgcggggnggcgcccagaagcacacgaaggccccggagcgcccacgcgggaaggagggccagtcgcccaaaggggaaaagcccgaaaagcgcccgggggggngngcagnncgggggagcccccncnnnnnnnnnnnnnnnnnnnnnnnnnnnnnnnnnnnnnnnnnnnnnnnnnnnnnnnggcccccggccccnnccgcgggaggccgggcggcccnnnggnccgggcnncagtggggtctgccgagcaccaggcaggagtggtgtggcaggcggtggctgggagggaggggacgcccacaggggtcctagaggtggatccacttgttccagttgacctcgtgggggaacacacggcccagccggagggtacagtccaaggtgggctcatagaaagccatggggctctcgtccaggctggagggcacttccacctcttccaccacgggtgtagagaagagcgagacaggccttggctttctcagccagcgcttccggatgcagccgagggactccaggccctggagcaactccagcacggcgacgggctgcaggaccccctggtagtggcgcagcagggagctctcggggatgccaggcctggtcatgatgtggtacagcatggcctccatcatacccttgcatacaggaaggttcaggtggccatccacgacacgccacggccggccgatgaagcagacactctcacagtccctttcccgtgctgcctgggagatgttggcagctccgaaactctctgtgaaccctctggggtcttcagagccctctggaggctgcgcctggccgctcagctgctcttggcctggggaactgaactcaccgacaccctcttggtcttcctgtgctgctcccgctgcagcggtgtcttcaagagctgggggtggagatggggcctgggcttctgccccatcttcagctccgggcccaaggctgggggccaaattgnagtcctggagcgctggcctcttggcaggggtcatctgggtgccctcggcgtcggtctccccattctcactggcccagctggcgcgcctcttggtgccccgggggctgtgagaaggaggtgcctgcccctcgggggggctgtcctcactggaagacccctccaggggtctggcctgggggtcttctctctggatgtcggcgtcttctctgtctttcagccgcacggagtgcaggagccaaggccaggcagagcccatggctaccaggcgcgcagtgttgccaccgacctccagcacctgatgctgctccaggagggcctggatgcaatctgcgaatgtcctggtgcgcccaccacctgccttctccaaggccgagaaccgtctgcgcagctcctccttgtcaatcccaaaacaacccgtggctataatggcttccaagatctccaaggcagcagtcaggtcttcgggactatacccagacagctccagctggaga

SEQ ID NO: 312655 - DNA, 1009 bp, Homo Sapiens
actttcccccgtgtgccctggggagaattttggcaattcccgaaactcttctttgaaccctttgggggtttttcagaccccttctggagggttccgcctgggcgcttcagctgctcttgggccgggggaaactgaattcccccgccaccccttctggttcttcctgtgctgctcccgctgcagcggtgtcttcaagagctgggggtggagatggggcctgggtttttgccccatttttcagcttccgggcccaaggctgggggccaaatttgagtcctggagcgctggcctcttggcaggggtcatctgggtgccctcggcgtcggtctccccattctcactggcccagctggcgcgcctcttggtgccccgggggctgtgagaaggaggtgcctgcccctcgggggggctgtcctcactggaagacccctccaggggtctggcctgggggtcttctctctggatgtcggcgtcttctctgtctttcagccgcacggagtgcaggagccaaggccaggcagagcccatggctaccaggcgcgcagtgttgccaccgacctccagcacctgatgctgctccaggagggcctggatgcaatctgcgaatgtcctggtgcgcccaccacctgccttctccaaggccgagaaccgtctgcgcagctcctccttgtcaatcccaaaacaacccgtggctataatggcttccaagatctccaaggcagcagtcaggtcttcgggactatacccagacagctccagctggaggacaaactcctccaagctgcaggtgttttcctgggggtttatcagcttggtgaacgtatcagggaggcaggaggttcccattgttagctcttccagaggagcggcagcgggcctgagccgggcgggcacaggggtgcagcggagctggaacttcatctggcaggagttgaccacaatgctgtcgttggggttgaggttgcgggtgctgaccctcgtgccgaattcgccacccaggcctcgctac

SEQ ID NO: 312656 - DNA, 1613 bp, Homo Sapiens
tatgactgaactactataaatccacaagcaacggttcagacacggtgcttctgaagtgtttcacccctccccgccaggcgcaagctgcatcaaggagagggtggactcccccacctctgctcaggcatcaggagacagatagggccgttactgctgagcgccagcggcagctggaacaggcatcccaagggggttggcagcagcaatcactggtgagcctgccagaggtccaaggggtgaaggggttggcactgaagaaatccctgacatcatattggcgctgctgacgggcgtactgccccctggcatgctagatgaacccattcgagcctggtccttcacaacagtgtagaaataggggtgctccattgcctctcttgcagtaagccgtgactggtggtcatatcgcagcagtttgtccaggaaatccaaggcctcagggctgacaaggtgctgattttcactgtggacaaagcgttcccatcgctttcgagagtgtctgcccaagatatcattgaaacgtggatctaattcaatgttgtatttgtcaatatagtcatataaatcttctgtccccagaaccttggctatcctcaccaactgatcataattgtcatgtccatggaaaaatggctccttccgaaagatcatacttgccagcatacaacccaaactccacatatccaaactataatcgtacatctgatagtctacaagtagctcaggacctttgaagtatcgggaagcaactcggacattatattcttggccaggatgataaaactcagccaaaccccagtctattagtcgtagctttctgtgctcatgatcaatcatgacattatggggcttgacatctctgtgcataattcccatgctgtgacaataatccagggccttcagaatctcatacatgtaaaatcgaatatcatagtctgttaacgtctggtacaattgcttgaagtctgtgttgtttacgtgttcaaaaaccaaggcgggggttcgtgacacagggtcttttacaatgtctgccagtgtgatgatgttgggacctcctctcaaattctccaaaatctttatttcacgcttaattttcttcttttttactggcttgagaattttaacaacaactttttcattatttgtgatgttgatggcttcaaatacttcactgtatttacctcggcctaattttcgaaccagctggtagtcatcttgatttccccattccaccacatgtgactcgtaatcccagtattctcgaggtctgtgtgtattaacatctgtgtaaactctggccctgcttggcacgggtcccgacatgtcagacaggttggcggacaaagctggacttgatgtttggagatctggcagtcactgtgttcagaagcagctgggggtaagaccttgtttcagacctgttttcttcaaacaaagagatgtgaaactagtcagtatgggtgaatgatgtttcttggagattttatgaggttccacgctgcatgatttaccatgtgatgagcacactgctttgacaagccttgatagagctgtggtggaagcggcagcggcggcggccgctctcccctctgctcacacagacaatatggccc

SEQ ID NO: 312657 - DNA, 689 bp, Homo Sapiens
gtgatcaagtagctcaaaaaataactacttcatagaaacttgtatgcccagtatgagcatttcatgtccttttctgatatgtgaacaagaaaaggaaaaacatgcctagggtgcatatggtgttcaggaaaaacactgccaacaaaaggttgtcttaaaaacatgtatatatgttgcttagaaatccaccatgaaacagatttccttttctttctcactcagatttggaattcagagtctctgcaagatgtttttccttgtggaaaaataaataatctcctttggaaaccaaaaaagaaatcttttcatgttcacagaactaaagttactaaattctgtgatggttctttggcttgagtgttctatatgtcagtggtccttactctgatttgttaaggaattaattatgattagaagagcacaagaatgctcactctttgaggatcttccaaggttcaaaagggagtgcttcaggttcataggagtctcaaagcctcctgggaatacagcattgattttaaaaaatgattagggattgacaaaacctagctaacaatatcctcagctataaatccaaagagatttagtcacaagtaggttgcacttgattttgcacttgattatgctacaagcaacaaaattataaaaataaattttgtgttttctaatctagtggaaatatgaacatg

SEQ ID NO: 312658 - DNA, 928 bp, Homo Sapiens
  misc_feature (732)..(787): n is a, c, g, or t
tggaggtgttgccgcccaacctataaaagggactttttttgcaaaggcctttcccccactattggggtgggagaaaaaggatgaaagtctctccccgaatttaggggatttttaaccaggaaaaggtaattcccaggggcccgggggaatcccgttcttttaattttatccaagttcccttttggaaccaccctgctggatggaggaaattaaggttctaccaaaaattccttaagccaatatgcttgttacgggcccagtaaattagagtctggggtactgttccagccagaatgtccaaaaactttaaaggagtccctcctgaattccttcagtaatgggagtcatgccactagagagatgggcacttaccaaaggaaaaaaatggagaaatttgttcagctcgtattttgggggccaggaattgaagaagttgaactgctgctaatcgtacattagcatctttatctgtaaacacagcagtcacttcacttaatatgtttgaaaggtgtgcatcaattataaatgggtattgagacaaaaggtctttaagtccaagaagagcactttgtttaaccccagcattgtagtgatgcatctgtgacagcaaatcctttatgttaagttttctattgtttgttggaagtgttccatcctctttgagttgctcaggcagatgtatagtctttgttttaaagtttgtaggagtagcattttgtaacttgggcttcnnnnnnnnnnnnnnnnnnnnnnnnnnnnnnnnnnnnnnnnnnnnnnnnnnnnnnnnagtcattctcgactactgaggacccggccgcggccggggcgagaagcccgagaagacaagcgagggagcagaagcccacggggcaacagcgtgcgccgccgacctcaggctttagctcccggagcgtgttttcaaatagcc

SEQ ID NO: 312659 - DNA, 1079 bp, Homo Sapiens
  misc_feature (276)..(286): n is a, c, g, or t
gggttctttatataactttcatgcgattatttagttttttaaattaataaagtgaatttaagaaatattgaaataaacatctaagtaattgccattttaaacccttgtttcttactgtgggagagggggaaatacagcactcatttcttgtttttaatttgcagaagtaagtgaaaatctatgtaaaatcaaaccaaaagagttggactgagtgtgtattgtcttgagattaagtgacaaatagtaaagtgttactgagtaattaagcccatgtannnnnnnnnnngtgagttgaaaatctttgaaatatgtgataaccgaatgtcaaaagttcctaaactctaacagtgcaggttgttcactgtaacgaggtaactcatatttgctggttacataaactacaagtactgctctcacaatatgggactttgaactgtgatgtagttcaacagttgccggcatcctctcagctgatacgctgcgaatattttgggttagacttgcagccagatgcagttttgcaacccaagaaaaaagttgaacctatgatcaaaaactgctcccaatatgaacctggaaaaaaatcaggtgagctcccttggcgatctgcaggaacactagtaatgactggaattactccgtgatctttgatgactattacacataacagcactctagcaccttttcttactggcatggacttcctcatggactgctacttcatggatgatagcttcattgctttgggtagggatttaaggtagtcaaggggaaaatacgcagttttattacaggtcttaacatcaggcaactttcaactttaaaaccctttgtgaaaaatgtggttatagcactatagctctgattttaggatggttaaatgttatattcattgttggcctaccttatcaaactgtgccattaatcctttcacagacataggtaaggaagagaacaaccagtggattcaggggacaattatctatctccaaataataggcttttatttcttgcagctaactttttcagtgattctagcagatgccatctagtacatccttgatcttgtttgtttcgtg

SEQ ID NO: 312660 - DNA, 1173 bp, Homo Sapiens
  misc_feature (588)..(588): n is a, c, g, or t
ggacagtaaataaatattattttgttatgccaaaaatatagcgagcagcttcatggttaataatacatttatgttgacacctccctaatccaggaaacattcacaaacaaggactcccatatacaaatactttaggaagagagatttcccaggcagatatcaccaaaaatgttttcactgtaggaatcacaaaataagtttttgtcaaaataactgttgttgaacgttatactggtcttcctcactggtgattgataagctcctttctatctagtttgtggtacttccttcattttccctagaaatgttacttgttaaatgtgtcctcaggcggtttcatctttgttgattctgcccatctaagtcataagcttctcaaatgcaagctactagctagttacacttgtaagttttccataatgacatgattttaaacataaagagttcataagaatcacttggagagactatttaaaaatgagattcctaggcccacctcagattgtgataaatctgtgtgactgactgatgcagactttttctggactataataactgatgctgctctactgctttaatacaggccanagtaacgtggaagcgcacagcagaaaatcttcagaaagacatcaggtttgttctgattttgacaagggtaacttcttctttattaaagcaaataactggacataatcttaaaggattccacctccatcgtctttcctaacttagatcttcattgagaaattgggcaaggttaagtttacttttttctagtgctgcggttttggctcgtgttggtagtctcatcttcatttctgattctggttctggaacttcatgatcactttcagagtcggcttcagcagtctgacacctcctgttcgtcctagctgaaactgtcacttttctctgtcctctgttagtcgtttagctgagtagacgtttgatgcttgggttgcttttacacccctgagtggagtcatatatacttctttattctgtttcatcttcattttggaaagtagttgtagtgcaaggtggcatcctgtgctgcttcagcttggtcaccgaattctttatttcctttttctgactgaatcttgattttctccaaagctctcagacatgtcctatcttttacttgctccagaatctcattcaatagaacca

SEQ ID NO: 312661 - DNA, 813 bp, Homo Sapiens
  misc_feature (571)..(683): n is a, c, g, or t
atttctgtgcctttctgtcctgtatttactgtatttagaaaaagcagctagaatatttctccattaactcttgagattcacaggactgtctagctctgagtcctagcaatagactccttagaggagtagtacgtttatctagattttctctagataatgcaggcggaagacctggggttcccgggtggggcattgcagttcttcctgtgtttggcttccaggaattacatgaacgacagccttcgcaccgacgtcttcgtgcggttccagccagagagcatcgcctgtgcctgcatttatcttgctgcccggacgctggagatccctttgcccaatcgtccccattgggtttcttttgtttggagcaactgaagaagaaattcaggaaatctgcttaaagatcttgcagctttatgctcggaaaaaggttgatctcacacacctggagggtgaagtggaaaaaagaaagcacgctatcgaagaggcaaaggcccaagcccggggcctgttgcctgggggcacacaggtgctggatggtacctcggggttctctcctgcccccaagctggcnnnnnnnnnnnnnnnnnnnnnnnnnnnnnnnnnnnnnnnnnnnnnnnnnnnnnnnnnnnnnnnnnnnnnnnnnnnnnnnnnnnnnnnnnnnnnnnnnnnnnnnnnnnnnnnnntcagtggaatcccccaaagaaggtaaagggagcaagccttccccactgtctgtgaagaacaccaagaggaggctggagggcgccaagaaagccaaggcggacagccccgtgaacggcttgccaaaggggc

SEQ ID NO: 312662 - DNA, 1615 bp, Homo Sapiens
  misc_feature (93)..(93): n is a, c, g, or t
  misc_feature (111)..(111): n is a, c, g, or t
agaagcaaatcaaaaccagtcaccaggagcaagagccgaagtgggcgcacggctgtgcacacgccttgacaccacaagcacacagaacggccncctacaacgtccatacgnctccggatgtcctgagtggagagagttgtgtttattccccatgtcatacgcgcatatagggaccctctatttaggagctggtggcctgcactcagcactaaaagtcaggattccctacacaagaagctgacgggattcaagttctgagttttcatacatagctttaacttgtattaaacacatgtttatttacaacgtggagagagaataaggggcagttaaggccactttctcctgtgaaacactgcaaaatatgtacataagtacaacctaatataggcaaaggttctaaaaatcatctttcttggcttcacgtaattgagtatcagtcggggagtggagagcggctgccgatagcaccaggccatgccaggccacgccaacaagggcgtgtgcattcactttttcattgagctgccctcagagctgctgccgagctgagccctgcacgggcccaggtgtgcgccgcaccccagaccggtctgaagcacgtgtcaccggtccctcagttccatttccaaatccaccaaggtccagtcgacagacatttccaaaaagaatcctgttctaggaccacttgcgctgagagcacacccgggggtcaaagggcagccaccgggggtcaaagggcagccatcaggtactccccagggaagggcttgcggccaccagtcactgcaaccccgcctcacctccgatgcctgctgtgcccagggtggtcccgctcatagcgacggcctgtgcgttcatacgacctcgagcgctctcgtcgctgatctctgtagtaatgacttttcttcttgtattttcccggattatccgcccgctcccgtgacctgcttcgagaacgggaagaactccggctccgagacttgtgtggcttctgggggtacttgcagtccttggacttccgggagccccgaatctcagagcctttgtagggagcgctgcggggggcctgtctcggtggggagtcactcctgctccgggagcggctctgcgacttggacccaccagatgtggagccgctgtcacttttcctcctcttaggagacgctgatcgggatggggacctcgagtagctctgctcacggctccggctccgactccgactctctcgcccctttggcaagccgttcacggggctgtccgccttggctttcttggcgccctccagcctcctcttggtgttcttcacagacagtggggaaggcttgctccctttaccttctttgggggattccaccagcttgggggcaggagagaaccccgaggtaccatccagcacctgtgtcccccaggcaacaggccccgggcttgggcctttgcctcttcgatagcgtgctttcttttttccacttcaccctccaggtgtgtgagatcaacctttttccgagcataaagctgcaagatctttaagcagatttcctgaatttcttcttcagttgctccaaacaaaagaaaccaatggttacgatttgggcaaagggatcttcagcgttcc

SEQ ID NO: 312663 - DNA, 498 bp, Homo Sapiens
ggagagagttgtgtttattcaccatgtcatacgcgcatatagggaacctctatttaggagctggtggcctgcactcagcaccgcacagataaaaatatacgactttcaacacagatccaaataccctcacattttaaaagtcaggattccctacacaagttttaagctgacgggattcaagttctgagttttcatacatagctttaacttgtattaaacacatgtttatttacaacgtggagagagaataaggggcagttaaggccactttctcctgtgaaacactgcaaaatatgtacataagtacaacctaatataggcaaaggttctaaaaatcatctttcttggcttcacgtaattgagtatcagtcggggagtggagagcggctgccgatatcaccaggccatgccaggccacgccaacaagggcgtgtgcattcactttttcattgagctgccctcagagctgctgccgagctgagccctgcacgggcccag

SEQ ID NO: 312664 - DNA, 1525 bp, Homo Sapiens
  misc_feature (172)..(180): n is a, c, g, or t
  misc_feature (333)..(341): n is a, c, g, or t
  misc_feature (416)..(430): n is a, c, g, or t
  misc_feature (481)..(625): n is a, c, g, or t
tgtgcctacctcttgtgagttgtaaggtgaggggcgataaagagggaaagtttttttagggcgggtgtttttgcgccgggggggaagatattgtggtggggggtgggagtgggtgtggagcccgggtgggatggaaaggtttacagtccactgggggggagaggttgacttnnnnnnnnnaatgggagtgatttaccgcccccctctcgaaagggacagggggggcggggtaattttgtaaaaatgttggttgggggtgcggtgtgatgaaaccaaaagagcccgtgcgataccctgtatgttgtttgaagaacgtgggggtccgcggggtgnnnnnnnnngggggggagaagaacccggggtttacagtcgggggtttcgttgggggaaaatttttgcaggtgttcttttctttnnnnnnnnnnnnnnnccaaaaggagtgttttagaaattttttcgggggaggggggcgcgcccgcgnnnnnnnnnnnnnnnnnnnnnnnnnnnnnnnnnnnnnnnnnnnnnnnnnnnnnnnnnnnnnnnnnnnnnnnnnnnnnnnnnnnnnnnnnnnnnnnnnnnnnnnnnnnnnnnnnnnnnnnnnnnnnnnnnnnnnnnnnnnnnnnnnctgagagggaaatctttattgttttctgtataaaaatgtccatcagatgaaggtcaaaggggttgggggcagatgcttatgcgggaatagcgaggtggcagccccagcagcctttcagccctctctcgtgcaggccttgctcggagtcccaggagatccacaggtccggcatgaacagtgagaggtcagaggtggaaggctcagcaggagaggagaggaggatcagcagaggtcatgagaaggccagaatccagggtcaggcctgggtcgaagttgagtttcttagctggaggagtttctcctagcccttcaatatccaccacgtcactgttggcatcggagtcgttcagagcactgagtgtcacatcagccttctgtttctttatggggggacccccggcctcagggacactggagctgctgggaggaggggcagctggaggaggtgacaagacaccagatgccaccttcttgggccctttcttgggtgactcagctggaagggggatgccagaatcttcatataccttgcgtttcacagtggcctttatctgggccactgtccgttccttgatgacacagctgatgtgattaagatcgtccccaaatcgcttcacagcagccctcagcatctctatttccgtctccgtccacttcgcgcccgcaggagaagagtcggccacgggatgcagctgcatcgtcagctccccgagcttcgtgaaggcggcgccggccgccgagaagatctctccgacctttgtggacgctgacgtcatggccccgcgcgcctcctcacggagacgccgccgccgccgctacacgcgagccgggaccacggagagcagggagactgagcggctcgggcccccgcgcaggaagtcccgccctccccgcagcccc

SEQ ID NO: 312665 - DNA, 624 bp, Homo Sapiens
  misc_feature (43)..(54): n is a, c, g, or t
  misc_feature (111)..(165): n is a, c, g, or t
ttttccccgcgaaaaaatgttttttcccccaaattgaaaattnnnnnnnnnnnntttcccaaacccccccttttttccccttttgggggagaggtttttaaaaattttggnnnnnnnnnnnnnnnnnnnnnnnnnnnnnnnnnnnnnnnnnnnnnnnnnnnnnnnaacattgggccccaaaaattcccggggtagggaccccccggccatttccatcccattaactttaaacccatattttttaaggatcggtgctttggaccaaaaaaaagggaaggcttaggaaggccagtattttgagtgggaataaaccattgaaatatagcaatcatttttcaacttctacaattgtctttatgtgccaactaacatttatgcagccttttacagatcttttaccacgtaatttaaattttagaagttttgataaaatcattagtagtatataaccatgcagtaagcacatcacagtgacagcacagaggcaaagattttgcacaggtatatcagctttccacattgtgcaggttacacacaatacaatataaatgttattcttaacagatcttaaaaaagatatttaaaggcctacgtgtaaactacagtagtttatatatgtatgtt

SEQ ID NO: 312666 - DNA, 485 bp, Homo Sapiens
tccacacacagtcttgctgcttctgtatcagaatgtcgtcgaataaattccaattcttgtaacccatgagcatgctgaaaatcaattttttctctgaatgctctattcttctcttctttctgctgtttctccacttcaacatggcgggctagacgagccagagttaaaccaactttatccttctgataatcaatatggtctttacgtttgatattctcatcagtataagaggtgctaggcttttcatcatcactgctgaccagatctatgtattcaagaacagttggtaatggtccttcactgacaaattgaatgtggttttcattttcatccgttgttgattcagatgcatcagggccaattggagggacagaccctattatttccgaccccggttttcgcatgtgtcggacgaccgagaagaaagcaccattgctcgtgctgtccctgccgccgccgtcgccacgaatccccctcccgccctc

SEQ ID NO: 312667 - DNA, 834 bp, Homo Sapiens
  misc_feature (38)..(39): n is a, c, g, or t
  misc_feature (41)..(41): n is a, c, g, or t
  misc_feature (46)..(46): n is a, c, g, or t
  misc_feature (48)..(48): n is a, c, g, or t
  misc_feature (52)..(52): n is a, c, g, or t
  misc_feature (152)..(152): n is a, c, g, or t
  misc_feature (175)..(175): n is a, c, g, or t
  misc_feature (237)..(237): n is a, c, g, or t
  misc_feature (290)..(290): n is a, c, g, or t
aatgaaaaaccttttacaggtaggcatcaatattttanntnatttngnttangcactaaaatacaaaaatgaatccattagtgaattcctttaccaaatcctgaaattttaccatgggctttagaaaccatcatgtcccctaatttttttcngtagagaagcttgcctagtagtnttatactgcccattaggggttactaaatatgcaatccattccttggacacatggacatgctnttctgcttcgattcccaaatgccgaactgctgaacaatccttacatcctaatntaccttcttttatttcaagccatttgtattgttctgtaaacataaatgcttgtttttcattccaacaatctggaagcacaagattatctatttctttctttgatgaaagtgatggcttttcttcaatgattggttgttcaatatactcgaaatgtggttcctttgccttagacaatctgcagtgatttttgctcacttcattattttctgtgtctgttttcaccttcttcatatttaaaaaatgcaaaaaatcacccctgtcgttttggcattttaggaaacagaatatcactataataggcgctagggttttcatcatcaccacagaccagatcgatgtattcaagaacaggtctcgatggtccttcactgacaaactgaatgtcgtcttcattttcatccgttgttgactcagatgcctcagggccagctggagggacagattctattatttccgaccccgggtctcccatgtctccgacggccgcgctgacagcaccactgctcctgctgtccctactgccgcagccgccaccactcccct

SEQ ID NO: 312668 - DNA, 706 bp, Homo Sapiens
tatatgcttcatgttatttaaccagaaatgtcttatctctaaaaatttttagtagtaattatttaccaaacttaaaaacatttctataaatataaagcttttctttatatttaagacaaaatataaaggctagaatttggttccttctctgtaacactaaatattttagtgtgaaattgaatttttttattactatagtcttttcaatctataatttgtgtttttaatttcttgatatgtcacttctgttcctccctgcttgcattttttaaaaactagacattgtggcttgagaatttatcaatcatctttccgaaatgaccacattgtgcttttagtttgtatgtttaagtggtcaagcaaggctctaggaggtagtcactgagctggaccttaaacacatctgcaggagctcacaaaatgggagcaaaagaggcattccagaaagaagagtagttaagcagatgtgggggcagggcaagaggagacagcaccttgttgccagagattctacacaaaggtgtgatggacactgatgctctattaagaagcttttgtggtgtgtgtggtagagaataattaaggcttctgataagacaggaaagggatatttcatcatgactgttaagaaaaggtaactgggttgtttaatgttttaattgataattgtcactgatcgtatttctacttgttaaataattaaaaa

SEQ ID NO: 312669 - DNA, 590 bp, Homo Sapiens
  misc_feature (563)..(563): n is a, c, g, or t
tttttgtcaatgttagaaacatttacttctgacgataatccatatagctttctctgatgttacacagcgattacatctccttgtgtctaaattaaagtcaaagtatgaattttaagatgatttttaattatttaacaagtagaaatacgatcagtgacaattatcaattaaaacattaaacaacccagttaccttttcttaacagtcatgatgaaatatccctttcctgtcttatcagaagccttaattattctctaccacacacaccacaaaagcttcttaatagagcatcagtgtccatcacacctttgtgtagaatctctggcaacaaggtgctgtctcctcttgccctgcccccacatctgcttaactactcttctttctggaatgcctcttttgctcccattttgtgagctcctggcaggatggtgtttaagggtccaggctcagtggactacctcctaggaggccttggcttggaccactttaaacataccaactaaaaggcacaatgtgggtcatttcgggaaaggtggattgggtaaattcttcaaggcacatgnctaggttttaaaaatggcaagcagggg

SEQ ID NO: 312670 - DNA, 934 bp, Homo Sapiens
atgggctcggaaatctagttcgggaaaagtgtgaggggctcttcacgtggggaaggaacagcaggcgcggaggagggggcaagcgtgtgtgagattcagtggtccatgcgtgcgtttgtcgtgtaagggtcattcctggggtttggagtgggggaacaaatcaatgtggctgtttttccgtggaaagaattcccactgcagtgtcccggagcctgcgtgtggtgggcaagctcctcaaatggtatctcacagggaataggggagtcttgaaaacgcagcttcggcagtaggaacatgaacctcttacctaaaagttccagggagtttggctccgttgactattgggagaagttcttccagcagcgaggaaagaaagctttcgagtggtatggaacctacctggaactgtgcggggtgctacataaatatatcaagcccagggaaaaggtgctggtgattgggtgtggcaactcagaactgagtgagcaactgtatgatgtgggctatcgggatatagtgaacatcgacatcagtgaggttgtcatcacagcaaatgaaggaatgtaatgccacccgacggccccagatgagcttcttgaagatggacatgacgcagatggagtttcctgatgcctcgttccaggtggtgttggacaagggcaccctggatgctgtcctgacagatgaggaacgagaagaccttacaacaggtggagcggatgctggctgcggttggccgtgtcctgcaggtgggcggtcgctatctctgcattctccctgggtcaggctcacatcctgaacgaacagccagtgggccacttctcccgggaggggtgcgatggtgagggtgccaccaagtggccaacagcccggaccacgtgtcggaacgcagagcctcagtttctccttgtcctgtctttgcctttcttctgac

SEQ ID NO: 312671 - DNA, 528 bp, Homo Sapiens
gccactttgctatttatgtacacataccaaatatataatgatgctcaacccatacagcacagagattacaatgtaacatcacacattcaccaccagtgaggggagaaacccctttatacaatcctctgaaaaaactgggctaataattaaaatccaaagtacagtatatttaacaaaatagtaaatattaaacagtgaatacttaataaaggacctcgccttttccccccagattggcggcaatccacaaaaatatactttttaatctggtgaccatacaatacataggtacttacatcaaaggtgataatatatttaagatgctatatacacaaagagtttggctcaacttttaatttacatttagaataagtgttcatggcttttttttccaaggttctgcttgcaagatatttttgttttccccttcttaaaataaaactaaagaggtaaaccaagataaagctattctctaaaaaaagttacaacatatagctttggcttatataaataattcatagcagaatg

SEQ ID NO: 312672 - DNA, 555 bp, Homo Sapiens
gtaaccggcattataaaatggttttattaattattaataactatttaatgtgtacacagttatccatgaagaaataggaaataccagtgagttgttaccagcgttgccccaggctgggagagcccttccagctttcctttggcctctgacacccctgccccactgaccgcccaccccccattcctgtctggaaggctcgcctgccatcatcccgcacatccgacagctctcccttcagggtcacctcctccttggacaaagcatacgtgaccccttgtcaggtttcttggctgggtgctcccccagagtttggctcctgcccccaaccaagcatgcatggtgacaatgcacccacttgataactgatcactggtgtcacttccacctccctccctccatgagcgcaaacctccggttaatacagttgggtcagcccagggtcctcggtgtccccagagtctgccatgcctggtgctgggcagatactcaataaacacccaaaatcaggccgggctcagtggctcacacctgtgacctcagcactttgactcgtgc

SEQ ID NO: 312673 - DNA, 555 bp, Homo Sapiens
ggccacagagccgcgggaccatggcacctgctggacgcccgggggccaagaaggtgagtttcgtcccctcgatcctcgcggagctcctggccgctgggctgcgagcgaatccgttcacacccggcgtgcatacctagacaagccctggggcctcggcaaaacacttggacgggatgggcctgagcctcaatttttccctgtcacgggttgggtagcgtttatggagcccttactcggtgcctggcgctgcacagagtgctgtgctcaagttatctcctcatcttcacaattatccccatttcacaggtgaggaaactgaggctcggcgagtcaggcgactagctcatggtcacgggtccagccccgcggggagcgaggatcagaagtctagctttcggacgcatgtcgcgcacacattttttttccttaaccgaccctcgcccgcagctctttgggctaatccgaacgggaactcttcggactgtgccctcgcgttttggctagtccttggcaggacgcccccagagctgcggtgcacggtgggaggtatgtggg

SEQ ID NO: 312674 - DNA, 827 bp, Homo Sapiens
  misc_feature (663)..(663): n is a, c, g, or t
  misc_feature (816)..(816): n is a, c, g, or t
ggatctctttgaagaaaaaatcaaaaagagccctctcactatatgctatccagaatatgcaggatcaaacacatatgaagaggcagctgcatatattcaatgtcagtttgaagacctcaataaaagaaaggacacaaaggaaatatacacccacttcacatgtgccacagatactaagaatgtgcagtttgtttttgatgctgtaacagatgtcatcataaaaaataatctaaaagattgtggtctcttttaagttttgcagttcatggtaaaatgcattttcaaaccaaatgagtacttatatatggatctctgtagactagagtcttgcagcaacacagaatgtaatataaggcaaatgcatctgggacttgaccaaagttgttctgttttgtttttttaactgaaagtaacagaaggacctttcttaaatgtgacagatggtcctgcagtgtgaaactgaaggacagtgttaaagctgggctctagtatattgatgatttctgcataagtgtaaatatgcaaatgtatgtatacatgtatttatgactttagttttcgacattatttttaggttttaagagtggcaacttaggattttagggtgatggctttggaaataacataaatataccttgtactgaatgacagactattactacngtttgccagttttaaacagctttatttatgttcatgtcctgtaaatttttaagtacagtaattaatattaggaaagattacaggccttatctagattatatgtatacttgtattaataaaaatgttatttgtacaaacattgcacagactatnttaataacatg

SEQ ID NO: 312675 - DNA, 454 bp, Homo Sapiens
gtacttttctaccttaaaaaaatcagtgaggatatttatttaatgaacatcaattccttttaaattttcttagagaaattctctgtggctcagtttaccacccataaagcggagacagtaatttatggttatcctttctgacccacaaagtatgaaaagttcctgtaatctgtaaactcagttctgtaatctgtattattgagatgattaatataaagttgtattttcactgaaatgattgttttgctggttatgcttggtgatattttagcgggcttatttttgaaaggcatctgttacttcagtggcataaagtgccctcacactgctgtgcagccatcaccaccattcatctccagaatttgttctcagtcccaaactgaaactataccattcaaacaacagcgctccccatttccccctcccccgagcccatgacatctccttattatta

SEQ ID NO: 312676 - DNA, 757 bp, Homo Sapiens
  misc_feature (18)..(18): n is a, c, g, or t
  misc_feature (27)..(27): n is a, c, g, or t
  misc_feature (39)..(39): n is a, c, g, or t
  misc_feature (423)..(423): n is a, c, g, or t
  misc_feature (527)..(574): n is a, c, g, or t
tttttttggccctacganccccagttnttcggcacgagnctcgtatctcagtgatgggaggagagcaggcagccaatgtgttggccacgataacaaaggaccaaagagcccgggaaggaaagcagttctccagtgctgatgaagcggctttaaaagagcccatcattaagaagtttgaagaggaaggaaacccttactattccagcgcaagggtatgggatgatgggatcattgatccagcagacaccagactggtcttgggtctcagttttagtgcagccctcaacgcaccaatagagaagactgacttcggtatcttcaggatgtaactggaattaaaggatgttttctgttggacatgtactgaaaattaacacatgtagtagccttaaaattttagacttctcgaacatgaggctgttnacagtaatttttttaacactgtgcattgtacttttctaccttaaaaaaatcagtgaggatatttatttaatgaacatcaattccttttaaattttcttagagannnnnnnnnnnnnnnnnnnnnnnnnnnnnnnnnnnnnnnnnnnnnnnnttacggttatcctttctgacccacaaagtatgaaaagttctgtaatctgtaaactcagttctgtaatctgtattattgagatgattaatataaagttgtattttcactgaaatgattgttttgctggttatgcttggtgatattttagcgggcttatttttgaaaggcatctgttacttcagt

SEQ ID NO: 312677 - DNA, 642 bp, Homo Sapiens
attcacaggttttacaggaagcacgtcctccattagtatccgcagacgatgagatatatagcacaagtaaagcatttataggacccatttacaaaccccctgagaaaaagaaacgtaatgaagggaggaatgaggcacatgttctaaatggtataaatgacagaggaggacaaaaagagaaacagaaatttaactctgaaaaatcagagattgacaatgaattattccagttttacaaagaaattgaagagcttgaaaaggaaaaagatggttttgagaacagttgtaaagaatctgaaccttctcaggaacaatttgttccattttatgagggtcataataatggtctcttaaaacctgatgaaggaaagatcttagtaataaagctatgccatcacattgtgattatcagcagaacttggggaatgagccagacaaatatccctgtaatggacaagtaatacctacattttgtgacacttcatttacttctttcaggcctgaatggcagtcagtatatccttttatagtgccctatggtccccctcttcccagtttgaactatcatttaaacattcagagattcagtggtccaccaaatccaccatctattttccaagcccgatgactctcagatacctg

SEQ ID NO: 312678 - DNA, 1287 bp, Homo Sapiens
gtgaccgccatcttgcgtacggagatgtcttatggtgaaattgaaggtaaattcttgggacctagagaagaagtaacgagtgagccacgctgtaaaaaattgaagtcaaccacagagtcgtatgtttttcacaatcatagtaatgctgattttcacagaatccaagagaaaactggaaatgattgggtccctgtgaccatcattgatgtcagaggacatagttatttgcaggagaacaaaatcaaaactacagatttgcatagacctttgcatgatgagatgcctggtaatagaccagatgttattgaatccattgattcacaggttttacaggaagcacgtcctccattagtatccgcagacgatgagatatatagcacaagtaaagcatttataggacccatttacaaaccccctgagaaaaagaaacgtaatgaagggaggaatgaggcacatgttctaaatggtataaatgacagaggaggacaaaaagagaaacagaaatttaactctgaaaaatcagagattgacaatgaattattccagttttacaaagaaattgaagagcttgaaaaggaaaaagatggttttgagaacagttgtaaagaatctgaaccttctcaggaacaatttgttccattttatgagggtcataataatggtctcttcctgatgaagacttggggaatgagccagacaaatatccctgtaatggacaagtaatacctacattttgtgacacttcatttacttctttcaggcctgaatggcagtcagtatatccttttatagtgccctatggtccccctcttcccagtttgaactatcatttaaacattcagagattcagtggtccaccaaatccaccatcaaatattttccaagcccaagatgactctcagatacaaaatggatattatgtaaataattgtcatgttaactggaattgcatgacttttgatcagaacaatgaatatactgactgtagtgagaataggagtagtgttcatccctctggaaatggctgcagtatgcaagatcgatatgtgagtaatggtttctgtgaagtcagagaaagatgctggaaagatcattgtatggacaagcataatggaacagacaggtttgtgaaccagcagtttcaagaggaaaagttaaataaattgcagaagttacttattcttttaagaggtctgcctggttctgggaaaacaacattgtctcgaattctgcttggtcagaatcgtgatggcattgtgttcagcactgatgactattttcaccatc

SEQ ID NO: 312679 - DNA, 822 bp, Homo Sapiens
  misc_feature (702)..(702): n is a, c, g, or t
  misc_feature (767)..(776): n is a, c, g, or t
tttgttgtcaaggttgtactggcctcaaaaactgaattggagaagttccatcttttttcttctagaagagtttataaaagcctggtattatttcttaaatatttggaataacttcagtgaagccatctgttcctagagttttctttctaagcaagtttttgaatactccactcaggtattgtttgcagttgtgacaaggcacaaccaatctctggtatgaccttgtttcccagggcttttactgatggcatgttcacccaacccactggcacttcctaagttctaatcatttctcctttgtactgcaaaatgcaaaacaaaacaaaaatcctacttattatcttctcaaattagcttttcaggctcctgccctatgcagcatgagacatctggaaatttcttgagaaattatatgtgtttgaagctcctaatgtatccatttttttcattgcagtcttgattgttcttctggtttctggtcccccccatgccttcccctgacccccaggttatggtcctctgcctgaatcaagttcagtattcaggttcttccctatagccagaagtggaaagggtccccagagcaaagagctgcattctgtgcatgtgctttctgggatttaccactctctagaattttgctcctttagttctctttgcttctatagcaataagttgcatttaaatattttttgtaatttnatagttgtcctcaatcagtccattctgctgccgactactatcccttacccaatagcaaaatctannnnnnnnnnaaagtgtctgtcactcaggctggagtgcagagcgagactctgtctc

SEQ ID NO: 312680 - DNA, 886 bp, Homo Sapiens
ttttttgaacacttaaaacttgttttattcctaggactttattccccatacagataaatttgcattctcatactgaatgtaaacacttaaagatggatttaactctacagctagaattccatattaaattatatttcactattccctaactaaaaacttttttttccctgagtaagggatatgttgagatttacataaacagcacttcacatgataccgggatttcaaatttttaaaaagatgcagagttcacttctaataatggcaaagtagcacacagatatcagaccaaccctcctgctgatagcaactgcaaactctgaacaaatatattttagaaaaaactaaaggcactggaaacaactataaacaagtggaaagtagagggaagttggcacttaaaaagtgaacagcactggctcaatgtctcatttttaacggggttctcacttgaggggggaaaccaaaagcccaagttttattgggttaaggatcagagggcagaatatggggcaaccacaacagctggaacataaaggggaaacccccaaaaaacaggaggcacagaaggggcagacttccttctgcccaaactctggttgacccctgaactacacacttgcatgggaaagacttccagcagcatagctaaagctaaaacaactgagaagagatttcagctgctgccacctacaaacaagacagagtgtggagttggtgttcagccaagttaactgcctcctaagacaacaatcaattttctttagaagtatgtaacagaatccagggtcattatgtcactcatgagcatgagacaatctatgctatctataccaaatttcagaactacttaatctgaattattcttaaatttagttacaatatg

SEQ ID NO: 312681 - DNA, 519 bp, Homo Sapiens
  misc_feature (402)..(402): n is a, c, g, or t
  misc_feature (408)..(408): n is a, c, g, or t
  misc_feature (465)..(465): n is a, c, g, or t
  misc_feature (481)..(481): n is a, c, g, or t
  misc_feature (495)..(495): n is a, c, g, or t
ttttattcctaggactttattccccatacagataaatttgcattctcatactgaatgtaaacacttaaagatggatttaactctacagctagaattccatattaaattatatttcactattccctaactaaaaacttttttttccctgagtaagggatatgttgagatttacataaacagcacttcacatgataccgggatttcaaatttttaaaaagatgcagagttcacttctaataatgggcaaagtagcacacagatatcagaccaaccctcctgctgatagcaactgcaaactctggaacaaatatattttaggaaaaaaactaaagggcactggggaaaccaacttttaaacaagtggggaaaggtaggagggggaggttgggccacttttaaaangtggancaggcactgggcttcaatgtctccttttttaacggggttctcacttgaggggggggnacaaaggccagttttnttgggttagggtcngaggggcagatttgggggggcacc

SEQ ID NO: 312682 - DNA, 1194 bp, Homo Sapiens
  misc_feature (1124)..(1124): n is a, c, g, or t
  misc_feature (1178)..(1178): n is a, c, g, or t
tttatgccattaagcgatcaaaaaagccattggcgggctctgttgatgagcagaacgctttgagagaagtatatgctcatgcagtgcttggacagcattctcatgtagttcgatatttctctgcgtgggcagaagatgatcatatgcttatacagaatgaatattgtaatggtggaagtttagctgatgctataagtgaaaactacagaatcatgagttactttaaagaagcagagttgaaggatctccttttgcaagttggccgaggcttgaggtatattcattcaatgtctttggttcacatggatataaaacctcgtaatattttcatatctcgaacctcaatcccaaatgctgcctctgaagaaggagacgaagatgattgggcatccaacaaagttatgtttaaaataggtgatcttgggcatgtaacaaggatctccagtccacaagttgaagagggcgatagtcgttttcttgcaaatgaagttttacaggagaattatacccatctaccaaaagcagatatttttgcgcttgccctcacagtggtatgtgctgctggtgctgaacctcttccgagaaatggagatcaatggcatgaaatcagacagggtagattacctcggataccacaagtgctttcccaagaatttacagagttgctaaaagttatgattcatccagatccagagagaagaccttcagcaatggcactggtaaagcattcagtattgctgtccgcttctagaaagagtgcagaacaattacgaatagaattgaatgccgaaaagttcaaaaattcacttttacaaaaagaactcaagaaagcacagatggcaaaagctgcagctgaggaaagagcactcttcactgaccggatggccactaggtccaccacccagagtaatagaacatctcgacttattggaaagaaaatgaaccgctctgtcagccttactatatactgagctactcctttcccacctccccctgaacactgtgacaagaggaagctaggttgaaatcactgatagaatccagtttgcaattactttctcgattggtgtcagtagttttactgattaggacttttattgtgaattacagttgaaagctgtatnttgatgattgctatgtcaggctttcatctaatcttaccagtctgtcttctgtangatgtgtcactgttgg

SEQ ID NO: 312683 - DNA, 587 bp, Homo Sapiens
caaatgttgtttatggtttttattgtttaagggcatccttaattatggttacaaagtggagtgcaaatgttatttcccatgttttaaaaatacatgccggaaaatacaagtgggaatgttgaaggagggcgggggaagtaaatggaatgggggttatgtccttataaagtggaaacttgaaaggtactgtctgttgttgagtggggaaagacatttctattacttacagggtaaccataaagtttctaaaacggtaatatattaaacagggagagtggtacgggagaacagtatgaagtcaacaggaaatggctaaagatggagagctcatgtagaatattttaaaaaatgaaaattgatatagtacctggtgtatttgaatacagcctacagagctttcattatccaaagagtgtggggataaattagtgaatgcatatttctcaaaattaacaaaacagaacatataattttgaacgctgagaaaaataaaaatttaaaaactacactgtatacacggtatacctcaactgtgaataatagtactcatgtcaagtcagtcataattatgtagatactgaatactg

SEQ ID NO: 312684 - DNA, 660 bp, Homo Sapiens
ttttgtgtgttggaggagaggagggttagaaattgagttttaagactgatgcctttttgattatcatagaactgaaatttgggtttcggtgttcattctgctctaaccacttgatagacctatagcagaacgtccaacctatcaggatttcagtataatcaactgtcacacaaggagatgcattacttttgcttctataattttgcagacagttatgaatacgcagctgacttttgctgtcagaattgtcaaaatctgttcctacattaaatctccctgtaatatggccttccatatctttagaatctactcattatcagatagggatgaacgaactgagacaaggtttctttacatgggatctatatgtctgggtctgaacagctagatttagcaaataaaaatacaagatgtcaagttgcttttgcatttcgagataaactatgaatcatactttagtataagtttgtcccaggcagtgttgaggacatacttatgctaaaagttgatttgtagcttacctgaaattcaaatgtagctggatgacctgacttgtatctggcattcctgatcagggctgggtatcaggtgagtccatgagtcctgcggaatagtctgaagcatactgtgtgcatatgtttatgtgtactttccacacac

SEQ ID NO: 312685 - DNA, 822 bp, Homo Sapiens
  misc_feature (106)..(106): n is a, c, g, or t
  misc_feature (142)..(142): n is a, c, g, or t
gagaggtatcgcttctgtttcagtcactctcgctgactccgtgggtccatatctcactgaaattccatctactggggcccagtggcaactcctcatctagctttanatttggtaatgacttctcacccccccattgcttagnaggaggagtaattattatttccttgctttatcccagatctccactctcagtttttgaatagcagaaacaaagtgttaacacataagtctcctttaatgttattttcctttggttaactcatctttggttaggcatcagggcatgttcacaccttggtgttagcagcaggttctgcacagcttacaggacagtggagagatggggcccagagccacttggaaagaactgtgtgaggaagggactcactgagtcagacaccgtcattttcaaaacacacaattctatataaaattggtattttacatatatacagtaaagatggagatatacacacatatgtacatatgctatacatacatttatttacagttaggtatacgcttcttagaagcctttaaatagcaaattaggcaatgcacaaggaatagtccatttaattttaagtaatatatataaagttctcattttaaaattatattagtagggatgtagccatctccaggaaggctaagaaagttcttggaaattcttgcatctccaacattccaacttcttaacgtttccatttttaggcattaaccgcgtccttcagttcctctttctctcgctttctcacatgcacactctctgcgcacgcgtgggtcgacgatatcccgtaattccgggccggtacagcctga

SEQ ID NO: 312686 - DNA, 831 bp, Homo Sapiens
  misc_feature (17)..(17): n is a, c, g, or t
  misc_feature (250)..(250): n is a, c, g, or t
gttaaactaatcctgcnattttcaagactgggtttcccttacctcctaaactagagaaaatggataccctacatgtccacaggggaactggaaggattaaaagacaaaatgtgtgtaaaagcttccagcacaatgtctggcacaaaacggttgcccccaaaaagttcaatactcttcctttccctgctccccctcccaacaaaacaggaaaaggcaacagcccaagtaactaaacaacttcttaatattnccaagtttctacccaatcatctcttcttcttttaaaaccacaggcttgaaatctttactgtttactgtcaacaacggcatatactgctgtacagtcagaattttagaatttagaaatcaaatataacccccttattcaacagatgctgccgggggagataaaagggctttccttttatctgtatcatcttgatttagtagcagaacctaaactcgaaaaataaacgtggaataacaggaatactattttttaacatgtttttcaaaaatcaaacctgagcctacataacccattgtgcaaacagtccctttaggagaaaaactgcaactgtgattaatttctctcaagaatatttatttcccatttggagagtttcacatgtttccaaacatattttcttgatgtcctccatgtcattgtgtattctctccttcccttaatttgtttcttttccagtgtataaatctattgctctattatagattattataatataaactcataaattcaggaatttaaaaaaaatctttaaaagcatgcttctcagaaatcattacactctgttaaacacttgctatctc

SEQ ID NO: 312687 - DNA, 1290 bp, Homo Sapiens
gggtacccggtccggaacttcttttgggatatcgtcgacccacgcgtccggtcagtttaaaaatgttcatgtgttggatggtatcgaaaaccagaaaccacttttaataatgtgtttaagatacttgatttgaagtccttttcatatggactaatgtagtatcaatttcctcctgtcccgattatgtgaaatttggcctttaaacaaagaggggcccattcataagaaagtgttatatctaggtttttaaaactgaagttgaaattatctttgttagcagtagtagtatagaataaaagatccgtatgctggttcatagattgatacgtgttagtcctgttatttggaggctttttggcatagttgttcgatcaggagcctgtgttactaaaagtcttcatacagagtaccagtgcagccgccagaggagaaaattgagattcttgaccctttcatactcttttctttggtattcaggacactaaggcaggaggaccacatgagttctggttggtaagtgtccttgtcatgaaaacacttgccttacaagggctctaattatgatttccctagtcagtgctctgaagatgtgtcacattatattataaacaatacggaaggggagataggtgagatgatatgaaaaacaaattttctcactgtcataaaaggctctaattatggttactttccttgtgatgaaaaacttggccttacagggctctagttatggttactttccctagtcaatgctctgaaaatgtgtcacattataaacaatacagaaggagagatagatgagagatcatgaaaaccaaattttatcttttacatggcccctttgtcttcgtttgaaacatccccaacatttcctacaaatcagcgtagttacaaaggggtcagtcttttaaaataagtatttcctattaaactatatatatatacagtgcctttttggtgttgtgagtcagtggaacactgaaatacagcggttgtgtaatttaagagtggcaacagtttcatttgataagatttgaaaaggctttttatcactacaatcttagaggattgacagtacaggatttttgtttaagagaaggattgtttagactccagaggtgactatgttgtgggtcttttgataattcatgaatacagatttgctttgaccgatcactagatactgcctccctcatttcaaaagcaatataacgtttgtatatgctggtttaatttaagtttaatgttaaagtaatcattttctcattcccaaagacaatggcaaaaaaa

SEQ ID NO: 312688 - DNA, 924 bp, Homo Sapiens
  misc_feature (49)..(49): n is a, c, g, or t
  misc_feature (96)..(96): n is a, c, g, or t
gaagagggcctgttttttccaggaaggttgggaagccgggaggttaagngggagaaggcagagaccccaggcccgttaatcagcagcaaggtgatngtgtgatgtgtcttttcacagttgagttagatgtgccccccccagttatgatggggatcaattttaaatagactttcttgatccccagaagtttcaactacgtggaccagtgggttacacttgaccgggatgatttgttatagcacaacttatatatttcaaatggacaaaaaattagtatcatttacagtatcttaagataaatttcctttgaatgggagcttcctttccggtactttgaggtctacaagacgtatctagaaaatttactactgtggaaaatgaagactgattaaatcgaattggggggaaggggaagggcctgtggtttttctttttgattaattgctgtaacactgtccttcgggcggctgagggagtttcatattttctttagacatcattaggcgccgaagctcttgcaggacaactttgatgctatatgaattctgccattttgctagcactgatatggctcttgggtccaccactccattagaactatttactccattcatattaatttttgttacaaatcttacaaaggggggtgcttctgggtatttaggtccacattctattttaaggctgtatattcggttttcataaattgttcttggaggcccaattatcatccctgtccatcttgtaagtgtcatgtcttcgtcatcttctagaccccagctaactgtgccatctcctactcctttctggccttcttcgagttcttccaacagtcggaaattgcgagggacttttactcccgagcccgtggtggctgccatcttgcgtcgctgttgcttgaaggccggccccttcttcaccccc

SEQ ID NO: 312689 - DNA, 1728 bp, Homo Sapiens
cctttagtacacaatgaattgcttttatttcggtatgcatccacatttcagcatttagtggtcctgaacagcaagtggaaagacgcagcaatttgccaggaggtcaagcccaccaatttcggggatctgctgtgcacaccgggttccttcttaatccctgctgaggatcttgggaagcagcagcagcaccaaaaccaaggcatgcaccggattcaaggttctttttgttccagttgtcagattccaaactagaccccaatggattgcaaggatgaccaaatgaaagccctgtttaaaacttcttcaatttttaaaagcaaaagcagttacaggaaagtaaaacaattcagagggatcatgtgtgcttacaagtatcttcatgcggtctttctccaagttcaaccaccaaggactccgagagctggcaggtctgagtaaccctggtgactattcttttcaccttatcaaaacctgagctaaaaacaatgcatcagctgatgacagcagagggtggcagggctgaggacccaatattcatttcccaggctggtggagagtgagtgagtatggttccaaaactaaacaagggaggtcagaggctctttccaaccttacctgatggcttctggccaaagcaaggaagtgtcatggaaggtgttgggtggtgacggtgcaaaaaggaacttgaggaggagggagaaaaagcagcacccctcgataaaggtgggggagagaagatatggggaaagccctgaattcctcaccgaaggccaatctcagaggggagtggaggggttacaatctatgcttcggccaagggcgggagtggaggagcgtggggacaggatgatggtttggaaggggcatcacttaagacttaaagaaaccaggggtgcaggcgaaacaccccacacacctagcagtagtcccacaggctgcgacctgaaaccttcacatctactctaacaagccccccaggctagagggctgttgttgcagggagggtgggaggcgggagggtaaggggagaaggcagagaccccagggccgtgtaatcagcagcaaggtgattgtgtgatgtgtcttttcacagttgagttagatgtgccccaccagttatgatgggaatcaatttaaatagactttcttgatcccagaagttcaactacgtggacagtggttacacttgacaggatgatttgttatagcacaacttatatatttcaaatggacaaaaaattagtatcatttacagtatcttaagataaatttcctttgaatgggagcttcctttccggtactttgaggtctacaagacgtatctagaaaatttactactgtggaaaatgaagactgattaaatcgaattggggggaaggggaagggcctgtggtttttctttttgattaattgctgtaacactgtccttcgggcggctgagggagtttcatattttctttagacatcattaggcgccgaagctcttgcaggacaactttgatgctatatgaattctgccattttgctagcactgatatggctcttgggtccaccactccattagaactatttactccattcatattaatttttgttacaaatcttacaaaggggggtgcttctgggtatttaggtccacattctattttaaggctgtatattcggttttcataaattgtccgagcccgtggtggctgccatcttgcgtcgctgttgcttgaaggccgg

SEQ ID NO: 312690 - DNA, 1021 bp, Homo Sapiens
  misc_feature (9)..(9): n is a, c, g, or t
  misc_feature (14)..(14): n is a, c, g, or t
  misc_feature (46)..(46): n is a, c, g, or t
  misc_feature (50)..(50): n is a, c, g, or t
  misc_feature (57)..(57): n is a, c, g, or t
  misc_feature (64)..(64): n is a, c, g, or t
  misc_feature (90)..(90): n is a, c, g, or t
  misc_feature (114)..(114): n is a, c, g, or t
  misc_feature (130)..(130): n is a, c, g, or t
  misc_feature (152)..(152): n is a, c, g, or t
  misc_feature (155)..(155): n is a, c, g, or t
  misc_feature (198)..(198): n is a, c, g, or t
  misc_feature (207)..(207): n is a, c, g, or t
  misc_feature (250)..(250): n is a, c, g, or t
  misc_feature (286)..(286): n is a, c, g, or t
  misc_feature (326)..(326): n is a, c, g, or t
  misc_feature (363)..(364): n is a, c, g, or t
  misc_feature (382)..(390): n is a, c, g, or t
  misc_feature (467)..(467): n is a, c, g, or t
  misc_feature (471)..(471): n is a, c, g, or t
  misc_feature (498)..(498): n is a, c, g, or t
gcccctgtnccatntttctatgttcgcactaccacccccgtctatntgcntctgagnattttgnacagcgtcgagtctcagcccttgccngtgtggatgagaaggggcgtgtgntgacatctactccaantttgatgttatcaatctgacancanaaaagacctacaacaacctagatgtatctgtgactaaagcctngcaacatcnatcacattactttgagggtgttctcaagtgctacctgcatganactctggagaccatcatcaacaggctagtggaagcngaggttcaccgacttgtagtggtggatgaaaatgatgtgntcaagggaattgtatcactgtctgacatcctgcaggnnctggtgctcacaggtggnnnnnnnnngccctgagctggggaaaggggtcatgcagcgccaggggatatgcccaactcactgcctgctggaagctctgtgggantcanatgaaacttgagggaattgtgactctnttccctgttcagggtcccctgcccttctatctgggagctagggaaggtatgggggaggaaagagaatggatttatagctacccttaccctcacacatacacttgaaaatactttcagcctagccagttctagcccctgtcctcttagatatatccccctttctgggtgaactataggctctgtgcctctcagacaaattctgatctctaagagatccccagacctcacttgcctctgcctccatcttggccctgattcaaccctaagataatagcacaacaaaattcttcataaagatatttttattcacctgttccgtgctatatggaggaggccaagtccatttagtgacatttcttcccataatgtgagtggggaggattgtggggaggaggggctttgggttcctgtgtttgtgcatatgaagggagatgggggttaggtggaggaggagagcagcgtggttagctaaggttattgctttttgtggcaaatctaattaaatgacaggaatctcttcacg

SEQ ID NO: 312691 - DNA, 1024 bp, Homo Sapiens
gggaaggattaattaagggccgggcataaacccctaacggcgcgaggcctgggtggcgaattcggcacgaggcttcggcgcctaatgatgtctaaagaaaatatgaaactccctcagccgcccgaaggacagtgttacagcaattaatcaaaaagaaaaaccacaggcccttccccttccccccaattcgatttaatcagtcttcattttccacagtagtaaattttctagatacgtcttgtagacctcaaagtaccggaaaggaagctcccattcaaaggaaatttatcttaagatactgtaaatgatactaattttttgtccatttgaaatatataagttgtgctataacaaatcatcctgtcaagtgtaaccactgtccacgtagttgaacttctgggatcaagaaagtctatttaaattgattcccatcataactggtggggcacatctaactcaactgtgaaaagacacatcacacaatcaccttgctgctgattacacggcctggggtctctgccttctccccttaccctcccgcctcccaccctccctgcaacaacagccctctagcctggggggcttgttagagtagatgtgaaggtttcaggtcgcagcctgtgggactactgctaggtgtgtggggtgtttcgcctgcacccctggtttctttaagtcttaagtgatgccccttccaaaccatcatcctgtccccacgctcctccactcccgcccttggccgaagcatagattgtaacccctccactcccctctgagattggccttcggtgagggaattcagggctttccccatatcttctctcccccaccttttatcgaggggggctggtttttcctccctcctcctcaagttccctttttgcaccggcaccaacccaaaacctttccattgaaccttcctttgctttgggcaaaaagcctctccggtaaagggtgggaaaaaagccctccggacctccctttgggtttagtttttggaaacattaactccctcacctctccc

SEQ ID NO: 312692 - DNA, 906 bp, Homo Sapiens
  misc_feature (158)..(245): n is a, c, g, or t
aacctcttcctgcgatgagctcggcacgggaattattattgtcaattttacttgcaagaagtttcctacaagagccaaggaatccatgcgagtaaacatttacgggcaccatagataaaaggcttgtgttttaatcctcatcctctccacctgttagnnnnnnnnnnnnnnnnnnnnnnnnnnnnnnnnnnnnnnnnnnnnnnnnnnnnnnnnnnnnnnnnnnnnnnnnnnnnnnnnnnnnnnnncggccttggtaattatgagctcttctagtgtcccttcctcttccctgtgcccaaggggttttaggaaagcattttatctccacagcaatcctatgaggttgatactactatcctcatagaaggggaaactgatgccaggagaggttcaagcgtcttacctgaagtcacacagcaaactgagtgatgaaggaagacttgaaccctagaaaatttcactggcaaaggagtaaaagtccctcgcaattttccgactgttggaagaactcgaaaaacgccagaaaggagtatgagatggcacagttacctggggcctacaacatgacgaagacctgacacttacaagatggacacgggatgataattgggcctccaagagtctggccgtgcacctgtatctctactctcctttgggccactcagcaaacgtccctggccagcctggccagtccctgggcctattccaaggcactacttagacccggagggctctccctaaaaaacactcaacaccatgaacggctggctgcaaaaagcggggcctcccctcaaaaacccttccctggaagcattgccgaggaacttccgcacagtccttctcttcactggccacaatccacccaactaccttcctctctcaatgctacattacatcgggtcgagc

SEQ ID NO: 312693 - DNA, 719 bp, Homo Sapiens
tttttaagacaaggcaaaaacctttattcattaagagggaagatttagctttccaaacagtttgtctcctgtcttctcattcttctccctggcagtttattctccgccagcctgggaaatgactttgggtcctcagccctgccactctctgctgtcatcatcagctgatgcattggttttagctcaggttttgataaggtgaagagaattgttaccagggttactcagacctgccagctctcagagtccttgggtggttaaacctgagttggggcaaactcagcctccgaaggattaaaggaaagagcccaagtaggaatctgtgtgatcactgttcttttgccaagacacggggtggacaataagattcctttacaaagcactggtgtaagtgttcgcctggtgctgcaaaaagcggctcactgggaatggggaggagcgtgtggtaagccagacctgcggcgagaagttgggtgaaaatgggtcttaaccatcgcttcctgcatctatcccagagggttgggtaccttcgtgggcggagcgcggcctgcccagagtgccttctagatcctgggtcaggcgccaagctccccagcatcatgcaggaagctgcagccccgcagagttaggacagctcatttggcacccggcgagcccttcccaggcccgcagcccagaatagatccggggcccaagacgcccactggagacagggtccc

SEQ ID NO: 312694 - DNA, 902 bp, Homo Sapiens
  misc_feature (25)..(25): n is a, c, g, or t
  misc_feature (116)..(116): n is a, c, g, or t
gatgcgcagagagacccccccaggncccgggtgttaatccaggccagcacaagggttgatttggtgtggatagttgtctttttccaacagtgtggagtttaagatgttgcccccancccagtctatggatgggaaatcaaattttaaattagacttttcttggatccgccagaaggtttcaaactaacgtggaccagttggttaccacttggacagggatgattttgttatagcaccaactttatatatttcaaatgggacaaaaaaattagtatcatttacagtatcttaagataaatttcccttgaatgggagcttcctttccggtacttgagggtctacaagacgtatctagaaatttactactgtgaaaatgaagactgattaaatcgaattggggggaaggggaagggcctgtggtttttctttttgattaattgctgtaacactgtccttcgggcggctgagggagtttcatattttctttagacatcattaggcgccgaagctcttgcaggacaactttgatgctatatgaattctgccattttgctagcactgatatggctcttgggtccaccactccattagaactatttactccattcatattaatttttgttacaaatcttacaaaggggggtgcttctgggtatttaggtccacattctattttaaggctgtatattcggttttcataaattgttcttggaggcccaattatcatccctgtccatcttgtaagtgtcatgtcttcgtcatcttctagaccccagctaactgtgccatctcctactcctttctggccttcttcgagttcttccaacagtcggaaattgcgagggacttttactcccgagcccgtggtggctgccatcttgcgtcgctgttgcttgaagccc

SEQ ID NO: 312695 - DNA, 947 bp, Homo Sapiens
  misc_feature (864)..(887): n is a, c, g, or t
tgaatgtatagtagctgcatgtgtgaactactgctgtaaagtttgctgacatttctgcaacaacatttctccatctgatttaccagaacctgtaacaagaccagaacatgtattcatccagaaactcctgggctctgctttgttcaaagaggagcaaatccacatagaaattaaatgttataaatttattttttttaaactaatttccaaagaatttagctgaagactcagagtcagcctacctcttgactctccacatccgcatctaagatcctgaaggccaaaggaatgcgcctgtgggatgccaaagccatcagtagctggaagaaagaatacctctttctagaggtttggtgtcctcttgctggcctgtcattatttggaaatacgcgcttttggaatttccttcattttcgctatttccaggttcagaaatcatacctaccacttgttctttctttgcccagtaaaactcagggtttctcttattcagagttaccatgttgcacacccccagtgctcagcctgcccagaagcccttctctgatctcagcaagatcttagtagtaaagctaacggatccattgaaattcatactcagcatctgtgactactagacaaagcccatttactgaaccataagtgtgcacttttaaactaaattgttacctgaccagggcaccacaatagaacctgagggcattttgaagtttttagaaacacgagaggaagagctgttggccagatcaaagagatacttataagcccggcacaatttttaacataagtcattcctggctattaagtaaaatatttcatgaaccagaagtcctgtttctctaatacttataatctgcgaggtcnnnnnnnnnnnnnnnnnnnnnnnncatgtgcagcacacatgtacacatatacacgtgcactaccaaactagctctattaacagc

SEQ ID NO: 312696 - DNA, 1158 bp, Homo Sapiens
  misc_feature (78)..(93): n is a, c, g, or t
cgcggtccagcgagcgcgggcccgacgcacacagggcgcggcttcaggcccacgggcgtttcgcggtcgtgttccgtnnnnnnnnnnnnnnnncgcacccccgttgttagaccgggggaagaattaaggccaacggttttaacggtccgagggagcaacgtcgactgtgtttccgtgttacccccgctggggggcggaagacacgtcatttcccaccatggcgaagagaggccttgcgttccctccaccccggtagactacttctctcttaagtatcaaacagttcttgcctgaactctgactatcctcttctacatctccctaaaccaaggtacttgatcttcttgtatcattcccaaagattaattcactaattttctcagagcaaactgtaatgaaggcagggaatagggcctttacacttcagaagggcacaggctagctcctggagaggagtggagatctgggtccaggcacccctcggccccaccacttttcctcaaggcacagaaaaagccaaactcgaaatacgtcttgagtctacacgagtgtacatctccttgcctacaactccgtgagatcatcattgaagtacagaagtattgcaggtgtgtgaagtgtaccgtccatactgagatagtcaaattcttcctcctcatcccggatcccattctcttccagggtaaaatccatgttcaggttcttcccttcatatttccacgtgtagctggcagcatgtgagttataggggagatagcggtgtaggatttcccatatggactccagaacccccacctccagtgtgtgctcctgcgacgtgagcgtgttaatgatgcggatgctccgggtcttggcagacagccgccccacctcataatacgacccctgccaccagggcttcccaaaatcgttggcccagtccgaacagggcagctgaggcggaacgtgcacaaagcggccccgcggggtgcagtacctcaggcagccggtcagcggatctatgtgcttgcggatgtctctggtctttggatcaaaccagtggctgatatcctggcctgcaacttccacgatgggtttcagcagcaggttccccttgtattcctgtgccaatgacgttaggtcgtccctcgtgccgaatcgccacccaggcctcgctac

SEQ ID NO: 312697 - DNA, 444 bp, Homo Sapiens
aagattttgcagatgtcgactcaactggttgtttattttccaagttagaaacttctacttcagtgttgtcagaacagcgtttttttgatggcgatggttttgtacaagatttctcttcaccaccagagaggggctgctggttacttgcttctgaaagtggctgtctagctcgcttagcatgagtcatagaccttggagctgctgtgggcctctcagccatttttctctgaagattctctcgcctggcacgggttcgctccagcagttttctccgtaaacggatccatcgccccaggcgtcggactacgagacgatggaaacggtggttcaaattcaggaagagaaaagtgagtctcagctcagtgtgtctcctggaaaaaaccaggagtctgaggcgggggaactctcccacaaccagctgtcctctcctctcggcttccagtc

SEQ ID NO: 312698 - DNA, 404 bp, Homo Sapiens
  misc_feature (52)..(52): n is a, c, g, or t
  misc_feature (137)..(137): n is a, c, g, or t
  misc_feature (333)..(333): n is a, c, g, or t
cagtggcctcagcaggggcaggggcaggggccagcatgggctctgccttctnctgcctctatgaccttgaggtcgaacttgaccttggaggagccagcaatgactgcgtaagatccctggtcggcagggcccacttncccgcactgtcagcgtatgccgtgtgccctctgtggccaggccgtacttgttgctggcgctgatgtcactgcctccgcgctgccagcgcaccttcactcctgcccgctctgtctcggcctcgaacacggcagggctgcctgcggccacttccactgaccgtggctttcttgctaaaagctgagactggcttcttcncccggctcaggcatcctgagagacgtcacaccaggcacgaagcaggcacaggtcacccaaagagggacttc

SEQ ID NO: 312699 - DNA, 550 bp, Homo Sapiens
gccagaggggtgggggaaagagaaaagtgagtgttgggaatcagtgaaggggtttagacatgcaagtaacaagggatggtttctacattgtacagtagaatcaggctaacagtatcactaaaggcctgatctggaggcagaagtggcaggcaaagctttgtctctttggtagccccctctttgtgattaaacgttttgctttgtaaggtttttgccccttattctccttttcatacatgtaaagaactttgctgttgctcctttatagcctacaggtaaacttctcttctagtgagagtattgacaggagatggcttatattcccctgtttttgtaaggggaatatcctcagggttggcttcctcatttttgctgaaactagctgcactgaaggtctcataggatgaggtcaactttttgttcaggaggtttctgttgcggtcacccatgatggcggcctccccattggccagcttttcctggcttcctcgttcatcaacaggcatgaaagtggacagtttaggctggctcttcttcctctccggagacc

SEQ ID NO: 312700 - DNA, 513 bp, Homo Sapiens
tgtccttaaaaatagaagacagaagtattaaaattatcttttcttttattttaagtcttctgccttctttcttgagtttgctcctgttgacttcccacagcacagataattgacatgtccctttgtgtttataaatactactaaggtgacctagttggtctccttgttgcaataattaataactctttgcaaaatgtctcctttgagacagaggcatttcatatagatacccaccatgaggtgttctgggcatctgaaggtattaagagttcagtgggaaaaatctctctccctcgcctttttttctggtttagtcaaataacgggtgaacatagaaacctgttgggaagaatatgaaaagttatgtggcctctgaggctacaggcacttgcaaatccgagaggaaagtgccgtctttcatagctggtctctgtataaagagtatgtagcaacaactgtttaacatccgagatgaagtggacctgatgctgtatttgggtatttttctcctct

SEQ ID NO: 312701 - DNA, 662 bp, Homo Sapiens
aagtaaaagtaaatttggtgtatgttaatgagtacaccatatcaacttagaaaaattgtgttaatgagaaaaggggagattcaactccttgagtagctctatatacttaaaatataaagccaccattgtatctaaaattgagtctgaaatatggataacaaaattgaccacagctattttccatcacatattgcagcttttaaaaagtacacaattgttaagtttgcattagaaatataagcagattacctactagttgaaaccatatagtattgttactaagctgatttttttaaaaaagtacaaagaaacatacattttcattcatttggaaaatgtaaaaatttaagtactaatatataatctcttcactttctctgatctacaaatggatagaatgcctagttatcgtcatgcagataaattcttcagaattcaattaccaaagcaagcaacaaacaaaaaaaaccttgtcagtaatacacagatgaatctctttaacagtttctattctttagcagtctttgatgatttcagaatttgcagctttagctcttttatcatcatctctaacttctgtcttgcttcccgttcctgtctgagttcatcttggagttcttgcctatcggcctcagcatggtccaatctctgcctcagttctg

SEQ ID NO: 312702 - DNA, 577 bp, Homo Sapiens
gatttttgaagatcaaaatagattatcaaaatagggaacagcaaaaggagggaggctgcccactaagaactattcctcaagcaagtttcctactgattttcttataattattctaaaaatttttaaactacactatggcaacagaattcatttgtaaatcctagcttaatcaggtattttcataattagatcctaaggttttcctttaaaactatttccttatctcacatacagacatgtttctattcaacgttcttcatgccacaaataggattttttaaaaaagtgatatctattaaatacataattcagctgcactgctataaagatttctccaaattatggtaatctgagatggctttatataattattttgtttaaagaaaataggaaacttagaacaaagacattcatgtaaaggaagtcattcacaagtgtttgccaccaaaatgacaagggcccaagcactggaggccagcctgggcaagatagtgagagttttttataaatttacatttttttagccagtaaatagaagaaacaacctatggtgtataatcaaatatattacaactca

SEQ ID NO: 312703 - DNA, 843 bp, Homo Sapiens
ccccttatcatccgctgctgtccagacacgagccacggagatcagcgagccgctacgcattggccccaactcccaagacacaacgctcttaccagaaacaaccactcaatgctgttttccagaagacgaaaatacactagacagctactggcggaatggaggatcagggccctgggccagggcatctacgcagcagagaatggggcgccggcgtgggccaaaggggagccagctgcggggccacggtgcggtgacaggccacagcgtgcactgggtcatggaatatcaaaagatacagaacgtttactgaaaaaacacaacgcatgttaaattgaacttcacccttctgtaataaaaaattaaaaacttttgttgactctgtttgaacacaatagactaggaactcttccctagacagtgttagaattggcaagaaatgtcaccagcaacttttaagaactttccggtggtccacaccttccgctcggccaaatcatcttcagagaggaggctcaaatcaggccctgtcctgacccccaggcgcagatctgggggaccacctccaagacaccctgtttcttgccaatccgggtcaacttcccgacagtctctcgcgggcaggagcaaagggacttagcagtcactcttccacagtttaattgttttgtcattttctagcgcacagaaggcgatgatgttttctgttgggtgacaagctgttgagatcacgacatctgtgtggccttgtagtttcctgtacaatctctttcgtctgaaggttccagatgtaaacaagcgcacgcgtgggttcgacgatatcccgtaaattccggaccggtacca

SEQ ID NO: 312704 - DNA, 373 bp, Homo Sapiens
ggtttaaaccacccctgttgtttgccccaaagaaattccatttgggcctgtgaaataatcctatttgccttgccagtatcctgtttcctcctcccctaggcctcaagttggtgaccccaagccctattgtaaacaagtgattatcctcaaagggagatgcccaatggagtaacaatttgttaaccttacgttttctgtctgtatatttttttaaaaatctggtagtttctggaaaaaaaagagaagggggtttgtagtacttaaccctatttatttccgtatattttagttaattagtttttggaataaatggatttcagtatagctttgtggttaaattgcattgcctttattttatgtttaggcttatttt

SEQ ID NO: 312705 - DNA, 467 bp, Homo Sapiens
gctcgcagaacacagccggctcaggccccggccctgaacaggccgcaccgccgctagcattcggccggctcttcctgctcttcttggcggcggccgccttagcgtgaccctttagggcattggtagcgatgcggctgaggactcgacccagcggctcgctctggtcgcgctgcatgttcttgtggctaccatcagccaaagcgaatgacaggctcagcttgggtttccgaaggtacgcagcgcactacagcgcgctccatcgctcccgccgctgtctggctccccgcttcagcccggctcagcttctccaccgccgtccggatcacccgaagcgcggcgcgggcgcctgggagcctccacatgaacctggtggcctagcggtcgacaagacccgcggccgatcagcggcctactttcaggtggagctgaggagccgaggccgccggctttgactcattcagatctcc

SEQ ID NO: 312706 - DNA, 1035 bp, Homo Sapiens
  misc_feature (323)..(344): n is a, c, g, or t
gagggaaggtacccgagtctgtttcttgttactcaacatcagtgcttgttttgggcccctttgtttgctgccttgtaaaaaaatcaaaagagggagaaaacccaccaaaatggcagaattctgaccaatgtcctacaagatcctggaaagtgaaggcttctacctcatagacaggggtgcaattttcagctgagtcaccagggccttttttcacttcctgtcaagcgatggtctcttaaatgttcccttcaggtaagttctttgattcccataattttataatagtcatccttaagctaccacttccctttccactgggatannnnnnnnnnnnnnnnnnnnnngtttgaactacacactgttaaactaaaagtattgaatttattttgttttgttttttaacagaagctttgatatcagctgcagatcactcaatacatggccgagacaaatctacattggccggaagcagctctagatgagcctcttggctagacttagtccctccttattagtgattggcgattcaggccatgtcatagggcctttcagacaaaaggttcttatcccagtcagctggccaaaacattaactttggatttcttaccctgctacagcatcttctagaaaggcagcaagataatattgtggcagtgcacagataacatcagggtagacttgactgggagaaaaccaaattctgcgcttgctcctgtgtgcccccatccagctgtgcatgcacacacaggacacctttctagtatgaagaacttgcatcatgtctgccctctattgagcacccccttctagaaatacttccaagtattagcatgtgaactgttgactccaccctggtgctttctgctaggaaagcacacttaacgcatccagtgtagtaattgaacttgttctactgccatggtcatatgcagtgggattgcataaggagcattatcctagctctgaagataccatggagtagaattccccaccccctgtcttacatccacgccgagccctatgcagtctcaaaaa

SEQ ID NO: 312707 - DNA, 421 bp, Homo Sapiens
  misc_feature (286)..(286): n is a, c, g, or t
  misc_feature (321)..(321): n is a, c, g, or t
ttcggcacagtttttgagactgcatagggctcggtggatgtaagacagggggtggggaattctactccatggtatcttcagagctaggataatgctccttatgcaatcccactgcatatgaccatggcagtagaacaagttcaattactacactggatgcgttaagtgtgctttcctaggcagaaagcaccaggggtgggagtcaacagtttcacatgctaatacttgggaagtatttctaggaagggggtgctcaatagaggggcagacatgatgcaagttcttncatcactaggaaaggtgttcctgtgttgttgcatngcacagctgggatgggggggcacacagggaggcaaggcgcaggattttgggttttcttcccagttcaagtcttaccccggatgtttatctcgtggcactg

SEQ ID NO: 312708 - DNA, 579 bp, Homo Sapiens
caagaagacataaaccattctcctatttaattggttgtgctgaaacatttcaaaaacacgaagaatacctttccgtgttgtctcagccccaataatgtgcttcagctcatctggcataattgcaagtaatttcgtttttcctgctactcttgttctcattcgaatacttttatctctgcatggaacagcctctgctaaaatgccatttggccaaaatgcatctctgaaacgtttcactgagtcggctacttgttcaggtgaagtcatccagtcaacatggtcaactatttttctattaatagtatcgccatatgtagctctaataagctgttgaagtaggtttttgatattccttcgcaaccactgatttctttcttttaagtcgaatacttcatccatgagaagcagcattaccctaagtggaatattgtcatccacattatcgtcaagttgagccgaaactcggcgatgttcagggtctgaatcagtcttaggaattaaaggaggcaccttaaaaaatgattgctttatgtcttgacctaatctttctgacattttgcccatgttgtctgacatttt

SEQ ID NO: 312709 - DNA, 942 bp, Homo Sapiens
cgacttaaccttacaggattaatttcaactttttggacatgaggtgggtattctttcctttcttttcggtccagactgctttgggctgctgtttttactactggtatctgtgcatgagcatgatgaaaacgtctaccatgaactacagtttccagaacataatgacgtattttgcgtattttcactcaatttcttattgttgctcaacatgttaagtccaattgggttgcctttcaaagttttaaaactttcagacttgtttcgtcttacatatgtcttcaagatgaattcaccagagctattagcaacgattttcagatcgacgatttaacttttttccttttgaggtttcagaatcctcatcttcatccacactgagcagatttgttcccatctttatctgtatgtccttcactttcttcttcagtgatcaaagctcccaattatttttaaaacctccttctctcttagactctgatctagccaaagcttccagaaaagtaatctcccctgcgctaccgccgctcttgccggccgccatcttcctcctcccaggccgcctccttcttaatccatggcccacaccgccgccgtgctcgccgggatgaggggccgcgccggaggagggtagacgccgcagggttgcggggctcgggctcagccgtcaggcgggctgcgctcccacgttcagacgggcctatgcaaaggcaggccaggcgcgcccgggcctgtccgcggggtggcgggcagcgaggcccgcggcccgagcttctcagacctctccgggggaacgcgaccggcgacgacgacgacggcgcttcccgggcccggttcctctcggcccacgactccccatgcccctgctagcgtattactgttctgtgacttccctgtgacctctgcagaactcctcatcctgcgtttggtctccaggtgtccccc

SEQ ID NO: 312710 - DNA, 884 bp, Homo Sapiens
  misc_feature (98)..(98): n is a, c, g, or t
  misc_feature (165)..(165): n is a, c, g, or t
gaggcattgccatctcccaagtgctcttcgtagggaaaacagtttctgctcatgacgaggttcccactccccatctgaatcccggcccggctaagctnggtggtgaacagctggcatgtctctgggttgcggacggtaaaggccacgtagacctcaggagcccgnctggtgctcccggcaggcagccagcctccgcaggacgccgaccagcgacatgatggcttctgggcaatacagcacgtctgctgcaatgacaacatctggctggatggcagagagctgatggaccgtcgcgatgtcccagtccagctgggccactgtcactctggggctgtctaagttggcagtgatgtctgcctctaatgagaggccattgagaaggacattccctcggagctgctcaaggacccggctgtgacagtcgctgaagatgtatgcccgggggcggcacatcttgcagatggccaggcctgtgaggccagcaccactgccaagctctaggacagtcctgttagtgaagactgccgggttctcgatggcccattctgcaaggtagagggcggcgtcccatgtgaccaggcctgtggtaccgtaggagatgatggccgtgctctcggagagtgtgaccgagcctcccgagggctttttgatgagttctgagagaaagcaccgggcatatttgacggacggcgggtgcttcacacacacaggatgcttcacagtcttgtgcaaaatatcccgcagcagctcagaatctgatgagtctcttaactttgcttctaagctctgccaggggaaggagcgcagtgtgcgtgccgccaggaagcggcgctcgaaactctgcagcaagagttcggtccgcgagttctcctcgggcgccatga

SEQ ID NO: 312711 - DNA, 1926 bp, Homo Sapiens
acacgtctccgtgagcggccagctctgctggtcagcagcacgagctggacagaggacgaagacttctccatcctgctggcagctttagaaaagtttgaacaactgactcttgatggacacaaccttccttctctcgtctgtgtgataacaggcaaagggcctctgagggagtattatagccgcctcatccaccagaagcacttccagcacatccaggtctgcaccccctggctggaggccgaggactaccccctgcttctagggtcggcggacctgggtgtctgtctgcacacgtcctccagtggcctggacctgcccatgaaggtggtggacatgttcgggtgctgtttgcctgtgtgtgctgtgaacttcaagtgtttacatgagctggtgaaacatgaagaaaatggcctggtctttgaggactcagaggaactggcagctcagctgcagatgcttttctcaaactttcctgatcctgcgggcaagctaaaccagttccggaagaacctgcgggagtcgcagcagctccgatgggatgagagctgggtgcagactgtgctccctttggttatggacacataactcctgggccagaggctataaaaccccaggacccctgctgtccttcccgcagcttcttcttggagtctcagggcaaaccctttcgagcagcacctcccagtggccagaagctgaaatgacagcagtggtactgcctggtaaaagaattggttctgtgacccgggaagctttggttggccttgatttcttctctggaggcttggaaacgcttcctctcttcttctgttcttcacgccccatgcccctgctagcgtattactgttctgtgacttccctgtgacctctgcagaactcctcatcctgcgtttggtctccaggtgtcccctttctgccgtgttcctaacattttgattcctgtcttgaaaaaagcacctgctgcaccgtaagcccagggatgtggcagctgcagtgggcttggctttgtgaggaactgagtgtgtccacgttgggggaacatcatacttgatacacacgtttttatttgcacaaagaaaatgctatttttggagccagaattttcatgtctgatttatggtgattttcttaagaaccagaactgctggcagaaagggggcacccacacgcttagatagccgatgtcttattagagggcagtttgtggttcctgatttggaatttaacattctccaaacattccagtccaatgaaagttttatccgctttcccatataaaaattcttcccatgagattgacttgattctcacaatcccgttggagtcgtgtgtgagtcctacagtgtgaggttcagcattgccatctccaagtgctctccatagggaaacagtttctggtcatgatgagcttccgcttcccatatgatcccagcctggcctagctcggtggtgaacagctggcacgtctctgggttgtggacggtaaaggccacgtagacctcaggagcccgctggtgctcccggcaggcagccagcctccgcaggatccccgaccagggacacgatggcttctgggcaatacagcacgtctacggtgaaagcttcaggttactttttgatgagttctgagagaaagcaccgggctttcttgactgacggcgggtgcttcacacacacacaggatgcttcacagtcttctgcaaaatatcccgcagcagctcagaatctgatgagtctcttaactttgcttctaagctgtggcaggagcgccgggggtttcagcacggagacccatcccgtctgcccctggactcccgcgagccccgcgggcctctccgctcgcccgccgcccccctgccaggggaaggagcgcagcgtgcgcgccgccaggaagcggcgccctcgtgccgattcgccacccaggcc

SEQ ID NO: 312712 - DNA, 847 bp, Homo Sapiens
gaatttttatatgggaaagtggataaaactttcattggactggaatgtttggagattattaaattccaaatcaggaatcaaaactgccctctaataagacattagctgtctaggcgtgtgggtgccccctttctgccagcagttctggttctcaagaaaatcatcataaatcagacatgaaaattctggctccaaaaatagcattttctttctgcaaataaaaacgtgtgtatcaaggatgacgttcccccaacgtggacacactcggttcctcagaaagccaagcccgctgcagctgccacatccctggacacactcggttcctcacaaagccaagcccgctgcagctgccacatccctgggcttatggtgcagcaggtgcttttttcaagacaggaatgaaagtgttaggaacatggcagaaaggtgacacctgggagaccaaatgcaggattgaggagtactgtcagaggttcacagggatgttcacagaacagtaattacgcttagcaggggcatggggcatgaagaacagaagacaggaagcatttcagagactccaaagaagaaatcagggccaaccacagcttcccgggtcattcaccaggtgacaccactgccgtcatttcagcttctggccactgggaggcgctgctcgaaaggctttgccctgagactccaagaagctgcgggaaggacagcaggggccctggggttttagcctctggcccaggagttatgtgtccataaccaaaagggagcacaagtctgcacccagtctcatcccatcagagctgtgagactcttgccggttcttccagaactggttagcttgcctgcggatcga

SEQ ID NO: 312713 - DNA, 460 bp, Homo Sapiens
  misc_feature (12)..(12): n is a, c, g, or t
  misc_feature (23)..(23): n is a, c, g, or t
  misc_feature (49)..(49): n is a, c, g, or t
  misc_feature (54)..(54): n is a, c, g, or t
  misc_feature (100)..(100): n is a, c, g, or t
aaaatcttcccnatgaaattgantttgaatcctcaaaaatccccgttgnaatcntgtgtgaatccctaacagtgtgaaggttcagcattgcccatctccnaagtgctctcccatagggaaacagtttctggtcatgaatgaacttccgcttccccatatgatcccaccctggcctagctcggtggtgaacagctggcacgtctctgggttgtggacggtaaaggccacgtagacctcaggagcctgctggtgctcccggcaggcagccagcctccgcaggatcccgaccagcgacacgatggcttctgggcaatacagcacgtctttttgatgagttctgagagaaagcaccgggctttcttgactgacggcgggtgcttcacacacacacaggatgcttcacagtcttctgcaaaatatcccgcagcagctcagaatctgatgagtctcttaactttgc

SEQ ID NO: 312714 - DNA, 1229 bp, Homo Sapiens
gcacgagccactgcacccggccgagaataaggtaaactttaacttggcactgtaaaggtcaattttcaggcagtcttagagtttagcaatttctctagtgtataaactgattcttaacgatttaaagaaaattatattcaagtggcaaatttggaggcaacaggctacttcggagtccatgatatgagatggcgttttaaatacatgttttatcttcaaggttttcagctcttttctctggaccatctggatataagttgatagctgtcacaggtatgacgtccactttatccaactgaagaattcctttgtattcagaaactgggaaaaacacctttaagatggttattaccacagctgctcctgtaattccaaccaccatgatgttcaaaaactgaaagaatactgggaaaacgttgctccagaacctacacagatcttttctaaacttttccatccactgacacattaccttatatgaagatggcggctctgctctgagaggagtttcaggtaacttgccaggtaaaacatcttcatctacagtggtttccacattcctgataagatactggctagtggtttgcagtgaactaacactttcttttttggagaggttaggaagggtaaataaaatgtcactgtctcgagaaatagagtagagcatgctttcttccaaagggagggtatagtttgaatgtctgagtactccccggttcttaactaaaatatcaatttcagtgacatccttttgctgaacttgttttccatcaatctctactacctcttcttgaatgacaattagttgcaaactggaaccagatgtcataggccactcatgaactaaaatccttacactgacaattccaaaatattctttttcctccaaattttcaagattttcattcttcactatcaaagtctgacagcttattcgggttacaccactatttacaggtaagtcatttacatacacctgtccactctcataggttatgttaagaacaacctgctgtttagatatgtccccatcatctttcagtgtagttacattaattctgatgccgtcctgtggggctccggacagcggcggcggctcgggggcgcccgtcgtcagccagccggaggcgggtagcgccacgaacagcaggagccggagggcgagcgaccccggtggagcgccctccatcttggacaacccgggcagagggcagccgcggccgggaggt

SEQ ID NO: 312715 - DNA, 2007 bp, Homo Sapiens
  misc_feature (1079)..(1113): n is a, c, g, or t
ccacttggccccacccacggcgccccttcatcccgtcccaccccaaccacctccgaaacgtatctgctggtcaggaccagggagcctgtctggctggctgagggataaggcgcagtgcaacggaagggatcaggaagcctgagaggagccaggtacaccacagctgctctgggcagctgccctcttagtctcttccacctcaaggagccaaggctaaccccaggctccagggacagaggataaactgccttccattccaggccctcgctctggtaaaagggttgacggttagcctaggcctctgaggaaccaagtctgtcatccatctttgcaaagcaaagctgttctttttccaactttattcagaatgttctgccttcaaggtactgattgcacacaggaaatgtaccaggtatagttactgagctggggccaccaatggagatggagcactgcagacccctaagagttcaagccatgctggagtgggaagacctatccaccttctgaacatacgaggcagaaggctcagagtcctggaggcagactctctcctggttttccttgtgctgatggccaaaatactaaacaagtcttctctccgtcacttctaagcccagggatgcaatctcactccctggcactctgctttcttctagaagtagtaagcctggctggtagggaaccaccctgaggggtatgggaaggggaagtcggttcactttccctatctcccaaaatactagaggtggggttggcaccctcccccagtctccgagcctacagagctagcccagtctcccaggcaaggcccagatgccctgggacttagctcggggagggaggtataggcatggggtgctcgtctgtcctggcggctgcagagccctgccccttttctgggcggcagtaggaatacagaagctaagctcaccaaaatcctattggttaatgtttctagtgaatttcccagaaacatttttaagtagactaccaaactaccctttcttaattaaaaattcattaaaccactaaaacccctcccatgcactttttcttgcaaatcagatatttgtatnnnnnnnnnnnnnnnnnnnnnnnnnnnnnnnnnnnatattttcaaatggaacttactttttaagtgatggagacatgcacttgggggtgggtgggtgtgagttttcatttgtgttttgaaatcccaaattaatgagcatgataaactgttattgctggcactggctttaccccaagtggccaagtggcactgtctgactctctgagtccttgctgggtccccccaaccttcccctaacccccaccctttccctttccattgacttgggacagcccttgtcgatgtgccaatcacagtgggaagggggagaaggggggaggtcacagtgcatggggttcaaggtcacagtgggcggacaagggggatcacagtgcaagtaagtcaggtcgttccctctgctcaagtccagctgtctgccacggcagtgcaacccgtggcggacgacccaggaggcggtgacggcagcaacggcggcatcttttcttgcctgcatttatctgcgctgtttgaagccttgagacccatcaggacccaaaggctgtctgatcacattattgggctgcctgctgtcttcgggttgggagatcctggttggcctgtcgaggatgggtttctcctgctcctcctcggggctggcgctgcccaggatccgcttccgggcctcggcgtactcggcctctcgctgtgctagggacttgactggaagggtgggcctgctggtggagttggggctgctgaccacaccgttgctggtgggcctcttgaggatgcggatctgtggagggggccccgcgggaaggctatcgtcctgaatcacaatgggcactttgggaggagatttggatttcctgcccgctgtctgccgcctcttcccagctctcagcgacctcctcatcttccatcttactcgccgctttccctcctccccc

SEQ ID NO: 312716 - DNA, 694 bp, Homo Sapiens
cctcattcacaattggggtcccgtccgcaagcaggtaaccaagaaggattctgactttatgacccatcgacttgaaccttttatgtataagaaaaataaactttcccagctcatttaagccagtggtttttttcggggagtcttctctgtccttgcagctggacctaatcctaactgatacattgatccaactaaaaaggggaaatgcaataaagaaaggaataggagtaagaggcaaaggtggaaattcactaaaaatgctctaaaagtatctactatatatattaggagctggttttaattaactgaataatacattgtctttgtataaataaagagaagagaaaatgcatcctagtgagggaaccaaaggcattactctttctccaacacctcaaacatggtatgccagaaccaaactcattatcttccccccacaaaaaaaatcctcctccaaattctgtatttttctcagcatccatggtcagaatctgcgagtcatatcggatttcttgctgcatttactctcatgtacaatcactcatcatgttctagcaggaaaatacccattttttcaagattattttctttaaagtacgatttctagtggtatccatttttgaaaaattgagaactcaaatatttaatttttatttatgtatattttctcccctcaactagactagctttttct

SEQ ID NO: 312717 - DNA, 676 bp, Homo Sapiens
tgctgatcgttgggcttcacctggcatatgttggctccagagcacgccgggtttctggagcttgtgatggaggaaagttggatctcatacaggtagttgtccccattggtcctcatgtccccagaggctctgaacagcttaaaataaatatctccgaggctgaagctcttgccatttatagggttggtgatggtcccattcaccatctgcacctcctgaggcttcacggcgcaggcagcccgggagtcccagctgaagtagtaagtgcagctgtcgatatcaaacctcttgaatgcaggtctgcccaccgtctttgtacaggtcaattctatcacggaggatgcggtcttatttccaccacacggataacctttggagtacgtgacaacaactttgtcacctatgacacccagcttctgcgtgtgaacgagtcccaggacctggacgtcaccagttgtggtccttctgcaaatgctggccctttcagagcagcccaggggccctttatatattttctggcacagatttatatagtacgagactccgttgtggaccagggaccaggacccggtgagagaggagagcagccgcaggtcgtaggttttgtgtttctggacgaatttgcactccaacttctttggagggcagacaacttttgttttccactcaaatgtca

SEQ ID NO: 312718 - DNA, 675 bp, Homo Sapiens
aggagatgctataatcagaaattgcaagctgattgttttattggtatcttgaagttagagcatgatgccattatgtttcacggcatttgaaacactgttatcttcttattcacttcctgtcattgaatcctagattactgaggagactgccccctgtggaggtccttgtgggcggcccccttggggaggtggtccctggggctttccaggaggaggtgggggaggaccttgctgatggcctccctgttggggtggtccttgtggccttcctcgaggaggacggggatggcctccctgttggggtggtccttgtggccttccttgaggaggagggggatggcctccctgttggggtggtccttgtggctttccctgaggaggtggtggaccttgttgctgctggcctccttgttggggtggtccctgctgagggccatcattctggttcccatcaccagcagagggttgagattgctgtcctcccaaaggtggtccctgacgctcctcatctatgaactgctcagagtctcctccatctgatattaccaagggaacgtcttcttggctgacatcttcatctaagtcctgagctgagctgaaggccagcagggccactgacagcagaatcagaagcatcttgcagaaggctctggtgtcactcccaactttatgctc

SEQ ID NO: 312719 - DNA, 1368 bp, Homo Sapiens
  misc_feature (184)..(200): n is a, c, g, or t
tatgatactgcacagcatcaggcattttaaagcagatctttactaaacaggttaatgagctaacaagcaggttctctcgtctttgggctctttcctttctgagttgcatattctattttcttgtccccaagtagagactagtactacaaaaagggaccacatttttcaagtatttctaagtatnnnnnnnnnnnnnnnnntctcttaggaaatgtctagacctccattcttggattccctttctttccttttattttaaaaaagaacagtacccctcttttaagatgctgtcttacattaatgagcatctaatggaaagaaggtatgagttgcactgaggattagaatagtggtgcgttagtggcattatctataaatacactcacctaaattgaaagctaagaaggaaatgtaaatataatatatatttatatttgatgtaatatggacatctgcagattctaataaacaaggactattgctgatagtaggctgtgacatactgtcttgtgaaatggtttccttgacaaaatttaagctgagcttaaaagcaaaaaacaaaaagtacacagaaatatttattaaaatgtaatacagtttattgaactttctaggtatggagtttgatggacagggctgcctttaatgagtgtgaaggtcactaagtcacttagacatctcaccgtggaagtttgtgagcctgcattaggagatagactgattaccatacatgacataaaaaggaacagtggatagctcatactttatggtggttcttctcctccgaaataatatactgcagaaatcccagacagagctccttacaaacctttaattgtaatatatttttgatgattattcacattgaatgcacagaccaagaattcagtgaatgtcattttttaaaaaactaatttgtattgtctgctctagtgatacaagttttactagtgataaactattttaatcaaccatactattcttatggaaaaaaatatctattttggcaggtttctgtgcctttatttccctcttctgaaaaaaagtctgtgttttcatagtttggtttgcattgtatatcaataattaatcaggaatgggttttggtgcctgaaaaattggccatggaggcacaccaaagcttcaagcacaagtcttgtacatgggccatcactgtctggtttcacttcgtgtgtttcctaaacacatttagctgcttttttaacaaactcagccccatacttgagtcccttgttgttgggagcatttccagggcatcttttaagggaactgttgacaaacagcctcgggcaggatggaacacggaggctctctgttgtctgtctccgagatctttgtgtctgggga

SEQ ID NO: 312720 - DNA, 507 bp, Homo Sapiens
gggaagttcccagggagaaggcagcgcgttttacccgagattcagggtctggctctgcttcccaggctagagtgcatttggcgcgatcacggctcactgcagcctcgacctcctgagctcaagcgaacttcctgcctcagcctcctgagcttcctgagtagctgcgactacagaaaaaagaaatcctctttttagaacatctcttggtggtaccatcagaaatgtcttccttaagtggaaaagtccaaaccgttttgggccttgtagagccaagcaaactgggccgtaccctgacccatgaacacctggccatgacctttgactgctgttactgtccacctcccccgtgccaggaagctatttccaaagaacctatcgtgatgaaaaatttatattggattcagaaaaacgcctattcccataaagaaaaccttcaattaaatcaggagacagaagccataaaggaagaactgttgtattttaaagctaatggtggaggggctttgg

SEQ ID NO: 312721 - DNA, 646 bp, Homo Sapiens
gcgcgttgtacccgagttacctgtagtcaaccacagtctgaaaatattaaggtattttaagacagaaagagagagaggagagaaaccgcattcacaaaaaagaaatcctctttttagaacatctcttggtggtaccatcagaaatgtcttccttaagtggaaaagtccaaaccgttttgggccttgtagagccaagcaaactgggccgtaccctgacccatgaacacctggccatgacctttgactgctgttactgtccacctcccccgtgccaggaagctatttccaaagaacctatcgtgatgaaaaatttatattggattcagaaaaacgcctattcccataaagaaaaccttcaattaaatcaggagacagaagccataaaggaagaactgttgtattttaaagctaatggtggaggggctttggtggaaaacacaaccactgggattagccgagacacacagacgttgaagaggcttgcagaagagactggcgtccatatcatatctggagccgggttttatgtggatgcaactcactcctcagagaccagggccatgtcagtggagcagcttaccgatgtccttatgaatgaaattctccatggagctgatggaaccagtatcaagtgtggcattattgg

SEQ ID NO: 312722 - DNA, 1003 bp, Homo Sapiens
  misc_feature (474)..(474): n is a, c, g, or t
tttcagaataggggggcaaaattggggggcctcccaaggatttttttacctgtttcccatttttcagccatttcaaggattttggcccaaattaaggggtttccggagccaaattcccggggggataaccaaagtttccaaaacaattacggccaggcggaatattcaccttaggagttttggattacctgggggccttatcaaccctggcctcggaatccacaaccatgggcaggatcctttcgttgtgccccatcactggaatccccttagcagctttctggatgtctctgaccagctgggaggagccacgtggaatgatcagatctatcattttgtctaggcggcaaagatcttcaacttcttctctggtattcaccagttgcacggcctccttgactccatggattgagagagcctcctgggtcaggaggtggagaatccggttgctgtgtgcagcctctttccctcctntgagtaacaagccattgccacttgcgatagccaaagctgccacctggggtagacagtcaggacgagattcaaagatcaccagcagaactccaattgggacagtcacttgttccagttccaagtttttggcgattcgggtgcggcgcaaaacacgtcccacgctgtcctgggaggaggctgcgatctgtcgcagaccgatggccaggctgttcaatttggatgtggagaggcttaaacgtttcagcagaggagctgcaagtctcccctctgtctcctccaagtcttttttgttggctaacaggatctcatcacgctggtccgtcaacagatcagccagatgatggataatttctgctctctgctcaggttccaaggtggccaacatccttcctccagatcgcgccatttctccctgctgctcaacagtagggcctgcaggctttacttctgaaaagaaggtaccaactttcttcccctccacaatgtctgtgatgacgtgcccagacacctttgggtgggttccattggc

SEQ ID NO: 312723 - DNA, 834 bp, Homo Sapiens
  misc_feature (153)..(156): n is a, c, g, or t
  misc_feature (159)..(159): n is a, c, g, or t
  misc_feature (161)..(171): n is a, c, g, or t
  misc_feature (173)..(174): n is a, c, g, or t
  misc_feature (177)..(178): n is a, c, g, or t
atttgggggggaattccaaggccctaagtccaggcccagggttttccttaggaaaaccggtattggaccatgttcccctttcctattgggcccgccggcgcacaacgaatgtttttgaaaactttttggggggccggggccgccgaccaaggnnnnttntnnnnnnnnnnngnnggnnggggttaaaaatccttttaataaagtatatcagtgacaacttcctgtttaaatatattgttaaaaaatcatgcaagagcattttgttatcattatgaggaaagatttgagactactgttccttctgcagaaacgctatgcacagatgcaaaatgatcaaaggctgatacaataatgaatctcaagtaagtagcggagccatcatgtgccacaatttcttcattttgaagctgcccctctgtgtgtaccaaatctttttcaatccattgctcaaaatcaactggctctttagacgtgcttttttcaatcttcaaggtctgtacaaagtaactttggattacaagcctttcaatccttacatgtttgtggaaacaaataatgaattcctggggaaacattcctgtggtggtccaaaacgtttctggattcccatcaatgatattttcaggtgggtgtttttcatcacttgatgtagctaaaatcacttcggacccttcagagctcagacagagatcaatttttctcatcttaaagtgtttaacctgggactcccgttagctctgggcgccggaccttccgggctcgaaacctcccttgcgccccgccccacgcagagcgtcccgacccgcagctccgcctgctcgccgcggcctccgt

SEQ ID NO: 312724 - DNA, 919 bp, Homo Sapiens; identical to SEQ ID NO: 135827
  misc_feature (71)..(79): n is a, c, g, or t
  misc_feature (311)..(311): n is a, c, g, or t
  misc_feature (317)..(317): n is a, c, g, or t
  misc_feature (320)..(320): n is a, c, g, or t

SEQ ID NO: 312725 - DNA, 630 bp, Homo Sapiens
gttcaacgtacctgtgtaatgacgcatctgaaaaattccttttaaatgttagtgacagtaaggtttttctctctgaattacagagcttgctgtgattgcttttttgttgttttattgttgtttgctgccactgtctttaagtctagagctaaaattattgtttgattaaggtagccatatttggttagatttttgctagattcctactttgggtgaatttgatctgtttttttcttgtaatgattttatgtttgaggtctctcagatacctttggaaccaggcagggtttgctacttaagagaactggtggcatcaaactggagacctaggaaagatatatttgtactttaggtaaaatagacttgatagtctacatgtagtaaaggttttgttgaatggtccagataatatctgtttcatttagcatcagaatgcagtaaatcagaatcttgcaaatggtaaaattgtgcttaatttaaaaaaataatgttttgttttctaatgttgttttccatgtcaatttaaaattcttctaatatatggtaattcaggaaagtttctttgctcttgttgataatggtcccaaaagatatcttccatatagaaaatacactgaccattctctttcg

SEQ ID NO: 312726 - DNA, 1410 bp, Homo Sapiens
  misc_feature (24)..(24): n is a, c, g, or t
  misc_feature (47)..(47): n is a, c, g, or t
  misc_feature (174)..(174): n is a, c, g, or t
  misc_feature (248)..(340): n is a, c, g, or t
  misc_feature (384)..(384): n is a, c, g, or t
aatagtaccactggttctgaaaanaacttgaatgaatggtgtacttnggaaaggtcgagctggggcagacagagtctggaatggccctcttcgtcaggtacaggcccacgtcttgtatgaaactctggaggattcccaaggcttccactgaaatttttgttcgtggccgggtcntctgtcggttttcctcatctgactctgctggagaggccaccgtgggttgccgtggggggaaccgagggcctgtnnnnnnnnnnnnnnnnnnnnnnnnnnnnnnnnnnnnnnnnnnnnnnnnnnnnnnnnnnnnnnnnnnnnnnnnnnnnnnnnnnnnnnnnnnnnntggaacatggataatgtggggcggcctgtcgccatggtgatgcnaccgcgttgctctcctgttcataaatggcatcacgttctggctgagctggagaaggatcttctttccagcgtaacagctcgcacaaccatccctggcttttggttgctgcaacctttgcaaacagtgcttgagacactttagcacgcttcatttcctgctgaatctcatcataaatggaagcattaatgttcatggtattgttctctggtttcccattcctttcagtggcaatagtagttgttttcacttggggagggcgtttgggtggtgtgttgatagagtggggcaggacccatgtccgaggcagcattcaagctcctttccctttcgtcctggtatattcggtctctttcagcttccggtaactgcaagaaattctgcatagcccgaaggtttaccagcaaagactgggatgcagtcttggggtcctcttcctttcggaggatttctgaaagcaagccctgagttctgttaaaagccacacgtgcaaataccgcctgggagattcctgctcgtttcagttcatcgcgtacccactggtagatttcggaagacacctctgtgttggtcgaaacctgttgctccaaaggcttattcatagatctactgacagggggagggtggttcaagtattgttggtttaaggactgctgggctaaaagtctattcactgcatactgctggttcagcagctgagccatcaccagctgctggttgaccaattgaggactgataggtgttgatacgagcccagggtgcaggtttggaagaggtgtccggacagagggctggctgccatgggagagctgcgcaggggatggaggctgctcggctgtgttccctggaactggttgctggccaaaattgacatgattggcgccttgctgggatagctcagaaagactatccatttcaaccatcatatcttttgtcttcttgaaatgtttgtaccacctcccaaattcttgacattttgctgctgagacatttgcatagtaagtactgttcacaatggaagaaatcat

SEQ ID NO: 312727 - DNA, 1478 bp, Homo Sapiens
  misc_feature (146)..(146): n is a, c, g, or t
atttgagaacagccctcccatcttagcaatgtcccggggtggctggagccacggtcacttcttggtcctggtccagaactgtcggtagcgctccacatgcaagtcatcactgagctcctgctcgtactccttcctcgactggagcngagcctcacgcttccgcagcctggcccggcgctcctcaggagagagggtgtccagatctatgggcatcgccagcatgcgccgtggctccctgtagcggatgtggatggtggagccatcctgcttcaccagcagcacggggtagagtcgtgcataagcctggcggtgcacacgagttagttaggccctgctgctgtcagctcgccaggaggatgtgtgcaggcggcggagtgcaggtccggtggccttcacggtgttctgcctcagccggccaagcaggctgcccacggccgccattcctccttacagccccagtggcacgtggaggtggtcagtacaggccctggcgtgcaacctgctaggcagagaatgaagagatcttttttaaaaggaaggttcttccacctaatggtttcttatcaaatcccagcccaggatgcttccaagacacatgtaatcaccacgccacttaccaacctctcccagcaacccttggacttctcagaaccgcctgtagaggtttttccaaaagcagaagttggtcactactcccaaagattctgagttagcctgcggcagggcccaggctgtctgttctggccgttaccgagtctgcgaaacctctctgaatggactgcagcctcaaaagtggagctgaggtcatgccttgctttctaaggtcattgctagttttaataaaaactcagtgaagtgaggattgtcatgcttgcttaaaggagaatggaggcccagggctgctttgctgtgacctggattcccatgggagtctgtgctgaggtgtgcgaagtaaaagcccagttttcaatactcagattccaggagatgaggctgcacagaggccgagcgcccagcttcctctggcgtacccctgtctctcaccaaggaagggacctgaagacaggtccggctgcctctaaaatggaaatcctgctacgtgtcctatgcccacatccctctccctcggcctcaccagcacaggagcctggggctggtccaggagggtcttcggggaaagctccctctcctttcctgctagactgcatggggacaagggcttattacaggtgcagccccctgtccccttccctgcctccctccctcccgactccaccgggagggtacagcgcctcccgcctctgttcccggcccacacgaggcgccaacctgcggccgccacagtcgctgcggaggggtctgaggacaggcggtcctgactcccgctgcccggtggaactaagaccagggacgaggccacgcaggagatcaaggtactcactgcgttgggtgctgctgcgctgcagcccacgacgtcc

SEQ ID NO: 312728 - DNA, 731 bp, Homo Sapiens
  misc_feature (138)..(168): n is a, c, g, or t
ccccgggttttttcttttgggaaaacccagtttttgggcccctttttcccttttcccttagggggcgcccgcgcggccccaaccgaaatggtttttgaaaaaccttttggaaggggccgagggccgccccaccaaggnnnnnnnnnnnnnnnnnnnnnnnnnnnnnnncggcagcttccaggaacgagtgatttaagaacagccctcccatcttagcaatgtcccggggtggctggagccagggtcacttcttggtcctggtccagaactgtcggtagcgctccacatgcaagtcatcactgagctcctgctcgtactccttcctcgactggagctgagcctcacgcttccgcagcctggcccggcgctcctcaggagacagggtgtccagatctatgggcatcgccagcatgcgccgtggctccctgtagcggatgtggatggtggagccatcctgcttcaccagcagcacggggtagagtcgtgcataagcctggcggtgcacacgagtgagtgaggccctgctgctgtcagctcgccaggaggatgtgtgcaggcggcggagtgcaggtccggtggccttcacggtgctctgcctcagccggccaagcaggctgcccacggccgccattcctccttacagccccagtggcacgtggaggtggtcagtacaggccctggcgtgcaactgcgttgggtgctgctgcgctgcagcccacgacgtcactccc

SEQ ID NO: 312729 - DNA, 776 bp, Homo Sapiens
  misc_feature (109)..(109): n is a, c, g, or t
tgatcggtgcggtagttatatgttttgctttcaagaaacggagtggatttaaaggaacagcccttcccattcttagccaatgtcccgggggtgggcgggagccacggtnacttctgggtcctggtccagaagctgtcggtagcgctccacatgcaagtcatcactgagctcctgctcgtactccttcctcgactggagctgagcctcacgcttccgcagcctggcccggcgctcctcaggagacagggtgtccagatctatgggcatcgccagcatgcgccgtggctccctgtagcggatgtggatggtggagccatcctgcttcaccagcagcacggggtagagtcgtgcataagcctggccggtgcacacgagtgagtgaggccttgctgctgtcagttcgccaggaggatgtgtgcaggcggcggagtgcaggtccgttggccttccacggtgctctgcctcagcgggccaagcaggctgcccacggccgccattcctccttacagccccagtggcacgtggaggtggtcagtacaggccctggcgtgcaaccagcacaggagcctggggctggtccaggagggtcttcggggaaagctccctctcctttcctgctagactgcggacgccacagtcgctgcggaggggtctgaggacaggcggtcctgactcccgctgcccggtggaactaagaccagggacgaggccacgcaggagatcaaggtactcactgcgttgggtgctgctgcgctgcagcccacgacgtcactccc

SEQ ID NO: 312730 - DNA, 506 bp, Homo Sapiens
  misc_feature (17)..(17): n is a, c, g, or t
  misc_feature (34)..(34): n is a, c, g, or t
  misc_feature (56)..(56): n is a, c, g, or t
  misc_feature (71)..(71): n is a, c, g, or t
tgaactcctgctcgtantccttcctcgactgganctgagccttcaacgttccgcancctggcccggcgctncttcagggagacagggtgtccagatctatgggcaatcgccagcatgcgccgtggcttccctgtagcggatgtggatggtggagccatcctgcttcaccagcagcacggggtagagtcgtgcattaagcctggcggtgcacacgagtgagtgaggccctgcttctgtcagctcgccaggaggatgtgtgcaggcggcggagtgcaggtccggtggccttcacggtgctctcctcagccggctgcagataaatgttcaagctctggtcagccgacagtgctgcagcagagtgccaacatgactgaggctggctgtgattggcactgccgggccacaggagacattaccagagctggtggacgtgccggggcaggatgacctcggggcttcctcgagtgacacaggctgtggtcagaggcgttcttgcgtgtgccgaa

SEQ ID NO: 312731 - DNA, 3092 bp, Homo Sapiens
  misc_feature (15)..(15): n is a, c, g, or t
  misc_feature (137)..(146): n is a, c, g, or t
  misc_feature (152)..(152): n is a, c, g, or t
  misc_feature (302)..(302): n is a, c, g, or t
aaaaacgcagagatnccatccgaatgggaaggcattggggtctggaaaccagaaatgcagggacggccagtgggccccagcagctctggggctgcacttttgaagaactttctctaacggttttgaagatagcattnnnnnnnnnnttaagnttgcaccaggaggcctaagaaggttccattccagagagaaagtccactgtaggtcagtcacagcaggcccaggcccaggacacagggttgagcattttacggcaggtaagaggcttctggaaacttggcctctgaggcaaccctggcccnaggtggagaggttttcagtgctgaagtcaaactgcccacattcctccatcctgaaaggctaaggaagcaaccactctaacgtcagactcatagcctgtctccgccaaagttggtacggcccctttcctgaccaggtccgaagtcttcagctgaaggggggaactgagaccccttggagatgctctgtggcctgacgtttggtccccagccctgcaggcaggccgcctagtcgtcctccccgccaccgtacatgtctgccagcttcttgaagcggctgccccactcgttcagataatcgtaatcttggtcttggtcggaggcggaggaggtgagggagctcagggacgcggcgtcggagccgctgccctcatagtcgaacaccaagagggtgtcgtagggcggggctgtggggtctgtgttagccgccttcaggttctcaattataaagttgccgatttcatctgggttggctggccgaggacggtacatgggtgtcgggatgatggttggtgccacgtcattgcggagaaccacctccggcctggcctccagacctcggtggagctgggtgatgtcatagtcctggtcctcttcgccaccccccttttcgccatagtagaagacgttgtcacgggtgtcatcttctgggagtaggaggggctccttgatcttccgcttctttctcaccaacaaaagcagcaccagcaggaggaacagcagagccaggacagcccccagcacagggaggatgaaacctcccttccagggtccagggcaggtttcgacatggccatggcagtcgcacacagtggccctgatcaccgtcagctgctctttgttgccatggtcagacagagaaaggtgcacgtcatatgtatcctgcttcaggaacttcttcagggacaagaccactgtgtcaccttcctcgttgacctctgccgtccagtagatgtctgagtcatctgtgagctgggcctggaaaggggaggtgtggggagacaggtccttgtccgtgatgttcagcacctggcgcacagggctttggttgcagatggtgatctgacggggctcagggactgggccatggtcattgacatcaatcagtgttagcagaagggttcccgtgccagtggtgggagggcttccattgtccatggccaagaccatgacttcatagatgttgttcctcacaaactgctcatcctcacggtcgagggtgcccacagctgtgacctgcccactgtctgggtccatggctagccaccctgctgggtctctcaggatgcggtagctgatcttttgattctccttgtcagggtcttctgcagtgtagacacacacaggctccccagtggggatgccctcctggacctcaacgactttggagggtgggacaaacacaggtgcctcattcacatcctccacgtggaccactatggtggctgtggaggttgggagcttcagcacaaaaggggcctcgttggtcacttcaacgtacagggtgtgctggtttttggcctcaaaatccaaacccttcctggttgtcaggatgccctggttgctctcagggtgggtggtgatggtaaaatggtccccgtcgtcaccgcccatgataaggtaggtggcacgccacgctggtgagttgggggcgtccagatcagtgaccgtcagcctctgcacctcatggcccactgcattctcaggcacatgggcctcgtacttctgggggtcaaacatgggagcattgtcattggcatcaaggatctccactactgccactgccgtggtggtggagccgtccccatccatgtctgtggcctggatggtcagtgtgtactcagggactttttcccggtccaggccactggagatgacgctgatggtgcctgtgctccggtgaattgtgaacatgaggtcgtgtgggtcctttggttcttggctatggatggagtaagcaaccaccccattggtaggtgtagatggcatcatccttcatcccgtggctgtcacctgcatcacagaagtacctggtaggactccctctaagacactccctcggaaggtgtcctgggtaaacttgggcttgtggtcattctggtcggtcacgatgatggagatgttcatggggtcctccactgaggcaccattctctgacacagcgtggccaaagagctcatacttggcaatctcctcccggtccagtggcttattcaacaacaaccagcctgtctccttctctacagcgaagacaccctcaggggggctgtctgcccccggccccgtgatgctgtagaaaatcttggtgtctctatctttattagacttgagctgattcagtctctgggggaagggacccttgccattttcagggacagatattggagcaaccacccaatctctcttgtgtcttcgtaagatacgtttggatgggaagatcttcaatggattcctttccttcagtgaccttctttcctggactgtctcgccattccgcacagtgaagtcatcattatcagtgctaaacagagctggctcttgcccagggcagcccatgaatactttccccagcgcctggccgggctcctgctccgcgcctcccgcctccaaggtcacttcagcctccctgaagaccgcccggcacggctcggaggccgcgcactgcagccagcaaacctggagaaggaggagagacgcgagaggtccacgagggagccccatggctgcagagagaggggtgaagcagctgccgcgacggcgggccggtgttccgctcagctcttgcccctttga

SEQ ID NO: 312732 - DNA, 671 bp, Homo Sapiens
tatgcttttgggttgggtaactgcttttaatattaaagtaatagaatattgaagcaatattgtctagcactctgctggacattaagtccgtgggaggagaagtgaacaggaatcgattctttgtcttttaactgcccttagttaggagatgttaaaatacttggcacctctggttatatgtatgttatgtgtgttctcccccctaaaatttctaagcacatttattcacttttaaaatgaatctttaaaagattatagttagtagttatagttaatattctattacttggaaaaatgtgaataaatggatcttcaaaagattcattttaaaaatgagtaaatgtataataggctataggtgatcttacttgcgtattaggtaggaggcacatatttataccatttcatatgtaatatctttgtcattgtgtttcatcgaagatcaattgctagcaacttgaagggtatttatacttgggtcacttgaactcagctgactaaattgtaagaacgagagcaagcaagatggctgttattggaagccataactttcagaagataattctgcacaattcgtaagttaaaacacacactttgtaaatggaatgttatgagacagtcgcctctcagtatccatggggcattggtttcaggcctcccttacgatgcct

SEQ ID NO: 312733 - DNA, 429 bp, Homo Sapiens
ttgagaattttgacttgggatactgggttgttggtgacaaataatgtcttccttttcccccttcccgcctggctcggttatgggaatagccgtcagtgcatccatgtctgtgaccaacacccagccagactaatgtacacagcagggagaaataacattcaaatggtggttcacacatctcatctcaagataagattcttagggttcactgctttattcaaaagtgttttcactgtagctccttcatatggaatatcaaaactgaagaaattcacatgtggaaatgcaaatagacattgattaatcaaggtagcatctttatgtaaatatataaataagtttgggcattgaaatgtaaactgtacagctaatagacttttctcctctgcaatgtgggttgctgtcatttcacgtaatgtgtatgtttac

SEQ ID NO: 312734 - DNA, 596 bp, Homo Sapiens
  misc_feature (65)..(183): n is a, c, g, or t
gttcaagccattctcccacctcagcctcctgagtagctgggaatacaggtgcttgccaacacatnnnnnnnnnnnnnnnnnnnnnnnnnnnnnnnnnnnnnnnnnnnnnnnnnnnnnnnnnnnnnnnnnnnnnnnnnnnnnnnnnnnnnnnnnnnnnnnnnnnnnnnnnnnnnnnnnnnnnnngtgtgaaccactgtgcctggctgtgttcttacttttttttgtggcctcctgaatgtagaggagtttggaggtatgtgtgtccctgtggttgcatggtaggtgtgggtatgaggatgtgatgtgtctgggggatggtggtttataggctttttgtttttctccagaggcccagttggttgatgacttcagtttcttagaggtgaaatcccagtgaaaccgagtcgaatccccagtagaggggaaggtctgagcgaggttcagtgatttgtgggcactcgaggaaggttggcctttaattcatggaaagggttcctcatgggcagtttggaccttgctgttagggtggaatgagaggtgctccaaccttaacagaggcacagaaactagagaagggacctggttcccactgccac

SEQ ID NO: 312735 - DNA, 668 bp, Homo Sapiens
  misc_feature (82)..(82): n is a, c, g, or t
  misc_feature (110)..(110): n is a, c, g, or t
tcagccccgctggccattcagagcttctagcttgtggcaccccagaggtagaggaggtgccgaggctgagggcaggagggtntccacacatctggggtgggagtgtggtnccctctcctgaggggcaaaagcccaagcgaactagagggcatttggtccagaagccacagcaccttggagtaaagagccaaaggtggaggtgtcattaaagaggggacatccagcaaatccaaaaagggtccatcgaggagagggagcaggctgagtcatttccttgaagcatcattttcaagccttatttttttcctttctttaaaacaatgactttctttcaaaatgcacaccaaaatcttaacatggaattgtaagccacaaaacagaagtgacaacactgatctggtccgcaggaaggaggggtccctcagaaccctccctgctccatctcccacgtggccctaccttcttggggcctctagggtgctccggaacccagtttgaaaacctggaccttgaacctcagctggcgctgaggtccgcatggggaccgcggggcttggaggctggtagaagtggttgggggaggtgggacgcagacaggagaccgtgttccctaggaggctgtttcagtgtggacaagatcatcatacgcttcactcatcaaaatcccc

SEQ ID NO: 312736 - DNA, 1988 bp, Homo Sapiens
aaaaaaacacaagttttattttaaaactttatttctgcaaagccaatcaagaagtgttggaaggaaaaagtgtaaaagttattcttgcatatttgggaacagcaagcacttagtttgagaaaatgaggacttaaaacagttgaatcaaaggcaataccctgctacttgtatttaaaatcaatggtgatgttctttcttaagcaacattcttctcttccctaatagctacaatatgatacagtacgcaacagctcacttgaaagtgctagaatcagaggataaagaagccataagccaccccacttacatttcctactatacaatgcctttttggcgcttgataaatcaagcattcatgtagcattacattcaacagaaacatttctcgtactttgggtttaagatccttgtccctccagttcggatgtcgtgacatctgactcttcatcattgtaaatattttcagccatttgccatatctgcatgatgttatcctcagacactgagcaaatgacccaaggctcattggggttccagctaaaatctgaaatcttagcagtgtgtcctccatgaataaacaggagttctggaggcccatcttctgcatcttctgctgattgttcttccccaattttacttaaatcccacacattcaggcggcggtcagtaccacttgaagccagaatagtttcattatgtggagaccagtggacctggaaaatttcatctttatgagattcgaaggtatggagttttaattttaagttacgcagatcccataaagctacggtcttatccgcagagccggtggctagaataaattcgctgtagggattgaatgagaggcagttgacttcggcagtgtgcgcatccaccaagtgactcggcttggaggtggtattggacctggtgtcccatatcataagtttctgatcatcagcaacagatccaaacaatgactcgtgcagcaggtgccaggccacatcctctacaacagctgagtggccagtaaagatggctttagcatccacaattttgccttcttttggtcctgcgtttatatcccacagacaaacagtatggtcatcagatgcacttaggagatgtccactcaaatttgaattccaggagagaccatagccttccttctggtgacctcttaatctgagatcaggattacattctccacttgggtctggtttagcagggtgttttgtatagtcaaaaaccaacacatcagaagatggtgtttttgtagcaatgatgtgaggattctgcggcatgtaacgagcacggtttacttctccttcgtgattgattttaatttcacattcaatttttcctgttacagaaccaaagccaccaaattcacccttgtcactgtcacaatgggaagcatcaaactgtgcatcatcattgggaatatgtactcgagcaaccaccagatgattctgctcatcagacgtatgagtccccagcactagccaatgaagggcataatcttttccttcaggtttagtcacttcaggaagccactgaacggtaagactgggccactgaagagcatgggtcataaccaggtcatatagaaacggtgtattcttcttccagattttatattcttcattgatgacacgctcctccacagtatcttcaaacatctctttactcgccatcttgcgtcgggtcgttcgcccctcgccgccgcctcggactcctctcgttagccaagagcagcccgaccgctggcgctcctgcctttcccaagcgcgtcacactccccactgtcgaaagcccgggccccgtcttgctgcctgggtgctccccagacgccgcgtccttctttcctgcctcctccccgctcgcgggtaccgaggtctgaggcgctcttctctctctctccaaacttggaacgagacttttcaacccgcgcctcccagcccgcccaggcagctgagcgcaggcgcatccgccctgggaaaagtgag

SEQ ID NO: 312737 - DNA, 765 bp, Homo Sapiens
ccgtcctttccttcaggccgcttctggatcctcctttggtctttcgcttcaaattcacatttgctcctctcttataaaggaattttagggctttgaccttaccatacacagcggcttccatgaaggctgtgaagccataaaaatcacactcattgacatctgctcctttagaaaggaaaagtttcagcagcttcacgctccccgcaatcgctgcgaggataaaaggcgtggccccattcttcttcctcagaacagggtcagcaccatgacgaagcagaagttccacaatgtcctccctgctcatttgtactgcgttatgcagaggtgtccagcccccttcctcttcctggaaattaacattggctccaccttccagcaattgctggaccaggtcaacatcttcgttttgaacagctttaatcagcaagtgattgtcttccactgcagcccttctaccgctggaggacgtgggtccctcctgggggttgttatgatccctgctctccatgacggtaaatgccacctgctaccacttttagccttttccttgagaaaatgcaaatttatctcctagcacttaatcaaagaagctttgagtgtaagttgggattctctggcaacagagcagcagtatgaagaaggaacaatgttctcagtcttctgacattccacctgctcaactcagacgtctcaattattcctttggcagccgcaaagcctggaagactgcttgcagcccgagcagtttcctcctgctgcgtcccc

SEQ ID NO: 312738 - DNA, 1223 bp, Homo Sapiens
  misc_feature (27)..(27): n is a, c, g, or t
  misc_feature (178)..(186): n is a, c, g, or t
ttctaatgaatcatatcaagtcagcancaacccaagcaggtaacattccccaatttgagtgtcagaatcataaagatgaaattactgtaccaaagcctttttctcctagctaaaaagctatacaaactaacagtcaacattctgttttctttgcagttgcgtgctctagaatgatatnnnnnnnnnaagtacctgtgatttcattccagtattcaaatttgacccaaacaatttttatgttccaggaacacttagctgatataaccatctatagtgtgaagagtcatgtacagagtacagcagtgggttttttctagccaagcgtaggctgacctaaattggtttaagctctctcccagtcattcctgtaattattcctagcaaacacacggtcccctcggagggttaaggtgttgaagctggtactgtagcacttctgtatcagctggctccttggatcattttatctagattgaggtagtccagagatttggagtgagccctcttacctttaagaagacaaagaggcagaggcccatggagggccttgtaaggttcataaggtaaagatttagtgcacttgtctcctgagcttggcatccgccttcgcctcctgccattgacagctggaatctcgtatggctggtagtacctacttctggttttatacaaacgagaggaacgggcaagtcctgcatctagctgtttggagcgtaaggatggcatggcttctgctttgctctcttcacgtcctgggcacttgtgagctaacttcaggagttccctcgccagtcggtgaagccaaccaaaatagttaggagtccatgtgtaggatctggtagcctgacacggtcctccgcatcggggagcagggtgtgctggagcagcggggcttctctgcctccgcctttcccggggagttggcctcagccccagggaagggcaaggtggtcagggtacttctagactctccattaatatcgacttccattttaagcaccagtctgcacaatccagactaaatcccagaagatgtcactgtacaatttccaatgagtcccaagggaacacagacataataatttttctgttctactccaggtacgatggcccagggctccgctgcctccgccgtgcccggggctgcggagcgggagacaggggcgggatccaggcagaggccgccagccgagccagccgggtaccctctcctctcccacccc

SEQ ID NO: 312739 - DNA, 759 bp, Homo Sapiens
  misc_feature (24)..(24): n is a, c, g, or t
  misc_feature (83)..(83): n is a, c, g, or t
  misc_feature (101)..(101): n is a, c, g, or t
  misc_feature (121)..(253): n is a, c, g, or t
  misc_feature (374)..(374): n is a, c, g, or t
cttccttgcccaggctggagtgcncatcttggctcaccacaacccctgcctccccggttcaaccaattctcctgcctcagccntcctaagcagctgggatnacaggcatgcaccaccacgnnnnnnnnnnnnnnnnnnnnnnnnnnnnnnnnnnnnnnnnnnnnnnnnnnnnnnnnnnnnnnnnnnnnnnnnnnnnnnnnnnnnnnnnnnnnnnnnnnnnnnnnnnnnnnnnnnnnnnnnnnnnnnnnnnnnngcccggcccagtcagcagtactcttaaacgccaataatgttcaagctgagaaacacatcatcaagaatgcaatcctattaaaaatagccacaccccccaaaaaatggactaggagtatgtnctaaccaaggttgtgaactatctctatgaggagaactacaaaataccagtgaaagaaatcagacaacacgaacaaatggaaaagcatttcatgctcatgggttgaaagaatcaatatcaatgaaatgtccaaactgcccaaagcaatctatagattcaacagtattcctattaaatgaccaacatcacttttcacagaattagaaaaaacttctaaaatgtatatgaaagcaaaaaagagctcaaagagccaagacaatcctaagcagaaggaataaagctggatgcatcacattacctgacttcaaaccatattgcaaggctacagtaaacaaaacagcatggtactggtataaaaacagacacatataccaatggaataggac

SEQ ID NO: 312740 - DNA, 372 bp, Homo Sapiens
ggctgcaggaattggcacgaggcacgatggcggcggtctcaatgtcagtggtactgaggcagacgttgtggcggagaagggcagtggctgtagctgccctttccgtttccagggttccgaccaggtcgttgaggacttccacatggagattggcacaggaccagactcaagacacacaactcataacagttgatgaaaaattggatatcactactttaactggcgttccagaagagcatataaaaactaggtcaggatctttgttcctgctcgcaataacatgcagtctggagtaaacaacacaaagtggaagatggagtttgataccagggagcgatgggtaaccttcagtactggatgcgtttcctttgg

SEQ ID NO: 312741 - DNA, 718 bp, Homo Sapiens; identical to SEQ ID NO: 126498
  misc_feature (19)..(19): n is a, c, g, or t
  misc_feature (31)..(31): n is a, c, g, or t

SEQ ID NO: 312742 - DNA, 1142 bp, Homo Sapiens
ggaccataagaagactccctcaggttgcccgagttgcccacaacggcgcagcgccggcagcccaccgacctcttctccagcatagggtccacattcccaggcaccactctgaacagctccttgatggtgtcattcaagttattgggcttcttctcccgctggagcctcagccaccatcggtaggtgtcgtcctccaagagcgcgttctgggcagtcagcagcggctgcatggtctggttgaacctctcatcgaaccaggccgagagcttgcgctgcccgatgcagtgggtgcaggtgcaaggcctgtgcttgatcagtctcttcaggttctcggagagctccaggaccatctgcttggggaaccaggtggtggccaccatggtgtgggagtagttcaggaagaaggaggtgaggaagatgaagagcacgaggaaggtgagcactttcagggtcctcttccgcagggtcaccatcttcgcagtcctgatggtggcctcccacgatgggtagcaggaactccctcctaagagaggagaaaaatggaagaaaaatcccagaggtggaggctcaatcaaaagggatggcaggaattccaagggaggacacaagggccgctaagctcgacttcactcctgctgggggatgacccccaactgtgtcccagacacggctgtgtggtagaccaacgccattcgtggcatgttggctttgcttgcatatatttaccttttcagaaaataaagtagcctattctcctgcaatccttaaagagctgataatgtctctcgatcaagctttaaccagtgatttcctttcacatccaaagaagataaggggtcattaatctctgtgacagtccagggtccctcaggagcgaggacctcgaaggaagggtgttggtatagcggggagggaaactgtctctgccgtcctcctccaactgtggtttctgacgatccttaattagggctttttctttcccatcctgtcgccagggacatggtgggtacacaaccagcttgatgaaggcacagaaggttgtctgtcatccatcgggagatttcatcctcaggctcatgacactgatagggtctttggcagggatggcaccaggggatccctcgtgccgaattcgccaccca

SEQ ID NO: 312743 - DNA, 919 bp, Homo Sapiens
cggtttacacttggatttttgccaggaaccggggatgtagggtggggaaaatggtgccccgtggggagggggttcacccacccctttccaagtggatgtcttgaagggcaccaggatcatgctgccattatctcccagcttcccggaagctctcaggggtacaccagatgttgggtggtcttggtcccaacatcagcttcaaaccctgccgtgggcgccttgttcatcctgaggacaaagtcgtgactgtctatctcaggcccataagaagactccctcaggttgcccgagttgcccacaacggcgcagcgccggcagcccaccgacctcttctccagcatagggtccacattcccaggcaccactctgaacagctccttgatggtgtcattcaagttattgggcttcttctcccgctggagcctcagccaccatcggtaggtgtcgtcctccaagagcgcgttctgggcagtcagcagcggctgcatggtctggttgaacctctcatcgaaccaggccgagagcttgcgctgcccgatgcagtgggtgcaggtgcaaggcctgtgcttgatcagtctcttcaggttctcggagagctccaggaccatctgcttggggaaccaggtggtggccaccatggtgtgggagtagttcaggaagaaggaggtgaggaagatgaagagcacgaggaaggtgagcactttcagggtcctcttccgcagggtcaccatcttcgcagtcctgatggtggcctcccacgatgggtagcaggaactccctccttttcagaaaataaagtagcctattctcctgcaatccttaaagagctgataatgtctctcgatcaagctttaaccagtgatttcctttcacatccaaagaagataaggggtcattaatctccctcgtccgaattgcc

SEQ ID NO: 312744 - DNA, 1370 bp, Homo Sapiens
  misc_feature (226)..(236): n is a, c, g, or t
  misc_feature (375)..(375): n is a, c, g, or t
  misc_feature (391)..(391): n is a, c, g, or t
  misc_feature (662)..(675): n is a, c, g, or t
gcttcgccggggaaattttttctacccccgagaaaaagcccagggggtggggccaaataccacatttaaggatcattttgggtttttaaaaagttcttccttcttctgggaaaagcagaacttataccagtgggtggcatcctggcagatttttagtctaccatttgggaaagggtgtaccgcctctcgcactttcaggagaaccaagtcaaaaagtgattggctnnnnnnnnnnngtggtagcaattcacagcctattcctgcccgctgaacagacattgtgatgctttgatttaccccctagcagctacatattcttgagcaagtcataacccctattgtgcctcagtttctggatctgcaaggagtgttgcntgcataaatgtttgtntaggaacttagtaaaatgacatactcctctctctgctctaagaaggccatgagccagctgcagctcatctcactcagcctgggcctgaccagagtcctttcctcttccaagagaaagcaaggaaaagcagcaagcaagcagacataccaggtcaacaggagtgatctatcattggcaacgaggcctcaaacaaactgcaaatgctctggcttcagcaccttatccccaaatgccacaaaccagacatggaagccatgcaagagtgactatnnnnnnnnnnnnnnggcacagacagagtaccaccaagcaaaaagggggctaatactgcagagatggccccaaagtgcagcttgaggaacacagcaagtcatcccaagaccctcacttagctgccaaagaaacagcaaacactatcagctttgcttcagtcttctgaaatgaaaatattaataaggaagactcactaatacttgtggcaaacactattagcagggatgcagggtgtctcctgggctgcaggactccatctgcttcagctgaactcttggaaactacagatgagagatatatgcatacgcacacacatatatgcgtatctgtatgcacacagatgtatttaaatgaaggtgcatacactgtgctaaaatacaaacaacagaaatcaaaggtcatatataaaaacgctaaatatgacatataccacaggcctagaaccagctcttggttgggagctggggaaaggggtggtatcatctgaagactatgtacacaatttgtggtgggcagggaaggcatcagtgtaaacaactcagactcacttcacaatactggcccacaggtaagtgtgatgtatctcatgtacaaaaatagactcccaccttgcttttgtacaaaccaagcttggtaggcacaccaggaggaccgtgggtttgtcttgatgacagggcactgcaccaggctgctgctaaaccttccagcc

SEQ ID NO: 312745 - DNA, 380 bp, Homo Sapiens
gccgggtggatggtactgctgcatccgggtgtctggaggctgtggccgttttgttttcttggctaaaatcgggggagtgaggcgggccggcgcggcgcgacaccgggctccggaaccactgcacgacggggctggactgacctgaaatgtctggatttctagagggcttgagatgctcagaatgcattgactggggggggtggattatcatagatgcagctgttatttatcccaccatgaaagatttcaaccactcataccatgcctgtggtgttatagcaaccatagccttcctaatgattaatgcagtatcgaatggacaagtccgaggtgatagttacagtgaaggttgtctgggtcaaacaggtgctcgcatttgg

SEQ ID NO: 312746 - DNA, 633 bp, Homo Sapiens
  misc_feature (592)..(592): n is a, c, g, or t
  misc_feature (611)..(611): n is a, c, g, or t
tccgggtgtctggaggctgtggccgttttgttttcttggctaaaatcgggggagtgaggcgggccggcgcggcgcgacaccgggctccggaaccactgcacgacggggctggactgacctgaaaaaaatgtctggatttctagagggcttgagatgctcagaatgcattgactggggggaaaagcgcaatactattgcttccattgctgctggtgtactattttttacaggctggtggattatcatagatgcagctgttatttatcccaccatgaaagatttcaaccactcataccatgcctgtggtgttatagcaaccatagccttcctaatgattaatgcagtatcgaatggacaagtccgaggtgatagttacagtgaaggttgtctgggtcaaacaggtgctcgcatttggcttttcgttggtttcatgttggcctttggatctctgattgcatctatgtggattctttttggaggttatgttgctaaagattttggagggcttgtttttaagtttggccgcacttgagacttatggcagtgaacacatctgatttcccacagcacaacaggcctgcatgggtttgtntgttttttactgctcactnccaaccttttgtaaggccattt

SEQ ID NO: 312747 - DNA, 2082 bp, Homo Sapiens
ttagtttaagagtcaatttaataagtttaaaataaatgtttagtttcattaggatgatgctatcaatattttcttggttacagacacattattaaagttttgggttaattttattgacaattcttaagattctttctcatgcttaataaagcatgctactcagttaactcttgtctacatcagcaaagcagataatacaaaacaggaaaattacaaatcactgatacttagtccttgtgggaatcatgcttttctcccagcagttttacaaggtggctggcattccctgagcatattctgaattgcactgtggggaaagaggttgtgctcagttgtagggtggggggatgcactgcctgaggattaaaaaactagttctgtgaccgtgaggaagtcgtttaaatttccatggtctgttccctcctatgtgaaaagagaaggtgggcttcaacctctaagatcttctccagttttcacattttatggacttttgtagaaaaaacatcaggagttcatgtgggatgacagcaagtcatttctttgaggagagtcttgatcaccaggcaatattcacagtgtagagactgtcagatgaccatggctagcatggaaatgagacccacacatttaaatcacccagcaaatattccgaaggctaattgtagcacattttatgaaagacatttcaaactgtggtcctgaagagtgtatcccatcttgcagaggtggggagcctggggggacaagagttctgaagaggaagagacaacaagagttcccagtagctaatgtttgtcattctagttgaccgtgctggtctattaggctagtggttcagtacacagatgaaatgcaacatggaacccagtttattatcagaacaactacaaagaaattgtcccctgtctaagactggagtgtcaagtctctgcccttttttcctttccttcagtggtggatgtggagtgactgtgcatcccaccagaaccacgtgtcatggctgagtcacatcttcctgcccttggaatgagaggcacagcggaagaccttcccatggaagggacacagggagcctggtggctggaccatggtgcttctctcttccaacacgtccactcaccccttgggagaccctcaaaagccagttacattacatgttcacagaatttttggtaaaagtaaataccaattatagtgaggaagaattttgaccacggaatattttaaaaactaaaaaatgtttatatttcatttaacatttgacacagaagagaccacatttgaataaacacattaaatcttcagagcactttcattgtggttttggacctcagatatgacaaatacttacattgacaaatccataatttcttttgtaatttctttttatttttacaaattataccatgataaaatttgacaaaaattattcatgtgaaagtttcctctaacattttataagttaatcaagtgcataccacaatagatttttggttgttgtttaggtgttctcgtgattttagtattacacaactttaagctgagactacactcagaaataagtttagaaaatggcattacaaaaggttgggagtgagcagtaaaaaaacaaacaaacccatgcagggctgttgtgctgtgggaaatcagatgtgttcactgccataagtcttcagtgcggccaaacttaaaaaccagccctccaaaaaagatgaaggcattctggaaaaatacagcaattccagggtatactatgtctttttctttagcaacataacctccaaaaagaatccacatagatgcaatcagagatccaaaggccaacatgaaaccaacgaaaagccaaatgcgagcacctgtttgacccagacaaccttcactgtaactatcacctcggacttgtccattcgatactgcattaatcgtccagccccgtcgtgcagtggttccggagcccggtgtcgcgccgcgccggcccgcctcactcccccgattttagccaagaaaacaaaacggccacagcctccagacacccggatgcagcagtaccatccacccggcatcccgggaattccggaccgg

SEQ ID NO: 312748 - DNA, 1371 bp, Homo Sapiens
  misc_feature (27)..(27): n is a, c, g, or t
  misc_feature (356)..(356): n is a, c, g, or t
  misc_feature (367)..(367): n is a, c, g, or t
  misc_feature (1322)..(1322): n is a, c, g, or t
  misc_feature (1339)..(1339): n is a, c, g, or t
  misc_feature (1357)..(1357): n is a, c, g, or t
  misc_feature (1360)..(1361): n is a, c, g, or t
attcggcacaggagaaaataaacaagnactaaaaagtcctgagtagcgctgtgtggccgcaaacctgaacccaccttttgcaccacgcgggacccggcactcttcctgccacccacccctgagagggctgcgcggccgaccccagtactagaaaacactcgtcacctcactcaagacgggtacgaaggccaacggacgccttcctttagaacgctcagcacacagagcaacttctcacgcctactctcaaatggcgtactccaaactagcactcccgacgtccagctgtgaacccagagcggcggaaagcccctgaacccagcgcccgggcatgtgcagacgcgtttgttgtggtngggcgtggctnccttccggacccggcgccccgccctccgccccgtgtccgcatgcgcgactgagccgggtggatggtactgctgcatccgggtgtctggaggctgtggccgttttgttttcttggctaaaatcgggggagtgaggcgggccggcgcggcgcgacaccgggctccggaaccactgcacgacggggctggactgacctgaaaaaaatgtctggatttctagagggcttgagatgctcagaatgcattgactggggggaaaagcgcaatactattgcttccattgctgctggtgtactattttttacaggctggtggattatcatagatgcagctgttatttatcccaccatgaaagatttcaaccactcataccatgcctgtggtgttatagcaaccatagccttcctaatgattaatgcagtatcgaatggacaagtccgaggtgatagttacagtgaaggttgtctgggtcaaacaggtgctcgcatttggcttttcgttggtttcatgttggcctttggatctctgattgcatctatgtggattctttttggaggttatgttgctaaagaaaaagacatagtataccctggaattgctgtatttttccagaatgccttcatcttttttggagggctggtttttaagtttggccgcactgaagacttatggcagttaacacatctgattttccacagcacaacagccctgcatgggttttgtttggtttttttactggctcactcccaaccttttgtaatgccattttctaaacttatttctgagtttagtctcagcttaaagttgtgtaatactaaaatcacgagaacacctaaacaacaaccaaaaatctattgtggtatgcacttgattaacttataaaatgttagaggaaactttcacatgaataatttttgtcaaattttatcatggtataatttgtaaaataaaaagaantacaaaagaaatatggnttgtcatgtagttttttnatnntgaggccaaa

SEQ ID NO: 312749 - DNA, 645 bp, Homo Sapiens
  misc_feature (382)..(392): n is a, c, g, or t
  misc_feature (459)..(512): n is a, c, g, or t
gaggttatttttttcctattgctctgaagactgcagtggttgctgcaaagctcaggcctgaatgagcaggaaacaaaaaaggccttgcgacccagctgccataaccaccttagaactaccagacgagcacatcagaaccctttgacagccatcccaggtctaaagccacaagtttcttttctatacagtcacaactgcagtaggcagtgaggaagccagagaaatgcgatagcggcatttctctaaagcgggttattaaggatatatacagttacactttttgctgcttttattttcttccaagccaatcaatcagccagttcctagcagagtcagcacatgaacaagatctaagtcatttcttgatgtgagcactggagcnnnnnnnnnnnacaacgtgacaggaagaggagggagagggtgacgaacaccaggcatttccaggggctatatttcacnnnnnnnnnnnnnnnnnnnnnnnnnnnnnnnnnnnnnnnnnnnnnnnnnnnnnnagctctagcttaagaagaaactttttttaaaaagactgtttggggattctttttccttattatatactgattctacaaaatagaaactacttcattttaattgtatattattcaagcacctttgttgaagctc

SEQ ID NO: 312750 - DNA, 535 bp, Homo Sapiens
  misc_feature (36)..(37): n is a, c, g, or t
  misc_feature (41)..(42): n is a, c, g, or t
  misc_feature (46)..(46): n is a, c, g, or t
  misc_feature (51)..(51): n is a, c, g, or t
  misc_feature (58)..(58): n is a, c, g, or t
  misc_feature (71)..(71): n is a, c, g, or t
catatgtgagaggggggccactgagagattatcagnntcgnngacngaatnggttganctctttatatganaatggagtcaatggcattttggctcgatgaaatgggcctctgggaaaactttacaaacaattgctttgcttggttacctgacacactaccgaaatattcctggacctcacatggttttagttccaaagtctactttacacaactggatgaatgaatttcaacgatgggtcccatctctccgtgtcatttgttttgtcggagacaaggatgccagagctgcttttattcgtgatgaaatgatgccaggagagtgggatgtttgcgttacttcttatgagatggtaattaaagagaaatctgtattcaaaaagtttcactggcgatacctggtcattgatgaagctcacagggtaaagggtggggggtctgggctttcagagattgttcgtgagttcaagtcgactaaccgcttgctcctaactgggacacctttgcagaataacctgcatgaactgtgggcctta

SEQ ID NO: 312751 - DNA, 797 bp, Homo Sapiens
ctgaagaatgatgcattggagctatgcaacaggataagcaatgccattgaccgcgtggaccacatgttcacatcagaatttgatgctgaggttgatgaatctgaatctgtcaccttgcaacagtactaccgagaagcaatgattcaggggtacaattttggatttgagtatcataaagaagttgttcgtttgatgtctggggagtttagacagaagataggagacaaatatataagctttgcccggaagtggatgaattatgtcctgactaaatgtgagagtggtagaggtacaagacccaggtgggcgactcaaggatttgattttctacaagcaattgaacctgcctttatttcagctttaccagaagatgacttcttgagtttacaagccttgatgaatgaatgcattggccatgtcataggaaaaccacacagtcctgttacaggtttgtaccttgccattcatcggaacagcccccgtcctatgaaggtacctcgatgccatagtgaccctcctaacccacacctcattatccccactccagagggattcaggggttccagcgttcctgaaaatgatcgattggcttccatagctgctgaattgcagtttaggtccctgagtcgtcactcaagccccacggaggagcgagatgaaccagcatatccaagaggagattcaagtgggtccacaagaagaagttgggaacttcggacactaatcagccagagtaaagatactgcttctaaactaggacccatagaagctatccagaagtcagtccgattgtttga

SEQ ID NO: 312752 - DNA, 478 bp, Homo Sapiens
aagctctggatttagtttcttacttaaaacagagataatgctttgagtgcttaaggaatttcttatgctagtttggatggctctaaatggagtttttctgactaacaaggctgacaactttctgaacaatatttaaacttggaatagtagacttgggcggatagtaaagaagagagagaaaaagacaggttatcaatgttgtaatcttagggaaggggcctcaattgagagttttccaaattgatgccccatatgtgacagtgttcagagaaattcaacattagccatttatatgggttgtgatcctttcctactgtgccagaaccttcaaaactgtcactttgagttccagaagagtccttcagcatctttactcttgtgttattatttcccacacaatctattgcttatcctgtgatgaaagattcttttattaacagttactaaagagctgtcaaactctgattacttttaagat

SEQ ID NO: 312753 - DNA, 827 bp, Homo Sapiens
gggagagctgccgccattttgcgggaagaggaggcgctgtacctgcagtgctgcttttcttgcctagactctaggaactatccgagctccactccccacaacatactcaaaggaacggagagaaccgggacccccctgcggggacccggaactgatctgacaggatggcatctgatgactttgacatagtgattgaggccatgctggaagctccctataaaaaagaagaggatgagcaacaaaggaaagaagttaaaaaggattatcctagcaataccaccagcagcaccagcaacagtggcaatgagaccagtggaagcagcaccatcggggagacaagcaatcgtagtcgagatcgggatcggtatagacggagaaatagtcggagccgaagtccaggtcggcagtgtcgtcaccgtagccgtagctgggatcgtcgacatggtagtgagtcgcgaagtcgggaccatcgtcgtgaggatcgtgtgcattacaggagtcctccacttgccactggttatagatatggacacagtaagagtcctcatttcagagagaagagcccagtcagggagccagttgataatctgagtcctgaggagcgtgatgcccgcacagttttctgtatgcagttaactgccccaattccggcctcgagatctggaagactttttctctgctgaaggcaaggttcgcgaagtacgtatcatttcgaatcggaatcaccgtcgttctaagggcattgcctacgtggaaattcggtgaaatccagtctgggcccctgggccaatgggcttgactgggcaacccgttgcttggaaagcctt

SEQ ID NO: 312754 - DNA, 752 bp, Homo Sapiens
  misc_feature (42)..(42): n is a, c, g, or t
  misc_feature (103)..(162): n is a, c, g, or t
ataaatccaggaaaaacaaatgtaagggccttgaattttccnggtaatccagtcctagaattcccaaagaatttggaatgcctagatggggacactctttcannnnnnnnnnnnnnnnnnnnnnnnnnnnnnnnnnnnnnnnnnnnnnnnnnnnnnnnnnnncttgtggccagaaatcaaatgcgttttttctgacttcaagcatagtactccttgcacatgcacacataagggactataaataatccttgtataaattttacatttaaagtcccaatggttttcaccattgttttaaatgcagtactctgagaaaatattaatggagattttctaaatcaagagactatacatgggacattaccgtgggaaattacaaacatcattatatccatccttacattgtacatgtattgaggccctactatatgcaaagcacaatgtgtgttttggaggacatacaaatataccttttgcatagtcaaaaggataattattcaggctagggctggggttaatttcagaaaagcaataatgaaaactcagtatatttatataactttgtacttacttgcataaatttcaagatgacaaacaatattttaagatgagaagaacatttaatcactatccaggcaactctaagaaacttaagtttagttacttaattttgttcttaatatggaatatatgtacgtactaaaagtggcgtctttccttttgtgacagaataattacttctgttttgtaaa

SEQ ID NO: 312755 - DNA, 853 bp, Homo Sapiens
ttttccgtgggatgtattttttaatgagaacacattgttatactctgagtacgtggcattcttgcttgatagaaacatttacaaggacacatacacatttatatccaaacatcaaatgaagtagatattttaaatgaccagttcgcacaagaaataaaatatattatacaaaacatgggttatatccacagtcattagttctccttttctacacaaaacagcaataaattaaatcacattatatgcaaatagttagttgtacattagaacaataaacagtatgtaacgtgtgcagcttttacttttacttttctaccagactcatgatagatttgtactgtttggtagtcctgtatttaaatcaacaatgaataatgtgacccagaagacaggggtcacagaattggtctgtcacaaggtctatcccatgtcctcttggtttcaattatccaccatgcacagggaacaaagctcagattcccaggacccaacacaaaggtctgcaacgaacaaactcacagcaactccatgctgttcaggggctacttcattgttgtcttataagatgttgaagattttcagatcttggcaataaataatgaagaggccaccctgtttccaaatctgaatttgcctcttttttagccatctctgtccaactatcatgcaccgtgacagctttgttctcctagcaaataagaaatattttggtagcctatgttgtgatttacacttggtaagtaggccctttattccttgtgcatagaaatttaggtctttaaacatgaatcaaagcaatgcagcatttttgctaacacttaattctgcttgttcaaatctctcccctatgaat

SEQ ID NO: 312756 - DNA, 439 bp, Homo Sapiens
taaccccaggaatgtaacttccccaagatcgtaaaaaatgtgcacacactacagaccaggagacaaaacttgccagggctctgctgtttaaaaagagacatttcttgaagaaatatgctgaaattcatccatgattctgcaatacagtggctgagcctgggtctttcatctggtttggaattgataacttcccagcttttgcctggtccaaagtcttcaccttcaggcatttctgccctttaaaaataataacagtggcaaaggctgcagcacctgctaaccacggctaatgtggccaaacaatagtttcttttctactctaatgctgaatatcaggaggaaaaaaacccagtagagacgttctttcctttttggaaaaaaagtgctcctcccttactcagaaagtcggtgtttacaaacttccaaagcgcctgcctcc

SEQ ID NO: 312757 - DNA, 617 bp, Homo Sapiens
  misc_feature (537)..(537): n is a, c, g, or t
  misc_feature (558)..(558): n is a, c, g, or t
  misc_feature (561)..(561): n is a, c, g, or t
  misc_feature (583)..(583): n is a, c, g, or t
aaatctagcttgccactctgtgccttttaagtggggcatttgcccatttacattcaaggctagtatcgatttgtgtagatttgatcttgtcattgtgctgttggctggttattatgttggcttttttgtgtggttgctttatagtgtcaccggtctgtgtgtttaagtatgtttttgcattagcgtgtagtggtctttcctttctatatttagtcctcctttctaaaatctcttgtaaggcagatgtggtggtaatgaattacctcagaatttgcttgtctgtaaatgatctcatttctccttcatttagaaagcttagtttagctgtatatgaaattcttggttgaagattttctttaataatgttaaatatagtcccccaatcccttctggcttgtaggatttcagctgagagatctgctgttagcctaatggggttccctttgtagatggcctgccctttctctctggctgcctttaacatattttccctcatttcgaccctggaaaacctgatgtttatgtgtcttgaggatngtcttgtgtaaaatcttgtanganttctttggtatctcctgaaatntgactgttggcctttctaacaaggttagggaagc

SEQ ID NO: 312758 - DNA, 1158 bp, Homo Sapiens
accattcaaagtacaactgaagaataaacgatctaacagattcttgtgagacacattatcagataaattaatccagtgacacatgaataaagatttagagtttttaaagaaatacagtaaaagcaaaaacatatgaagcataatttaatctgatgattcagaaggcacctcaagattgtgttgtgccgttttcctcatgctgcgtggttaggtgcctataacagaattctggttagtaaaattttgaaaaaaattcacatataattcacattaaacgactacagatagatacaatatgggcattttgatgtgtacatttgtacctgacttagggcacaatttataataatatactaaaaaaactaaaattaattataaaatgagtatttttagcacacttagtaacagctacttgttttaaactattatttcatttttggtgaccaaattatatttgaccataattaaagaacacataaccttaaaataatatttaagaaacatagttacaacagacatgttacattaaatgaaaaaaggaaagaaatgtacatgtattaaagggtactgaggtttttcaaacccattcttttgaaaggccttttaatccactttcatgtaaaccaatttaaatttaaaaagtttatactcaagaggtgaaatcagtgttgagcacatggctgcctaacaaccattcaatgctgatcactgaactagtattttcatttgattatcctgacaaacataataattgagcccatgtatatatgcaagatgtggaggatccaactaataactgcagaaataaaaacactcaacttaaaaaaggttgaaacaaatgacaaatggaaatggctgaatcactgtacctttttgacacaaccttaaatcttagttttactatatattatttggtactcctggattcagtagttggggtaaaaaaagtttctatattcaaacatatctacagaatgtcaatataaaatgtgtggatatatacatttaatatacacatacatacacgcacacacacaacgcatactcacatgtctaggaaccagcacctaacccacatccccgtttctcactaatgacccgatgatcatttatgaccggacgcgtggttcgacgatatcccggaattccggccgtcca

SEQ ID NO: 312759 - DNA, 1642 bp, Homo Sapiens
  misc_feature (8)..(9): n is a, c, g, or t
  misc_feature (13)..(13): n is a, c, g, or t
  misc_feature (16)..(16): n is a, c, g, or t
  misc_feature (66)..(66): n is a, c, g, or t
  misc_feature (179)..(179): n is a, c, g, or t
  misc_feature (199)..(199): n is a, c, g, or t
  misc_feature (267)..(267): n is a, c, g, or t
  misc_feature (314)..(314): n is a, c, g, or t
  misc_feature (394)..(394): n is a, c, g, or t
  misc_feature (702)..(702): n is a, c, g, or t
  misc_feature (1020)..(1020): n is a, c, g, or t
  misc_feature (1026)..(1026): n is a, c, g, or t
  misc_feature (1028)..(1028): n is a, c, g, or t
  misc_feature (1033)..(1035): n is a, c, g, or t
  misc_feature (1043)..(1043): n is a, c, g, or t
  misc_feature (1045)..(1045): n is a, c, g, or t
  misc_feature (1055)..(1055): n is a, c, g, or t
  misc_feature (1057)..(1057): n is a, c, g, or t
  misc_feature (1064)..(1064): n is a, c, g, or t
  misc_feature (1070)..(1070): n is a, c, g, or t
  misc_feature (1173)..(1173): n is a, c, g, or t
  misc_feature (1177)..(1177): n is a, c, g, or t
  misc_feature (1180)..(1180): n is a, c, g, or t
  misc_feature (1182)..(1182): n is a, c, g, or t
  misc_feature (1186)..(1186): n is a, c, g, or t
caaaaatnntaantanttttgacacatctaaaaaattctattgtgtgacttccaggtcttggagtnaggtcaacaggagaagagtcaagtgaggtcacagatgaggtaagagaaacttctgaggattttccttgagcctcagcatctgaatcactcctttggcaagatcgatagtggcnaactgatcccgatctctgtngagtagcagtccctgatttggcttctgtaatttcatcatcaatactacggaaatccagtagataagtnctactatccacttggtataactgtagactcattttggagtaagtccntgtcacaggaattcttccttcgtacacgcaaataatatgggtttacaaccttccattcataatccaattgtttgattgcnctacatacttctgccataatatcatttggtcgactttgacttctaattcctaaatgccattttgctttccttacaccttggtgtttggatttctgtggatttaattcatcaagggtatggcgtccccttggtgtttcagcaaccaagaatggtactctttcaggatggggccgagtcaggtgatgatcatcaagaaaagaatcaggtgggcttgtcgccaaatagaaatctttggcttcattcattattctcctgtgatctattatgagatggtaggcaactgccaaaggatcctggtgatttctgtngtaagacagctgataacttcctcttctgagcactcaaacttttcacatacttcttttaaggcttcatcatcaatcatggttgaactatatgatggatcctcaggaaagagatattttggaaggtcctgtttaaaccattcatgttccctgatatctttgattgtggccctcttcatgggatccacctgcagcatatgtgtcaaaaggctaatcacagaaggatttaaatattgaggggtatagaagatcccatccacatatcttcttaaaaagagttggcacatggtcatcatcaaatggaagggttccacataattnagcatngngaatnnncccactgntncatatatttncntctgggnctgcanacaagcgtccggaaaggacgtctggtgcagcatagttgggtgagccacaacgggggcggaaaaattcaccagcggacatcatgtttgaaagaccaaaatcagntatnttngnattnatgtgtgcatcaagcaggacattttcaggtttcaaatctctatggaccaccatatgcctgtgacaataatccacaccagaaaggatctgttggaacagacgccgactttctttttcatccagccttccattcttacagatataatcaaatagctctcctcctgagacatattccatcaccatgaaaatatcagatggtgtactgatgacctggtacagtttaattatatgaggatgcctgaaaagcttgaggttctgaatttctctgcggatttttcctaccacatcaaggctccgaatcttctgtcgattgagtatcttcacagctactttatgcccagtcaattcatgtttgccaaccttcactttgccgaaggtgccgacccccagcgtgtcacccagaatgtagtggccgatcttcacccgcccgtcgtgtttctgcttctcggctgtcgct

SEQ ID NO: 312760 - DNA, 459 bp, Homo Sapiens
  misc_feature (18)..(18): n is a, c, g, or t
aattagaaagtccaaagncgacccaaatggatattatgggcagaaggtatggtaggagcaatccaaaccaattgggattatggaatgggaagggttgtaaacccccatattatttgccgtgtaccgaagggaagaatccctgtgacaagcaccttactcccaaaatgagtcctacagttatacccaagtggatagtagaacttatctactggatttccgtagtattgatgatgaaattacagaagccaaatcagggactgctactccacagagatcgggatcagttagcaactatcgatcttgccaaaggagtgattcagatgctgaggctcaaggaaaatcctcagaagtttctcttacctcatctgtgacctcacttgactcttctcctgttgacctaactccaagacctggaagtcacacaatagaattttttgagatgtgtgcaaatctaattaa

SEQ ID NO: 312761 - DNA, 400 bp, Homo Sapiens
  misc_feature (12)..(12): n is a, c, g, or t
  misc_feature (32)..(32): n is a, c, g, or t
cctaacaaaacnccggccccaaaaaaacaatngggcccgactttgaacctcccaaaacccccaaaagccccatttgccttccccttaacacccttggtgtttgggatttcctgtggatttaaattccatcaaagggtaatggcgtgccccttggtgtttccagcaacccaagaatggtactctttcaggatggggccgagtcaggtgatgatcatcaagaaaagaatcaggtgggcttgtcgccaaatagaaatctttggcttcattcattattctcctgttatctattatgagatggtaggcaactgccaaaggatcctggtgatttctgttgtaaagacagctgagaacttcctcttctgagcactcaaacttttcacatacttcttttaaggcttca

SEQ ID NO: 312762 - DNA, 460 bp, Homo Sapiens
gtgtgagggcttcaaatggtatcatttccttccctgctgctcggtaaactccagcaatagctgcacttgtcaagattccagcagtaattggtcccacgatgcccatcaacaggatgcttacagacatgaacctaccatatttgtgatgtctgagggtgaagagggccagtaatccagcagggacatgaaagaagagagaagacaccagtgcccacaggaatacaccataccacatctctgggaaggagcagagggaagtagagttggggcacagggtcccgttgcccacccgcggcacaaccttcaggctcaggatctgctgcaggagcccggccgacccgccgctgccgccgctcccctcgcgctccatcctgtcgccattcaccacagagaaatgagggacgagcgcccgaggtgcggtagcggccggcgccgactcaccctcgccgcctcagcgtcc

SEQ ID NO: 312763 - DNA, 789 bp, Homo Sapiens
  misc_feature (236)..(236): n is a, c, g, or t
cgaacaagatttcgaacaaagtggagatgataagagactcagaaagccctcaatgaaatggagctggctcactcttccttctctgaaatgcagacagctgtgagtgacatgggcctctggagaatgcaagtctttgccatggcacggctccgtttcttaaagttaaaacgtcaaactaaagtgttattgaccctattattggtatttggaatcgcaatattccctttgattgttgnaaatataatgtatgctatgttaaatgaaaagatcgattgggaatttaaaaacgaattgtattttctctctcctggacaacttccccaggaaccccgtaccagcctgttgatcatcaataacacagaatcaaatactgaagattttataaaatcactgaagcatcaaaatatacttttggaagtagatgactttgaaaacagaaatggtactgatggcctctcatacaatggagctatcatagtttctggtaaacaaaaggattatagattttcagttgtgtgtaataccaagagattgcactgttttccaattcttatgaatactatcagcaatgggctacttcaaatgtttaatcacacacaacatattcgaattgagtcaagcccatttcctcttagccacataggactctggactgggttgccggatggttcctttttcttatttttggttctatgtagcatttctccttatatcaccatgggcagcatcagtgattacaagaaaaatgctaagtcccagctatggatttcaggcctctacacttctgct

SEQ ID NO: 312764 - DNA, 1040 bp, Homo Sapiens
gcagcaatggttttgggtaggcaatatccccaggtaggaaaagtcccttctggtactttccctttttaaaaggaggttttaggccctgtttaggagataccccaggccattttcggaaccaaactataatttttcatgccactttttgtactcttcccatattccatgtcatctggaccaatttcctttcagtttcgcttgagcccaccttcataaatgctgattgatctttcatcatagctaagatttttatctgcaaactgttccagaagggttcgttctactacccttttgggtgcttcattttggaaaaagtagacaaggagatgctgaagtcgaggatcactgtgagaggtgggggtctctttggcaagctgatagagcctggagtattcttcatggaatgcctcactcagtgccgcttctacaccgctcttctcataggcacgggctgtgtttgcaatagcctgggcagtttgctcctttacaatcacagcatgctcagacgacaagcagcgaaccccatgagaagaggctactgaaggctcttgtgatgtagagtagtcctgtgatgaggagttggtggaggactccatttgagggattttgcaagactgctcttcttcccactcctctacttcctgctcaaaccgccagttatcctcctgaatgtaatgcttgagttccacagatagggcttccacttctgacatttgatctgattcagttggggctgcctctgcattgaagtagggtagtttgtcattaatgtacatcagacagtaagcactaacatttctcaggcctccataggaatctctttcaacttcttcccaggaagattcagtaacagagatgtcattgtacttgagccagctccgtcggggttgattatagatataggcccaatagtgtccagcatttgcttgtccttcatgaacaagaactgcatgcaagcgataaggcacctgacgaaggagaggatcgcagtacatctgttcaatagtctgagtagtacttgcaatacaagtctttaaatc

SEQ ID NO: 312765 - DNA, 519 bp, Homo Sapiens
tcagagtgaaaaagacgctgtatttgatttacaatgaacaagatttacaaaaaggggtggggtggtcttggaactgctcccagtccccccggactgggtggggctctagggcagcctgtctgacagaccaggaccccaggatgtctgggccccgacgtaggacttgacctacgtctcacttgacctttgacgtggggcccagcagccgtgagtccacccagagtgccggcacccttggggaggccggtgaggtcaggaaggcatcgtaccgctttttctcctcctcccatctcgtggtggacagacagacataggatctgggaacttgccctgggggccacaggccctcagatcccccaggggcccaacctagggcatggaggcggctgctggtacgtgggcggaggcggaggcaagctgcccccagcgtggcagcgtaaggcacattttcaaatcactcgagactcgacagtgaacacccgatgctggttctgcggccggaggaagctggggctgggg

SEQ ID NO: 312766 - DNA, 633 bp, Homo Sapiens
tgagccattgcacctggcctcaatattacttttaaaagaggaaactatcccaatagatgttttggtaaaaagaaggaaaaagggccgtgggcaacttccaaacgcaatgtctctgttaaaaatcaattccactgaggtcaaaagcccctaacgaagacatcacccagaccctttcaccactcagaaccaggtacggacggcatgcctcatctcacaacagcccagcgggctttgcaggacccttaaaaacaagattccagggtgcagccatgaactcacatcacaccttcctggatttacagtgaacaagattccagggtgcagccatgaattcaccaaacacctccctggatttacagtgaacaagattccaggatgcagccatgaactcacatcacaccttcctggatttacagtgaacaagattccagggtgcagccatgaattcaccacacaccttcctggatttacagtgaacaagattccagggtgcagccatgaattcaccaaacacctccctggatttacagcgaacaagattccagggcacagccatgaactcacatcacaccttcctggatttacagtgaacaagattccagggtgcagccatgaattcaccaaacacctccc

SEQ ID NO: 312767 - DNA, 656 bp, Homo Sapiens
aaacagcaggtgcttatttcttgcagttctggaggctggaagtccaatatcaaggtgctgctgattccagtcttggtgagggctctcttcctggcttacagatggctgccttctctctgtgtcttcatacagctgtcctctgatggacagaaaagggtccctgtctcaggaaggtagaggctgccacctcctggcccgaggacacagctttccagaggaggggcctgcttctaagtccaagtcccatcccagccggatagccaggggcaactgccccggtaaactgagacagcagcagcaggcaagccagtgcagagctgggtgatccacaggttcatgagcggtggcaggtggaacaagggcaccatgggcggagggttgggcagctgcaggtggcatcattgagccaggggcctcctggtctctggagggccagccgggggttcccgtccacctgtcagggggttcgacgccactttgagatgacaaggttggagagagacaattctcctcctccccgggcgccgtctcctccacatcccacaccaggccctgcccatgactttccccctctcagcgccgtcctcagtggccacaccaagaacgaggctatgtcttcctgggaagggcctcagatgtcagcaaatgccctggtc

SEQ ID NO: 312768 - DNA, 501 bp, Homo Sapiens
acattataaaaattgacaatgatttattaaatatgttttctcaattgtaacgacttctccatctcctgtgtaatcaaggccagtgctaaaattcagatgctgttagtacctacatcagtcaacaacttacacttattttactagttttcaatcataatacctgctgtggatgcttcatgtgctgcctgcaagcttcttttttctcattaaatataaaatattttgtaatgctgcacagaaattttcaatttgagattctacagtaagcgttttttttctttgaagatttatgatgcacttattcaatagctgtcagccgttccacccttttgaccttacacattctattacaatgaattttgcagttttgcacattttttaaatgtcattaactgttagggaattttacttgaatactgaatacatataatgtttatattaaaaaggacatttgtgttaaaaaggaaattagagttgcagtaaactttcaatgctgcacac

SEQ ID NO: 312769 - DNA, 926 bp, Homo Sapiens
  misc_feature (756)..(756): n is a, c, g, or t
tgataatagtgtgataatattaattgaaaagttgttttaaaggattttaaaattttaaattgagtaatttaagcttcattttaaagttctgttttacagtgacttattcttcctttatatcagagtcccattgatttaaaaataaatctctttttagaaagaatagaaattctgagtgagctcatttttaagcctaagtgttgtgtgaatatcctggaagttgttaagagctatgttgaagtgctaactgtaaaaaattaagtgctttcacgacgaggctttcttaattcccactgattttctttccatgccgtaaacagctcataaaatgtcatatgtagctgtgagtgttaaaataattacacttaatattttaatagtgtgctgtgcaaatacatagttttttgttttgttttggcaaatgtttcattttgttttaatgacttcggtccaatataaagaaaatgaaatacagtgaatagttcttctttcaagatgagctgtatttattactggaacggaagttgtcatatccgtgatcattagctttgaactttaagcacgactgcttttcctccaaggactgtttttcttcaaatgactggcaccagcagcataagcatgacttaaagcagtttttgaatcttttgctcaccaaatacagagcaattgggttaatgcaggaattcagtgaagccatgttgataccaatatagtccaataccaacagaaagctcaaaagttcacatctattgngatcattctgattataaagagtgagcttcagaatcctgctgaggtgaaggggaagccagcagagggcaaagacaaggaccaggcaaaagacggttttgccacttccgtctctgctttagtgatcatttaaagcatctgcatgcacttttcttctcacatttcacagtcat

SEQ ID NO: 312770 - DNA, 539 bp, Homo Sapiens
gaaaaggaggattttattgagtgcactcagacccagtggattaacatccagagactgggccaaggacaaagacagcatttaacttttacatacacttctaaagagggtgggctaacttgaaacaagcctacagtggcacaaagtgtagtgatgtgaaagcaaggatacagaagcagaacaaaggcagttaatcatactttgacaggtttataactcaggcttacatatgactcttgctatgtggcctagatggctgttatctaggcttgctctagtgccttgtgttggcttatcttataaccttcactatggtgtctaggtggctgcaatccaggcctgctcaggcatgtctcatgactttcactgagctgcttagataaaacaatgcttgaagttactagttatagaaaacaagaatctataaactcataagtttactcataccataggagaaagaagaataaagaaaatttgtttttttcttctccccatgttgggggagtgctgggagagtcttcagagcacattcctttgagccc

SEQ ID NO: 312771 - DNA, 402 bp, Homo Sapiens
  misc_feature (277)..(338): n is a, c, g, or t
cctcgtgccggcacgaggccaccacgaggccgccagggtgactgcgggattccgatctgcgccggagctgcgatgctagagcactcttgccacccccaccccacggacgtgttgcagtgatatcagaattttgcgtgcggtttacccgtgtttaacctctttgcgtctcgcttctgaatcgtatccacttgagcatcactagactgatctattttaacactggtggggggcagcgaggtcagttatgggtccttcctccttaaaggggtggacagtnnnnnnnnnnnnnnnnnnnnnnnnnnnnnnnnnnnnnnnnnnnnnnnnnnnnnnnnnnnnnnttggattgtagtttctaagtttagctgtggcgtgcgaattcccaggaggtagttctttaaaaat

SEQ ID NO: 312772 - DNA, 341 bp, Homo Sapiens
ggaagccaaagagtgtatttttttagtttcagaagcctgatgctgacattcacctgccccaactctcccctgacctgtgagcccagctgggtcaggcagggtgcagtatcatgccctgtgcaacctcttggcctgatcagaccaccgctcgatttctccaggatttcctgctttgggaagccgtgctcgccccagcaggtgctgacttcatctcccacctagcagcaccgttctgtgcaccactcagcacggccatctgggctcctccagggtgtgtgctcgccctgcggtagatgggagggaggctcaggtccctggggctaggggggccccttctgctc

SEQ ID NO: 312773 - DNA, 2011 bp, Homo Sapiens
  misc_feature (1236)..(1264): n is a, c, g, or t
ttttttcagtgtaaaaggtcacttttatttgcctgtctgaattggcttcacatcacacacaattacagaaccagccccaccggtttcgtcgcagtcctgaggcaggtgcgtgttggctgtgctgtggtcagcctggcgctgccctgagtccacttgtccctccacagaacgaatgactcgggttgatgttgccggatctcaggggtggctgtgactgacagaggaccttgttgcacctcgtggctgctttgttcacccgcaggcggccctgtgggcaccccggggttccccttcagtcccaaggagggtaaggatatgggtttcctaggagacagccaatgactgccctgcatctggagccagcctgtccatgggcagtgcacagatgacagccctccctcactgccctgtgtgctggctaccgcatgtcctgtgccagcctcagcctctttgatgtggccgtgttccatcctggcgctcagctggacaagtgctggctgagccacgtcccagccaggggcatgagatgggggccctggatgggaggctgccagaccccaactcatgggtcccttgaatctcccagcttggactcggccagggtggagctgtctgctttggatgtatcatctcatggctcatttgggaggccagccccaggctgctgtgcttggtgttggaggacaggccggagctgggggtcacagtgcgcctctgagcttgggaacctgcttcagcctggggttgctgtggagaatggcccagagctgagcagaaggggctccccctagccccagggacctgagcctccctcccatctaaccgcagggcgagcacacaccctggaggagcccagatggccttgtgctgagtgtggcctcagctccccattgcctcacggggcctgtctgctaacaggtctgggttttgtgcacagaacggtgctgctaggtgggagatgaagtcagcacctgctggggcgagcacggcttcccaaagcaggaaatcctggagaaatcgagccgtggtctgatcaggccaagaggttgcacagggcatgatactgcaccctgcctgacccagctgggctcacaggtcaggggagagttggggcaggtgaatgtcagcatcaggcttctgttttaaacttttaaaaaaatacactctttggcttccttttatttcttgaggattacatgaaacgtgaactatacaggaaagtatggcagccaggtnnnnnnnnnnnnnnnnnnnnnnnnnnnnnctgcccacggtgggggcttcctccgagccgccggtcctctccggccatgtgcatccaggcggtggctacttggagccagtcatgaagctgttctcaatgcagagcacgatgtaggcgtgatgacagctcgcggcactctgccccaggagcctgccccccagcagcgaggaggcttggcccgtggccgagggagcctccgtccgccactgtctcacagtagctctcggtcagcctgcgcccgttggggtccgagccatgccacacgctcttctggggccaggtggggtgcctcaggacgtccttgccgtcaaaggagaagatgcgtgccccgggcttcagcggaccctcagagcctgagaacagagcctcccagctgggaaacagcagctcgtccttgaggttgacgatgggcacgtctgcgcggtcggcacggcgcacgatgctgtacaggtcctgcaggcgcgaggacagaaaggcgcgtaaggtgcccgccagccccacggcccgcgcctgctggaagcactggaagtcggccccgcgtatgccccgcatgccgcctgacaggggtctgttgagcgcaaccaggtggagcaccggctggaagtcgcggtgcctgtgggcgggtgggcttgtgggtcgcgccggccgcaggtgcacgtaggagctgtggtgcggggctccggggtgggtctggggctcgggcaggcgaggggggctggccaggatgtcatctgcccgccagggccg

SEQ ID NO: 312774 - DNA, 1032 bp, Homo Sapiens
  misc_feature (158)..(168): n is a, c, g, or t
  misc_feature (198)..(198): n is a, c, g, or t
  misc_feature (262)..(352): n is a, c, g, or t
  misc_feature (381)..(390): n is a, c, g, or t
  misc_feature (414)..(602): n is a, c, g, or t
  misc_feature (1018)..(1018): n is a, c, g, or t
cccccccctctttttcccggggggagatttttttatgacaggcggcccggggggggtttcctctcggcgccttgtgagatatttttacccccgtggggggagggttcccctgcgcgcggggtgttaaagtttttccccccctctttaaaatttgcccnnnnnnnnnnnttttttatatgaccccccttcttccccctngggtaaagccccgggaacctcccgagccccccctcggttttttcccaggcctcggttccccccnnnnnnnnnnnnnnnnnnnnnnnnnnnnnnnnnnnnnnnnnnnnnnnnnnnnnnnnnnnnnnnnnnnnnnnnnnnnnnnnnnnnnnnnnnnccgggccccccaaaaaaagttttagaaannnnnnnnnngcccccgggggccccccccctttnnnnnnnnnnnnnnnnnnnnnnnnnnnnnnnnnnnnnnnnnnnnnnnnnnnnnnnnnnnnnnnnnnnnnnnnnnnnnnnnnnnnnnnnnnnnnnnnnnnnnnnnnnnnnnnnnnnnnnnnnnnnnnnnnnnnnnnnnnnnnnnnnnnnnnnnnnnnnnnnnnnnnnnnnnnnnnnnnnnnnnnnnnnnnggcttccttttatttcttgaggattacatgaaacgtgaactatacaggaaagtatggcagccaggtcctggggccaggggctggccggctgctccctgcccacggtgggggcttcctccgagccgccggtcctctccggccatccgcatccaggcggtggctacttggaggcagtcatgaagctgttctcaatgcagagcacgatgtaggcgtgatggcagctcgcggcactctgccccaggagcctgccccccagcagcgaggaggcctggcacgtggcgaggcgagcctccgtccgccacgtctcacagtagctctcggtcagcctgcgcccgttggagtccgagccatgccacacgctcttctggggccaggtggggtgcctcaggacgtccttggcctcaaaggagaagatngctgccccgggctt

SEQ ID NO: 312775 - DNA, 893 bp, Homo Sapiens
  misc_feature (22)..(22): n is a, c, g, or t
  misc_feature (36)..(36): n is a, c, g, or t
  misc_feature (39)..(40): n is a, c, g, or t
  misc_feature (43)..(43): n is a, c, g, or t
  misc_feature (68)..(68): n is a, c, g, or t
  misc_feature (102)..(102): n is a, c, g, or t
  misc_feature (114)..(114): n is a, c, g, or t
  misc_feature (141)..(141): n is a, c, g, or t
  misc_feature (156)..(156): n is a, c, g, or t
  misc_feature (209)..(209): n is a, c, g, or t
  misc_feature (290)..(290): n is a, c, g, or t
  misc_feature (303)..(303): n is a, c, g, or t
  misc_feature (339)..(339): n is a, c, g, or t
  misc_feature (345)..(345): n is a, c, g, or t
  misc_feature (353)..(353): n is a, c, g, or t
  misc_feature (363)..(363): n is a, c, g, or t
cacaaagtgattgtgatgcatntgaatgtcgatctnctnnctngcgatggatgaactattaccacaancctctggataattttctcctcatttaaccaattnagcacatcttgnctgggctgtggaggttcgatacacgtnaggagcctgagcaanaaatccatgatagcagaagttcctatgtgctttataataaggtctacaaaatnatgcttcttctttaagaaatccacaatctgttctggttttctgctgataagaatacttagcaccttgctgaagaaactggnaagtagtggattnaaaggggaatcgtttaggaggaagctatataatttnattagnaaggattnatcttctccnagtctatcattcatctgggagacatcagaagtgagcaactcacaagatatatttggatacttgtatctgatcttttcatccatgtcttgaggtggttcttctataatgaatgagactaaatcttcgagacattctgcttttaacagaaactctataagtttgcggttctgagctttacattcctgtaaaacatcttcctcatccattaactccttcagtgttacatcttctctttctagaagtgtgtctatgtgggatgatgagtgaagatcaaatttccaaaacatgctggtctttcaaaccaagtttaaaaattaaaagaaatgttttcttctttgtggctccttgcccattacaggttatcctggtaacagttttcctccaatttactgcattagcagattagcaggaatacagtgggatatggatatgaaacaagctctcctggaggtgcccacgacccgccgctagttgcgctcaggcgggaaacgcgctcaccgactccatccgcgatcccgggaattccggac

SEQ ID NO: 312776 - DNA, 396 bp, Homo Sapiens
agagagcgggcaaagactggaaacagaaatgcaatcataccgttgtagactgaatgctgctctatgtgatcatgatcaaagtcactcatcaaaaagagaccaagagcttgctttccagggcacagtagataaatgttgtcatttacaggaaaatttgaattctcatgttctgattctttctctgcaactttctaaagctgagagtaagttcagagtcctcgaaactgagctccattacacaggagaggctctgaaagaaaaggctttggtttttgaacacgtgcaaagtgagctaaagcaaaaacagagtcaaatgaaggacattgaaaaaatgtacaaaagtggatacaatacaatggaaaaatgcatagaaaagcaggatagattttgtcaact

SEQ ID NO: 312777 - DNA, 1318 bp, Homo Sapiens
  misc_feature (1193)..(1193): n is a, c, g, or t
  misc_feature (1217)..(1217): n is a, c, g, or t
  misc_feature (1243)..(1243): n is a, c, g, or t
  misc_feature (1276)..(1276): n is a, c, g, or t
  misc_feature (1294)..(1294): n is a, c, g, or t
  misc_feature (1302)..(1302): n is a, c, g, or t
gaaaaaggagtagatgaaaaggaagcatgccctaaagatcatcaagtaaacctgtcttgaatacgtgtagcagtttttcactgttttggatttaaaaatgttttaagttttatttttaatcgacaagtcattgtattgcatttgtggaatacagtgtgatgctttgcaggtacataatgtgaaattattagatcaagctaattaacatctttcatttttttcagtggtaatacatttgaaatttgctgtttcaatatatattattgactgtagtcaccctgttgtgcagtagatctcaaaatttattccttgagtttagctgcagccttctacccattctctttcccaccttccccagcaccccaccctcatcctctgataaccatcattctgttctctacttctaggagttcaacttaagattttacctgtaagtgagatcatgtaatgtttgtctttctgtgcctggtttattttatttggcataatgtcctctaagatccatccacattgtcccatatgagagaattttgttattttaaaaggccggatagtataatgtgtctatactacattgtcttcatccactgatggataattctcagttgattttgtattttggctattgtaaataatgctgcagtgaacatggaagtacggatatcccattgagatactgatttcagttccttttatattcccagaagtgggtttgctggatcatatggtaattctatttttagttttttgaggaacctctataccattttccatggtggctgtactaatttacattcccagcaacggtgtagaagagttcacttttctctgcattgttgctaacactgatctttcatctatttgagaaaatgcattctagcaggtgtgaggtaatctcattgtggttttaatttgcatttccctaatggctagtgctgctgaacgttgtttgcatgaacctggtatgtcttcttttgagaagcattttcacaagccattggtgaagtatgtggctcaccaccacccatactccagccctgttcccagtcactggtacctagagggtgagagtgaggctgctcatcaacgtgttctccaagtcataagctgctgctctcccactcacgatgcttgggtgattcagtgatgttttccacttaaagacagtgatagctgtattcaccacagtttantagatgttctgatgtgtcccagtnacagaggtaatacaaatgtgtggganataatgctgggtgcctgaaagcattggagaccnttgtaaggatgccctttnggtggttnaagtggaacctgaaat

SEQ ID NO: 312778 - DNA, 419 bp, Homo Sapiens
tatgcccagtgatactgggctttaccatccttccagctgtcctataaagtgtagcccttccattttgccctggaagtcgtaagtttttgctcattaacagaaaggaagagtactaatgagatccttcagcaattgtaggggactcaggatgtgtcccaggacatctaggagataagagtgctaggatgatacaagaaaagcaagtcactacactggcgctctttagagtacccagctaccaacaacccactgtcatttccatcatgctccagctctctcagtagctttctggaatcaatgttgtcttctattactcaatgagaatcttcaaggatgcaagtgttgagaagccaatctatagattagtgcaggagtggtttattatcttcttgactgtgtctctctgtttgtggttgtgt

SEQ ID NO: 312779 - DNA, 643 bp, Homo Sapiens
cttccattttgccctggaagtcgtaagtttttgctcattaacagaaaggaagagtactaatgagatccttcagcaattgtaggggactcaggatgtgtcccaggacatctaggagataagagtgctaggatgatacaagctgtcatttccatcatgctccagctctctcagtagctctctggaatcaatgttgtcttctattactcaatgagaatcttcaaggatgcaggtgttgagaagccaatctatagattagtgcaggagtggttaatattatcttcttgactgtagtctctctgtttgtggttgaaagggcaggaaggactttacatatgataggtcttgaggcatggcgttttgttctgtcctcatgattgtttctttgttattaaaggatgagtatggtgggatgagctttgtctgtagtggggctatcttggtctttgtggccttctctgaagttggaccagactccgttccctggaatactgtggccacactcttcagtttgcaatagcagtggctggttgctccaactggaccttcaactttctaggtggattgctcttcctgaacaatattatctagtttgtgtgttggtgctttggggcatggcatgcctatgtatttttgttacatcttg

SEQ ID NO: 312780 - DNA, 1016 bp, Homo Sapiens
  misc_feature (191)..(200): n is a, c, g, or t
tatagggaaagctggttttcggcgggtacccgggaaaaaggccattacggccggggagggcaggcggcggtggcagccatgtccctgacagatctgtggatgaaatgaatcatgattttcaagctcttgcattagaatctcggcgaatgggagagcttttgcctaccaaaaagttttgggaacctgatgannnnnnnnnnatggacaaaaaggcttttttcttggggatgatgaatggagagagactgcgtggggagcttctcaccattcaatgtcccagcctattatggtacagagaagatctggacagggttttcatggaaacagtgaagtaaatgcaatactgtctccgcgatcagaaagtggaggccttggtgtgagcatggtagaatatgtattaagttcttctcctgctggtgaattggattctcgatttaggaagggaaattttggcactagagatgctgaaacagatggacctgagaaaggagatcaaaaaggcaaggcttctccatttgaggaggaccaaaacagagatcttaaacaaggagatgatgatgattctaaaataaatggcagaggtttgccaaatggaatggatgccgattgcaaagattttaatcgtactcctggaagtcgtcaagcctctccaactgaagtagttgagcgcttgggccccaatactaatccctcagaaggactggggcctcttcctaatcctacagctaataaaccacttgttgaagaattttcaaatcctgaaactcagaatctggatgccatggaacaagttggtctggaatccttacagtttgactatcctggtaatcaggtaccaatggactcttcaggagctactgtaggcctttttgactacaattcccagcagcagctctttcagaggactaatgcactaacagttcaacagttaactgcagctcaacagcagcaatatgcattagcagcagctcagcagccacatatagctggtgtattctcagcaggccttgctccag

SEQ ID NO: 312781 - DNA, 1772 bp, Homo Sapiens
ttttttatcaacatttatatgctttattgaaagttgacaagtgcaacagttaaatacagtgacaccttacaattgtgtagagaacatgcacagaaacatatgcatataactactatacaggtgatatgcagaaacccctactgggaaatccatttcattagttagaactgagcatttttcaaagtattcaaccagctcaattgaaagacttcagtgaacaaggatttacttcagcgtattcagcagctagatttcagattacacaaagtgagtaactgtgccaaattcttaaaatttctttaggtgtggtttttgtcatgtagcagtttttatgtagatctatatataaaagtccacacctcctcagacagccaatgaaacaactaaatttcaatctgtacaacctaaatagtagttacagtcctctattgtacaaaatagttacactacatacacaaatatacaataagcaaaacaaccttcatggtaagatagcctaggtcccagctacctgtcaccattttgtcactctcatagttttgtgtcatccattgtttgagaagaaagaggcacagtactattgttttttatgaattttggtgacagttgtcaaatttgtacagtgaactctgttccccctcattttagtctttttaccctcctttcaagttcctcctggggggaggagaggagagaggcgagtccagtgaggagctccatcgcttcacaaccccatgtaggacactaagcgcaagcaggagagagaacccttggaagtgaggggtagggagccggaagggatggaaaggcacacagctcctgagcatgaattaaaccatttctcagatatctgccaagctgcatgaggtcccggtatatccatgctaattctcggattaacctttaattcacccaactaagaaatttctccaagccataagcatatgagtgtttaatactggaaaagagataatggcatatgtcagtctcacgtctctttcgcagcgagcaatgaaatgggtgactgtggaggcagattctcccctagcacatcttctccgtctgttcagttcacacgcagcagccagttctgcgggggcataggcagctatgcggttggtcctgagccctgcgatgctggctgggcggggggctgtgtggtgccctgtggctgggtggtggcagggggggagccagtctgcagctgggcctgaaactgggcaagctgctcaggactggccagtgtcttcagcagattgttctcctgctccagctgggaatttttctctattagttctttgatttgctctttgaggacctccacttcttctctgaccgcatacatcaaatggcttttcactagatccatagcttgctcgattttgttgtcaatagctaccacacttgcaccagaggagctattatcaagtctcacagaagcgttttcagtccccagcaaggatgacaagaaagaaattgaaaaatgtctcagttggtaaactcctagatccatcgccactggtctacaccattgggatttcatgcaattgcagccaaaaacaccctcgtggaaaaaaagagggaacaccagcagccttgtataagctagataaaatcttctggctttccgcagcccagggagaaacagaaaacggcagccctaatttaaagaaacccagcttctagggcttgatgatcccaggcagatgcggatcccagtgccgtgaagaggcgcttcccagatccgcagccgggctccactcagctctccc

SEQ ID NO: 312782 - DNA, 454 bp, Homo Sapiens
  misc_feature (137)..(173): n is a, c, g, or t
atcttttgaggtgaattcctcttcattgttttctgttggcttcactgcaacagtttctctgtcagctttgatgccttgagcttccaaagacaattcttccagttctttcaggatatcatcttcatcaaagtcctgcnnnnnnnnnnnnnnnnnnnnnnnnnnnnnnnnnnnnngaggctcctgttctttggcagcaccagctccttctatttctgcagccaaggcatcaagatcaatgtcatccttggtgctgtcttcgctcttgtttttctgtttcttccccattgcttgtcaatggcgctcgtggccccagcccctctattcggtctctcacagacccactgtctcccggctgactttggtctccgctcagctcttttcccctcgtgctgccgccgctcgcacccggctctccacagacccgcgcactggaacaggacacatatggtgtccc

SEQ ID NO: 312783 - DNA, 451 bp, Homo Sapiens
taatgaaaatgaaaattccctatacacctgaactgggtgagagatttttgtggggttttctaaaaaacccttaagttaaccaaggtaactcttctaaaatggtcctgacaggcaaggaatgggggggcaggagtaagatggtaagaattctacttatacaagtcgccatcattttgatgttttaacacccctcctgatccagaatttcatcaacatatcaaagaatcacaactttcctaaaattccagggctttcatggccaaatttatcactcatttctgcatccatggatgctaaggaacaaagtctccaaatctaggcccttgaatcaattagagacagcatgccagggtggctacagttggctatgtaccaaaaagccctaatgagatgaaaatgaaacctctgtctattcaaaaaccaaacttgaacagccctccctgaaagctct

SEQ ID NO: 312784 - DNA, 822 bp, Homo Sapiens
ggtgaagttttattacccattcttgatactcttgtttttggatggcagttgattgttttaattcattcgaccatttattttctaggtcttgctgggattcaaaatgctgagcagccagtgaatttacatcttgatctgtcagtgattttcccaattcctgcatgcctttttccatttcaataccttggtctctctcgtaattttttcaagctccacttctctttcccccatcagttgtgagatcctaccaaagtaattatgttccaaatttaagagagtttcagaggcaggagaatgaattaagtcatggtacacatctgcaaaatcttcatcccagctgggttcttcaggccttgcatgctctaacgtggtctcagcataagctttggcccatgtactcgccagctgatgtaaatctacttcacctgatttcacagctgccagggatgcttcagcatctctatcataatcgctgagggattcttcttctataaactgagtcagagcttcttttaagtctttttctataaagcacggtaaactgtgcagcagcatcagacgtccatgcaaatgactggcattctcttgaacaggaaatttgagtggcactctcagttctaagcactgacttcctactttaaatttatatacaaattctctctctctattgcagaatctttctctgtttttcttcatattctttgacaggatttctacagaactcgtctagttccgaagtcctgggcagtccgctcactcgagctgtcagcgcgtcctgcactgggaaaccagctgacttgccgacatacttttcccacaccc

SEQ ID NO: 312785 - DNA, 857 bp, Homo Sapiens
  misc_feature (279)..(279): n is a, c, g, or t
  misc_feature (403)..(403): n is a, c, g, or t
  misc_feature (477)..(485): n is a, c, g, or t
  misc_feature (780)..(780): n is a, c, g, or t
  misc_feature (835)..(835): n is a, c, g, or t
taaacagtcaacttttggggtgtggatggaaggggggtccattttaaaagtgcttttacattgaatttccctcccagattagatcagcaaataaatgaaatttattaaaagaatgttgtgtctttaatagccatgctgttcagtgtagaaactttaaatctctcattaattttctgtgtattgtatcatgtacagcctgttagatatttgcaggttttataggttattcagtccaacgctttatttatttgctcttgttagttgttgctgtgaaacagntcatttcctttctggacatcaaagatattttcttggcattaattttaaactgatttcataaggtcaaagtattaaatgttttaattcagattgtgggatagttttgtagtcctttggattttgncaaatggaaattaaaatgcctttgtttagatgttagggttaagtatagtagtgctctctccattgtgtcttaannnnnnnnnaactcacttgtggcaggtctttattgaataaaggaggaataaacctagacagggagttagaaatgaaagacatttcaagacagttcaagggttatgttggtgacacttcttgtcttccagacagttttgaaagcacagatcttgcctcttgtgcttgttaaaaaatctgtgatacttctctgaagattttataattaaataagtgaaccattaccatgaccttttataaaagtgctgccctatttgaagtattggggttttttctcatgatgagctttgttagacttgggtactngaaaaaatcagtagtttttttccttctattttaaagggcaaaggaaatgcttgcnttcagctagggcatgggtgggc

SEQ ID NO: 312786 - DNA, 881 bp, Homo Sapiens
  misc_feature (125)..(125): n is a, c, g, or t
  misc_feature (170)..(179): n is a, c, g, or t
agcatttttgaatttctaggttctataatccataccaggaactttttcatgttctggagccatatgttgaaattcattgttcctcatgtttcttttccaggcttttaatatccatttaacatgancggggtactatggttcattacttttcacaaatactggggccgggnnnnnnnnnnggttaattttgctacgaaaatgttataatacgttttgtatgatcagtcatcatcctaaagagttcaatagagtcaatgaaaaatagcagggttatagcccctcccccccaagtcaaaacaatatttgttgaagtaataagaattagaccccatcacaaatgaccttcactgagaagataattgtaacttaatcctgcagcgaaacatccatttttccttgttcttttcttgcacagttccatcaaatgaagatcacagcatattcataataaagttatataactgattcagcaccacaaaatgaattgggagacatgagcgtctgtcctgggttgcagggtcacaggttagccaggagagtgcattgtactgttccaaaacaaacctgaggacatctgaagtctgatttgagtcaagtgggtgggagtgtttactgtgaagcagctcgtcagattgcactgaaggcacgtggaggtgcaaagaggccttaagaaaaaggggacactgatattgtgcttgaggacatgctgaccagaaccagtcaggtaatggacctgctttggcagttgatacaaagtaaccaagggccaatggttgctgaagaatattaggtacttcctcatgaggttctgttgatagtagccgatcagtactctgacccttgcccgcatcacctccatgggggtaatgagaccccggaga

SEQ ID NO: 312787 - DNA, 527 bp, Homo Sapiens
  misc_feature (58)..(68): n is a, c, g, or t
aggttgcagtgagccaagattgtgccagcctgggcgacagggtgaggctcttgtctcnnnnnnnnnnngtccacatcttcatgaaccctcagactctggagttgggtgtcggcttttttagccagcttttgtgggaattgcctttgacctattaaagaaggaaagtgggtaatggagtcccagccactcaagagactggatatcccccgagaatggcttgggttaccagctatggacccttggaagatgaatctaatccttctcactggtttttctttgcaaattcatttgcttttatttttctaataacaataaactctattttccatgttctcagggcccctgggtagacagacacagcttgatttcagagcagacataggcgaagaaaacatggcattgagtgtgctgagtccagacaaatgttatttatatacacatccaaatttgaagagaaaatgtatttctttaggtttcaaacactgtaatagatataaagcaaaaataaaaacctgttgcaaagttct

SEQ ID NO: 312788 - DNA, 278 bp, Homo Sapiens
gcttccttttttagaagttttcattgttggctcttcttttggtgtacctccaccaagaggttttggtggtcggcctcttttacccttttttggcggactattctgttcatcttcattttctaatatatcttctttgagcctcttttcctcaggccactgctgttcatcagattctgaagccgtatggcctcttttccgacttcgctgactgcctttaggtttctgttcatgtaccaacttagtcaagtcatccatacctaatttctcctcctgccccc

SEQ ID NO: 312789 - DNA, 973 bp, Homo Sapiens
  misc_feature (41)..(41): n is a, c, g, or t
  misc_feature (60)..(60): n is a, c, g, or t
  misc_feature (69)..(104): n is a, c, g, or t
  misc_feature (212)..(212): n is a, c, g, or t
  misc_feature (786)..(796): n is a, c, g, or t
ttgcagtaacctgagattgcgcccactgccactccaacccngggcaaaccagaagagagnctctgtctnnnnnnnnnnnnnnnnnnnnnnnnnnnnnnnnnnnnttctcagtgattggcaaatgatggcctgagggtcacatctggctggtgggcagtttttgtacagctgcaagctaaacatggtttttacatttttagagggttgtttgnaaaaaaaacaaactaaacaacagcaagaagaatgtatgacaaagacacaggtggcctgcaataatttactaaccagccttttacaaagaaagtttgctggcctctgttctatcaaaaaccaactgagagagatagctactggaatataccaatgagtattaaacaagacaccactgtaatgtgccagtgccatcagcactactcatttctaaaatgaggcacttctgtttgaatatgtacatttccaaaacataattacatctggtaagtagtactaactctagccctttgaaattagacctgcacgtgaaatcatagcattcttaggggctgaagtcaataattacaaagcatttcagatgtcaatcattgagctcttcagtagttagtggtttaagaccatttacagtcttaaatattaataaaactcataatttaggtattgtcaataagaggtgatattgctgcattatttaaataacatctataaaaataggtttagacatcccaattcgttatactcagaagcaagaataactagttaacttagtaactacttaaaaatgggaaatgnnnnnnnnnnngtgcaaaactttagcaaaaggctttggaatgcaaagactggagcctcttagcaatcactcccagctggcataggcttctcctaataaagttagtctgcaatgattgctgtgggaaattaacagctgtctcttgtcagtgagcctttttataaaaaggatgacaggtccatgagcacc

SEQ ID NO: 312790 - DNA, 481 bp, Homo Sapiens
gacattccagaaagttttctgcctccacaatctttcaaatgccaacacaaataggaaaagcagaaccccttaaagggacagctcaggttttctctggagcaacttgaaattaacagatttgctgttccaacagcggaaaatgcccatttcaacgttggtgagtgctgtatgtttaacatacggaagcaaaacgacgagaaagccgtaacacctaaccattttctacttttaagttgtttctatgactttcaagacaacagaactcctgggatttttctttaaccattttttatcatggaaacatttccggccttttgttctctagtgacattccaactccccaagcttcaaactcctgttccccgactctatttttaaaatctcgaaattcttgcgaaaaatctagactccattgttcatctcttcaacctgtagttttcagtttcctttacacagtcctccggtggtgcctctaagcagg

SEQ ID NO: 312791 - DNA, 664 bp, Homo Sapiens
  misc_feature (501)..(501): n is a, c, g, or t
  misc_feature (593)..(593): n is a, c, g, or t
  misc_feature (637)..(637): n is a, c, g, or t
  misc_feature (653)..(653): n is a, c, g, or t
agtagacgaaatattgggccaaagggccaaggaatcctgttaagggaggaatctcgcggtctcatttccagccaggcacttttctgttcttgtaactttccagtcgtaatttggggattactgttgataactctgacacctggtggtcatttcaaaaactgcactctggaagaattaaacgttcacttttatcatttttagttgtttttccacctccaatgtcagtgtcaataatatgcattttataaattagtgattattgttagttgaatgatctataagtaaaatccttgcacatgcattcaacagaatacactaggatagaaaatttctgaaaggtataccagaagctatacatggtggtccctagagagtgcagctaggtgtggggaggaagcagacttattttactttatgccagttagtgccctttgaaatggtcttaaacagaaatagtgtattactgtaataattatagtgaagtactgcacttgggcaggnatattcccttccagggctcctaccctctcctgattttgcatccagggacgtcctctgtgcttttgaatgtattaaggagtgacgtacggctngattcactctgatctcattcactgacagtggtgggagagccccnagctgagtagaaactngttctggggca

SEQ ID NO: 312792 - DNA, 1442 bp, Homo Sapiens
caaaactgattctgagaagccttttcggggcagtcagtctcccaaaaggtataagctccgagatgactttgagaagaagatggctgacttccacaaggaggagatggatgatcaagataaggacaaagctaagggaagaaaggaatctgagtttgatgatgaacccaaatttatgtctaaagtcataggtgcaaacaaaaaccaggaggaggagaagtcaggcaaatgggagggcctggtatatgcacctccagggaaggaaaagcagagaaaaacagaggagctggaggaggagtctttcccagagagatccaaaaaggaagatcggggcaagagaagcgaaggtgggcacaggggctttgtgcctgagaagaatttccgagtgactgcttataaagcagtccaggagaaaagctcatcacctcccccaagaaagacctctgagagccgagacaagctgggagcgaaaggagattttcccacaggaaagtcttccttttccattactcgagaggcacaggtcaatgtccggatggactcttttgatgaggacctcgcacgacccagtggcttattggctcaggaacgcaagctttgccgagatctagtccatagcaacaaaaaggaacaggagtttcgttccattttccagcacatacaatcagctcagtctcagcgtagcccctcagaactgtttgcccaacatatagtgaccattgttcaccatgttaaagagcatcactttgggtcctcaggaatgacattacatgaacgctttactaaatacctaaagagaggaactgagcaggaggcagccaaaaacaagaaaagcccagagatacacaggagaatagacatttcccccagtacattcagaaaacatggtttggctcatgatgaaatgaaaagtccccgggaacctggctacaaggctgagggaaaatacaaagatgatcctgttgatctccgccttgatattgaacgtcgtaaaaaacataaggagagagatcttaaacgaggtaaatcgagagaatcagtggattcccgagactccagtcactcaagggaaaggtcagctgaaaaaacagagaaaactcataaaggatcaaagaaacagaagaagcatcggagagcaagagacaggtccagatcctcctcctcttcctcccagtcatctcactcctacaagcagaagagtacactgaagagacagaggaaagagaggagagcaccacgggctttgacaaatcaagactggggaccaagactttgtgggtccaagtgaaagaggaggtggcagagctcgaggaaccttttttcgagccagaggaagaggctggggcagaggcaactactctgggaacaataacaacaacagaacaacaaagccggacgcgtgggtcgacgatatcccgagaattccggccggtaccagcctgctt

SEQ ID NO: 312793 - DNA, 560 bp, Homo Sapiens
cgtgtcagtgtattcatatcagagaggcaccaagcagcacagctgatgtgaaaacgcagcaagagacagatctgagaaacccagagcctcctcagacccctggggagggcagagaacttaacccatactgtctgaaaaacaaatgaacatgtttgcaaagccaatcagcttactttagtttatacatttccaggataatgaaaaccccttttagaactgacatgctcatgacagccactcccctcagcaaaatacaatctgttttctaatatttgcatccccaaccataggaaaatcctctgggtaattacctctctcttctctcatttctaggccatgtgtagggtctctttccctcccaggtttgacccatggcctgaggcctccagctacagttcccattaccttctgtcctctcagacactctactttcagattgagttgagttttggcactgatgggaaaactcggttaaaaaacaacaacaatattccagatatgttaccagagaggtctgctgaacacttgaaacttcaccaggcagtgagcccagacccctt

SEQ ID NO: 312794 - DNA, 568 bp, Homo Sapiens
aatgtcatccagatttataactttaaatactacccttagtaactgatgaatccccaatttgtgtttccagccctaacctattccctatattccaggttcgtatctacctatcagcatcataccatggatgtcttaacaggcatctcaaacttactatgtctaaaacaaaatttgacttttcttccccaaacttgccctaccacaaatcttctctattttcggtaaaggaacctcagagatgctcaagccaaaaagctgaaaatcactcataaatccttagtcccacatatctactaaattctaatctccacatagcaactatggcagtattttaagattgctcatttcattccctactgaaaacattccaacagtttttattatatttaagattcagcccagattacttatctgggcctcttatctcctctgaccctcttccactgctttcttgcttgagcacctcactgcagccatactgttaccttacttttcttccaggaccctgatacatcctctttcccctccctggaacattgttccttcagctctttacatggttccctct

SEQ ID NO: 312795 - DNA, 862 bp, Homo Sapiens
tggtaaagaaaaaccccgtgtctatgaatttcccatggaacagagccatggcaataaatctgccaataaaacgaaaatatttcaggtgatctggattgatgtaagaagcggggtttatctgcaagcagtagttatccttccctgcatattcaaacaggcaatacattgggttcaacacttcatgtgacaaaagaaagaaccattctcttgctacacctccataatctaaaccttcttctcctggaaaaatcacccacaaacgtcttcgcagatcttggggactgaagctcattatctgttgaaaggaatcctcaaacaatgtttttcttgtcactgtaatctttatgtgctgtggcatggccagttgctgacaccagaaccggaaatactgaacctttgctttgaagtcccgaacataggctatctgaggtccattgtctagggcagattttcctgtgcggggatctatataggtggtagttcttctattgtggtccacaaaatatggaattccatccactgtgaatctcatttcccaaccttcaggtaagggcttttcatttaattgaccttgacttctggggtcttcccattgtgtaattcgtgtgttgtggttgacgaaatatactctgccattgctgtctgttctcttctcccatccaggtggcaatggaccaagaggatcaaattctttactttgtgatgtagcaaataaatcttgattcccataaatgaatctctggttaaactgctgcattgctccttgaagctgactacgctgtagctgccattgttcatagttccggacggattccagtgttggcctctgccacgttgttgttcttgtgaaatggtcaacata

SEQ ID NO: 312796 - DNA, 691 bp, Homo Sapiens
cagcatatacagggtgtgcaggaaacagccacagatcctagaactgagagcaaaggcttgccagagatcaggaggcaaaaatctgtaagaaaaatgatggaggatggaataaactcacctggcagagtgcagttttagcagagcactttataactgcactccaaggaaatacagaattaacaggtcaagaagaactgatggagatatctgaagttgacgagggattttattccagggctgcgtctagtaccagccagtcgggtttatcaaacagtagtcacaattgtagtaacaagccaagtataggaaagaaccacagacggtcaggaggaagcaaaactggaggaaaagaaaaagaaactacaggggaatcttgcaaagatcactttgctcgaaaacaaactcagagagcccaaagtgagaatcttgagcttctctctttgaagagacttactttaacaaccagccaatccctacctaagcctagtagccatggtttggctaagaccgcagcgactgtatttagtaaatcctttgaacaagtcagtggtgtcacagtcccacataacccgtcatctgctgttggttgtggggctgggacagatgccaataggttttccgcttgtagtctccaagaagaaaagcttatttacgtttcagaaagaactgaacttccaatgaagcatcaatc

SEQ ID NO: 312797 - DNA, 779 bp, Homo Sapiens
aaggtaccctataccaagtcagtatttcttgcatatttaaggtagtgaaggaaaaaccgtaaagttttatgaaaagttagatttagatatgaactattaaaaaactgttcaatagtgtctataaaatagataaattagtttaaaattcgattgtagaaaaacatcctagctcctacccaccactctattactcaggtgcttccataacagccaagagtattacaacaagagaatataaaaacatttaaaatacaatttcatatatttttatttacactttaacaacttgctgggaatttaaacaacttgctgggaacatcctttgtgaggcactgtagcctttttttatttgaaactacttaaactccaagacaggctcactaactctttttcaagtgcaacaacaaatgtgttagctgaaaatagctaatttaatgattatttgtgacacagacacgattatgtgagccaagagagcctccccacctctgtctcccctgtggaggaggaggtctttgtgtgcttttgtgtgatggttccactgaattcattacaatagaaatggacatttgatattcataacgatccaacatctgagcaatcttctttcgagacacaccatgtttattcctcttttctaattcttcaggatcaaatttccaccaagtttcaggttcatgaaactctactctgtatccttttcctatggccacttccacatatggcttcatttcccaagcttgtatattagtgttatctattataactggagatcttcc

SEQ ID NO: 312798 - DNA, 1369 bp, Homo Sapiens
aaaaatctatcacctcggaatattgaaagaaattcagtaaaacaagatgtgtctcatagttaaggagagacataaaaataaaaatgtcatttaacagtttgaatttaggatttactgttaatcagaaacaccgaggaggcttagctcaccttttaattgagaatgtgggaaggaaagagagtaaacacattaactttagtagcagaagtgctgctaaaagaaatacgtgaaaggaaatgtaacagacaaattggcttttatcccttttgataccaatatatgtgtatacaagtcataacactgtaagtagtgtcttaagggcaaaaatgtagcttcttgtttataaaacctaatgagcacttgaaaaaatttacactctgaaattaaataagaccttaataatgaggctgtgtatgactggtgatatggaggagcactgtgctggctccagaggggtgttgcttgtctagaatctaatatgctgcagaactggttggaaaacgggtcacaactggaaaagccaaagaaaagtttccattagcttccaagaaattctagggtttttgttcttggaaatcatctcagcttccatttaaaattgttagtctgtgtcttctaaataaaacagagacctttttctcttggttgagcctttcctcttcttttgattttatctccaccactttatgagctctttcggcccatcgctttttccggtaatgctggaagaggaccactacaattactattatgatcatcagtgcacaggcagagccaatggccagagccaggaagtggatctcagagaagcgtacagtgtgcacgacgctgagccggatctcccctatcaccccatcaacatcaggtgggttcttcacctggcaggtgtatgtcccattgtcgtcgaactgcagtttccagagaaggatggaggcatcgtaccgctcaggattcccatcccaagacacccggtccttaaaccgcccactccatgggttggaagggatctatgtggtagtagaatacaaactgctcaggtcccccgtctagaggacgaaaattccaggtcactgttagagcatcacccacaggggcaaagctggagaaagtgcattttaaccgagcatctgtcccattaacagcctccagcacccgggaggtataaatttccacagctgctataggccaaagagctgtgagctgtatgccaaggagaagaagcaccgcacgagtagagctcttgccatacatgagggaaacccagccttggccccagagaccggacggggcagaccgagggctccaacaccctccaaggccactccgggaggagcaagcaccgcgttttcccagagagaggagtttgagt

SEQ ID NO: 312799 - DNA, 1114 bp, Homo Sapiens
attagaggggagccccctcgcaggaagtctgccccccatctctgggaatttgtgttcttcaagaaaaccgcgttccgggttgtctcccccccgggggccgtttttgttgatttggggtgggggattcccaaggccccctaggtccatgggcccaggggttctccctagggaaaacaagctaagggcccaatgttccacttttcctctcctggggccccgcggcgcccaaacggaatgggtttaagaaagctttttggggggccgaaggcggcccgacaagttttgttttccttctgtgtcttgcttttttaaaagtttcatactaagttttattgtatgctgctgccagtgtatataaaacaattacccttgtgaaatagaaattcatgaaaattcagagaggtagatgttaaggactgacgaaagtagaagtttgtatattatggcacatgtgttacagggataagcttttgtacaggcttcaaatgtagctctcttgaatattcactggatcataaggagtggtttgggaaacctttgaaagattcattttactacaaaaaggaacagactttctggggtctgaagggatttgtacttgaagatactccagtcagcagagggtcatgttgagcattctgcagacagaactgtttcaagtctgcagctgcctgggaaacttttacgcggttgagtccggcctccagccggagctgttgaaccactttcttcatagcggcgacgctggaggagccagacatggtgcacgcgacggccgggccgattcgtgggtcggtgggtcgtgggccgtgggtcggcggggccagacaactcagcggcgcgcggcgggggcggggctccgaactttgtctctaagtttccggttctgtgctcagcggctccaccctccgtgtgatgcgcgccttgccagccctctgttccagctccacaccctgccccgagcgcgagccgttagccgcgaagaactaagagggggtctgaagaggaccagggagggaaggcagagcttgtgggagtttctaaaaggcccggcggcgggtgaccaggaggtctcagttttcctccccagtttgtgggaagccctcgtgccgaa

SEQ ID NO: 312800 - DNA, 1922 bp, Homo Sapiens
gcttttaaaggatactgcaatataaatatattaagcatggcctcaaatatccaacattttcctatcttacattttaaaccaaagttaaaagaacctacaggctttataaagaactctcttcacagcacagctgtagttcactttaaacaaaaaatgttccctttgtgctatatccttagaagtaaacataatatacagataaatgagaagtttcgattctgcatcaagcattattcaatctcaccttctgatataaacctgcatacagtcaaacttgcaaagcattcacttaatattttagttgaaacaaacttaaaaggtatatgggttttcggtgaaggagacctttgtgagttccagtggtgtccttggcactcagaggttcagctgaagtcccgactggtgaggacaagtggagccacaagggtccagacgtaaagcaggaggcagacccagctggagctgatcttgacccacacagctggccacttgctggtcatgctctgaaactttgcatcagggctgtaccagctggtcagggtcatcatgatgtacaaggaagccaagcagagcatgaggtggaataaggagtagctatactgcactccctctttctcgttgtccacagcccgccgaggctgtcccatcttcttcatcactggcaccactggtagttgtatcaccaaggatgacgctgtcactccctgacagggtcagcttgtctacttggctattagtggaagtgcggatgctagaatacaagaggcagagaacaaagacaaacagtccaataaaattatctgaatccagtaaagacccactctttgatggtggagtaggggtagggaccacagcagttgaatttccaggagccagggttggtgcagttatgcgtgtaataaagctcatcaggttgggattgcaggaacgatcaggttcattggacatggctgaccaggtgaggtacatagtgtagagggtgatgagggaggactgcaagaggccggagcgaggctggtgttcctgaatttttgggtggatcgatataatagaagccacaacgcaaaggatcaggttaatactgatgaagaacttgttttctgtgcagccatctggtttggtgtaatatgtatagagcagcccgacacagatgattgacaggatataaaaggcgcttgtgaaagacagtaaagcagcataccacaaccttgggtttccttcttccattcgatttacccatgattcattccaagaatgagcaaaatctaccagcagcaccagctgaatgaggatgaagagggcggcccctatcatgccaacaacaaaccagactgagctgaaatagcccccagggatgtagaaagagccaaccatgattccaataagggcagcaattttgaagaaccaaaacccattgtgtactgccgctcggagatctttacttgtttttactttgaacatgagcagagaaaagacaaagaaaaagatggccatggcaaagctgatccgatacacagctttataaccaaccagcacatcacaatctttatctgcatttatatcagcctcatggattttaaatcccccttcacaaaatccaggaatcttcttcaagtaagtttccatctcttttctctgcatgatataggatacgacagtgctcaggaggagaatgaaagcataaatgaggcgagtcaccgtggaattcttactgttaggacagcaactacacagcaaacatgaggcaccgctgcagaggcatggaacccagctggcgagggagaagacacccagcacagcccccatggtgacgccagtgatggaggtggccggtcctgaggctgctttctaacacggtggtaactgccagctgaggtgactccccagaaacatgacggtttctcgtgccgaatcctgcagcc

SEQ ID NO: 312801 - DNA, 439 bp, Homo Sapiens
  misc_feature (37)..(37): n is a, c, g, or t
ctcaccccagtcggggccctccagcctgaacccctcngagtgcccccaagggacccccactggaacctccacaaagggtcctccccttcacccgaaaacccccatataccccttttaagtttgtttccaacctaaaatattaagtgaaatgcctttgcaagtttgacctgtatgccaggtttatatcagaaggtgagattgaataatgcttgatgcagaatcgaaacttcctcatttatctgtatattatgtttacttctaaggatatagcacaaagggaacattttttgtttaaagtgaactacagctgtgctgtgaagagagttctttataaagcctgtaggttcttttaactttggtttaaaatgtaagataggaaaatgttggatatttgaggccatgcttaatatatttatattgcagtatcctttaaaagcaa

SEQ ID NO: 312802 - DNA, 1030 bp, Homo Sapiens
ctacaaacctctggatatacacgtaggaagcttttggtatttccactagtgaaactgctcagttgaagggtatgtggatcttcatctttaataaatattaccaacatgtgaaaagcccgacaatgtcaaggactggcaagagtgccacatgtgatgggtgtggaatggcagctcactgtagcaggtgctggggactcagttggggtcttggagaagcacttagttatagcaagaatgtctcataaatggtatctgatagagacaagagtagtggggaataaaaacaagttgcttagaaataattatagatctaaagtcaacaaaaaaccttttctaatgtaaaaatacatacttttttcagagggagggggaacaacttaaactagaaaacaccttcatattaatcattcttctcatatacttcaaatttgtacttaatgcctttctcctcctggacatcagagagaacacctgggtattctggcagaagtttatatttctccaaatcaatttctggaaaaaacgtgtcactttcaaagtcttgcatgatccttgtcacaaatagtttaagatggcctgggtgattcatggcttccttataaacagaactgccaccaactatccagaccatgtctactttatttgctaattctggttgttcagtaagttttaaggcatcatctagacttctggaaagaaaatgagctccttgtggaggttccttgagttctctgctgagaactaaattaattctaccctttaaaggtcgattcttctcaggaatggagaaccaggtcttcttacccataatcaccagattctgtttaccttctactgaagaggttgtggtcattctctggaaatatctgaattcattcctgagcggtggccagggcaggtccccgttcttgccgatgcccatgttctgggacacagcgacgatgcagtttagcgaaccaaccatgacagcagcgggaggacctccgagcccgctcgttacagcagaacgcgcggtcaagtttggcgcccc

SEQ ID NO: 312803 - DNA, 838 bp, Homo Sapiens
gatttgtgaaataggtttagcataaatatattgagaataaaaatcagaaactggtaaagaaaagccatatgaaaaaaatatacaaagttatctcccaaatgttgataagaacctagcgagttcagaagataggcccaggtgagaagtaggcccaacccggccaggcctcgaaagtgctccgcgtagaactacacgttgaaagtggacgtgttattggcatttcattcaaatccatgaggagaaaaaactacaggaggaaatcttacaccaccattgctgccaccacctgcagggccagcttctcactaggatggaaaagaagcgtttctgaggaacaattcacattagtacaaaaaaatgatacagccatttccaaagagcagagtaatgatcacaatggcagtttcgaggaatccagggtcagtcctcacacgggcctcacccagcctctcccgagtggcgacggcgctgagagccagaaagggggcaacgcgaagacgagtttctagcgacccttgggaaaagcctacgctacacatttcagaggagattaaaacattccatatgccaattaactttaacctaaaaaaatagagtgggagggaaccttgacattcggagaaattcaagtgtggcggtaacgctgaggagtgaggctgtttgtccaggaacgctgagctgggctcagacggtcatcagtgcagacgcagcggacgctgctgaggatggctcagtggtggggaggcgctccctcccgaggaggcctgcacgtctgtgtcctggcggctcgaactgggtcctccgggccagttcatgctcgccctctcccgcaggcagg

SEQ ID NO: 312804 - DNA, 1058 bp, Homo Sapiens
gtatttcggtaccgtctctcttttgtccagtcaacatgtcaatttttggcggcgcccactggtttgtgccttatgaacccccctttaatgtctgtccttccatccttcaacagacttgctgaaacctgttggttaaacaatgcgcatccccaaggcaatgtcccaaagcctcttcccgctgcccattccgactcaatcccggttgaacattccctgtagacttcagccgttgcgcagctgcccccccttcaactgttttcctgcctctcctacaaggaagtccagcattccccaaggtattcttctagagcacctgccagcccagagagcttcctttccttgtccatacagccctgcagagccacaacagccgaagaatgtcatttgtcccctcaaagatccggaagatgcgaagatctcggagcacacgctctactccaggttccttcatgaagcccataccccccatgatttggatgcattcatctgtcaccttccaggctgcctccgagccaaagattttgctgatggcggcctctatctggaagtccgtggctcctggtccatgttagcactcaccatgtaagccatggactcagttacatactgcagcataaccatccgtgccagcttctcctggatcagcccaaagttgtgaattttctcccccaaactgggtacgattagtggcatgatctacctggaagagggtccacacatcccgctgtggttcagtgtggttctgcagtctccctaggagaggggctgggcttgcgccagagggatgggttttgcatacaaccagagttcagtctacgctggatggagacctaagctagcaagtcgggctgctggtaggggaggagttgctagtgtagggagtgcctgcaagtgatcagggacacatggcaagggggacagtgagacttctgtttgggttacctagggactcgggcagggtactcaccgccttagcaatgatgcctctcatggtacctgccagggccgcagccatgccaaaccttccattgttgaggatgtgcatggcaaccttgaag

SEQ ID NO: 312805 - DNA, 1355 bp, Homo Sapiens
  misc_feature (1199)..(1199): n is a, c, g, or t
  misc_feature (1343)..(1343): n is a, c, g, or t
gtagcgaggcctgggtggcgaattcggcacgaggctgtgtcccgtttcttcgaggaagtgaacgatcccgccaagaatgacgctctggagatggtggaggagaccacttggcagggcctcaaggagctgggggcctttggtctgcaagtgcccagtgagctgggtggtgtgggcctttgcaacacccagtacgcccgtttggtggagatcgtgggcatgcatgaccttggcgtgggcattaccctgggggcccatcagagcatcggtttcaaaggcatcctgctctttggtacaaaggcccagaaagaaaaatacctccccaagctggcatctggggagactgtggccgctttctgtctaaccgagccctcaagcgggtcagatgcagcctccatccgaacctctgctgtgcccagcccctgtggaaaatactataccctcaatggaagcaagctttggatcagtaatgggggcctagcagacatcttcacggtctttgccaagacaccagttacagatccagccacaggagccgtgaaggagaagatcacagcttttgtggtggagaggggcttcgggggcattacccatgggccccctgagaagaagatgggcatcaaggcttcaaacacagcagaggtgttctttgatggagtacgggtgccatcggagaacgtgctgggtgaggttgggagtggcttcaaggttgccatgcacatcctcaacaatggaaggtttggcatggctgcggccctggcaggtaccatgagaggcatcattgctaaggcggtagatcatgccactaatcgtacccagtttggggagaaaattcccaacttttgggctgatccaggagaagctggcacggatggttatgctgcagtatgtaactgagtccattggttacctggtgagtgctatcatggaccagggagccacggacttgcagattgaggccgccatcagcatggggggtatgggcttcatgaaggaacctggagtagagcgtgtgctccgagatcttcgcatcttccggatctttgaggggacaaatgacattcttcggctgtttgtggctctgcagggctgtatggacaaaggaaaggagctctctgggcttggcagtgctctaaagaatccctttgggaatgctggcctcctgctaggagaggcaggcaaacagctgaggcggcgggcanggctgggcagcggcctgagtctcagcggacttgtcaccccgaattgagtccgagtggcagctggcagtacgggcttggagcagttgcaactgtggtggaggcaagctgtaaacacagaaggggattgcatgcaggttctgctgncggtggcggggc

SEQ ID NO: 312806 - DNA, 948 bp, Homo Sapiens
  misc_feature (447)..(447): n is a, c, g, or t
  misc_feature (848)..(848): n is a, c, g, or t
  misc_feature (858)..(858): n is a, c, g, or t
ttttttttggcggggctagaacttttaattttttgcgaggacattagtgctttagagagcgggcacagtgttgggaacactaggccccttcgggacaaaccagggccttaaggaaaggggctttggctttggcttgcgggaaggcacataactgggacaggccctggccgggagtttttagacgccaagtgggttggtggtgaccacaccacctcgttccaccaaggccttggagatgcttttgaagttgcggtagagctcttgctgccaggggtgatactgtagggcggccatgccctttgggatccgagctgcagcctcgatatcgccaggtttcacagagcattttgtcatgctgggccgtgggggggccctcactcagggatcttgaggccctcgagagaaccaccaccatggcatagaggtcggtggcccggtctgccagcngctgcagcagaaactgttcattgacaatccccttcttgtgttttatcagcttggcctccaccacagtggcaaactgctccagagcccgtactgccagctcgccactccgactcaactccgggtggacaagtccgctgagactcaggccgctgcccagccctgcccgccgcctcagctgtttgcctgcctctcctagcaggaggccagcattcccaaagggattctttagagcactgccaagcccagagagctcctttcctttgtccatacagccctgcagagccacaaacagcccgaagaatgtcatttgtcccctcaaagatccggaagatgcgaagatctcggagcacacgctctactccaggttccttcatgaagccatacccccatgatttggatgnttcatctgtnacttcaggctgctccgagcaaagatttgctgatggcggctctatctggagtcgtggctcctggtcatgtagactcacatgtaagcatgga

SEQ ID NO: 312807 - DNA, 611 bp, Homo Sapiens
  misc_feature (159)..(159): n is a, c, g, or t
cctccaccacagtggcaatctgctccagagcccgtacagcttgccactcgacttcaactccgggtgcacaagtccgctgagactcaggccgcttgcacagccctgccccccgcctcagctgtttgcctgcctctcctagcaggaggccagcattcccanagggattctttagagcactgccaagcccagagagctcctttcctttgtccatacagccctgcagagccccaaccagccgaaagattgtcatttgtcccctcaaaagatccggaagattgcgagtatctcggagcacacgctctactccaggttccttcatgagagccccataccccccatgctgatggcggcctctatctggaagtccgtggctccctggtccatgttagcactcaccatgtaagccatggactcagttacatactgcagcataaccatccgtgccagcttctcctggatcagcccaaagttgtgaattttctccccaatctgggtacgattagtggcatgatctacctggaagagggtccacacatcccgctgtggttcagtgtggttctgcagtctccctaggagagggtctgggcttgcgccagaggtatgggttttgc

SEQ ID NO: 312808 - DNA, 1094 bp, Homo Sapiens
  misc_feature (13)..(13): n is a, c, g, or t
  misc_feature (22)..(22): n is a, c, g, or t
  misc_feature (24)..(24): n is a, c, g, or t
  misc_feature (30)..(30): n is a, c, g, or t
  misc_feature (33)..(33): n is a, c, g, or t
  misc_feature (35)..(35): n is a, c, g, or t
  misc_feature (51)..(51): n is a, c, g, or t
  misc_feature (55)..(55): n is a, c, g, or t
cgatgcaccgaanccatcaaananactctnctntnttgaaccttgatcccntctnttctcaggggcccatggtaatgcccccgaagcccctctccaccacaaaagctgtgatcttctccttcacggctcctgtggctggatctgtaactggtgtcttggcaaagaccgtgaagatgtctgctaggcccccattactgatccaaagcttgcttccattgagggtatagtattttccacaggggctgggcacagcagaggttcggatggaggctgcatctgacccgcttgagggctcggttagacagaaagcggccacagtctccccagatgccagcttggggaggtatttttctttctgggcctttgtgccaaagagcaggatgcctttgaaaccgatgctctgatgggcccccagggtaatgcccacgccaaggtcatgcatgcccacgatctccaccaaacgggcgtactgggtgttgcaaaggcccacaccacccagctcactgggcacttgcagaccaaaggcccccagctccttgaggccctgccaagtggtctcctccaccatctccagagcgtcattcttggcgggatcgttcacttcctcgaagaaacgggacacaggctccaccagctctttaagaaactgtgtctgctcttcgttgagcacggacgggtatgggaacacctgatctgtggtgagctggcctttgaacattcccacagcaaaggacttagattccgccttggccggttttttcctggtcagagcgtcagaggggtgggaatctgacttgtccagagccagctgagcggcatccccggcatagggccgccgggcagggccgggccggggctgccccaggagcgccgtgagccgcgagcttccgcccccgagcctcagcagctgccgccccaagctcgcggccatccgagccgcctgcatctccgaatctctccgggcgccgctggctcgagctctgacccagctctggcgtcctgcacgcccacgtcctggcgcccctaaccctgactcatcgtccacagtgcaccgggcggcggacggttgcgatcccgggaattccggaccggta

SEQ ID NO: 312809 - DNA, 1354 bp, Homo Sapiens
ttttttgaagtattactatctttattatggtatacagcagtattttatacattagctcattttatagtaaaaacatttatgcacaactgtagagaaactgctgcacagatagctccaacttaaattagaaaatattttctttgtagaaaatagtaaaaattataacatttaccaagctaacccaacaagttcatttaaaccgaaaagtagctaaatacattatacatttataaataccggttgaattctgggatccaggagaaactttagtcctttattgaaatagccatgttttaagttatgtgaagtgaaatttctattaatcttctctcttactcttaatttatgccagattatttttctttaggctaaatccataatccacaacaaggttttagctgttcttttctaaaggacgggtaccatatccttttaatctgcttgataaggtacccatgcctatccaaataatgaaatggttcagttattattaaagcatgcccagtatttgggcaaaaccagaatctaataaattacactgtcacctaatacccatggcttgatgggaagccatgaggaacaagggtaaagtgataaaactggcaagtggatcaaggaataaaagccaagagaattctgagaccagagggcaagaaatatctagtcgggattcaaggacagaactgaagttcaaatagaaaaagaatgttgcctcaaggattaggagctgagctggctatcagagctcctagtacatggtgatcaaataaggggcagttagagataaagactggattaagcaagagaaatcaggaccaagaaagattctaggtattcacaataattaaatgaaaacaagacagaccatgcagctttaaatttcctagcatagtagttccaggattctcagtacagaaataatctctggaaattaaggcgagaagataatgccactcttaagctcctgtgctatgtagaatgtttcccagagaaataatatctgagaaatcaggcagttatctggccaggggctacatcaggttcttcagttccctcaaaacaacttaatcacatacagtttgtcttaaaaggaagcctccaagcagctaaaacaaactttcaacagacattcagtttaacagatcctatactgtggctttaggaactaggccactgactacctaaaaaccccagcttgcccacttgaagttaacctctagaaacattagtgatctgtgaagttttcaccattaaaacaatgctttatcatccaaatcatacttgttcttctctttgctttccagttatgaatttgttacctttttgcatttgattatttccagtggtttggttc

SEQ ID NO: 312810 - DNA, 2345 bp, Homo Sapiens
  misc_feature (1141)..(1141): n is a, c, g, or t
  misc_feature (1150)..(1150): n is a, c, g, or t
  misc_feature (1195)..(1195): n is a, c, g, or t
tttgactggctagaaatttttattatttgcgaggcagtaagtgctcttgagagcaggcacagtgctgggaacactaggccccttcgggacaaaccagggccttaaggaaaggggcttcggctttggcttgagggaaggcacataactgggacaggccctggccgggagtattcagaagccaagtgggttgctggtgaccacaccaccccgctccaccaaggccttggagatgcttttgaagttgcggtagagctcttgctgccaggggtcagactgcagggcggccatgccctctcggatccgagctgcagcctcgatacaccaggtgtcacagagcattttctcatgctgggccgtggggtggccctcactcagggatcttgaggccctcgagagaaccaccaccatggcatagaggtcgatggccccgtctgccagccgctgcagcagaaactgttcattgacaatccccttcttgtgttttatcagcttggcctccaccacagtggcaaactgctccagagcccgtactgccagctcgccactccgactcaactccgggtggacaagtccgctgagactcaggccgctgcccagccctgcccgccgcctcagctgtttgcctgcctctcctagcaggaggccagcattcccaaagggattctttagagcactgccaagcccagagagctcctttcctttgtccatacagccctgcagagccacaaacagccgaagaatgtcatttgtcccctcaaagatccggaagatgcgaagatctcggagcacacgctctactccaggttccttcatgaagcccataccccccatgatttggatgcattcatctgtcaccttccaggctgcctccgagccaaagattttgctgatggcggcctctatctggaagtccgtggctccctggtccatgttagcactcaccatgtaagccatggactcagttacatactgcagcataaccatccgtgccagcttctcctggatcagcccaaagttgtgaattttctccccaaactgggtacgattagtggcatgatctaccgccttagcaatgatgcctctcatggtacctgccagggccgcagccatgccaaaccttccattgttgaggatgtgcatngcaaccttnaagccactcccaacctcacccagaacgttctccgatggcacccgnactccatcaaagaacacctctgctgtgtttgaagccttgatgcccatcttcttctcagggggcccatgggtaatgcccccgaagcccctctccaccacaaaagctgtgatcttctccttcacggctcctgtggctggatctgtaactggtgtcttggcaaagaccgtgaagatgtctgctaggcccccattactgtggaagaatgggatattcagggcgtggaggacggggagcagtggggcctggaattgggcggaggagaaggggagaaatgggaggcaggttgcctgatccaaagcttgcttccattgagggtatagtattttccacaggggctgggcacagcagaggttcggatggaggctgcatctgacccgcttgagggctcggttagacagaaagcggccacagtctccccagatgccagcttggggaggtatttttctttctgggcctttgtgccaaagagcaggatgcctttgaaaccgatgctctgatgggcccccagggtaatgcccacgccaaggtcatgcatgcccacgatctccaccaaacgggcgtactgggtgttgcaaaggcccacaccacccagctcactgggcacttgcagaccaaaggcccccagctccttgaggccctgccaagtggtctcctccaccatctccagagcgtcattcttggcgggatcgttcacttcctcgaagaaacgggacacaggctccaccagctctttaagaaactgtgtctgctcttcgttgagcacggacgggtatgggaacacctgatctgtggtgagctggcctttgaacattcccacagcaaaggacttagattccgccttggccggttttttcctggtcagagcgtcagaggggtgggaatctgacttgtccagagccagctgagcggcacccccggcatagggccgccgggcagggccgggccggggctgccccaggagcgccgtgagccgcgagcttccgcccccgagcctcagcagctgccgccccaagctcgcggccatccgagccgcctgcatctccgaatctctccgggcgccgctggcgtcgagctctgacccagctctggcgtcctgacgcccgcgtcctgccgacgcgtgggtcgacgatatccaaacattgccggaccg

SEQ ID NO: 312811 - DNA, 1027 bp, Homo Sapiens
  misc_feature (735)..(745): n is a, c, g, or t
caaagcaccctaggtccacggccggcaccactaatatagttaagaaatacgtataaaagtaaattagaacactgaaacttaatcagatatatgacatcaccatcaaacattcttcagctcaaaagagcaaagcatctgagagttagtctaagaatgcatgtactttaacaacacatgacaacacatatataacagaaaataaagacaatggagaaatgctctcttctaatgtagtaatttagagtactgaaaatgcaatttttgcagcactttaacaagtgagaattatgaaaatctgttcactgaacaggaatataaggaaaaactaaacatgtatcccaacttattaaaatgacacatctataggctacatctatcctgaatctctctataaggccaaattaacttttcacaattttctcttaataaatgattaaaaatatgaaaatacttaaaggaacatagcatttagactgtgaaactgtgttgtaaattttattatagttgtcattttttcttgatgttgaagactgcatcacagtttcataaataacattgcttgtgttttataatatatctgtatgcagaggtacgtttaacaacatctgcatgtatccccagaaattgttgctaattttagaacacatatttttattctgataatgatttaatttttttacttagtacttcagtagaaaacatgtgaatagattgtatgccccatatcagtatttnnnnnnnnnnncctgaacaacattcttttaaatgtccatttaacaaaatatatgttaacggttattgttttatcatgattaaattggtatcaaattaataggcataagtgaaaaaactaatcacttactagtcatttagaaaatgcagtaacatcatgcattatgtattactaagaaagttctcacttaacataagcagtagatgaggagaacagtatcatgaaaattctaaatatatctttatgtatatccttaaaaatcactttcctttatataatttccattttaattta

SEQ ID NO: 312812 - DNA, 771 bp, Homo Sapiens
  misc_feature (412)..(524): n is a, c, g, or t
  misc_feature (550)..(665): n is a, c, g, or t
  misc_feature (674)..(692): n is a, c, g, or t
gagaaaaaactattttattttactactttatgaatggaaaagtacttctaagaatggaagtggtgtcggaaatcacaaagggaaaatctagatttgattatagaggaaaacaaaacactgttattaatgaaacatcataacaaaatttaaaaggcaatccaagaatgagagaaaatataaaccagagggataatatctttaataggcaaagacatatgtaaaaacgaagcagaaaagtaggtgtatgaatgacaattcatagatgaggaaattcaagagccaataaatgcatagaacaccttcaccactaataaaagaaatgcaataagtatctgcatatgatacataatgttgcagatgtttgtaatttacataaaagatactgaactagggctgggctcagtggcttatnnnnnnnnnnnnnnnnnnnnnnnnnnnnnnnnnnnnnnnnnnnnnnnnnnnnnnnnnnnnnnnnnnnnnnnnnnnnnnnnnnnnnnnnnnnnnnnnnnnnnnnnnnnnnnnnnttagctgggtgtgatggtgggtgctnnnnnnnnnnnnnnnnnnnnnnnnnnnnnnnnnnnnnnnnnnnnnnnnnnnnnnnnnnnnnnnnnnnnnnnnnnnnnnnnnnnnnnnnnnnnnnnnnnnnnnnnnnnnnnnnnnnnactgtctcnnnnnnnnnnnnnnnnnnngatactgaactaggcacttgacatccaagatgtccacttggcccttttctaagtgtacttcactttgttttcattcctc

SEQ ID NO: 312813 - DNA, 485 bp, Homo Sapiens
aaaaaatgctttcctaggagatgcagcaaaaatcacaccagtctcctgtggctcccccaaatcatctcgacagaaaagaagagagaagttggcagttttcagcatattaatagcaaacgacaaattagtaactatgtactttaatcttcaacattcataattgcacaaagcatcactggtcatttaaataatacatgtcaattaatctaatgaagaaactggcaaagtagaatgttaaaagcaatacctcgagcacgtaaagaatgtttgatattaacacttaacatgcaaaacgcagattagaacagctcttttgagcatggttatttaaaatccttaccaacagggcaaagcaagcactgtggagaaatacacataaatatatccaacctgccagatctctcaggtgagtgcacaccaattctaacaggtctggctgacctggctttccacatatatacagtggtttctaatactccaaagtc

SEQ ID NO: 312814 - DNA, 701 bp, Homo Sapiens
atactcaaatggggaaggggtgctccttaaatatatatagatatgtatacatacatgtttttctattaaaaatagacagtaaaatactattctcattatgttgatactagcatacttaaaatatctctaaaataggtaaatgtatttaattccatattgatgaagatgtttattggtgtattttctttttcgtccttatatacatatgtaacagtcaaatatcatttactcttcttcattagctttgggtgcctttgccacaagacctagcctaatttaccaaggatgaattctttcaattcttcatgcgtgcccttttcatatacttattttattttttaccataatcttatagcacttgcatcgttattaagcccttatttgttttgtgtttcattggtctctatctcctgaatctaacacatttcatagcctacattttagtttctaaagccaagaagaatttattacaaatcagaactttggaggcaaatctttctgcatgaccaaagtgataaattcctgttgaccttcccacacaatccctgtactctgacccatagcactcttgtttgctttgaaaatatttgtccaattgagtagctgcatgctgttccccccaggtgttgtaacacaactttattgattgaatttttaagctacttattcatagttttatatccccctaaactacctttttg

SEQ ID NO: 312815 - DNA, 589 bp, Homo Sapiens
  misc_feature (265)..(514): n is a, c, g, or t
tctcctttattatggtggcttttctcaccataatagggtaaccagtaagtagtagtcagaagttaggaagaagtattgtatgaggcctttggaaagggcactgtgttaaatcaatttatctcatgtttaaaaactaatatttattgtgcccggctaactgttaaagatattaaaattattgtcatttggcaaccatcgtaataattgattcaggcaaaaatcatgaggggatactaaagttaatgtatcaaagttcagtgaggannnnnnnnnnnnnnnnnnnnnnnnnnnnnnnnnnnnnnnnnnnnnnnnnnnnnnnnnnnnnnnnnnnnnnnnnnnnnnnnnnnnnnnnnnnnnnnnnnnnnnnnnnnnnnnnnnnnnnnnnnnnnnnnnnnnnnnnnnnnnnnnnnnnnnnnnnnnnnnnnnnnnnnnnnnnnnnnnnnnnnnnnnnnnnnnnnnnnnnnnnnnnnnnnnnnnnnnnnnnnnnnnnnnnnnnnnnnnnnnnnnnnnnnnngtctgtatatttcacaaatggcagtcatgaaagacatgccaaataacttctagactagagaataccaaagagacg

SEQ ID NO: 312816 - DNA, 1325 bp, Homo Sapiens
  misc_feature (54)..(54): n is a, c, g, or t
  misc_feature (223)..(223): n is a, c, g, or t
  misc_feature (443)..(464): n is a, c, g, or t
  misc_feature (684)..(692): n is a, c, g, or t
ggggtgtatattaaacaccctcgcgtgggggtggcgcacacacaatagaagttnttgggtgttacgtcgctcccactaggcaggcgcggcatacaacacccaaccggggcgggtgtccggcagagataacaagccccaccgcccgctcggtggggccgcagctttttttgcatcacgagactttttctttcccgaccgcccgaacccgtccccccgcccgctnggtgcttgccggtaacaaacacgagcgagcgcgattctccccccccacgcggcgttttctgtgggggccccgcgcgggaaaataataggcgcgttttttatcatacagtgggcgcgcagtgtgtatcatctctcgaccccaccgcgcgctcactctcactccggtgcaccaacaactagaaagagtggggatcgcggccccccgcgacagatgagctccnnnnnnnnnnnnnnnnnnnnnncaaacaaatgcgcgcgcaggaggtgaatatatcattcaagaaggggggcgtgtgctccgacgtgtcgaggagagacgcgtccgcccacccgagtggggtgcgagatagggggatttccccacggcgtggaaatgtggcgccgcctcccggggaaaacttcccccccctcgtctgggaagttttgtgtttgcacaggaacaaccactgccgcgggtgtagnnnnnnnnngaggagggtgttttttttatttgggtgggggaagctccccacgccccctagtcgtcttggcccccggggttttccccttgggagaacccaggccaatggcctccctgtttccacttttcctttaagggggcccgcgcccccccaaaggaaatggttttaagaaagcttctttcgaggggccgggggcgggcccgccagtttttttgccacatcgttctcggcggccggattgttttgcttttgcatgttgttccgcgttgggcttttttgatacaaactcaagattttattaaaatcatttgtaagttaaattagcatatctcggtggtgaaggaagacttttaataaagcaaaataatgagttaggtgaatcaacagaaagagtgaaaagtgttaacagtgacatttaaatggttacatgattttaattattcttttgataataagcaaccttgtgatatctattcaagaaaagccagagcccactatggaattcgcagttgaataagagctttgttccctgcttttggtaatgttaaagaaacaaatggaaatggtttaaagaccttataacaatctcccacctagcaaaagaatctaaaaggtaaggtgggaagcattagaaagagagtg

SEQ ID NO: 312817 - DNA, 815 bp, Homo Sapiens
  misc_feature (628)..(709): n is a, c, g, or t
  misc_feature (711)..(711): n is a, c, g, or t
  misc_feature (784)..(784): n is a, c, g, or t
  misc_feature (795)..(795): n is a, c, g, or t
cgcaggatttttatgaggattaaataaatgtaaggtttttagaacattgatagggagcaataaatagaagattgtattattattctgttaccttggagtgtaagtactgcatttaagtgaatgaaaaatttgctttgaccagatactgaaggataagtaatagctagtatttatccaatgccaactgtatgctaggtactgtgcttagataatctgtgtataatagtgttaatcctcaaaatttgggtgttatacccctattatagataaggaaactgaggctcagaggcaaagtaactttgtcactgtcacaaagctagtaagtaacagaggtaggatttatattcaaaaccctgtgtgttcattggaaccgtatcaggcttggggctattcatgtagcattatttccatttttatgtatatgatatatgacgtctgatgcattggccagtaatagtcaaattaacccagccaaattgtcacagtgattcttaaactgtggttctcacacttgcccaggatgttgttaaatgcagatctgaagaccccaatctcagaaattcaaatttaagcatggggcccaagagtatgcattcttaccagataccttgggcagtgactgtcaaannnnnnnnnnnnnnnnnnnnnnnnnnnnnnnnnnnnnnnnnnnnnnnnnnnnnnnnnnnnnnnnnnnnnnnnnnnnnnnnnngntcttcttaaatcagatactctaggggcaggggcaggggcaggggctagcagttgtgtttaagcaaactctgcnggtgtctttcntatcctagtttagaggatcc

SEQ ID NO: 312818 - DNA, 534 bp, Homo Sapiens
  misc_feature (481)..(481): n is a, c, g, or t
  misc_feature (490)..(490): n is a, c, g, or t
  misc_feature (498)..(498): n is a, c, g, or t
  misc_feature (511)..(511): n is a, c, g, or t
attattattctgttaccttggagtgtaagtactgcatttaagtgaatgaaaaatttgctttgaccagatactgaaggaaataagtaatagctagtatttatccaatgccaactgtatgctaggtactgtgcttagataatctgtgtataatagtgttaatcctcaaaatttgggtgttatacccctattatagataaggaaactgaggctcagagacaaagtaactttgtcactgtcacaaagctagtaagtaacagaggtaggatttatattcaaaaccctgtgtgttcattggaaccgtatcaggcttggggctattcatgtagccattatttccatttttatgtatatgatatatgacgtctgatggcattgggcccagttaatagtccaaatttaaccccaggccaaattgttcacagtggattttttaaactgtgggttcttcacacttggccggggatgttgtttaaatgccggntctggaggnccccattntcggaatttcaantttaggctgggggccccggggta

SEQ ID NO: 312819 - DNA, 541 bp, Homo Sapiens
aaggatttacttttcttaacaagtgaacaatttgcttctaagcgtcaatgaaaggcaacacctccctctaatggccaaaggaagagagtggcagtaagctggcttttccaatgtgtcacacaatccttcatgccattaagttctccttgttggaaaagaaattaggttgttttgataacttagaaaagttagttttagacaacagtgactttcagctacaaatacaaaatcaaatccatgtatataaggcttctgtaatcgatgtcttagaggaacatctgctcattttctccaagccccagtcctataaatcaaggcaagtcaagtaattaagcttcaactattttggcagctttgcaattaaaatgaacaaagcactatatctatccttccatatactgtatatattatagttctatcttgttacaccaaatctcacatgcagagagactaaaaatatccattttggtttcaggtataattaaaagccaataagggtcttgcatactattctttttcccccctactagcctgtaaactt

SEQ ID NO: 312820 - DNA, 683 bp, Homo Sapiens
gtgatgacggttttcttttagattctccattgacattttcattttgttgatgggcagaccattttcatcaataaagtcattactgagattagattcctcttcagaagtaataggtgatgaagtaactttcttaacttctgaggtttctatttccatatcttctacctgattaactgaattgctttctggacaagatgctgagggtgtggtcgtctgtgtactgtcagactctttggttgatggcagggtctcaaggctatctcggtagttaccttcagcatctgaagaactcagcaaatgcgattttgtttcggagctgtttctttcattaaaatcttccatgatgacatcaccattaatgaatggccttatagcagattctttaacagtcaatgatttaatatcattctcagggattattttatttatattattaacctttggttcaacattaccacttactactctactctcagaaatttctttcaagcattcacctttcaaatatattttgggtttattatcttttccatttatttgaaatgtacttgttctctgtcctttcttttcagactctcgattttcattattctttttgtcagtggtattttttagctttatttgatcactacatttattaactggtctctcctctaatttcttctgctgacttggttttttac

SEQ ID NO: 312821 - DNA, 761 bp, Homo Sapiens
  misc_feature (732)..(732): n is a, c, g, or t
ggtatacctctagtttggagctgtgctgtaaaaacacgagtgacatttttatattaaagttaaataaagttacaactttgaagagagtttctgcaagacatgacacaaagctgctagcagaaaatcaaaacgctgattaaaagaagcacggtatgatgaccaaacataaaaagtgttttataattgttggtgttttaataacaactaatattattactctgatagttaaactaactcgagattctcagagtttatgcccctatgattggattggtttccaaaacaaatgctattatttctctaaagaagaaggagattggaattcaagtaaatacaactgttccactcaacatgccgacctaactataattgacaacatagaagaaatggtaagtaatttaatatacattctttgtgaattttcttgagtcggagcattagaaatattcaaacaccattataatcttgaagtcttttcactcatgcctatctatgcagaaaattgaagatgttcagagtatgccatgtgacataaaggtgaaacacctagtgatgctctgtttgaagaatgtaagactaacatcaagtagtagacttaatacctatctttatattttaaagagtgtacacagaagagcttgataatgtttgaaaacgttttaagagccaatactccaccagaaaggagaattgtctgaggaaggaggggattctgcattctacttcctgagnagaaactttgctctgacttctccattttg

SEQ ID NO: 312822 - DNA, 463 bp, Homo Sapiens
  misc_feature (161)..(198): n is a, c, g, or t
tggttgaaatccccttttgcagagattttgttattgttgttgttactagttactggtataagcattgatttaaacttgtatttgtgttcctctatagtatttggtatttcagtaggagaaatatcacctcaaacactgatacttacatatttccctgctgnnnnnnnnnnnnnnnnnnnnnnnnnnnnnnnnnnnnnngtgtgtgatctcagcatcatgttgaccaggacaaaattcatccatatacacttagaaaattctctgaactttgccaactaaatatttccttggctttttcaggttttagaacattgacgaagagagaagacaacccactttgccatatatgcccatgtaagaagatgacttttctcttttatactccaggcaaaaaaagctatcttatattaaagtccttacaaaatatctcacacaagagtaggcattttcagttacttttctt

SEQ ID NO: 312823 - DNA, 983 bp, Homo Sapiens
  misc_feature (56)..(142): n is a, c, g, or t
aagaagaaagcatagaggttgattggggtggggggcttgctagaagcttccatttnnnnnnnnnnnnnnnnnnnnnnnnnnnnnnnnnnnnnnnnnnnnnnnnnnnnnnnnnnnnnnnnnnnnnnnnnnnnnnnnnnnnnnngtgtcatgtacagaaaagggtcctttggggaaagggcaaggggtgggatttttctggtcactgacttgaaatacatttttgagagttttgtccttcttgttttatggaataaaaagtttggcctttttattgcatgaagctaaaattgggaaaggtagggggcgtggatggggtgggagggggttgaggggagcagggagatgccctccccaccagctcctggataatgacacctcacttcttgcataatttctggcatcttcccgcctgcaatgcctgctctctcagcgtctcggagaaggggggatcacacactcatcgtcatgcttggagaataattgtcgttctgaaaggagtggaggaagttccctcctagctcgccgtcatctcgaggggtgcctggaggattgctaatgccacttatgttgttaggagaattttttggaagtccgtctatgtcgcctgaccctaatgatccattcatgtggtgtggctccatgccacccatgccgcccatcggaccgtccgagccgggacccatcgggaagttggaccggctgcctccaggcggcactggattaatcattgtgtagatgttgtcactggaatttgttgaatctgcgggactgggcataatgggtgttcctggaggaccgccaccaccagggggtcccacataggtaccaggtgatgaggaggagtatggaattgagttagcactgttaggattgggccagggtctgccagctcccgggcccatgttaatcccgggcatggcggggccgagggagttgggtggtggtctcatgccgctgccgtaattctgtgggccgggacccat

SEQ ID NO: 312824 - DNA, 702 bp, Homo Sapiens
ttcacttttctgacggtttattttattcatctttggtaacaaatcggctgaaatcaattaaacttgctttcccctcagctgatgaagttaattatgatttgttatggtgtctgatatgtaaattattagaaagcagacttacgttggaccggctgcctccaggcggcactggattaatcattgtgtagatgttgtcactggaatttgttgaatctgcgggactgggcataatgggtgttcctggaggaccgccaccaccagggggtcccacataggtaccaggtgatgaggaggagtatggaattgagttagcactgttaggattgggccagggtctgccagctcccgggcccatgttaatcccgggcatggcggggccgagggagttgggtggtggtctcatgccgctgccgtaattctgtgggccgggacccatgggccccatgcctcggggagggttcattctctgcattgatcctcccatgttggggtggccttgttgtcgtgtgggatccatagaattgggcagcaatggctgtgtcccaggaactcctcccggaggctggtttcccattctgatcgggggcctggggccgcctgcgtatcgcggtgacataaaaggctgcaattataggtaattagttcaatgacagcctgccctactgcacagtgacaaacacaaatgctctccactccacaaag

SEQ ID NO: 312825 - DNA, 596 bp, Homo Sapiens
cccgataagaaccccccggtcagatgtatgaagcagtacccctgcatcaccgtcattacaaatcgccgaactgggtgataggccatcaatactcggtcctagttgaccaaaggcccatgcctttgctccgcggcacatgaaagtgcgagtcaccccgaaaggtatatcggctgttgcagagcttattcttgatatagcgcctataggcatccgtgcccagcatgtccacattgacctgcgcgtcctgcacggccattgccatccatacgccacgtacgtgcaccgtgtatctgggcatggccacgctacagcctgaggtcctcagctggtcccaggaggggagagctttatgcagtagtggctaccggggtgtggtcagctgctgtccctttggtttttgtagccgagcagggtcaggagcaggggatgcaggcgggtgagcgtcctgtccactttccatccagacctgctgccagaaaggcctggggtctcccaccctgggaggtgctgttcttgtccctgatggcacctacctgctgctggccccctttcttcagggtccccaatttctctctcttccctcgtttctgtctgtc

SEQ ID NO: 312826 - DNA, 1223 bp, Homo Sapiens
  misc_feature (6)..(6): n is a, c, g, or t
  misc_feature (9)..(9): n is a, c, g, or t
  misc_feature (14)..(14): n is a, c, g, or t
  misc_feature (23)..(23): n is a, c, g, or t
  misc_feature (26)..(26): n is a, c, g, or t
  misc_feature (32)..(33): n is a, c, g, or t
  misc_feature (36)..(37): n is a, c, g, or t
  misc_feature (41)..(41): n is a, c, g, or t
  misc_feature (55)..(56): n is a, c, g, or t
  misc_feature (58)..(58): n is a, c, g, or t
  misc_feature (66)..(67): n is a, c, g, or t
  misc_feature (80)..(80): n is a, c, g, or t
  misc_feature (99)..(99): n is a, c, g, or t
  misc_feature (106)..(106): n is a, c, g, or t
  misc_feature (140)..(140): n is a, c, g, or t
  misc_feature (144)..(144): n is a, c, g, or t
  misc_feature (193)..(193): n is a, c, g, or t
aaaggnttngtgtnccttcagcnctnagggtnnggnnccanaatgtcagcctgcnngnaatagaanngctcgctctacanttcacagcccagggatgtnatcatcngcgtcccattgatgagtgccaggccctcttttgntttnaaaataactggtttcaatccatgggcttctagcacgtatttagcatcancccagccactcttcggagaccacatcttcccttctccaactagcccaagagcaagatgagagagcggggcaaggtctccactggcaccaacggttcctttctctgggacatagggcaggcaggaggcattaaacatttctatgacttgtttgagggtctccagggaaatgccactgtatcctttggctaagacattgatccttaaagccaagagcatccgacacctctcaggacttagtggtttcccaacacctgaagaatgtgagcgtactaagttgacctgaagctccatgcaaggtaacccaagcctcatcctctgatctgttttctcttttatgatgctatctatgacctccctggatttctgcaccctcttctcagctgttggggtgagctttattttgtagcgtccctttcccaagttgaccagatcctccgtggtcagacggtctccatctaactcgatgtacttttcaggctcccggtacttgctgtatagataaactccttctggttgagatggaatgaagtcaggagacatggcatcaccctctataaccacttccacgaactcgttgttctctagggccacctcgagccggtcctggttgtccagcaggcccaggcccttgcaccggcgcacaaggaagtgcgcgtcatcgacgtaggtgaagccaccattgtcgggcttattcttgatatagcgcctcacggcctccgggcccagccagcccacagtgagctgcgcgtcctgtcagggcactgccagccattccccacgtacgtgcaccgtgtatctgggcatggctacgctgcagcctgaggtcctcagctggtcacaggaggggagatgtaaccgagcaggggcaggagcaggggatgcagacgggtgagcctcctgtccactttccatccagacctactgacagaaaggcctggggtctcccaccctggaaggtgctgttcttgtccctgatggcacttacctgctgctcgccccctttcttcagggtccccaatttctctctct

SEQ ID NO: 312827 - DNA, 845 bp, Homo Sapiens
  misc_feature (56)..(116): n is a, c, g, or t
  misc_feature (816)..(816): n is a, c, g, or t
ttttaagtggttagaataggtccagagaacacctatattctatggtgttgccattnnnnnnnnnnnnnnnnnnnnnnnnnnnnnnnnnnnnnnnnnnnnnnnnnnnnnnnnnnnnntgagtttgttgtgggcaaattagtggtgataaaacattattaatctaaaatctgctcttaaaatttgttcagattatcattgactgattggccccgccctccccatattcactcataatatgatttgttattttgtgattcttgacagttaagaaagcaattttaatacctgaaatgcaagtctagctgtggcttcattttaagaatttggtaattttgtaaaagtgcttgaatgctcgttttaccattgttatatctcaattcttataagaccctcagcagaatcaatttacatgactggcagtactaagccactttaaaattattttaaataattttatttgcttgggttctacttgtttgggttttacatactactgtggcatccttcttttaaggatataaactataattagaaatgatatggaaaaaagtgactagaaaacaaatctgaaggcttttaaaaatttcagagtacattagtaaatgctttaaaagacaacccatccaataacatatatgcaagttaacactacaaattcaatgacataagaaaatagattggacttacttttacattcacctctacagatactctataatgaacacactagtatgatgataataaagcaatcaagaacaatttatctctcagtctgtgtatatgtgactatctacatatttatttcacacacacatngccaaatacccaccataacttcaatccta

SEQ ID NO: 312828 - DNA, 639 bp, Homo Sapiens
aagtcatttaccggtttctcataagacatccagtcacttcttttcccttgccctttcctaacactgttcctaacatttgggtaccaccccttagctcctgcgacccatgtggttttggagaaagctgatcacactcacggtgacaggccatggttggaagtaacatgttccacttttcacgaaaagtaatagatctgaatatcattcatggttaacaatagatagtgtgacatttgggtatgacctgctggtagaaatagggcatgattccctggaagtaagtcacttacaccaacccaagttctaattctttaagatgtagtaaagacaaaattgttcttgctatattaaaatggaagaaaggatttgcagagttcaaggatgatatgctctagctctatatgcactccgctatcaatctttccttttactttctgccttgaaaaaatcattttaataaaatcaaaaattttcattctaaaatacagttcaatgatttcactaccctttatgaacaaaaacagcacgaatcctctaaagaagaaaattgagccaaattgttatgttttgcctagatattcacacaatatttcacaccataatagaaaaaataatttttccatgagaagtcaagagacc

SEQ ID NO: 312829 - DNA, 437 bp, Homo Sapiens
aagatttgatctgaatatgataccggttgctaaatcacacggcggctggggcgggactgtcaaatggtccagaaaaggaagatacacattcccacagaagttaaacttttgagagggcaggggaagcaacgaggacagatatccttcacatgtatctctctcctttccggcaaaagcaaggaggaaaaagcatccggcgaggaagacttaagtgacatactcaaaagagaaggagtgtggggaggtcgcagattctgtagccaagacggctgggaaaaggacggagcgccacggacaggggacccgcggcctaacctcggggctgacccgccgcgctccctcgtctcctccgcaggtcctcaggcagtgcgtccagtcaagcccgctcggcagttcccgccgcagcccccgagatacagccagggccggcgcccccg

SEQ ID NO: 312830 - DNA, 2109 bp, Homo Sapiens
  misc_feature (235)..(254): n is a, c, g, or t
  misc_feature (300)..(308): n is a, c, g, or t
  misc_feature (414)..(440): n is a, c, g, or t
  misc_feature (596)..(618): n is a, c, g, or t
gtttcccctaaaggtggcggagctacacaaaaggggttggctcagaaattagctcccccgccatgggcgcggaattcccacaggggtttttcatagaaaaagggccccgcttctttttgtggaaatgcgggcttttttccccaatagtgctggggcggagagaagataggcctttaaaatttagaatttttcccaaacccaggtttccctgcccagaataaagaattgcggcaannnnnnnnnnnnnnnnnnnntaaaattttttggagaaaagttgggagccttgcggcgttagggagnnnnnnnnnggttgggaataagaattccccacgggaaaatggggcccccgagggaaacccccccatttctgggaaattgtttttcaagaaaccgcttccgggttgtacccccccnnnnnnnnnnnnnnnnnnnnnnnnnnnaatacccaaagcatctagttccatgggcccaggggtttttcttagggaaaacagggtagtgggccatgtgtccacttacccttactggggcccgcgccgccacaacggaatggtttatgaaaagctttttgaggggccgaaggcggccgaccaagnnnnnnnnnnnnnnnnnnnnnnnctttgttgtctttatgtattttatttttgggctcaaacattttctcctttaagagctgccatttttcctggctggtgccaataggaatcatttggggtgcctgggcactccccgctggtgctttaaggtttccgccctgatgctgacactgctgttcctcgggcccagttctgcatctccaggaaagacaaacagtctccagttttgggcccagctttcgtagtctcttcttttcgttaccctcagccctgatcttgtgtttgtacggacagtgagctcaccgtaggcctggacccaggctcagtttccaaagcaagcagcacacagcgcatgttcacataagcatgggggctggggggacactggggcttactgatctttttctaggggcctccagcccctggcaccacatagaggggaaagtgagtcacccaaaccattgcccctgggcttacgtcgctgtaagctcacactggccctgctgtgccctctttagtcacagacagcgtgtgagctgactctgtccctttaatgcccaggctgagcccagtgcctccttgagtatctgctccatcactggcgacgccacaggtaggtgtgaatggagtagccaggtgagattgtctccaggaagcccacagcaggatccttgatggtaagaggcacatccttagaggagcggtttagcacgaccacaacagcagagccatcgggatgcatcagtgccactgcgtccaggtcgttcttctgactggcaaccagccccactctctgggagccctcaggaatgaacttgctgaagtggccaaggtggtagaacatgggctgtttgtaaaacgtgtccttggtgatgtctacaatgatgggactgtcgacaaagttacgcacccaattgggtcctccttcggggttcagggcaaggttccagtcggtccagccgaccacatggtacaggaggttcgtgatgatgctgtggctgtactgcatccctcgatcccaggagcctagccgcacactctgctcccagaacttggagcccacacaggcctctgaggcaaagagcatggtgttggggaacaggcggtgtgtctcccctagggtggctttggctggagccagaaagtccaggtaccaatgtacagcaatgccatgaacatatttagctgcttctgggtctgtcagtaccacctttgcccagtggggcagcagcaagcgttggtcatccagcatgagtaggcggacattgtggtgagtactgttggcgagggtaggacctaggtcacgggcaatgaagtctcgctgatgttcaggggtgaagcccaggcactggaaggggtatccactcaacagcccagcagaaggctcattttcagctgtcactgcccagaactgtaacttgtgctcagcataggcatccaggaacttcacaaagtatctggcccaggtctggtggtagatgtctccgggctgtcccttgagtgaccccttccc

SEQ ID NO: 312831 - DNA, 420 bp, Homo Sapiens
ttttgagctgactctgtccctttaatgcccaggctgagcccagtgcctccttgagtatctgctccatcactggcgacgccacaggtaggtgtgaatggagtagccaggtgagattgtctccaggaagcccacagcaggatccttgatggtaagaggcacatccttagaggagcggtttaggacgaccacaacaggagagccatcgggatgcatcagtgccactgcgtccgggtcgttcttctgactggcaaccagccccactctctgggagccctcaggaatgaacttgctgaagtggccaaggtggtagaacatgggctgtttgtaaaacgtgtgcttggtgatgtctacaatgatgggttccagtcggtccagccgaccacatggtacaggaggtttgtgatgatgctgtggctgtac

SEQ ID NO: 312832 - DNA, 850 bp, Homo Sapiens
  misc_feature (137)..(147): n is a, c, g, or t
  misc_feature (176)..(185): n is a, c, g, or t
cgggacgcgcagcgacacacgggcgtgccgcgatacgacggaagcgcgcgcggccccgtgccattctctcctcaaaggccgggggcggcgcgggagcgccgcgcggcaggaggtggcgcgccgcacgttctgttggnnnnnnnnnnnacggggcacccacacgggaccggccccannnnnnnnnncgggcgtgttctcccgcaggaagggcggataggcgccccgggaatttaggtcagagccagcagcctctcccacaaagcaggccccttcaggttggcagcatcaccccattcctggtgccttcccagttggtttaagacttcacacaggctgagggcagactgcgctgatggcaatgccggaggtgagaggaggagctacctggaagaggcctacctttcagcttcccacagcacccaggaaccttaagagctgctgacctgctggtgggcctggccagagccttctcaccaggcacagctatgcctggtcgtcaagacaaccaacaggcagccagaactacggaaaataaacttttttatctggattccaggacccttatcctaaccttttactttactatagtacctctgcaacctacggggcaggaaaaaaagggaagaaaaaatactggggaagaaaatacagcactgtttggcagctcctttggcgcgcaggaaactgccaccccagccttggcttcctggggccaggttccagatgtgtgttgacaaactgcagcttcgatcatctccgtgtgccaggatcttgtggccgcggcaaagcacctcccctatctactcttgcagcacttactggcctccattataggcataatcagccttcc

SEQ ID NO: 312833 - DNA, 680 bp, Homo Sapiens
ggggttgcggtccgcttcggtttctgttgcgggacccggggtgtctcctagcgcaaccggaactagccttctgggggccggcttcctttatctctggcggccttgtagtcgtctccgagactccccacccctccttccctcttgaccccctaggtttgattgccctttccccgaaacaactatcatgagcgcgaggctgccggtgttgtctccacctcggtggccgcggctgttgctgctgtcgctgctcctgctgggggcggttcctggcccgcgccggagcggcgctttctacctgcccggcctggcgcccgtcaacttctgcgacgaagaaaaaaagagcgacgagtgcaaggccgaaatagaactatttgtgaacagacttgattcagtggaatcagttcttccttatgaatacacagcgtttgatttttgccaagcatcagaaggaaagcgcccatctgaaaatcttggtcaggtactattcggggaaagaattgaaccttcaccatataagtttacgtttaataagaaggagacctgtaagcttgtttgtacaaaaacataccatacagagaaagctgaagacaaacagttagaattcttgccgtggtgttacgatgttgaagatggtcagaggttctggaatcctggattcctaatggctgtacattacagtg

SEQ ID NO: 312834 - DNA, 758 bp, Homo Sapiens
tacatttattttaataactacttcattataggctgactggctttcctgtgtggataagagtgtgatctgaaagcaacgctgactgaatgtaaataaagcaaacgttcccagccatttttggcatgaacatggactacagcgtttaatgcagaccccaaagcccacacatttttggggagtaggttttacttgcagtacagattcttttcattacagatcacaaaaatacaatacaatgtgacaagcccagtttaagaattacatgcagtagctcatattaacacaaacagctccccacgaaggccgacaagagctaaatccggtgtcaacagggttcattgcaggagtagaataatccggtacaaggaacgagaacagattgaaaccagaaacaaagccatgcctgacagtcaatcaaggtcaatctgatcatttccatgaccaattacccatgtgaacaattcaaaatgacggtggaagagctgagcaccctgtactcacacacgatgcccacagcttggcaaaaggtacacaaacacttgtttgaaaagaatgactgaaacgtctactttcaaagaacaatggacacttttaaagggaatgctgacatttaactttacaaaatgaaatttaaaatgtaagtagtactctggggaagaatatgcctgaagcgtaaccatgatttcccagtggtataattaaacagagctctaatttaaaaactcttcctgggctgggcgccgtggctcacacccgtt

SEQ ID NO: 312835 - DNA, 1421 bp, Homo Sapiens
  misc_feature (134)..(143): n is a, c, g, or t
  misc_feature (641)..(641): n is a, c, g, or t
  misc_feature (1342)..(1342): n is a, c, g, or t
  misc_feature (1378)..(1378): n is a, c, g, or t
  misc_feature (1411)..(1411): n is a, c, g, or t
tttttcttattaaatgttttatttcttaacattcctacatattaataaatgttctatttcttaacctgatagtgggtacatgaatgtttattattctgtaaatcatattgtgcttatgaattgtttcacaattnnnnnnnnnnttcatcccacctattccctttgctcaggttccatgctcattaaagaccattctggtgatgctctgacttctattgtagctttgcctccaataagcaaatggacattggtccatttggcatgtgtaattctctttttagagtaataaactggtgtacaagttttattttagaaaaaaagtattaataaaacaatgaatgcttagttcacttaattactatgttcttataaatgaaattaaattggtctcaaaatatatcctcttagagccaatgtatcttctgcaactaaccaaattcattctcagaatcaagaccttttcgacgcttcaatttccttccatattgcagcttcaatttttgaagtatcatattccctcatcatatcaaattcaagccatggctgattccacttctgagcttctttcatttgctgttcagttaaacaaagatcaaatctgattcctttaatattaaaatttggacgttcccagcgtttanaccagggcttaggcttcatttttactttcagctcattaacaggaactttttggttaggctcttgtactactggcttcatattcacatcaaaagtgctatattcaggaagggcatctcgtaagtatcgcaagctatcatccagccgctctaatttgaccacttgaatctcctggacccgaggtttataaagttcaaagcatatctcgacaccttgtccttcgatacacattcttaaggatgaaagtagctccactggcatatgggtcagctgtagtaacacgaagaatacttccaacatagacctctggaatgtggagtacctcctttctaacatatcttttctttctatttgaaatttcagaggatctgttcttccccttcgaggaatgaattcaggactcaagaacctgcgttccggttccacggggcggtgcttgtccacgatgaccggtttcggcggcggttggaacgcaccgggctcggaaggcccagtgctctgctgccggacaggccccgcgtggaccctgcaggcgatagaggccggcggggggagcagagtcctggcggcttggaaactccggcctaggcccattgcagcccagtgccccgctgcaatgcaggccgccatgccagctcgtgtcgaattcctgcagtcgggggcctccgctagttctagagcggccgcccctccggtggagctnctaagggtcttccaaatctcggcggcgcgcctcctnccgctccgaccgcgctccgcgaacatcccgcgngcgcgctccg

SEQ ID NO: 312836 - DNA, 2161 bp, Homo Sapiens
  misc_feature (68)..(68): n is a, c, g, or t
cgccatttttgtgctaggagcctgataaaaccggcccggttctgtggaaagtgggcggcggagccagnggtccctggaatggcggagactctgtcaggcctaggtgattctggagcggcgggcgcggcggcttctgagctccgcctcgtcagagaccgggacgcggcgcctcagcgacctgcgagtgatcgatctgcgggcggagctgaggaaacggaatgtggactcgagcggcaacaagagcgttttgatggagcggcttgaagaaggcaattgaagatgaaggtggtaatcctgacgaaattgaaattacctccgagggaaacaagaaaacatcaaagaggtctagcaaagggcgcaaaccagaagaagagggtgtggaagataacgggctggaggaaaactctggggatggacaggaggatgttgagaccagtctggagaacttgcaggacatcgacatcatggatatcagtgtgtttggatgaagcagaaattgataatggaagcgttgcagattgtgtcgaagagatgatgctgataacctccaggagtccctgtcggatagtagagagctagtcgagggggaaatgaaagagcttccggagcagcttcaggaacatgctatagaggacaaagaaactataaacaatttagatacttcatcatctgacttcactatattacaggaaattgaagagccatccctggagccagaaaatgagaaaatactcgacattttgggggaaacttgtaaatctgagccagtaaaagaagaaagttccgagctggagcagccatttgcacaggacacaagtagcgtggggccagacagaaagcttgcggaggaagaggacctatttgacagcgcccatccggaagagggtgatttagatttggccagcgagtcaacagcacacgctcagtcgagcaaggcagacagcctgttagcggtagtgaaaagggagcccgcggagcagccaggcgatggcgagaggacggactgtgagcctgtagggctagagccggcagttgagcagagtagtgcggcctccgagctcgcggaggcctctagcgaggagctcgcagaagcacccacggaagccccaagcccagaagccagagatagcaaagaagacgggaggaagtttgattttgacgcttgtaatgaagtccctccggctcctaaagagtcctcaaccagtgagggcgctgatcagaaaatgagttctcccgaagatgactcggatacaaaaaggctttccaaagaggaaaagggtcgcagcagttgtggtagaaatttctgggttagtggactctcttctacaaccagagctacagatttgaagaatcttttcagcaaatatgggaaggtggtgggcgccaaggttgtgacaaatgcccggagtcctggagctcgctgttacggttttgtcacgatgtccacagcagaagaggccacaaaatgcattaaccacctgcacaagacggagctccacggaaagatgatctccgtggagaaagccaaaaatgaacctgtgggaaagaatacctctgacaaaagagacagtgacgggtaaaaaggagaagtcgagcaacagtgacagatctacaaaccttaagagggatgataaatgtgacagaaaagatgatgctaagaagggtgacgacggaagtggagaaaagagtaaggaccaagatgatcagaaacctggcccctcagagcgatctcgagccacaaagtcaggaagtcgagggaccgaacggactgtagtaatggataaatccacaggggtgcctgtgattagtggtaaaaacgtccgggtccaaagagagagcttccaaaagccaggatcgcaaatcagccagcagagagaagcggtccgtcgtgtcctttgataaggtcaaggagcctcggaagtcaagagactcagagtcccatagggtgcgtgaacgcagtgaacgcgaacaacgcatgcaggcgcagtgggagcgcgaggagcgtgagcggctggagattgcccgagagaggctggccttccagcgccagcggctggagcgggagcgcatggagcgggaacggctggagcgcgaacgcatgcacgtggagcacgagcgcaggcgcgagcaggagcgcatccaccgtgagcgcgaggagctg

SEQ ID NO: 312837 - DNA, 535 bp, Homo Sapiens
cctccttgttctccaatgttcttcttccttgtttaattacgtattttcccaattggatctccccagaatgatgtctgtggacactcgataatttttcctttttccacttcgcactcttttctgtcggaaagctttttcccagcaggctcatttttggccttctctacggagatcattcgtccatgcagctcagttctgtggagatggctgatgcacttggtcgcctcgtcagatgtcgacatggtgacgaatccatagcatcgagcccccgggctgccgggcgttcgttaccactttggccccgacaaccttcccatacttgctgaaaaggttcttgagatccgtagcgcgtgttgtggaggacagcccgctgacccacaggtttccgaccagaaccgctgccgacccgacctttttcatctttaatgattgggctttatatctttttcttccttaaaagagctcattttctgatcagcgccctcactggttgaggactctttaggagccggagggacttcattacaagcgtccc

SEQ ID NO: 312838 - DNA, 405 bp, Homo Sapiens
gacaaaaccgtaacagcgagctccaggactccgggcatttgtccacaaccttggcgccccacccacccttccccatatttgcctgaaaagattccttcaaatctgtagctctggttgtagaagagagtcccactaaccccagaaatttcctacccacaactgctgcgacccttttcctctttggaaagcctttttgtatccgagtcatcttcgggagaactagagacaaaagacaatgtcactccacaaggaagcagcatggaggaaacaaactcaaaaccataaaattcgtgctgaggttgcatacctacccgaaatttagttctgaaaaaatgataccccgacaaacttgtattgaaaatctgacctaaccataagatttcagacccacaggagttaattaag

SEQ ID NO: 312839 - DNA, 1079 bp, Homo Sapiens
cccaacacatctcatatcttttgtggtcgacctatcctgttctcgcggggggaaccaaccgtgtgtgaaggttcccgctgttattgcctggtgccgctggctccaagtggccgcggtgcccgctgcccgcggcacctgttacccgagcgcccctgggaacccgggcatttgggtcaccagggagcagaatgggtaaactcagcacaatgaagtggctcggatcctcctgaattttatagggatataaacatcagatagccagtaatacctgttgcttttggagaactcctgatggtgcaaacgcagtgcctggtcattggagagcagacataacagatcctggagttgtctatggtccaagctgaattttaaagaacaaaagggcaagagggaagacaactggccaaaattccccagacatcttcactgggagattcaaatgtctttgcaaattagccctcacacagcaatgggaaggtggtacttagcaactactgctgttaccacaccagtggttaaactgaagtctgtaccatttaatattgtgagtcatgaaataaaggtgatatctatagagatgtgtaaaaataggatctaaaattgggagggaggggtagctgccactcagaaggtaagagctggtctcagagtatacatcaggaataagcaccaagtgtttgatctcaggaggaaaacaaacacaagttatgatagatgactatcatcaggggaaaaatgtggtagtcaaataattctcaatgaatataggtgacatatcattttgtgaaagtgccattatatttttaagtggtaagaggagctgggtgtgcaagaatttccccataatccccatcctgagcctcgtcttcacaaggcaccaatgtgagtaaggcaccaacattgtttgggcaactaaactaagtgtgaagctgagaaacattacagcagtgaaaattattaggccctggaaaacaagagccatgaagaatggtttaagtgggtggaattattcgacgcgtgggtcgacgatatcccaggaattgcggaccgtaccagcctgctttaatacaggtgtatat

SEQ ID NO: 312840 - DNA, 1161 bp, Homo Sapiens
gagcagtcatcaatacttcttcaattttggcaacaatctgttctgcacatgtccgctccttctccaaagtcaatcggtccttgtctcgctctgcatcaagtttagtcagctcgctttcagccaaggtcagtcccatactacgtttctgccgaaaatcttctaagtgcctttgaacttctggatggactctttcttgcatagtttggatatagtggcgatgcagatcctcaggaatgagctcaggtcttctcttttctagatctgcagacatttcatcaggaacagaaactttcaggtgtgctgatcgatctagaaagaactgatgaaactcaaggaagatgcgacgagtttctttggaattggtatgtttatacaggttctgaatagagataacagagcaaattcgcaggttcaaattgtgaaactaacatggtgtaagaaaacagccaaatgagccgggcgagattttagtaattcaatgctctggaaacagctgcactgtccattgatctgttcatgttcagtaccaaaatcatcatcttctgctccaataatatgaggtgctatacgggttgagggacttccgacaagtgattgagtgtcagtgtcctgaattgtttcacttttctctgggttttcctctagataaattctctcttttgggccactcttgggactatctgcattgtcactactgggccgagaagcatctccactgctacagtcagtcctgcccagtacatctccaggatctgtttctgcctcactgactgttagggtgtcccctaaaggtctggagggtgtaactacagctccatcctgagcagagcctgtggctttggataactgctcttgcagctgaggaatgtgtttcttggcctcttggatctcttttagcaatctttgggcaggtgttcggttgtaatcttcctgcaataactgtagccgttcctgttctttctgtaacatttttctcagaatttctactttctggttatgaaccacattgttttcctcccccatgagcacaggactagtgattctctccatattcccagatgctccaggtgctgatgtttctccaacttgctcggacgcgtggtcgacgatatcccaggattccgaccgtaccagccgctttaacatgacgcgaggctgtta

SEQ ID NO: 312841 - DNA, 585 bp, Homo Sapiens
  misc_feature (214)..(240): n is a, c, g, or t
ggactcattttgttttccagctttttgtagctacccagtcactaactttgaagccatcccaaaaaacattgcaacttgcatgacttttgcccccagtgtctctaaactaggcagccaagtgtaacagaaagagcacgggttacggactccagcaaatgtgtgttccgttcttggttctatcacttactggctgtgtgacattaaagctaaattnnnnnnnnnnnnnnnnnnnnnnnnnnnttcaagtatgcgaaaagagggatggttgtactaaatgcctgtcacatgaaattttaaaagataaaaagagccttagtaaaggacctcaacattaggtgacagcccatgtttgctgcatttccactctttatgttaaattattttaagttcctgctgcctctcacccatggagtttgcttttgcaagtctcactgtcttctcagtacagcgatttgtatttgtaaaaggaccctgtttgtttcttatttgtttctacctcaagtattctctaaacacacatgttttggagaaggctccccctagactattgcagaaagcagcctgttactaggctcatctaagccc

SEQ ID NO: 312842 - DNA, 967 bp, Homo Sapiens
ctgggccgcccgagagtcttaatcgcgggcgcttgggccgccatcttatatggcgggagtaagaggaaaacgattgtgaggcgggaacggctttctgctgccttttttgggccccgaaaagggtcagctggccgggctttggggcgcgtgccctgaggcgcggagcgcgtttgctacgatgcgggggctgctcggggctccgtcccctgggctggggacgcgccgaatgtgaccgcctcccgctccctcacccgccgcggggaggaggagcgggcgagaagctgccgccgaacgacaggacgttggggcggcctggctccctcaggtttaagaattgtttaagctgcatcaatggagcacatacagggagcttggaagacgatcagcaatggttttggattcaaagatgccgtgtttgatggctccagctgcatctctcctacaatagttcagcagtttggctatcagcgccgggcatcagatgatggcaaactcacagatccttctaagacaagcaacactatccgtgttttcttgccgaacaagcaaagaacagtggtcaatgtgcgaaatggaatgagcttgcatgactgccttatgaaagcactcaaggtgaggggcctgcaaccagagtgctgtgcagtgttcagacttctccacgaacacaaaggtaaaaaagcacgcttagattggaatactgatgctgcgtctttgattggagaagaacttcaagtagatttcctggatcatgttcccctcacaacacacaactttgctcggaagacgttcctgaagcttgccttctgtgacatctgtcagaaattcctgctcaatggatttcgatgtcagacttgtggctacaaatttcatgagcactgtagcaccaaagtacctactatgtgtgtggactggagtaacatcagacaactcttattgtttccaaattccactattggtgatagtggag

SEQ ID NO: 312843 - DNA, 577 bp, Homo Sapiens
taagcagtcagcatgattttgctctgtcagtggttcctcaagtatgcttgctgaaggagttctatgctctggaaactcatcccgcccctcctgcacagggtcactaggaagtaagaccctaaaggcacactcagagttttctttctctttaaatctgttcatgcgcttacgaggtttagtgcgcctttggtttaaacgctgccaccgctttttaggcaccacttgatttacaccattgagttcatcattctcactgttcattacagagtccagctctgggccttttccgttttcaaaagagagtcctttttcagaaattttaccaggatcagattgcttaaccttgctatcgaaatgcacatcagaaaaatggtcaccatcttcacttgttaagtggcccattatctgaaggggatcctctttactaggatcttctgccccacctctcaatgaacctccacgttctcggtctccctgcagtacagcatcaagagtcacacttggaagctgattcagttttcttttgcgctcggtctttaaggctttacggttcactgtgttctttacatttgggctg

SEQ ID NO: 312844 - DNA, 549 bp, Homo Sapiens
ttttaaaaaaaagtttgatataatttagttggtattgtgttcaaaagaaagtgttaaattcttgccaaaattcatatttaaatttcttacttcatttgaaaaaatgtcctttaggatcccatgaagaactagaagaactgatctgtaaaatgccaaaacaattcttttggcagactggaaggagaaatggactcaacgcgcacaaccccaaataaaacaccccagaattttcgtagaaataaagacggttgctttcttctcctgaaaggaataaacatgtttcaccataagtacacgtacatagtgttgattatgtctgacacacaatttattcacaaccatcaaatataaaaaagctctacttctttaattagcacacaaattaccctataaaacaaaaaggtcctcggctaaaacaggaactaaaataattaagatcacctttaagataaaaagaaaaagattgaatcaaatgatacttagtttatatcagtttagattaaatattttaaaaatggaaataaaagcaaagaagtggccaggcatggt

SEQ ID NO: 312845 - DNA, 482 bp, Homo Sapiens
  misc_feature (460)..(460): n is a, c, g, or t
acagtaccatgggaacaacagtgattgacttgcaaagttttctgtctctatggaaaatgcaaaacagtactacagaaatacacaatgcactgtaagcagcggtttgctgtagtggtccaacaggtacaagcaaacattttggctcagctaggcagtaatccacttaaaccacatcccggggctacggccgacccaaccacagctcctgtgggatcaaaaagaatgggtctgtttaaaaataaaaattgttatgttttgtgctgctgtccaaaggactcaaaggacagagtcatgaggcagaagtttcccaaccagatctagaatcactgggaccacttccttcctttcccttctaccaacctagagacttggactatggtttcaaagtgaaattgcgcatttctaacatatgaatacccacagccctcacttactttaaatatcgaacagagaggttgcnttccaccaaggctcattgcctc

SEQ ID NO: 312846 - DNA, 965 bp, Homo Sapiens
  misc_feature (45)..(70): n is a, c, g, or t
  misc_feature (151)..(186): n is a, c, g, or t
tgtacactaaacataatagctcactggaaaaagccaatatttaannnnnnnnnnnnnnnnnnnnnnnnnnttgtctaataaagattacaacattttcagccaactggacaaatagaggcatttacagaagcattaccattgtggtgaaagnnnnnnnnnnnnnnnnnnnnnnnnnnnnnnnnnnnntgcacagcaggtggagggggaggtgaaggtggaggggctggaggggctggaggagctggtgtcactggggggcggggtgcagctactgctgtggcctgagccaactgcatcaggtctttttctttcttaattttcaggtctctcttcagctcttcctgcacttcaatttgcagatccttgtccaggagtgctctcttcttcaggatctcggctctgagctgctctttgtgcttgaagagcagagctgacagcttagtggcattctgcttgctacgtttctgctccacactctcttcacgcttccgtttttttgctgcctgtttttcttctttatctatcttatccaaaatatacttcatcacctggttacagacaatcattctttgattctcttctctttcagctggagtcatgctctttttctgttttaaatgttctattacagcattatgcttcatcaccacctgtttctgaatgatttcactttgattagaagcttggagggtgtgttcacgcttaatttctatctgttgctgtttcttcttttgctgctgatccctgagttgctgaaccctttgcaactgctcttgcacactggctgcctgcactgtaaccacattctgaatctggtgagtctgcacagcactgctttgctgaattcggataggtaactggagtttgatttgctggggcacaccactttgctgagcctgtatctgagccacaacctgtgactggatctgagagagaacctggacttgttgttgcagctgaggcac

SEQ ID NO: 312847 - DNA, 672 bp, Homo Sapiens
aggattcaaacattctaggctttaattctttacctgatgtactcatagaagtaagtcggcctcgttccaggggaggagcccatttgacatatatttcaaactgggctgttgcaactatcccctgggctgctccctgaactgctcgacatacaacgacccaagctactccaattccagctgctggtgggatgagcaggcttaacacagagctgaggcataatgcaaagccaatcattttctttgtagaatatattccagagaagtatccaacaggaacttggatgatgatgacaccataggaggtggaactcaagatgattccctggatatctgggctccaattatacatagggttctttatattatccaggagcttctttgtggaggtgttgggcaaaccatgtggatctgtgctattcaccatgactaccattgtgaggttcaggcacgcacgctgtgctgttattataacattacaacagtgcacaaggaaagacaatccatagcgaaaggaacagaaacctggaacttttttgggaggcaaccggttatccatttgcatacacggctgaagttgcttctcttcttgctgaagggttttgcctccacccactgattcgggacaaaaaagtgatttcttcttccgctgtgaagacttttctctcaactttc

SEQ ID NO: 312848 - DNA, 640 bp, Homo Sapiens
  misc_feature (325)..(325): n is a, c, g, or t
cagcaatcacctttttaaagatttcattaaatgaagatattcttgttttctgtggtagtctttattattattttttagctattgatacatagcatggcagcaagattacatcagtaatgtaatataatacagcttttttcattgaagctttgtaccttactatactctaggctatttggagtgttcccccacttgcactaaagtacaactatgatgtctctactgcctctcccagtgaaatataaaaatattgcactacattacagatatagtttacaaatgtcattagcagcattactgagctttctataattgtggtctacangagttaaatacttttaaaacatgagtagattcttataaaaccaaagttttgcattatttcaacagctctttcaaatgcatcagtttcagcaacatgcttgggtatcatgaaaacttccatggtttaatcaataaacaccagctacttacaagtagtccaccttccaggttatcaatggtaagttattttttataaagtggttacacactgagcagattgcctcaagtgtaagttatggaacaatactttagctttcagggaatttggtgtgtaaattcttctatagcagtgttcttttaaaataagatcacgtgg

SEQ ID NO: 312849 - DNA, 940 bp, Homo Sapiens
gttttttttggacctgtccatgaaagtgagttaatgtttatttttctgttttatctcatagtctacaattaatatgtattagttttataaacagagaggataaaggagtttctcccccactccccttaatacctttagaatggaaagaaataagacaatcacataaaggccagttttccactggttcattcaaaataacctcctcttcaaatactactactgtgatatatttaaataaggagatccgttcaagaatttccttcattggtttggatttggatttctttgccatggaacatattccaaccacaatctgcctttctggtggagaatcatcttcctcctcatcgtcttcatctgcatggtggaagaaatgtcgataatttccaggatttatttctgtatcttctggtccaacgaagaatctgggggcttcactcatttttattttatttgatgtagatataattgaaatgatttatattaaaactgcctctaagtaaatagtatcagaagaaagcattctccatatattagctgacgcacaggtctgtgacagcttgtttctgcttatacaatcacttgatattatgatgactgttggcaaatactcttttgttcttagatatcattgcttcattgttgatatcaaagttgttgttgcaattcaaaatacaaagacagtgaagttactgctttcttgagttgatacagcaatcttcttacctgccacgaatgcggtcgtcacgcgagcagttgtgagatggtcaagcccattcaggtctaggttaccccctttcatcccggaggcaggggtgaggtgtttgtcaagagacttcagttgtaggcgtggacgtaggctacttccttcagtaacagctatagggccacataagggaacctcaggctactacacctcaggaatctccgtcacgcctct

SEQ ID NO: 312850 - DNA, 837 bp, Homo Sapiens
  misc_feature (28)..(28): n is a, c, g, or t
  misc_feature (447)..(455): n is a, c, g, or t
aaaattatttatcccaatcaccagagcnagggagcccccatttttcaaaaggagaattaggaagccaaaacatttatctccccccacttggaaggaattacagggaccctgaccagggttaactagtgcaaattagggattagggactatttaaagtccctgtacccccatccctaggctgggatctttgggtgtggggaactgagtcaaagatggggtgtaaggtgctattttgaagggaaagttggtggggataccccaaagcccaccagaagagtagaatggttcccccaaaaccatctggagtgattggtgaggggagtgacactggggagatgggaatacaggtaaggatggaaggtcatgtgcaaatcctgggcttacccacccatccgacccctatcatttttctggctatttggtctagtctgggagaaaccatcaggnnnnnnnnncagggagaaagtagattcccttctccatcccatatggagttcttccctcctggcccccaaatctggtctagcccagaataggccatatgtagaggcagaaagaggtgtgatctgcttacctcttttgccttggaagaatctggagctcactggatttgggggtcaagatagggccaatatttccctgccctggactgggaaagtgctcagccacagaacagaggggcagaggggcaaccctcccccaaacctccttgacctggcttgggagaggccatctccgaagtccaggaatatggggaggaacatggaagatccaaaggcatggaagctgaggagggtgtcttgatacaagggaaacagggacgtagagacccacgct

SEQ ID NO: 312851 - DNA, 792 bp, Homo Sapiens
cccagctctgacttctcattactgtgctgaaagtcagcccacgtcggagcggtgaggaggagccacagcacatggggtgccacctcgaggtctgcacaggaggacttggcgctgccatttcctacccctgccatttcccacccctgcttcagcgaaagggactctctaacagggcagtcactgttgactctattctgaatttcctcccttggggaagaagggaaccaacatttgtacctgaccagatggctcaagtgcttttaaagttttgtttaagtagagctggaatttgaggtgctgatctgtggtctacagttatgtggtaactcatgttgtccagccaactcagagtttcgtcagtgaacaagaaacatgaaatctgcttcttagagaggctatatttttctgctacaaatattttatatttatagcaaaactagactttcagagtccttgattgtctaggggaagttaactccctgagaggatgtagagatttggggtggttgattagacttttgaaaaactcatcaccacatgccttcactccagagtgttctcagctagatttgatttggttgaggaggaactgtggccctccgtaagttattgccatagtgtatgcattaaaccaagtccattttgaatgacctaaaatgaagtaacacaatcagaaatcccatgtgcccataagcacagatttttctttttcattgaaactttaaaggttattattggaaacattactttgagtgcagtgtttttaaaagccaattcttttttatccctttt

SEQ ID NO: 312852 - DNA, 1927 bp, Homo Sapiens
tttgtcacttttattcagtagtaggtttttttccttattttcagtgccagacacggcgaggagtgattacagccaactgttactaaaacatttgtttgcaacatataccccctttataccactgaccccaaactgactcattttgtgtgctttcattctttctttttttaatataccaccaccaagaccgggtggagggggcaagggtaagagatgaaggggagcagtccaggaggccagaagaggaggaatgctacaagccacagtaagaatgagctgtatttaatttaaaaaaagggggaaggggtgtaccccacaaatgatacagtaatgaggatacacaattaaatcccatagcatgactgaaggctttcactgtgtttgacgtcatcacaatggaaggcataaaaagtggagtaaatcaatgttgatacagtccaatctagtccattaggcaagatggtgcaagaagtcatttaaattaaaagtgccctacccttacctaaatggctagcagacatggagaacaccacagtgatgaatccacagagctttctccatgtagctataacaatgtgttgtcgaatggcacactgtcaaacactggaaaggggcgccacaatggacctctctcttttataggaacgaatgctagattcaactatctcaactaagcaggaagtgggttcttctgctaggaatgccaaccctaattcactttgtcttgaaatatatacagattgtttgtagtagctacggcaatgatattttccttggggtgccaggctgtgtgaaggattttcttattgaagtctaggctgtcaacacttatttcatctttctttcgcttgccacttgcacagactttgcgaggcttcagaactgtgcgaggcttattgttttcccgcgatgcttctagggttatgtctcgctttgtgtttctgtcaaacattctgaagaaattattgtaagatccagtcatgacaacactgtcagatccattccaacaacattcaaatttgtcaaatatgcagtcattttcatacagtgaacagagtttacttctgaggtattcatgcacctggtatgtttccacaggcctgttttccatatttaagtcccaaattttgactgacaaatagtctctagtcatcatatatcgaccactatggctgaattttacatccgaaatagaggagatgatttcggaaaaaaatgacctgttactgggatcttcaggttcttcaaacaatttagaatgtctatcacagagggcagatgccctcatgtcacatagccgaatagttcctttactgctgctgtatacaaatgtgttacagctgtttggatgaaattctgctgctgtaatcacctctgttagctcttccatattggcaggcttgatatccacaatgttaaaactcctgtctgtaatttccagatgccaaagattaatccgcaaatcatctgcagataaatatgtttcataatcactattaatagaaattgagttgatgtgatatgtatgagcattggcaaatattcttcgtggactggcctcaaccattagatccataggcctaaagactggcactcgtagtgtagtaactgtagtaggatctctataccttccatcctcctctttcaagttatacccttctggtcttttgtccctttcactgattttccataattttattgttttatcattggtagacaataaaaactgagcagcatttttctggggtaaccacctaattttgttgatcttttcttctatttctaaacttttcaagtagtcaaactctggttcatggctctggaaggtgctgtaaacattatattctcctctgctatgagactggattttgttctcctgctcctgttgaaagatgacaactctaccacctttatctcctgttgctag

SEQ ID NO: 312853 - DNA, 613 bp, Homo Sapiens
tgctttaggcaattacaatcatgtctcccctgacacaacatattagtcaagtgagacagagaaagaagatgtcctatgtcacacagctgggtggtgacagccgctttagcatcagcacactgcgttccctctgatttcttcattcatctctaagtagcagtaaatccggtcttgaatactgactttgacactcagctttctccacatccttcctgtcacttcctttgagactacttcagattcttccctgagcttctatttctccatttgtaaaattgggttgatgagggtatcttccttcggtagctgggtttccttccaatgagccacagatagaagtcacagataatggcaggggcctgctggctgatggcattccagtactgggttgtgaagttgcttgtggtgaaatcagcatatggcctcctcaaagctctcgcaaatggagttggaatttcagaggttgccaagacctggaatcacatttggctccggttgcagggattgaggttaccagacgtacagtggtagactaacattgacttaggtcggtgtccgtcttcccagctccccgccatgtcgccaagtgaatccatcctgccgtccgtctccc

SEQ ID NO: 312854 - DNA, 1015 bp, Homo Sapiens
  misc_feature (994)..(994): n is a, c, g, or t
cagggctggtttgaaaacctgatgtaatacaccttcaagagcagagtgtcctttctgaaaagacactgcacattgatgcacagtgtccacatcacctatagaaggcaatcaaaaacaatgaggggctttagaggaccacatccattacacaaataagcaaatgagtccagggatgtggcaaacagaaaatccagatcatgtgtcttttctactgtgtatatgattagcagtacttgtttcattcaattgcagatgtttctgactaaattttttaatgagggttccaggaattaatgccaccatggcaatggccaacagcttaaagacagtgtcccaggagaaaagagcatccagagaggttagggttgacaggatggaccctgtctgcacacagatgaaattatatgggatcaaaccgataagaactgagaaggaagaactgcacgatgggaatgttcagaattggggccgagaggttcaagaaccagtttggtgtcatggggaaaagtctcaaaaacaataagaaaaaaaacaagctgtttctgttctcctccacctttctctgcagcagggccactttatcaggaaagtaggacaccaccaactgtttgccaaaaatactggagagcaggtagcagcatgtggcacccaccgaggtcaacacacagcacagcagaagccccagccatggcccaaacaaggcaccagctaaaacattcaggaagctggagccggggatggcaaagccctgtttgtagaggtaggcgccgcagaagagcaggaacacgtaggcctggtgctccttccggtactctcgaaggacctcagagagctcccgcagctctgccaggtcggaggggaaccacagcgacctgcctccagcctcctcggtggagcccagtctccgcccgcggggcagtcgcgtcgacagcaagtacaaggcgaaggtgcagccggcgaagaccagaaggaggccgagaagcgggcgcatgtnggctccgcaccccggcccgcc

SEQ ID NO: 312855 - DNA, 2068 bp, Homo Sapiens
  misc_feature (450)..(592): n is a, c, g, or t
aagactttgcagaggaagtaacatttctgagatggagaaaactaggagaggaacaggttggagaacaggaatcaaaagctgtttttggtcaagagatgcctactagacattcaagtggaaatgtaaagcaggtaaaaggttagagcttacagaagaggttcaagtcagtgagagctgtttttgaaaaatattaatgactcagataattctcaagaacaaaatttctcccatatttgagaatttatactgattcaattcttaagcataccgtaaataggttcaaataaataaaacaggtttgaatttattcctcctatgggtatactccagtaacacaatttgccagtatacattaatatgtgataaactctaatcataacattctacatgttcttggcttcagattaaaataactgattaattttataatgttttacaattttaaaaatnnnnnnnnnnnnnnnnnnnnnnnnnnnnnnnnnnnnnnnnnnnnnnnnnnnnnnnnnnnnnnnnnnnnnnnnnnnnnnnnnnnnnnnnnnnnnnnnnnnnnnnnnnnnnnnnnnnnnnnnnnnnnnnnnnnnnnnnnnnnnnnaggcctcaacctaatatgccccaaagttgatacaaattttattagaaaaacaaactttttgtaagtctaacaggtaaaggaacaaagaatcagatctatttttcttatagcttccttactcttcccttccctcttttattctttatcacctaaaagcttggtcaccagtaagttgaaaaggttaaaatatggctatgaaagtagaaaatatagaaaaatatttaagatgttcaacagtaatttttagagtaaagttagttaagcactagagtttatgcaacactgtaaaatacaagtattttactaactacactggaaaaaacacctacttgcaattttaattaatcattataattcaaaaacaggtttatataactggccaggcccttttgacaatataagtacaaatcttggggatatgttttgaagctggcttcgcttcacagactgataaatctactgtccaaaagtcacaagaattatgtctttattggttcatcttagaattaaatcaacatggaatatgtactttttgaattaaacaaaatgttttgataaaaatgagatacgtgtgtataaaagctggaaaactcatgtcccctgaaacttggtttccaccagatgagtttcaaattcagatactaaacacacatgaagaaataatcaaatgaattctattcatcctttccccaaagttttgcttacaattaagatataggtattatttgtatgccgaacaaacaaaataaattggaagatgtttggataaacagggaagtgaacacttcaggaactactatttgcagtttgcaggacaggataatcttctctaggaagaataatgtcaacatagcagcactatattcaccaggattccccagagccgatggtccgatcatgtggcaggaagccaaaccttctggctgctcacaatatcaatcagcttccctttaatcttcaggaagtgtctcttgaactccaatccatcacccttagaaagccggaagtcaaccaatattttatcatccatttctaacaaattcactttgaaaatgagtttattgtttctcctatcagttgttgatatagtaacctgattcatacaacttttcttccattgatagcccaacttctcacaagtctctttcaggcattgataagatttgtctgcatccaatttggtaaagaatcgtgtcattcttttgaccaaccgctgccaggggttctgtgaggatcctggggtgccaagtaactgactattcaaaagcatatgatcaggacatgtgggctgggaaaagctgatcccttgtaccaatttatcaatgtatgaggggctggtatcccataaggaaagacctgtgcggggttctggctgagaactggagtacttcacattttcttcactagaagcactgtttactggagagaagtccaaattggattgaatgtgcttagaaaatccactgggagactctg

SEQ ID NO: 312856 - DNA, 898 bp, Homo Sapiens
  misc_feature (875)..(875): n is a, c, g, or t
gaagatgccagtagactttcattaatttcactgttttgtctattaatgaaactgacagaacatgaaaacagcactcacaaacaagctaacaactcaccagcaagaaacaatgctatagctggaattctgccaccttggttctctccactacacaatttaccttcaccccacttctaacaactacacatacaagggccaatgaaagagcaaataagtaaaagaacttaacagggaaactcaattgtacacatttcttcccacaaagttctttttaaggtgtcgcttccaattttaccccaagtaaaatctaaaaatcatacaaaactacaaaagtgtattttataaacctactgtcacccatactattacaattgcttcaacccaggacaagtataaatactagttaactacagtcctgcaatctgtgagcttttttctctagaacaggagaaaaaaactccctggtttttctactgatgaacttaaaccttttgagcttttgatctatactttgatggctgtgtgttaccctatagataaggcctcaaacagtcattggaagtagcaccattttatcaccccagaggttaagaaaggtgctattactgaagttgttttaaaaggttgggacaatgagaagagctagaatgtccaagtatttgtggattagagcagaaattgtgtcattagagtagacttagagaagaaacgtgtcgatgagtagaatagaaatatgtgtcaatgagatccaagaaaaagacaatatagggattaaatgcatctgaactcagaccatttggtttcattggcatgttttcatgatgtacacaaattacacccaaattcctcttaccaaccctagagaacaaaaatgngtaccagtcccatcactctatcc

SEQ ID NO: 312857 - DNA, 889 bp, Homo Sapiens
tgactttgagatctttgttccctgaggtgccaggcaggcaactttagcacatgatgaaaacagacttccacctcagtggcctgtgggcacgcacaagtgaggtctgtttttctagacaccaagggggagtaagctgagctgtctagcacggattggagactccctctccctggtgggcctggcaatgacagcatttctcacagaggcattctggtaaatgaagctgaaaggggtgttttacatctgtaaacggtttcaaacaggtagagagaaaaacaccacaattaacactgttactttttgccttgtctggcatgtttgttttaaatgaatacattaatggggtttttatccttttgaatgacttttcagacactagacataaatctcttccctccagtgtatgctctgcctttttaaccactgacatgtaaggaggactactgtctagcatcagcttatggggtcagctggctgtggggatagcgtcctgaggaatgtggtcacagcaagaaggcggggagcagcagagccttgcctttgaatgaggcagcttgtgaggcaagcattctggagagaggtgctttgaaagtagggtgcggcctttcacctcttccttaattactcacacatctttgcgttctcccctgccgtccttcaactgtatcttacttttcttaccagaaaggaatggagtctgtttagagacaacttggacaacctgtgagtgcatctcttctttcctttagtcttcacagctaactctggagagcttcaaaactagaaggatctactccgcatgggtgcatgcagaggctcctggatctgggaagcccgccccctcacaaatgctgagccgttcttgctctgaaactgcgtgagtcaaggc

SEQ ID NO: 312858 - DNA, 867 bp, Homo Sapiens
ccagaaagttatcaagactttttttaagccatccgcagaaggggagacacatttttatgttgtgtcatttcgaagggatcacctgctgttaccagctaccacccataacaagaccacaagaccaaaaatgtcaattgtgttaccagcaataaacataaatgagaatgtgatcaatgggcaggactacgaagtgatgatgcagattgactgtcaggtgatggacaccaggatcctccatatcaaaagttcgtcggttcctccttacctccgagatcagcagaggaatcaaaccaacaccttctttggctcccctcccgcagccacagaggcaacccacgttgtcagcaccatccctgagtcattacaatagcaccctgcagctatgctggaaaactgagcgtgggaccctgccagactgaagagcaggtgagcaaaatgctgctttctgccttggtggcaggcagagaactgtctcgtactagaattcaaggaggaaagaagaagaaataaaagaagctgctccatttttcatcatctacccatctatttggaaagcactggaattcagatgcaagagaacaatgtttcttcagtggcaaatgtagccctgcatcctccagtgttacctggtgtagaattttttttctgtacctttctaaacctctcttccctctgtgatggttttgtgtttaaacagtcatcttcttttaaataatatccacctctcctttttgccatttcacttattgattcataaagtgaattttatttaaagctatgccacacatgcatgttcaaatggtttccactgattcgatttttcattcatttaatgcacacccattctggatattgtgcttatttgag

SEQ ID NO: 312859 - DNA, 592 bp, Homo Sapiens
atcactaaaaggggtcccaaaagccaagtccttaccagcaggcaaaaaggctagcttttccaatttttgaaagaaaaagaaagctactttttcttttaggaaatgtagtaatttgttttaaaagaataatggctcttaaaaaatagtaaaccagtggaaaattgtttaagaaatattgtacggatatatactcatttaactgaacattttaaatgtctttgaactaatgaagagaatcctggttaaacaaagaaatctcatattgttcatacatcagaatttcaacttaccatttatgtttattgctggtaacacaattgacatttttggtcttgtggtcttgttatgggtggtagctggtaacagcaggtgatcctaaaattaacaaagaacaatctgttatatataacaattggcttagtcctagaacaggccaaattcagggcttctaagaggtcaatatttcgttgggatgatgaaaaattatagtttttatttgaagttggcttaattaactacaaaccagcttagaatcattcattcattaatgtaatacacatttacagagtgtctaccgttgtcaggcactatg

SEQ ID NO: 312860 - DNA, 575 bp, Homo Sapiens
gtcttgataacttctgggtgaagcataatacacttgtagctcactccctgagttcctgctgatactactagtggtttctgtgtattgaacagccatcagctgagaatttgagccctgttccagagcaccctgaagaatacgggttttctgttgattatttgtcattcttcttgacttggtcctttctacttcatgtctatgaacccatcctcgaagttcatgatttaacctgagagactctgttgtgttaattaggggctgacaaggaggtggaggaatgtaaagcaatggttcttcagttagcaccatcagggctttgtcatttgaaacagaatgatcatatctgtagctgtttttctggataataccatctgatgtgtcctgtgcctctttagcagaaaatcctagaaggtgcctcctttgatttgcagggctcacactagggttcattctcctggaatcctgttccaacatgctcataggtccatagttcagtattataaatgccaatactatcatcacacagacaactcttcgccttggactagggactttaagcctctggttctctgaca

SEQ ID NO: 312861 - DNA, 1176 bp, Homo Sapiens
  misc_feature (961)..(961): n is a, c, g, or t
  misc_feature (966)..(991): n is a, c, g, or t
ggggcatgcgtagaacgcgagcgcttggcaaggctcggctcggaagagtccaagcgtgagggaagagggctgtggattcagatactgtttttctcccgaaataggaaattggcttatttttttctcctcggcagcatcttaatttaaaatatgacacttgacctacggccctgcacggagcggttaagagggtcaccaaccagtttcttaaacaattaggtctacatcctaactggcaattcgttgatgtatatggaatggatcctgaactccttagcatggtaccaagaccagtctgtgcagtcttacttctctttcctattacagaaaagtatgaagtattcagaacagaagaggaagaaaaaataaaatctcagggacaagatgttacatcatcagtatatttcatgaagcaaacaatcagcaatgcctgtggaacaattggactgattcatgctattgcaaacaataaagacaagatgcactttgaatctggatcaaccttgaaaaaattcctggaggaatctgtgtcaatgagccctgaagaacgagccagatacctggagaactatgatgccatccgagttactcatgagaccagtgcccatgaaggtcagactgaggcaccaagtatagatgagaaagtagatcttcattttattgcattagttcatgtagatgggcatctctatgaattagatgggcggaagccatttccaattaaccatggtgaaactagtgatgaaactttattagaggatgccatagaagtttgcaagaagtttatggagcgcgaccctgatgaactaagatttaatgcgattgctctttctgcagcatagcttgtcaataatggaaacaccaaaaactgtattatttgcaactaaattttctctgccatacactaactcaaaaattttgatattttcattaacttgatgattaaactttatgtgagttngaaannnnnnnnnnnnnnnnnnnnnnnnnncttgtcgggccggctcggcctcgagagcttcagacatcgttgcgcgcggccatagtagtgactgtcaagtgtttctagagactggctgacaggctggatctcacataaaacgcggggacgacgttgacatcaagagttagctatgactcacgacacagcgatatagcgcgccttcaacggatata

SEQ ID NO: 312862 - DNA, 591 bp, Homo Sapiens
  misc_feature (131)..(131): n is a, c, g, or t
  misc_feature (225)..(225): n is a, c, g, or t
  misc_feature (562)..(562): n is a, c, g, or t
cctcagaccagaaatatcccaaacgcgcacagtctggtccaggctggctgatactaccaagtcttctgtggggtggaactgagcacacatcacataatggttgtgccctgttaacacacaaacacaggttntagattgccagttccacactcggatggtctgatcatcggaggcactcagaatccagggatattcatggtgaaaaaacgtggtgcgaatataatntaagtgcccaagcaatgtgaaaagacagcgccgaagcttgtaattccaaaccttaatcttatagtcatctcctccagagacgaacagtggctgctgcttatggaagtcaaatgcctcgccactggacccatcatgttcatcaaacttgtcaatgagagtgcacatccgatagtcccataactggatgaccccattatgtaaactagtcaggatccaaggtcttttggggtgaaagctgagccctttgacccgcgcgctcttggtctcgaatttggttaacatctgctcaggtctgccgactccgatgtcttaatccgagccccgacacacccctgcntgccttcggacgcctccacgtcagcgacc

SEQ ID NO: 312863 - DNA, 594 bp, Homo Sapiens
attttccagatggcgaggtcacagcagagagatgtggccacctagcctttccttatccccttcccttcccttcacccccatcctcttactcctttcatgtcccatttcagacagagtaaccattaacaaaaatgaagagaaaaagttaaagtcgttatattcaaaagccctaaactaaatattattaataaccccctctgaatttcatgtctctggaattgaggtggtagtgaacagcagatcggtcagcaccagaagtcaactgagttaaggcaggaaaagaaataagcccaaccaacttgccaaaggtatctttgtcctttcacctgggcctcataccaacagcctctccttgtactatatttttaaaactggaactatgaacttcatccatttgcactgttcagacatatatatgtatgtatgtaaaaattatatatacacaaattagctgcacgtatatacatatatatatttctttttaaatttcatattgatggcagtaccttttttagcttgtgtttttacacacctttcactagaatccatgacctccctcgtgctctctttcttttgaaacaaactttaaaaagg

SEQ ID NO: 312864 - DNA, 719 bp, Homo Sapiens
cttggaatgccagtgtttatttaacacactaaggtaaatacatatcacatataaaaattgtcctataatacagccagtgggggaacataaaaataaatgcataactttttaaaaggttcatcctaatgtggctctaaaattaccttgtgtatccaagagtctacatggtatgttttggaaaatgccaggttatggtagctataaactgtccaggaacatgggagtgtatgcgtatgtttgcgcatgcgtggattttcggaattacaaaatctgtttgggaagaaccgtgttccactgagttgacctctgtagcctttctaatattgctctgtttgattaacagattcccttctacaccccgataggaggagtctactttaagacttcaccaggttccagcctgtcccctgcctcccccgaacattgcctggttccaggctcccagggatggcagctaccatcttggctttgaagagtggggacatccggaggtagccccggccatggtggtggatgaagaggaggtagatgggaccaaggacccagaggtacatggggggtacccagacccctgctgttctcaggaagcacaggctcagcaggctggtggcggcaggttcaggctctgtctggttccagaccccctgccccgcgcagggctcagccagcgcggccatcggcgccttctgtcgtcgtgggtcccagcgtctgtctgtctc

SEQ ID NO: 312865 - DNA, 861 bp, Homo Sapiens
aatgctattgccttgttgtgctcccgggctgcactgctgttcctcatccactcctgttcaagccgagaaacaagttcttctgaggagtgttctctcccaagagaccagaggtcttttggtgtcagtggcctcctgtatcccctccagaccaggccagaaacccaccagaacgtggctttggaggggaaggctgccccagtctctggacaggggttagactgctgggggtcttcagggaagaaggggggttgatccgccaggcaggacagcacaaactgtgccaccaccagagacaggcataggtaggtggacaggtggcggacagggtcgctctggaagcccgctccggaggcctgctgggcagcgttggtagctggcaagacaaagcagagaagccagtaaccaaacagcactccagatgactggactccctttttcctcttggtgtgaatcaggaacactgcgaagctcatcgtggtgagccacacagttaggatgaatgaggaattctggggcctcaggcgttccctgttggattttccaaagagcgacagccacgctggaggtacacaggactatgagggcgaatccaagcaccatcttggctttgaagagtggggaacatccggaggtagccccggccatggtggtggatgaagaggaggtagatggaaccaaggacccagaggtacatggggggtacccatacgcctgctgttctcaggaaggacaggctcagcaggctggtggcggcaggttcaggctggtgtctggttccagaccgggtgccccgcgcagggctcagcaggcgcggccatcggcgccttctgtcgtcgtgggtcccaagcgccaccccaggcc

SEQ ID NO: 312866 - DNA, 889 bp, Homo Sapiens
ttatcttttgcagatttacatgcttttatatctggaatgtttttctcaaacagttccaggaaccactttttggattttgaccagtttcttagaagacactctggcaactgggacccatactcaaaatcttcatcataaacttgaaaatactgatggaactccttgatttttttcttgtttgtggaaaacaaacttttattaaagagcatattcactgtgactggataaaggagatgtcttactaagttgttcaggtccattgtcccatgagtgcctaaattctccagttgttcatgtaattcttcagtcagttgcccagtaaactgatggagattgacagtccccattttccctttcaacataatatagagtttttcatgcagtgctaaaaagacattctttggaattgatgctgtacgataaacgatattttgcactgctagttcaaaatctacttttttggattttagaaacacattaattccttcttcttcagtaacaaaggtcattcggtttcccatagcaaagactgtaaatattggtccatacttgattcttgctttctctataaattctagaggggctttcccaaactcaaatccaactccaatccaaggaatccagcccttgatgcacgggggtctacgcaaattcttccgctgaaggagtaagaacagagcaaggcaacccaggattataatcactgttggggaaattagttccatgtttttgtccagcaccttccagaagcagaaaagtgtgaaacagtcctgccgtcccttgcttcttttctgtgggctacggaacctgtcgggactcccaacctttctgctgcaacttttgcagctctccttcgtaactgtagcttccttcctctgtcccagttttc

SEQ ID NO: 312867 - DNA, 680 bp, Homo Sapiens
ggtgttacctccaatttgaatccgatttattcattttcccaactttaaattggatcacacttatcttttcccaatacttgaaaacatttacttaccacatacacatttggactttacttcgatgaagtaaaaatacgaaaagtttatctctacttcccaaaaatgtcgatgcacgctgcaattgtatttcatttctttcgcacaattttgcacaggatattgttgttaattgttagtagaggaattcagaaatgactagatcttttagttgaggcaagcaggtatgttccccgtgttctagccctgcacttaagagtcaatgaaagaaagtttaaaaaagaaagcattgtctcctctggagaccccgtctgccacgaccacataccttgattcttgctttctctataaattctagaggggctttcccaaactcaaatccaactccaatccaaggaatccagcccttgatgcacgggggtctacgcaaattcttccgctgaaggagtaagaacagagcaaggcaacccaggattataatcactgttggggaaattagttccatgtttttgtccagcaccttccagaagcagaaaagtgtgaaacagtcctgccgtcccttgcttcttttctgtgggctacggaacctgtcgggactcccaacctttctgctgcaacttttg

SEQ ID NO: 312868 - DNA, 1425 bp, Homo Sapiens
  misc_feature (49)..(49): n is a, c, g, or t
  misc_feature (56)..(56): n is a, c, g, or t
  misc_feature (64)..(64): n is a, c, g, or t
  misc_feature (85)..(85): n is a, c, g, or t
agaattgaagcggctttcccttaaagtgaagaagcttctccctccccanggattcnggaaaagnaaaacctgactccaaaccaanggacttaagatgccctgtgtccaagtgctgctgctgcttttaccagtatctcttacccttccggttagaagaagtagagctgctgccccccatgattctatcactccaaacatatccccatggccaggtcttccacttgtagtccacttgattgtcatattcattgccttattttccacgaggaaaatacttttacccatagtaaaagccaaagacacatataaaaataagattttcctctttactctcgtccttacatgtccacagacttcatgtagagaggctgagcctttcgaccacaaagtgtgttctgtgttgaagatgttataatgatgggagagggcagttgcagcagcttctaaccaagtgtctacaacacatgtactactgtttcctacctgtgtcacctctgcaaaaaaatggagctctgagcccagttctgtgagcatggtgtcagagccctccaaagtcctgagaaatcaataccagggatccaaatctcagacaccagtttgaaggcaatacctggataccaagactcagagtgaggatatggattttgggagctgacagttttgctgatcctgccacactggcaggggctgaagtccagaaatggtgtgtagctctagtcattcttattcaccacagctcttatttcacagttttttcccttggtttcttctgtttcttctgttcctcatattcaagtattttctgttggaaatagcctgcaggaggattcttgctcttctcggcttcctggatgaaaagtgagaagagctgtgtcttcacaaacttcttcacaaatcggcggttggtcttggaggtcagagccttacagaaggatctttcttggaagtggccttgcccatttgcctcccgcttgatataggaagcataatggcccacaatcttgacaaagaactgcacaaaggggcctgaaacatgctcgttgatttgttctgcagtctttaactcattgatcccctgaccaagagagtctaagatgtcatcctgaagcttcggtggcaggatgtctttttcatcaccaaccgacattaagaaggttccttcacaaagattgaccagcaggacctgaaataaacatagactggctttctctggtcctctttcttcatagacccccagaggatttaccgtcttgatttctgcctgtggctgtatctttcagcccaggtagcaacaaaatcaatatcttcagttctcatttcctatctagcattctcctttctcaccattcccctctggagatctcagttccattcctgaggaaagggtgtgggtgtttgtaggaagggagtaggagaaagagctaa

SEQ ID NO: 312869 - DNA, 898 bp, Homo Sapiens
  misc_feature (672)..(675): n is a, c, g, or t
  misc_feature (726)..(726): n is a, c, g, or t
  misc_feature (757)..(757): n is a, c, g, or t
  misc_feature (859)..(859): n is a, c, g, or t
aaattataacactagggaaaaatttgtagcggatggcagtgttgaaggcaaatgtaaacataagggtaatggtctgtcatggcttttagaaaaagatgatagagttcatcattattttgccttcatctttgttaaggacagaaaattccctgacaggtgggcaagtatcaggttacctattttttattcctttggtacaaaagggttgaacgtcaggctaaaaaagcagccatgcatttattattaagcattttctaccgacaaggcactgtgctaggtactgtaatcctaccataagtaggtaggtatttcttccactgtaaatcataggggtttgctgttttatgtgagttagcctcttccccttgtctgagcattcctcaggggaggtcacctgtgaggttcccagaactgtagttttttttaccagggtgttgtatttggagggggaggaggactcggctcaaaagagctagctggctctccggtgttcagaggtgagtccacgatactcttaccacaatttggaagtttgtgaatctttttaaagaactaatcaatctctaatagcattgaggttgtacctacatattaagttgaatggactgttctatttaaaaaataaacaactagacaattaactagtttattaacctatcacaccccatcctnnnntctgaaatgatgaacaacatgggcgagtgatgaagaatgtatatataccanaaattcctgacggccgccgtcggccctcaangaaacttttctagacaattctttttggacgcccgggcccccgtataggtaagcggacccttgggccaatatgctggatttccctaaggagaacccttgggcncatggacttaagtggctttgggaattacctcaacccaaa

SEQ ID NO: 312870 - DNA, 1038 bp, Homo Sapiens
  misc_feature (39)..(39): n is a, c, g, or t
  misc_feature (79)..(79): n is a, c, g, or t
acatttcttttaaaaaaggacttggaattttcaagtatntgatgaggcctaaaatgacaaacacttgtctgggtattgnaaatgctcagctgaagggaaatatatgcaatatgttctcataagaccatgtgggaaaaagcagaggcataaaagagctacaacctggacaagtgcaaactaatgcatttaggacaaactgctgttacctgtagttaaaatataatgggcactgagccatcaataaggcttgagagaggaacttaatttagcctgatcaacatgctagggtaggtttttaaaaaataccagtcattactggaaagggtatttaaaaccaaaccaaatggcgcctattcacttggaaaatcacgtacaactctggtattcatagatccactgtgggttattagcggaaatcaacttctggaagagacacctaaaacatctcttcatggctgacagacacatctgtagtaggataggacacagttctaagccagcatagcaaatctgatgttctggatctccagggaggctttccctcaaggtctctaatcaactttcacagtcaaattccataccatgataataaatacaaccaatttaggtcatggtaccaaggatcctgctgggtcacagggcacctgattataggaactttataaattgtattgctgggaaaaaccacaagaggacaactgtttggtttcccatcttttgatgcagcaaaagaatgatatagctcacctgggttttgtttattaaagattgtgtgggatggcatttataatctaatcatcttaagtccatgagtacatctccttgggtccagctgatatgcctcttctataaatcatgtgctagtggcagctgtaaacacagctacagaatgggagcatttagaggacagtaccctgcccattttcaactcatggaaatgttgttttcaggaaatatatatggcaataatattcaaaacatctattcctctgaaattatggaagttaatcctaaacctcacaactttaagatacagcc

SEQ ID NO: 312871 - DNA, 1903 bp, Homo Sapiens
gggcattcaaaatgtgaactttaataacaggtcagagtgggggttccccaggaacgagaatgacggaactggtgctggaggcctcagggtgcccacttccctgctccaagttctggaggcgaggaggcaatggaccctgttgaggcagggcagtgcccagctccatgtaagtccatctgtctgggtccctgagacccaagatgcagcagtgtgtggagcagggggccgccctgcctgacccgggaggtcctgcagggaatgcggcccaggctggtcgggtgagcaggccaaaggctgtggggtcagatccggaagctttcctcccggccatcgatgtggcggagccgcaggtagacgtccgtgccaatgccctgcagggactgcagctgcagagacccaccgaggtactccgcgtaggcccgtgacgtgggcaacccgaagccaaagccgtgcatgggtcctgactgggcgccactatgcatgtccagatggccaaagagggggctgatccgggggtcctgtgtgctggcctcagcagtagtgaagtggtagtccatgacccggtccagatctttgtgagcgattcctccaccacggtctgagatcctgatgatcagatcgacatcattgttggcgatggtgatgaccacatctgggacattgtagggagtgtctaggtgactctccattgtggctctcatggcattcttgagcagctccggcaggatgtagtccagtggcatagggatgaaggggaaccgggcagccacatggccattgatgcggacacggggcgcattgccatacttgtgctcacacaggcgtctggcaaagtccacccacttctcaataatcttctttggtgagagacgagtacagatgatgccgacaaagtcaggcttgtcctcatgcagcgccaggtgatgtgtggccaacatgcggattccaagcctcgaagtcagcgtcttgtccaagaagtagcggacgagcttttcatcctctatgtgcttccggctctcacgtaggccctctgccaagagggtcaccacatccttgtggtcatccaggcagtgtcgcaccagctggcagtactgggcctcgtccgcctggtccttgatcggagggaagtctgtcagcttctggaaggcacggatatatagctcatgcacgtgcagtatggtggggttgcagccaatgatgaaaggaaggcagcggaagcccttgatgcggtgagcaatcctcactggaagttcttgctgcaggtaccgagcacttttcagaaggtggctgccgtcctgagagcggccagcgtagagcatcatggtgggcgttaggcggactgagggcttctccgctgccgcgtcgatggccgactggttgtaaaaggaggtgacggtcttggagcgctcccgagccatctccacgtggtgtgtgtcggtggccgacgtcgagcgggcccggagcgcgagtgcgggtcccaggaggggccggagcggaagcccgcccccgggaccgctcctcagcaccgacgccaggatcatcgtcttgctcctttcagacccggtggccgctaggactgaggatccgctaggactgaggacccaggcgacccaaaatggggcaagggggtgtgggtgggtaggggctcttctccgacttcagggaccagggtgcgtcgaggatgctgacaggctcagcccgcggagagcagctcccatcgcggggccggagccagggcccgggtcccagcggaagggctcgaacagtccactcgccaggcgcccagccgcctgcgccctccgccgccgtgacgtcgcgtgggcggcagcgcccgctgggtcctgggagttgtagtttggtctgagacgtgccgtcccgggcgcccgcgcatccaggccacgcc

SEQ ID NO: 312872 - DNA, 922 bp, Homo Sapiens
  misc_feature (20)..(20): n is a, c, g, or t
gtatgctggaggcctcacgntgcccacttccctgctccaagttctggaggcgaggaggcaatggaccctgttgaggcaggcagtgcccagctccatgtaagtccatctgtctgggtccctgagacccaagatgcagcagtgtgtggagcagggggccgccctgcctgacccgggaggtcctgcagggaatgcggcccaggctggtcgggtgagcaggccaaaggctgtggggtcagatccggaagctttcctcccggccatcgatgtggcggagccgcaggtagacgtccgtgccaatgccctgcagggactgcagctgcagagacccaccgaggtactccgcgtaggcccgtgacgtgggcaacccgaagccaaagctgggggtgggcagggggacaggacaggaggcttcagaggcttgagtctcctggggtcccccaaccctccattctggcctggcagggtctcacccgatgcatgggtcctgactgggcggcactatgcatgtccagatggccaaagagggggctgatccgggggtcctgtgtgctggcctcagcagtagtgaagtggtagtccatgagccggtcgagatctttgtgagcgattcctccaccacggtctgagatcctggatgatcagatcgacatcattgttggcgatggtgatgaccacatctgggaccattgtagggagtgtctaggtgactctccattgtggctctcatggcattcttgagcagctccggcaggatgtagtccagtggcatagggatgaaggggaaccgggcagccacatggccattgatgcggacacggggcgcattgccatacttgtgctcacacaggcgtctggcaaagtccacccacttctcaataatcttctttggtgagagacgagtacagatgatgccgacaaagtc

SEQ ID NO: 312873 - DNA, 1095 bp, Homo Sapiens
caggggaattttagttccccagggggccataaggggaaagaaagggggaaacccggggggcaaccccaccaatggccccctttaattgcgggaccacgcgggggcgccattcgcccatttttgtgtcttcaccacagggcttccgggcaaaaattccccccccatttctcaaatatttttctttgggggagaggccgagttccagataattcccgacaaaagtcaggcttgtctccatgcagcgccagggtgatgtgtggccaacatgcggattcccaggctcggaagtcagcgtcttgtccaagaagtagcggacgagcttttcatcctctatgtgctccggctctcacgtaggccttctgccaaagagggtcgccacatctttgtggtcatccagcagctgtggcaccagctggcagtactgggcctcgtccgcctggtccttgatcggagggaagtctgtcagcttctggaaggcacggatatatagctcatgcacgtgcagtatggtggggttgcagccaatgatgaaaggaaggcagcggaagcccttgatgcggtgagcaatcctcactggaagttcttgctgcaggtaccgagcacttttcagaaggtggctgccgtcctgagagcggccagcgtagagcatcatggtgggcgttaggcggactgagggcttctccgctgccgcgtcgatggccgactggttgtaaaaggaggtgacggtcttggagcgctcccgagccatctccacgtggtgtgtgtcggtggccgacgtcgagcgggcccggagcgcgagtgcgggtcccaggaggggccggagcggaagcccgcccccgggaccgctcctcagcaccgacgccaggatcatcgtcttgctcctttcagacccggtggccgctaggactgaggatccgctaggactgaggacccaggcgacccaaaatggggcaagggggtgtgggtgggtaggggctcttctccgacttcagggaccagggtgcgtcgaggatgctgacaggctcagcccgcggagagcagctcccatcgcggggccggagcctcgtgccgaattcgccacccaggcctcgctac

SEQ ID NO: 312874 - DNA, 455 bp, Homo Sapiens
  misc_feature (432)..(432): n is a, c, g, or t
aacttgaaaattgcttggacttatttatttaatttatgagtgtttttttatttataagctgatttggttgacacaacatataacaataagtgtacatacaaataaacacatctagacatgtatacacacacacaaacgaagatccaatagcttttaccttggaactctagccatgagatatcaatacaagctcacaggttttacatggttacactttgtttgctccaataggtaatccagtgaaggctgtgaaccaaacatttttaaagcagttccggtggcagtttgatttttaaaggccaaacctcctcagactccaaagacactggagccaaatagcaccaaaggagagcaccatatgctgaccaggcctgacccttcttaggacagcagcaccaaagcctggatacatggcaacgtcatcccggtttncccatttcaacagcaaacttcca

SEQ ID NO: 312875 - DNA, 1550 bp, Homo Sapiens
  misc_feature (92)..(110): n is a, c, g, or t
  misc_feature (146)..(146): n is a, c, g, or t
  misc_feature (160)..(248): n is a, c, g, or t
gggccccggtttttctttggggaaaccaccttttggcccccggtttcccttttctctttggggggcccccgcgccccacaaaaggaagaggnnnnnnnnnnnnnnnnnnnaaggggccggagggggcccgcaacaaaacgggtttntttttgtcggctcnnnnnnnnnnnnnnnnnnnnnnnnnnnnnnnnnnnnnnnnnnnnnnnnnnnnnnnnnnnnnnnnnnnnnnnnnnnnnnnnnnnnnnnnncctaaaacagtcatattttattcttctgaacagctacttacaaagtaatctcaatcagtgaaattataaatcatgtaactgttcatgattaaaaggcaagacacagccaagacagtagatgggcaagtctcacataaatacaagaatgtttatagaatgtttagcatatcatgttaatggacaatagttttccgttctctacagaagtatgaatgaaatgccaaagttgaagtcactggttatattcataaccagcttagtgaggatgttgcccactgcctcacatctgtaggacagttgggatatttctgcagagcattcataatttgagtattatccaaaagcagtttcatcagctggtactctctctgtgaatttcctgaagttctttccatgggctttattaattctaattgctgcaagtgttcaaaagccttcatgacaacaggtttttcaaaattataaacggaatgtgctttcctttgaacaaacttctgaaactcattatagaccatttgaaaattaaatggctcttcctcatagatgtcatttaaatgtttcattgctattataagacagatttccaagactgatagaccatgtacaatatttgctttcgagtccatgctacacagttggcttgcttccattagatctacggcagtcataaatgggtgcgatgctgttactcgatttaaagcaagcatcaatagcatgtgtaatgaccgcaggtttttgctgatattgaaatgcttctgtagtacttcttgcacacttctatcttctgagagatactgaacattttcattccacttctcagcaaaaaccttgtctggaaactctgcaggtagagataactgttctttaaatattttaacatactgtggaaaaccaaatgaattcattaagtgtatctgccggtgagaaaatcttgacttcactcttttttctaagagttccaaaatatccaatctacatgtaagaccaataactgctattggggtctgtgcagactgagaaatgtcaaaaagattatagagaagtgtttggtttttatgatgagcaaaaagatcaaattcatctaatatgaagatcactgggcaactgctagttcggtcacctttttttaaagcttccagaagaaatgaaaggttttcagcaaagcttccaaaaactttatctccaactacattttccagatttaactgccttgtgatttcctttagggcgattttgtcattgatctgcagcagtccatttaagtgaacttgtaatacattttcactcacttcttctatttcc

SEQ ID NO: 312876 - DNA, 1092 bp, Homo Sapiens
ggtacggtccggaatttcgggatatcgtcgacccacgcgtcggtctccagccatactctgttccagctggagtagcctcctagaccagcctggcccaccctgctccacccactgggcccccccagttattgatacccctctgtgctgggctccacgctaggcagaaggaggagtggcattggcatcctgacccagctctgccctcaaggtggggatggatgggcaaaggagagtcctgcctggcctacgatgaggccactcatgtgggcctaggtaggggaggatggtgcctggagcagagggacccacaagtgcctcccgagcctagatcctggctcggaccactgcaagggccgaggcagggccagaccagagcatcctgggtacaggcctgggctctccaggcctgggcctgattcaggtgcagtgggcactcctgaagggtcagagcggcatctgccaggcagcccctctggcttccgctgaggtggttgcaggcctggggcagagcctgggtggtcagaggccggggctagaggcagatggaagggaggcatttgctgacagaggacggggcacccgggctccccactgcagtcggccttgcctcctcctcctcctctacctccagtcaggctggacgggagggtagccttgtggctgagaggggtcagactaggtggcacaggggctcctggaaagacagcaggcttcctgctggggcgttcccttgttggagggaatagagtgggggtgggactctgcaggggtgtccttgtccactcgcacccctcgccgcccaccagggccatgctctgtgacttgggctgatccccaccctttctgggcctacagcaccacaggccgctgtacccccttagagctgcccctctctggcctggccggcaggtgtcttcttaactcctctgtcctctatattcagcatgttccttgtcagctgctgggccggccctgccttgcgctagcagaagcctctcctggcagcttctcaggtctccctaatggagacaccaggctactaggacactggctggggccaccccaactttgccttggtgactctgggccatt

SEQ ID NO: 312877 - DNA, 852 bp, Homo Sapiens
  misc_feature (34)..(34): n is a, c, g, or t
  misc_feature (719)..(728): n is a, c, g, or t
aaaaagggtggttcctcccaattcactgccagcnaaatgcatgattattatgaagatttgcacttcagtcacatcaattattccaaatcgcaatgttccagaaacatacgtttgccagtgcgcaacaatagaacataaatgtcccccgcaaaacaacaaaaaaacatccaatcagggtttgtccccagctgcactgcaatacaagttccaagaaccacaaaaactgttgatagtgaatcacagccatgatcaaaaagttctcccagaggagaactactattggttcttcttgcctgtttcccatcaatagcatccaaagactggtaaatgaaaaggccacaggcacaagcaatatatgcccacagaggtgcctgctctgtagctgtagggcagtagaagactaataaaatagttgtacagatgtttattgacagtccaatgatggtgatgagatttggggcaatccaggagggaactcttctaacgagccattcccaatacccttgcattaagggctcaagcagggaccgtccagcactttgatatctgtgttcttctagccgctttagttggtgtcttgacaatggtggtgttggtaactgaaacaatttatttaatacacatcctgtagtactcatatgcccgaagcccactggggactccgggtgagaatctccacatcttttccttgttgatcgatgcccactcatggatcttgnnnnnnnnnnaatatttaaagacagtaatttcccttcttttgtaggtttttgtggctggtgcttaccctgaccccaacaagtacacccctagaaatatcgcctccgactccagccgactgggtgactgatcggc

SEQ ID NO: 312878 - DNA, 483 bp, Homo Sapiens
ttgagatttagtgactttaaaaggaacattttacatgttaatccctgctaacattaatttaagcactaggatcacagtctaccgtttgcttctggtttccaataagcaagtgtgtaggctgtacttacaagctttatcacagtgtgtgtgatattttaaaatagttgacagctgtcagattactttatctttagttaaaatgaccccacgatcccaattacaacgtttttggtatatagcaaatgttgagatctgttaagaaactcttacctgctctgtagctgtagggcagtagaagactaataaaatagttgtacagatgtttattgacagtccaatgatggtgatgagatttggggcaatccaggagggaactcttctaacgagccattcccaatacccttgcattaagggctcaagcagggaccgtccagcactttgatatctgtgttcttctagccgctttagttggtgtcttgacaa

SEQ ID NO: 312879 - DNA, 1930 bp, Homo Sapiens
  misc_feature (177)..(186): n is a, c, g, or t
  misc_feature (1582)..(1582): n is a, c, g, or t
  misc_feature (1593)..(1593): n is a, c, g, or t
tttttggcaatatttgctcacatttattctcttgcatcgtaaatagtagccaactcacaaaaataaagtatacaagaatgtaatattttttaaaataagattaacagtgtaagaaggaaaatctcagaaaaagcagatagacaatgtagaaaattgaaatgaaatcccacagtaagnnnnnnnnnncagaaaagtgcctatttaagaattatgctacatgtggaacttaactagaccattttaagaaagaccaatttctaatgcaaattttctgaggttttcagattttatttttaaaatatgttatagctacatgttttactatagattttcctttagccactcaatatactgatttataagtctgtgactaattttaagtcccagaaatgaaaatgctccatggaatccatcctcaacatggttatgagtcacctgaaccccagtgttgcgaagtcgggtgacatacatgagtccatcatctcttaagagatcatattgacaggtgatgacataggtcaggggtaagccacgtaatttgttgtcatcagccaacaaaggggctgccctcacatctaggaaccctggatattttttagccagctcagaactgccataatttggattgttataaacatgtccttttataaacctctcagggagcagggaactccaattaataaatttgaagagatgacttgattccacaggtacatgttgtctggaaagcatggctttttcaagtgatctatcagtggtaaaatattcactccagaatctgaccatgagtgatttggatagaaatagaaaatttgaattttcttgatatgacggtaaatctacatcaagaggctgaagggcaggataaattaaagactggatcttgagtttgatcttgacatctgggtcatcaaggagctgttgagtcactgctgcagctaaattccctcctgcactatctccagaaataccgattctctcagggttcacaccatattttgcaagaacttttttacgtaagaaccaccttaaggcattatatacatcttcaaattgaattgggaaatgatacttaggtgctaatctgtagttggttgatacgacgacagcatcaagtctgtctgctgtccatcttgacagcaagtcataaccacttagagcagcacttcccacgcaccagcctccaccatggatgtaaaacaacccccttcttagtgcttcagactttctctttggcacatatacccgaacaagaatgttgttgaattttgtctcagtcacagtgacattttcatctgaggttggtgggacttcatcaaagctcccgacaaccttaaaggaatccataaaatggtgaagtcccaggagctccacaaatgtagccaaattttgtatagttttcagatgtgcgtttatccacatcattctccatggctcctcaacgttatctgggagaggcgtataaatataatatgctatgaggatccccacaatcagaaggtacagcgattttcttcccatggtgaacgtcccgcttcttggtctctgttactggcaggagttaccctggggctccaaagcnagtgatggcangatgggaccgggggccctgggctctgtcattcttcagtggccagaccaaggagcattactactcaaacatgagccaccaccatggttataaaataagcttctttttcatgattctgtcttccattttggcacacatatgcagacaacaatgttgttaaatttacttctcacagttacattttcatctgaggttggtggaaactttagaaagcttgaaaggaacatcataggctctatcaagttgtttggccccaacatttcagcaaacagggcccatctgtagtgtataccccaaatcttctattaatgattaaatgtcacagagtagctcaaacat

SEQ ID NO: 312880 - DNA, 715 bp, Homo Sapiens
ataatgagttctttttaaaccatgtcatacattccccatcctgatatcgcatgatccattataatataggcagggggatttactattggtggggcgtgccagaccctcccttgcttcagccagacagttcaacctggagttccttgttcctgcgcacctccgcagcatgcctctccttttcctgcagacgttcaataatagcagctagattagcctcacggttttccttaatttgttccattttcaggatcagcttttcctccgccatcttgctgaagttgttgttctcctccaaagccttctgaaggacttctcgctcgtgttccctcttctctgccaattgtttcagcacctgggcctcctgagactttcttctttcctctgcagcctccagtttcttctggatctcctccagggacaggtctttcttctttggagaagctaaagttcgtggggcttctgagataggagatggtggcttcaagatcagctcaaaagcctggccagaggcacgtttgttgatttgcttcacttccatatcatcgtaagtatagatgttgatgttgcgaggttccgggtaaaagcaagagcagatcagtgacagcatggacagctccttcattttttccttgtaggccattgctgttttagccattgtagggatgtgcagacgctgagcagtggcgaaggcaaagggtccggctacagcagcccc

SEQ ID NO: 312881 - DNA, 1194 bp, Homo Sapiens
  misc_feature (171)..(171): n is a, c, g, or t
tttttccctttcttttatttggcaaagcaataaaaggccaaggcagctttgtcatggtgagctacttctcgcggaagtcaggatcccgcatctgcagactatacaaacaacacaaattaaaagcacaatcatcattgaaatcacagagcttccaagtgtttttatccattntaatgggttactagctgctaatctgtctgcagctccttcaagcactccagttcctggcattaaggtcaggtgtgcctgggatgctttaaatatttgttcttttaattttgcaatatctaaagacaaatttgtagagtgtctttctagatgcttttttattctttcccaaatttttgatcttattaagccacaaatccttatcttatgtttagctcctacaacgggccatatcatctgaggttgaggtgccactataccgccatggtttcagataagaggaactcttgccgtactttttatcatttctaccatctgaccattttgttcagatcatctaaacatagtgtagcagtggcacacagactgagaggtgcaattcaagctaaacatccccttaggggaccaattaataatgattccataggaatcgttgtgcagcacctctgcctgttctgcaatgcaatcttcctaaacaagtatgttcattttgtctaactgagtccaatcctgtttacaaataggtttttgggggttgtatgcctcaattacaggagcagatttattatggtaaatactgagatcagaaagcatgtgtaactgtgtcatacagtgatttacatccaggcattattaccagctaagattgataaatatgcctaataagtacaattgttctctgtgtcagcctttgttgaaggaatactcacagaaatggtgatcactgccatcatagctaccattaaattattcactgtgagtgggttgtccctgctttcctcaggttgtcttcctgggatctgtgacagcttcttgatctgtctccagggtcggtggcctgtattcgatggggtgttgctcgtgacagttgggggtcctcctcggcacccagccttgacatggctgcaaccgggggggtcctcaggatcctcccggaatctcttccttggcatctggcccatgacaagatttcaggtgtcttgatggtatccaaactgactgatgattttggcctggagaaacaca

SEQ ID NO: 312882 - DNA, 729 bp, Homo Sapiens
  misc_feature (49)..(49): n is a, c, g, or t
ccacaggcctttccctgcctatcgtttgtggtttgaagcagttttttgnctccgggcggggcccaggtgttccttgccctgctctagtaaaccaacaacttttagcagtgtgtgtgatagccatcaagagcatgtcccattgctgcagaaatcctgtttctggccagtttctttaaggtctgtttgtgacagggttagggattgttcccagcgtgtcctgcctttctgtttttgcaaagcaataaaggcaaaggcagctttgtcatggtgggctccttctcacaggattggggatccccatctgcagactgcacaaagacaaacaacacagattaaaggcacaatcaccattgaaatcacagaccctccaagtgtcttgatccattttaacgggttaatagctgctaatccgtctgcagctccttcaagcacttcagttcctggcattagcgtcagatatgcctgagaggcttgaaatgcttgttccttcagttttgcaatatccaaagataaatttccagtatgaccctttaaatgtctcttaactctttcccactcatgctctgtttctttatacagatgaggagtaatgcaaaaatcagaagtatttcagtcacattgtaactgtattctatattctagactacttactcgatctcctagccacattatagtttgttggagatcattgatttgattagctagtttctggtctatattagtttggga

SEQ ID NO: 312883 - DNA, 869 bp, Homo Sapiens
  misc_feature (739)..(739): n is a, c, g, or t
ggctgcaggccccttgctccaagcaagaatcccgcggggtggccgtccggaccccccaattaaggagggaacccttccatcttggggatggggcccggccctcggggagccctcttcaccagaggcggccagggtgggcccaccaggccccgggtggccagaagccagcactcatggggagaataaggagaaaaagggctgactcaggcacaggccagggagtataggcgacccttgactgacagcccccatggtgaatgagctgaggcacccagctgccgaagtgactgctgagcagcccacatcagagaaccagcagggtggcggaacttgagagtgtgcagggagctggccagggtctccagaaccctgcggttgggctcagccaccagctcggttgcaccctgcagcatgttacagatggtgagctgtcggacatggcgggagctgtgcagaagaggtgagaaccgctgatcacaaagacgcctgtcagaagacacatcaaatggtccccacgtagaacatgggaaaaaaaaggcctccataaacttggctcgccaacatgtcacactttccaaactggaaggccttgtcttcatcagttcatcccagagtcggcgccagatggcctgagttgagaggcctttcttgagggcagtttcctcaatcctctccaagtaatatatattgagcagaggtaggatgctttgaagtattgggcctgggagggcccacaccnccgctctccagaacccccatatgggcgctcaccgcccgcccgcacagctcgaacagggcggggggagcgttggggcccgaggccgagctcttcgctggcgccgcctcccgggacgtggcctccatggtcc

SEQ ID NO: 312884 - DNA, 669 bp, Homo Sapiens
  misc_feature (473)..(473): n is a, c, g, or t
  misc_feature (476)..(476): n is a, c, g, or t
ggcctggagcttttcctgtcttcactgaaaagaagtacaaagtgagccccaggacagagcaaggagggagggacgttgttatgggcacccgtcaacctggctttgagtttggtgactccgggcagaaatcactacagagaagcctttccctcgcactcagctcttctgggagaaacgagaccacgacccagtgaaaatggtcgggctgagatcttggcatgtttgcttctttgcgtaagtgtggcaggcagtgagctccctagcagatatgattcctacaagcagtgagggatgagattcagggcaaaagctgtgttggagtgtgtgtatttaggggaccaggacgcagatgcaaggctggtggagtcgggtgggcaaagttttattataaaaaattaaaaacgaccccaggcagcaaaagcaagctcagatcttcctctggagcacatgtgggcagcggggagatcagcacnctnctctgttttgagctggaaaagggtctgtgcttttgccatttggttattgggttgatttctccttgtttttgtgagcagggactgggaagcgtgggtggagaaagggcgtcagcggggttagtgtcagcacaggcgctgccatacataccacccagatgcaagtcgatgaggtcactgtaataagactctcccc

SEQ ID NO: 312885 - DNA, 654 bp, Homo Sapiens
  misc_feature (89)..(150): n is a, c, g, or t
  misc_feature (273)..(337): n is a, c, g, or t
aatcctattaattatacatattcatttagaacattttatatactgcaccattaaaattcattaaattcaggccggggacggtggctcannnnnnnnnnnnnnnnnnnnnnnnnnnnnnnnnnnnnnnnnnnnnnnnnnnnnnnnnnnnnnaccatcctggctaacatggtgaaaccctgtctctactaaaaatacaaaaaaactagccgggtgtggtggcaggcctgtagttccagccactcaggaggctgaggtgggaggattgcttgagcnnnnnnnnnnnnnnnnnnnnnnnnnnnnnnnnnnnnnnnnnnnnnnnnnnnnnnnnnnnnnnnnnagacaaaaagacagagagacagagagagaaccagtgtgttcactaccaatttgacatcacgtaatattggtcacattgatctccttaaccaaagctgccacattgctcagctccagcaggtgccatgcaaatattatacagtgtataatggtacccttgtgagctgggcaacatggcagccctggcccaaccatatagaccacagggaaagtgtggctattctaaccttactgactccgatgaccccttacccacagagatacccttgtccacaatgcccccataattcctctctgtatggaccatgctaccccccc

SEQ ID NO: 312886 - DNA, 1049 bp, Homo Sapiens
  misc_feature (509)..(509): n is a, c, g, or t
ttttgcctttctcttcttccagtttcttatgtgtgtctctgaatttgctgatctctcgagatatcaggtctcttttgtcttcttccatttctatagcatttatatcctccttagtgatgagtggataagggatcagtggggccactggaaatctgcggaaaatgtcctccttcttttccttcttcttcttcctggggtgagaatcagattcctgtgagggggcatttagctcactggagtattcacgaattaaaacttcaatagcccctttaatcatctgatctctcctctttgtttcttcatccaaggcttcttcatcgtcattagtgacagtttctggccttgcattcccattagaagctttcttctttgctttccattcatccagctgtgcctttgtctttgcatcaactttaacgagtagctttttctctccaatttgcaggtcatgtaataatctgagtgcacggagggtagattctggctccttgtactcacagaatccgaanggcttgaagctttccggaagcaccttgtactctcttccagctcaaaaccaaacccacatttaagctaagagttgtcttaataagcatgctctgaaagctttctcggaaatgttgccaacaaaaacagtggtagtaggacccacaaattttcatcattttctttagcctttaagcctggatgatcctttcttgcgcccaaatgctttccaaccatagacacagtgggtactaagacagttggagcaggagccataatgctcattggtacaggaatcattggggtccctggaggtacaggtggaggaaatcctggaaactgcgggggtgggatccctggtgggagtgctgggattcccatgggagggcgattcaaatgaggtggaaaagacattcttactgcagcagtccgccgctgaggaaacggtactgccttcgcgaccttctgggatccaggttacgagtgcgctccactggttcgagatttctgcccgtcgctcgccagggagactgagtgcccaagcgcatactcgcacaggccgc

SEQ ID NO: 312887 - DNA, 1306 bp, Homo Sapiens
  misc_feature (417)..(417): n is a, c, g, or t
  misc_feature (1227)..(1227): n is a, c, g, or t
gggagcagcgactactcgacccggagccacagccgcagccccagccccggccacagccacgggagctacagcagtcgcagccatgggacccgcagccggacacgcagcccctcgaggacccccagtcccagctaccacagccggagcagctctgagagcgggggcttctgagcccagacagactcagcttggtgcccccctggcactgggagaggcgaggggcgggccccaggaccccagtggggagggggctatatctccttgcccccaaggctacaaagaggtctcagggccagtgcacgggcagatgggaccggggaagactttgagggtgggcatccagtggacaaggagaagccagatgtgctgcttctacgggtgtcctctcccacctcctgtccacccactgtgcccggngaacaaagagccgttacgaacacaggaatctccccatcccccttcctgctgatgccaactcaccaggcttgggactgctgccggtggatggtaccagagtccatgatctgctctgtcacttcaccttagctcagtgcagccagggacaccttgcaaggtgccagccctgggagtcctctcttccgcactacacaggtccctccactcctctcttatcactgggcagacgaggaggtggtacagcacatgggtttgggagctagaccgaaaggaagaacagcctaccccttggtgcacccccatccaagctgggggagctggcatctttttgagctggctgcaaggaggaccctggctgagggctggtggctggccccacagcctcccccaagctcctccactgacccaggagtgcccagacgggtggcccccaaaatcccagcctggggagctaggcacctcactcttggtctgacctctccaggccaggctctcctcaccccatgccctgggccaaggtcctaccagccatgactactgcatgacaagaggtggggggtacagacctcaggtacatttgaccctgaggttaaaaggggttcaggtcaagaggtgggagaggaaaggggtagatgggaggtggaatctgtaggaaagagaaaaagcaaagtcgttcactgactgagtagcccccagggagtggagacgggtccctggggagggagcagctgacaggtcagcagtgcccccagccccacccaagaggagggcagcgtgtgcctgtggtctgggacgtgggctggatggcangccaggttcacaggcataggataacatgtgctttgggacctgacaagggagtaccttgggggtctgatggggtcatggc

SEQ ID NO: 312888 - DNA, 1902 bp, Homo Sapiens
  misc_feature (25)..(26): n is a, c, g, or t
ggctggcttttctgtttcctgtacnngtaggtatcagaaaaatggagcaaagtggtaggtactttttgtgaagacggcacggtcttccctcttccctcagtcccaaatccttcccaagtaagaggctggagttgtcactgcttttggcctggagtttgggatccctgtctttcctaagacctggggttgtcagctctcatctgaggcatccagcagtctctgccttgcctttagcccctcccaagctggctggggtggcctgtgtggcatttctgttcctatttataggtacccaatagctgcccattttcgtgagccccatcttcacccaggcctatgttgatccatccagcttgccagatgctgcagagtcacaagcctcgaggtgccttcttcagggcctggttgaagaagatgatcagtggacagtctgctctagatgagctgggccggagggtcaggaaacccagtcgcccttacttcttgccctggggatcaaagttctgctttctccccaatgagacttgccttcctaagcctgtggctgtggagaccatgtctgcagccctgaagaaaccctgtcgggctttgtgtgaaggcagagaaagggacaatgatagtagagtgatatggagcaagagatattttgggcatgtgggcttcaactcctcgacatcactgttcatgctggcgagtgaatgccagtgtgctgatgggcgtacgctggtgctgagtagatgcgcagccccatctgtgcattctcctggatgcttagagggatttctttgctgtaagatgtctgtttgctgatggtctggtctatgttccgaattgagcacaaaacctgtcctatgaatgctttgcatttggaatttttgcttgacttcagttattggtggagtctttagcgctcaataggaccaggatccagcctcacttctagggtatgggaaatccaatctgagaccaggccctggctaagacccaaacatatgcacattcacttagcagaaccttaaacacccctcagttgtgcagcttttggtcatcaagggtgcgtctgggaggttggtttaatgcaatagaagtgctcccctctgaaagttgtacatgaaatttttgtaaatcacatccttatccttcatcttttaaagaaataaccactgcaagtccttttgtaaagtgaagaatccttttgtagaatgaaccactgccccttcattgatttcctgtgtcaatccagatggtgggatgtggttttcttaaggtgaggcctgtctgtgacctgcatctaagcccatgggacaaattgcacagaagtcctgtatgtctgtcattgtacccttaagtcaccctagccctctccctctaggctctgcttccgaggtcagaggagagatagcctgtggcctgtcctgccatgcaagaactcatcactgtggctgtctggaaagcccccccttatagtttgggcttcagctagtggcttgtcctcaccatgatggggccctaattcagccatgtacagacagagaatatgtctgctcctttccccttccttttaagtaagtccaattctcgagcttggggcaacattgttcacctttgtagcactcaggctgtccattcaatttcaggctccccagatcatgttttggtgaaaattaggggttgggttcctttccaacgtttgggaagatcctgtgagggagccccatctgtcttaaagattagagtcattgctgtaggatctaaggctgtttgcttcaccgtggattcgcttgagttaggaatgagaagtagccacagtatggatgggtggatgggttttatgagatggatcacatattttattaaggaactcaaacttctgggctccccccttcctttcaaactttgcca

SEQ ID NO: 312889 - DNA, 334 bp, Homo Sapiens
tttctgtttcctgtaccagtaggagatcagaaaaatggagcaaagtggtaggtactttttgtgaagacggcacggtcttccctcttccctcagtcccaaatccttcccaagtaagaggctggagttgtcactgcttttggcctggagtttgggatccctgtctttcctaagacctggggttgtcagctctcatctgaggcatccagcagtctctgccttgcctttagcccctcccaagctgggctgggggtgggcctgtgtggcattttgcttgtccatatttatagggtacccaatagcttgcccattttcgtgaggccccatttttcaccca

SEQ ID NO: 312890 - DNA, 632 bp, Homo Sapiens
  misc_feature (511)..(511): n is a, c, g, or t
  misc_feature (548)..(548): n is a, c, g, or t
  misc_feature (585)..(585): n is a, c, g, or t
gaacgcctaagtgtttcaggcaaaggcaagtgtgtgtgcaaaggaacttgagaaaacagattttcctaatacctaaagcataaggtaagaagatagtaacagaaagtgaaagggaaaacaattaagcagaaaccagattacaaagggtcacatacatgatggtatcgttttgcacaaactcatccaattgtctaaactcatcaaactgtacacattaaaggtgcaattctttatcaatcatacctcgacaaagctgttacaaaaagaaaatgatgtggtcttccagacactatctggagccacccacccacacgctaacttattggagtctttagggatccacttggtaatcaaacagcacagtgaatagaggaactctttggcataagaggatcataggttcaagtcccagctctaccactttctggcagtgtaaccactggcccttaccccagagcaagtgtcattctgtgccacacatatgcagcaatatatggacccacggggtcgnaagccatctctctgggctatgacttacgttgggcttncaccaatttcctactttgggcaactaaataaggcagnttcctcgtgggatcgtaggaaattcttagtgttcgtggggaaattta

SEQ ID NO: 312891 - DNA, 1340 bp, Homo Sapiens
  misc_feature (411)..(457): n is a, c, g, or t
  misc_feature (646)..(646): n is a, c, g, or t
  misc_feature (660)..(660): n is a, c, g, or t
ccagaaaatcaaatatctttattttcaaatttaaatttaaacacattccaaagtttaaaaaaattgtttgaaaattgccttggattttatttatctactataccatggcccttctttacagtaaaattagctgcccactcttatatgagtacagttcccagaaatatagaagctcaacattttacttaactttgccccaaaaaatatttttaaaaagaattactttattctataatcggaataaagcaaaatgataaagacgtgcaaaacagaacaaataaaaatagaaactttgacacccctcagcagtgactagttgcatacaaaatagcttccactcctccaactctattaacctttctatctcccacccttgagattttttaagatcctacaataaatgtaatatgnnnnnnnnnnnnnnnnnnnnnnnnnnnnnnnnnnnnnnnnnnnnnnngaggccatctttatcttccacatttgcctgtactctttgcccccccagtaaatttcccacgacactaagattttctacgatccacgaggagctgcttattagttgccaaagtaggaattggtgaagccaacgtagtccatagccaagagagatggctttcgaccccgtgggtccaatatattgctgcantatgtgtggcacangaatgacacttgctctggggtaagggccatgcttcatgtcttctttggtaatatatgacttgccctctgccagggcttggaaggcattctctatttcatcactggacttgatgttttctgactccttgtcaatcaggaaagcagtatagtcctccagtgagacatagcccttcctccctggatccacagcatccaggaacttctcaaacttgggctcatgttcatcctcctccaccatgggcaagtagtaattgagtcctctcaggcaggaccggaactctttgtgagtcaggcgccctgtcaaattctcatcaaagtgtttatagattgtgctaaattcctttagagtctcttcactcacacctttggtgtccttggcctggatctgttgctccaggttgtgttgcatccgcaacccaagctggtagagctggtcccactgctgagccaatccaatggtgctgtatttgatatcaaggatcagagcgtcttccaagttgtcccccaggtccacaatcttggttagttgacgcttcatcgcctggatctccttctgttttcttttatttgcttccagctgagattccagagttcctgtttctttgagcaatgatccatccagaaagtaagccctggtttccaggatccattgaaggaaggtactggcattctgttcaaac

SEQ ID NO: 312892 - DNA, 1448 bp, Homo Sapiens
  misc_feature (1251)..(1251): n is a, c, g, or t
  misc_feature (1253)..(1253): n is a, c, g, or t
  misc_feature (1255)..(1340): n is a, c, g, or t
ggtagaaaccttactttttgtttaatttgttttgccaaacaaacacagtgaaaactttagtctgactaattgtacagaaaatagaatttgtaaccagtagcaaacaaaacaggataaacctaagtccctggcaagctggatctccatcagcaggtcatccagatccccttgtaaatggcctcctgggaaaataagtcctaggaggcagaggcacagatttaccagtccccatcagaatcacaggctgcacctgggaaggaaaagcatgaaaaggaggagaactgatgttacttgaatctcttatcactacacacattagagttgtctgactgctgaccaaccttaaggtatggttttcccaaacctatagtccctggacatcccacctgcatccctagagggtaagtttcaagttcagtggttctgaagcctctgcttaaccagaatctgcaacaataactggggaggaagggtagacaaagtcataattgctggtgtcaccagggcagagtctaaggccccagcttccacttcaggaggaaacaattgaggatgccaggtcaccagcaagagagtccagctgccttaagcctcagtactgtcaaccagtgcccaggagtatagaggagttcaacaatggcctgcggtcccctggctggatggggtctgggagtccagcaggctgccggggcaccagttcacattccgtgcttcttgcggatgacagccatggcaagcagccgatccttctcacgcagttcttcgcgcagcttggcctcagtgagacgcaggtggcgaatgctgcctttcatctctttcatcttcacttccatcagagccaggatgtcccgctgctcattcagcttgcgcaggagctcctcctccgtggtgcctgacgacaaggagtacgaatggtcggagccagtatcagggaagccctcttcccctaccaccaccaactggggggcccatagggcactcggcagcctccagccctgcggtagcagcctgtaactccgacgcggcggccgcagcggctgcgccctctgcggctgcaaactccacttgcactgtgagatcgacgggcttcacgccttctccagtgggagtgatgggcgccggctgtacggatcccggagcctgactgctgtctacagtggcctgaagggtgagaagcacggccgcggaagcagataccaggttcggctgcagctgggcagtctgggcagtggaggcagagggtgaggactncncnnnnnnnnnnnnnnnnnnnnnnnnnnnnnnnnnnnnnnnnnnnnnnnnnnnnnnnnnnnnnnnnnnnnnnnnnnnnnnnnnnnnnnggcgggcggccgcggccccagcgggtctgcgcgctactttgcgctcattgacgccgcgcagcgggaagatggtggggacgcgtaccgtgtaggtcttgcggccgcccc

SEQ ID NO: 312893 - DNA, 918 bp, Homo Sapiens
  misc_feature (53)..(53): n is a, c, g, or t
  misc_feature (94)..(94): n is a, c, g, or t
  misc_feature (132)..(132): n is a, c, g, or t
  misc_feature (858)..(858): n is a, c, g, or t
  misc_feature (863)..(863): n is a, c, g, or t
  misc_feature (871)..(871): n is a, c, g, or t
  misc_feature (877)..(878): n is a, c, g, or t
  misc_feature (882)..(882): n is a, c, g, or t
ggcacctgccacttggattttaaaatgccagccaggagaagggttcttgtttnttccctaacaaaagggttatccttacttagaccatccccanttccttgaaaattgatggttggtggtggattcttaggnttctatccttacaacactggattccaccttgggcggtggtctgaagttattctttcccactttcattagatggtccacacgtgccaacagctgtgtattaattgagagtctgcagtataacttatctccaggttttgcaaccagtcggagggcaaattctctttgaaacataagtatagcacacctgaaaaaaggtcgatgtagcaacagcttgaagacaaaaggtgaagagatctgataaggcaaatttgccacacaagtatcaaagaatggcaaatctgttttcagcacatcacccaccagtacttgaagtttgctggccacaggcgtgccctgaactcttttgtgaagttcagctactagccttgggtcaagttcacaagcaacaaccttttttgccttttctaacaactttacagtcatgttgccagttccaggtccaacttccagcactacatcagttggtcttaaggcagccttatcgataatgctgttaataatgagaggatttttcaaaatgtgctgcccaatccccgtgttgaacatgagtcctccagcgctcttcagctcccggcgctgctcctgccgcccgcggcggcggccgatggcccccgacttgaccttcggcatctcggcagaaagcgggcccacaggcccgggacgtcaaggaggaccaaagagggctagctcgtgccgaattcctgcagcccgaaggtgtcggtaaantagancgaattcnccaggnnttcnaaaggggttcgatggggagtgggcgggtgggagcag

SEQ ID NO: 312894 - DNA, 834 bp, Homo Sapiens
  misc_feature (62)..(112): n is a, c, g, or t
  misc_feature (676)..(732): n is a, c, g, or t
aattttaactgaaggctggtgttgcttgtgtcccatgttttcttctttggcttggatattgnnnnnnnnnnnnnnnnnnnnnnnnnnnnnnnnnnnnnnnnnnnnnnnnnnnacaactcttaaggctggaatgggcttatttttcactgttttaggaaatatgccaggttttcttggtgcttcttctggtgggttgttaagaaactcaattgcttttgctgcttgttcttttgtttcaaattccacaaacgcaaatccctttggatctccagtagacttataatgtggtatacttatataaacaacattgccacatttcccaaatactctttcaatccagctgtgattaacatttttgggaagtaactccacatacactgtgcgttcatcctcatcctttggtctttcccccagaggttttttcctccggattctggtgccttccaaatcaagctctacaacagctgaacttctcaatgctctggcaattaacttcccatcagtagtcaattttttcattttgttaaaagacacaagtagtgatatatcaacatatccatctctagatttttctatctgttctcgaagaaatctatccttgtgaagatttgcatccccaaaccagaagtccacttgcttagcaatatctgcaagcacctgtttaactcgtgaccgnnnnnnnnnnnnnnnnnnnnnnnnnnnnnnnnnnnnnnnnnnnnnnnnnnnnnnnnnctgatttccactttcagtttccattctccgttcgactcccaaaatacagggtcaagtactgcggccttcggacatttccgtctccggatcctgatagtctcg

SEQ ID NO: 312895 - DNA, 415 bp, Homo Sapiens
  misc_feature (245)..(301): n is a, c, g, or t
ccccggattctggtgccttccaaatcaagctctacaacagctgaacttctcaatgctctggcaattaacttcccatcagtagtcaattcatgttaaaagacacaagtagtgatatatcaacatatccatctctagatttttctatctgttctcgaagaaatctatccttgtgaagatttgcatccccaaaccagaagtccacttgcttagcaatatctgcaagcacctgtttaactcgtgaccgnnnnnnnnnnnnnnnnnnnnnnnnnnnnnnnnnnnnnnnnnnnnnnnnnnnnnnnnnctgatttccactttcagtttccattctccgttcgactcccaaaatacagggtcaagtactgcggccttcggacatttccgtctccggatcctgatagtctcggttactttcccc

SEQ ID NO: 312896 - DNA, 516 bp, Homo Sapiens
gcaaatttgactccacaagagtgtattatcacaacactgactttgtgtgtaagcattgtacatgtacataaaaacattaaaatttcctcaataaatgagaagatatccttttgcacatttgcatttgggaaagagaaaattccttaggatctcagctctttgactgaatattacatggtgacccatcccagcttttgatgaatctggtcaaaagacttaggttgtctgtcacagtattccagatgacctaagttataaagctgagttcacccagttaccaaccacgcttttatacattttgctttttgacccatttctttacaaatacaactcatctgctcattaccattatacccgtgagactatcgttagcatacctgagttttacgcttgcaaatatatgcatgttattcttgcctattgattgtgtaaagtggcctaggaagggttctgttgtgtttttatacgtttctcaaataaattccatcttaaaaatataaataaatgttttttgtt

SEQ ID NO: 312897 - DNA, 439 bp, Homo Sapiens
aatacttggttttcagtaccacaagaactatgagctggttatccacttcatgtggaatcataagcgtcccaaagtgacaatacatatagattgccaggcagtgaaacagttaagatgccaccatagctttcttttcaacatctttctaagattaccttactatttcttttgttccaagtttgtacttcctcacagttctcacatatggaaaggatacacactttgtagaaacaagaactttatgttatccaagttctaggatagccatgagctccaattatctcagagctctgagtcctctactcaatacccattgagatttatgtgttctgaggcttttgtcttctagctacttacttcattctccatgggtaacgtcattcatccacattaactaatttcctcactccaacctggtgacagagagacacatcatctc

SEQ ID NO: 312898 - DNA, 1267 bp, Homo Sapiens
  misc_feature (115)..(116): n is a, c, g, or t
gcccaattaaaaaaggtgaaaaatggcaagccataaggcgaatcgggtataatttaaaaactttttccatggataaccttattgcaaaattggcacttggccagttccaccccannccaatggaaaaacttggcccccttgttgggttcacaccagtccttgaagccccaaagtggaagtcacccaataaaatgatctggataaaaagtttgcagctgtgctaagccagctagctccaccttctgggtgtgagccgacccgggacaccgctttgtcctgttcctttgtgggactctcatcctcaggcaggtagtcaggtagctctgtgttctgttcaacttccacaggagtatcttggaatgggaccaacatctcttctccactttcacttttcacaacttgctgagctttcataaccttggttgatgctattgctgatgccaaagcctcagctttcaaatctgaacggattcgcaccacacacctttgaacagccatttgaaaagtaaagctaataacacctttaatttttaacaaagcctcttcacatagatttctccgagacgtatcatcaaggccatctatatgcaaaaccactgttttggcacgtttgtttgtagttcccagaaaaaaattgagctttccttcgacgtgaattcatctcattaaaactatcaccatctgccatattggaggactgaagaatgtcatagatttcagaggccagaagttttgtttctcctggagttgtagttttctgtataacattttgtaagctcaacatcatacccagttctcctttcatcttttctctgtttgcacggcattctgccaagtatcgaagagcaagcaaagcggagtggacgactggagggttgggatggtccataaataaaataaggccaggcagacatccctgatcctggacgatggctcttctgtttaacggatctgctgctagatcccgtaactggttaactaccgatagagcgtcaggctcttcactcatggtggaagtggaagaattcatcttctatgccatgcacatgaataaaatcttaaattcgctccagagctttaggagtccagagcctgccacaccatcagggccacacctacggatgaggtagagacccaggcggcgcggagcgagcccttcggttcgcagccccggccgcggcgatcgcaaacaaccggactaactcagggagccaaagagcgaaggcgctggcgggcaaaggctctgcagactcttcccaggtgacct

SEQ ID NO: 312899 - DNA, 1252 bp, Homo Sapiens
  misc_feature (1110)..(1162): n is a, c, g, or t
  misc_feature (1174)..(1186): n is a, c, g, or t
tgagtgataaccttttccctgatttgcttgtagaacccttgctccagagctgttatggtacaatctacagctttatctgtaggaagataaacatctggagccattaattctggttctaactaacaggattggtgactatactgtaaggctgagtgtatagcatgattgctttaccactgtgtgatacctgctaccaccatcttagtggcagtggcccagtctcagggctgtgcacagattcaccactaaggacctttatgataagtgttctctaatctgggctcactgtgaaggaaatccgatcaccaaaagctagtccttacagagggagcatggacaaagctcctggccctcagacttcagcaaggatgagaatagatgcaaatgttgataaacatcctgccatgctgaatctcccagaagctggtaggaattattccatctgggtatccatcaatacctaagactggtgggaattactttgtttgagtatccatcaatatctaagactaagactagggtaactctctttacttcttcgggtaaagcaaagaagaatagccctgcatgacaagccccatgaaataccgatgttcccatgctcaccttttctttttgtttctttatagaatgtgaatgacactttgagcaggtaagtcctgtttgaatgcaggaggggaggggtgtgcgtatatagaaatggatggaatgcacctctgaagaaatctctcgcctctgcttattctaggagttgggctgtgaagctcggaaacatcagaggctgtctccttggaacttcatactatgtgcaatgtttccaagctttacttcgatgtgaagaaaatgttaaggagtcatcaagttagtgtgactctggatccagatacagctcatcacgaactaattctctctgaggatcggagacaagtgactcgtggatacacccaggagatccggaaccctctttcaggaaaattacctgccttcccctgggcctgggttgggaagggcttccctaggaaaaactttccttgaaagggatgttggccaaaagaaccgattgggtttttggaatttttttggaaaattggccaaggggccctggttttnnnnnnnnnnnnnnnnnnnnnnnnnnnnnnnnnnnnnnnnnnnnnnnnnnnnnggggttgtgggnnnnnnnnnnnnncccccccaatttccctcttttttgtgggaaacaccccccccgcttggggggggaaatatttttggg

SEQ ID NO: 312900 - DNA, 1468 bp, Homo Sapiens
ttaaaattgttaattctaactttattcttatacaatttgcagaatagatttgaaatgattgctataggttttaatgttgataagaactggactataatacaactgaaatgcagttgagctgagcaagtacatttaaaaatgaagtcacagacatgatttttctatacatttttttgtttgaagaaaattatgataaagtcagcaagcagtcacagatgaaagaacaaataaaataggtggcttggatagttaagatgagaaacaaaaatatctgtttagagttaaaaatggacagagtggtttattttgcagcaagaagagaaaacggggtagtggatggcaactgatggaacaggagaatgctcagcagcatttgctcttccagcctgtcacgcctcctccactgctgatatctacattttcactgttgggctcttttacaggggtctttcgaaggatatcttcagctaacgtgaggaacgccttttcgatgtttatatttgcttttgcactagtctcaaaaaacctaataccatgctcccttgcaatctgttctccttttcctttaggtacaactcttttgtcgtccatatcacacttgtttcctagtaacattctttccacatcttcattggcatgctcatctatgtttctaagccatttgctgatgttttcaaaacttttaccattggtgatgtcatatactagcatgatacccattgcgcctctgtagtaggaggttgtgatggtgtgaaatcgctcctggcctgctgtatcccatatctgtagcttgatcttctttccttgtaattcaactgttttgatcttgaagtctattcctatggtggaaataaaggtagtattgaaggcatcatccgaaaaacgaaaaaggacgcaggtcttccccactccggaatccccgatcaggagcagcttgaaaagcaggtcgtacgtcttcttcgccattgggaggagcggctcgggctctcgccgccggcggccccaagggatcggtccctctcactacggccaactcctcactcgggcgttctcaggccggaggaccggggaagcgtgggaaaaaggctcgagacggcgcgggcgacctacgaacagctttgaggaagccccgacagtggcggcgtccagtgcctccgagggcggcgaccgcggctccgcagcctctcccagccgctccgcccggttccggggagtcggtcgggacaaaatggcctcccctcccccctcagggcttctcggccgggacgctcccacgggcgagcaagcctgctctgccgtcgaggaggcgcagcgggcgtgaggacagtctctctcccgagcggaaactccctgctagcacgcggcgagggcagcgaagaaggacccctaagtcgacgagctcagttacatagccccaggaaaccgagccaccccggccagagccaccttttccccgtgccctctcacc

SEQ ID NO: 312901 - DNA, 782 bp, Homo Sapiens
  misc_feature (203)..(250): n is a, c, g, or t
gtgaattgaaccagaagccataatgttgccttgtttgacctcgactgggaatgtgtgtagggtgactcaaatttcccctttattgattttggaattacacatatattttaggaagtaggcaaatttgcaaatacagaactcaagaataatgtgaattggctgtataatggttttcaagttgattaacatctttaataaagacnnnnnnnnnnnnnnnnnnnnnnnnnnnnnnnnnnnnnnnnnnnnnnnnaggactaaggtctagaggaaacaaaaatgaataagatgcaattcttcaaaaaaatttaatgtctagtagggacatgagccacatacaatgacaactgtaatgcagtgtgataaatgctgtagtaggaggcatggagggtgatgcaagaatagaagagggtgttgagggtggctttctgcagccagtaattcttaagctgagacatagaagaccacataggctgtagccaggcagagaaggggaatgaagatattttgggctaagaaaatgcaggtaacaaaggtctagaggtctaaaatgcaagagtttgtaaattttgctagacattggtaataactggtaaattaccattctgtcactcttctgacaatgccacccacaatactgctttgtggattcctcaagtaatttacttgtgaagttctttccatgcaacccacaagtttttccacttgtttttcagaagcacaagtgggggctcttgtattgttcttagagtgttggtacacacaaagggaaaataaatgctcat

SEQ ID NO: 312902 - DNA, 1254 bp, Homo Sapiens
  misc_feature (614)..(677): n is a, c, g, or t
gaaaatgagcaagttcagaagttatttgttaaaactcagttgtatggttttcttaaagaaatgggatcagaagtttcagaagacagtgaagagaaagatgttgttaatctcctacaggcagtcggtgaatccttggcaaaaataaatgaggaaaaatgcaacctggcttttcagcgtgatgaaaaagtattagagttagaaaaagagattaagtgccttcaagaagagagtgtagttcagtgtgaagaacttaagtctttattgagagactatgagcaagagaaagttcttttaaggaaagagttagaagaaatacagtcagaaaaagaggccctgcagtttgattttctagaaatgaagaatgctaatgaaaaaacaaggcttgaaaatcagaatcttttaattcaagttgaagaagtatctcaaacatgtagcaaaagtgaaatccataatgaaaaagaaaaatgttttataaaggaacatgaaaacctaaagccactactagaacaaaaagaattacgagataggagagcagagttgatactattaaaggattccttagcaaaatcaccttctgtaaaaaatgatcctctgttttcagtaaaagagttggnnnnnnnnnnnnnnnnnnnnnnnnnnnnnnnnnnnnnnnnnnnnnnnnnnnnnnnnnnnnnnnnattagttgccgtaaaggcaaagaaagagctagattccagcagaaaagagacccagactgtgaaggaagaacttgaatctcttcgatcagaaaaggaccagttatctgcttccatgagagatctcattcaaggagcagaaagctataagaatcttttattagaatatgaaaagcagtcagagcaactggatgtggaaaaagaacgtgctaataattttgagcatcgtattgaagaccttacaagacaattaagaaattcgactttgcagtgtgaaacaataaattctgataatgaagatctcctggctcgtattgagacattacagtctaatgccaaattattagaagtacagattttagaagtccagagagccaaagcaatggtagacaaagaattagaagctgaaaaacttcagaaagaacagaagataaaggaacatgccactactgtaaatgaacttgaagaacttcaggtacaacttcaaaaggaaaagagacagcttcagagaaccatgcacgaattagagctgtgtagcttgatgaaagaactaaatcacaagttaactaatataaacaca

SEQ ID NO: 312903 - DNA, 443 bp, Homo Sapiens
gagtgcttagaattgttaaaatctttgtgaagcacaccactgaagatgaggttgaaaaacctgacttttatcatcatattgataatctcaggagaactctatgcagaagagaaaccctgtggttttcctcatgtggaaaatggaagaattgcccaatattactatacttttaaaagcttttactttccaatgagcatagacaaaaaattgtcatttttctgcttggctggttataccactgaaagtggaagacaagaagagcaaaccacgtgtacaacagaaggctggtctccagagccaaggtgcttcaaaaaatgcactaagcctgacctgagtaatggttacatctctgatgtaaagttattgtataaaattcaagagaacatgcattatggttgcgcttcagggtactcttctcaaccaacctgtaggaaagaacatgg

SEQ ID NO: 312904 - DNA, 1628 bp, Homo Sapiens
  misc_feature (16)..(16): n is a, c, g, or t
  misc_feature (67)..(67): n is a, c, g, or t
  misc_feature (74)..(74): n is a, c, g, or t
  misc_feature (86)..(86): n is a, c, g, or t
ataaaattaagattantattctgtgtatcccagtgacttctagagggttaaaaaatgactgagaaanaatagancagttctttcanggaaaaccacctccttttgggactcacaccatgtgtttttcattcaaattagtaatgttcaatttttccctgcagttgaaccagctattagctttctggagagtcaaaattttcttcgttttaggatcaaatttgtattgtctgtgttccatgaaagaaatagaaaaatccatctttcatgaaaactgcatcaactttgtggccaattccaggaaagtcatgtgctatcattttgggataacctggatccatagatcgtttatattcatcatacctcccagtatttgttagcaacaaagaagtaggtttttccagtgttttcctcagaaagagcagcatcgatatgcttcacagttctagggaagccaaaggagctgtagatgtccttggggtatccgtgtagcacattctgtccctgaacagcccagtacttattccctttgaaaaaccggacttcatctctgtcggcaaattcgtaagcagcttcaagcccatttggcagttgtggccagaaaacagaaatgaaattgagctcaacttccgggtagaagggatttgtgcgcatgtagaatctgtctttaaagaacatcacttctccccgaatcgtagttatagcatcaaaggttagcttactgtcacacgcttttggggtttgtgggccgatgggctggacaggattttgggaacgtccatatatggcttggatgccatcaatgtcatcctgagctagctgaacatcaccactgaaggtgtagctagggtacatcaaagccccgatatcagtagaatgggagagtccaagagaatggccgagttcatgagccgcaacacgatgtaagttgtactctctgaaattgttggtccacctttcatcttcatcaaaatgagcatcccctccaatacctgggcctggttgaaaagcatgagcaagatttcctccaggtccatcaaaaggagagttgtcccgatgatctcccctgacaaaagatatcatgatgtctgcttgaccctcagagaccttggtgaatgtcagaggtgtgacattactccagagttggaaggctttctcaatggcatggtccacatctgctcttggcaaatctggcgtgtaattttcaatcctgtaggtcagatgtgtttgctcccagcgagggttcccctcagtgaggacaaactgagccacatcaggcactccacatctgggctgcttcatcaccttcagggtttcagcatctggtttcccagtcactttcagcccaaagaattcctgcatttgcttcaatttttcaaccactgggccactatttctccgcttttcaacttgcctcccatcattcttcaggttgtagtatttttccaggtatttctggactaagtccacatcttgctcttgtgtttctagagtcgctgggaagctgtgagacaccacaccccagaacagcagcagcagcagtggaggaaagctgtgcatactggcctttgtcttcttttctcagtgcaaggtgggtgatggcttcccagcctcttgctgctccaatatcc

SEQ ID NO: 312905 - DNA, 1129 bp, Homo Sapiens
  misc_feature (242)..(242): n is a, c, g, or t
  misc_feature (278)..(278): n is a, c, g, or t
ccaatccaaatttttccagggcaacactgggcttccagaaatgtgggcaatattctccccagcgttgttttgggtccgtcttcactttctgcatccagcagcttttgctgtaggtcagcaatctgagcactcctgatttccatttcagtctctaggctttcaatctgctttgtaatagaatcttctgactccggaaacttgaccacgcacttcagtaagggagaatgtacgcctccggagtntaggaggtggattctccccagattcctttttttctntgagttgagccacatcttgagccaggatctttctatcttcaaggaggtcattcagatggcgtttggcttcctcagtactgaccataacctcaatttcgtttccaagccaattcttcactcgagctgcagtgccttccattccacggctctgagtctctttccgcttatctgcgacctcccgttgtttctggagagcatccttgagacgcttgttggcagctgctgcctcctccgttttacgtctgagcacattggattgtttctggaagtttctttcaagtttcagcagctcatattgcctcttacggtctcgttcttttaactgtattacttctttgtctttttttctgcttccactgtctaaacttctcagcatcttctttcatttgacgcattaactgtacccgctggtttttcatcatccgtatctcctggttcagtttggagacagtacgctctgtggattcctttagtttcagaagtttggactgctcattcagtttcttcttcagatcagcaatttgaccctccagctcctggagacgtttgcggcggcgctcactcaacttggcttggttggcatccttctttgctgtctgaagttcaagaaccaattcttccttttccttttgcagattgatgacttctaattctagctcttttatgttatcctggtattggtactgaatgggctgcagttggctgtcattctgagtcatcttcctagccagggcctctttcagtgcaagcgctttattcaactcaaccagctccttagacatctgcgcttgacggagagcatgctgagtggtaaaagcgtcagaagacctgctcgtctctggactggtttc

SEQ ID NO: 312906 - DNA, 1698 bp, Homo Sapiens
tttttaacagtagacgggctaaggtttatttacttacttaacatttaaaaataattcatttgcttcaacaacatggcagacaatcaagagtactattgaaacataattcagagagggtcaggacaggaaagatcacaacctcattcctgaggtggaatgaaagatctaagccaggcctccatcctaggccaggctcctccattaagcagagacaaccaaaagataagaaagcctcggcctcatccccatcaggagatagcctgaactgctcacaaataagaaacaacttgaccagactgaggactggttcctgatgagtcaataggaaagtcagttggttctctcttcagtaggtgacttagcacccttctggagaacatagagtagtagtctggacctggaggctaaggcccacatccaacaaaggttaccttcttttcagtaacgctttgttccttttttcaacagcaagaaacctgaaatccagagaagtcatttaaaaaaaccccttctggctgcaacctgaaagcatctcccaagccagactgggggtagagatgatgactccaacttcagtgggcctcttcttcgataggggagcagccagagaagaagctggtgttgctggccagagcccgtttctttttcttccctggagccttgttttcttggtattctgttgctacatgtttcaactctgggaggtcaaaaggggagggagctgggggagtcttctttgacagcacctgctccacatcgcacatctctttcaggatcttgctattgggggtggcacagacgggattaaagaagctctatcctggggtcacctcggtaggatcctccagtttgaaggagccttcggaatcctgggtccgttcgacagtgcccaagctatccttgccttgctggcggttccgacactttgtggggtcacagcaacagtccacaccacagtctgacttttgcttcctgcacccacactgcttgtttccacaccagcccttgcaggaacacccttggatgttcttcctggacaccttaactaattttgttggcttccattcctcgtcatccccctcatcatcatcaccatcaccatcctcatgctcattcacagaatgctctgaacaatattttagatcctcgatgtccatgctttgctccaggaacttttctttaacacgagaaggttttggcttaggtgggacatattcaaaagaagagtctggagatagaagggtatccttaggaagatgtttctgtctgctggctacctggaggagggtcagtttctgcttgatgatttcattctctcggagaagctgctgattttgctcacacacttctcgcattttctcaagttcttcatcctgacacttcagtgtgctcagcagctgctgttccttttcactgactgattcctctaactgcttctctgccatttggctttgctgcagctggctgagaaggtacagcaccttctcttggtgctgttgctccattctgaccagctcagcttgtaactctgtctctatactcggccaaatgatttcgttcctccaacagcatcttctgcatgtcagcacagctggtcttgctctgtttcaggctgctttcaagtttgctgacctgtattttggaggagaccagcggaacgcgtgggttcgacgatatcccggaattccggaccgtacc

SEQ ID NO: 312907 - DNA, 538 bp, Homo Sapiens
  misc_feature (431)..(431): n is a, c, g, or t
  misc_feature (435)..(435): n is a, c, g, or t
  misc_feature (457)..(457): n is a, c, g, or t
  misc_feature (459)..(459): n is a, c, g, or t
  misc_feature (525)..(525): n is a, c, g, or t
gaactaggctagctatttatttcagatacttaaaacaaatgtatgcagagccactgttgtaaaggaacagagatattgttaatggagaagtgcctgtgagacttgatgaaatagtgcctaaggaactccatttgcttgtttctcttataaatcattatcctgatttttttccagcaagtagaaaccagtccagagacgagcaggtcttctgacgcttttaccactcagcatgctctccgtcaagcgcagatgtctaaggagctggttgagttgaataaagcgcttgcactgaaagaggccctggctaaggaagatgactccaggaatgacagccaactgcagcccattcagtaccaataccaggtaaactattttcctagggcagtatttgttcatgtctacagtctcttaaactgaatgggaagaaaacnacangcatataatttttgatgatganangacaacaaaatgtatatagtataatgggagttgtactgttggtttaaaaagaggatacattcaggncagggagcatgta

SEQ ID NO: 312908 - DNA, 1038 bp, Homo Sapiens
ttttctccagggcaagaaaaagctggctaaatgctagttaagtaaatccattctcattttgaactgtagagaagaacctgacttgaatgagattttctaaaggaagacaatttcttgctcaacctcaggtataattagagttataaggaatctcacgtccagaattttatctgctgattgttagtatggtaggtaattggccttaggacactatttctactagaaccctttacattatttttaaactccaaatgctgcagatgaaagtaaatacaacaaatgcaagtaaatacaacaaaataacaataaaatcacttgtgtgctgacttgctggattctggttaagcacagatgggatgttcctgatattcactaagaagagtctaactaatggctactgtgtgtgtgtcagtagcccaggtttaaatcatatatacttgaatgaattagaaaacactgtactcctcacattattaaaaatattacaagcaaactgtatccaaggctttgtactaaccgtctggggacaggactctctctttttagtgaacaagtcactgctagagccttagtgttttgccctcatttttagacctgaaccaagtcgacatctcattaagttcatatattcctttcttctgtcaaacctcttgaaacaagccttctgcccctaaagaactgagagtaatttgtaaaggctttcctctctggaaactagaacagtcgaaagctataaattaggttaagtggcttcattgtctctcaggctaatgcttataacccaaggtttattttccctatgaacagggtgtgcttacgttgataaaatgaaccaaaatcagcttatggaaaagttaaaaatacagtttactgaaagattatgtatcctcacacagagcatagcaaacaatccaatctaaaagtttaaataaatgtcaataattttaaaactaactatattttatatgtatataaagctgaagtcactgccttggatagtgttacgctgcatccaatattttatgaaggacattcatt

SEQ ID NO: 312909 - DNA, 837 bp, Homo Sapiens
aaaaaaaccaggaatcaaaaaccaaaacaccctcaaactgcaccaatacttcatattttgaccaaaaaaatatcctgggaggaagtgcaaaatgcaaaatcaaatgaccgaaaaatgctgaacaaacagcattattaatatacaaaatatttatattactgaactagtaacaggtgatgttctccatgtctgtaaaactttggaaccacatagctgatttgttaaatctagtccatgccagcttccaaaaaccaaacttttagttagcttcattctttgatgcctcatcaaaattttctacaagatctggaacatcatcatcttcctcatcaatgtcttctggttttggtgctttactgtccaagacttgccgtgggaactgttcagctaacttcctaaggcttgttaaactgtcagcaccaagctgacttaatattccaggaagcatttctgtgattggtttggcttctgcatgaccagtaattgcaaaggtattagcagaaagggaagcttggactttgggattgttgaaatgaataactgtcccatcatctttaatcatgttcacctcttcaataccagctatattattcacagccagtttttttagagaactctgaagctttttgtcatcagctgtggctgttctatgtaccaccttcttctttctgcgagctgtacccttgccccctatccggacctgagcctgaagtttggctaacttttcttgattcatgctgttggtaaatctgaagctgggagggtcctccaacaccagcacgcggcaagagaaagatggctgcctcagccgagacagagaaagacgacggcggcccc

SEQ ID NO: 312910 - DNA, 684 bp, Homo Sapiens
  misc_feature (25)..(25): n is a, c, g, or t
  misc_feature (108)..(108): n is a, c, g, or t
acacagaagtcacgagggcctctgncaggaccttctattcacatttcaagaatccctttctgaaattctccaactctctggtcaggaggaggagcaccattggggcgnggtaggcagctagaggcgcaggagcaatccaggttccttgcgtggttcccagcctctgctgacagcacctcagctaccaggtggggagtggaaattcagcctgcttagaggactgacctctacagttcatatttgcagtgacataaaaggcaaagaggagctggcatggtggtacagaaggtatcagtcaagcgcaggctctttcagaaacctaggaaactaaaaagagattgcaacatgttgactggccatcagccagacatgttttagggtgagaccagtgcttcagcaccacccgccaaggaacactgatgagttgtgggacattatggtcggccaagtgaggaatgattgcagggaccagagaagaccaaagatgccagatgtccccagagtttcttgagggctgggtttcacgtctttgcttgtcctttttgtccccacttgcctgcaccgtgcctgactcatccagtggggaaggtgactcaagaagttgtttaagcctaggcctaggcagtccacttcgggaggtgggggcactccacactggggggccctgcagctccagggctggtg

SEQ ID NO: 312911 - DNA, 992 bp, Homo Sapiens
  misc_feature (123)..(123): n is a, c, g, or t
  misc_feature (155)..(155): n is a, c, g, or t
  misc_feature (246)..(246): n is a, c, g, or t
  misc_feature (265)..(265): n is a, c, g, or t
  misc_feature (268)..(268): n is a, c, g, or t
  misc_feature (291)..(291): n is a, c, g, or t
  misc_feature (321)..(321): n is a, c, g, or t
  misc_feature (331)..(331): n is a, c, g, or t
tcacattgacatggtggtgccctccaccttccgcaggtcgcttgccatgcccacagccaccatgcagttgatgcagagtagctgcacgtgctccactgggaaactgtgccgctggttcatccngcttggctgcctgggccgcccgcttggtcaanggctgcctgctgcagatcccggatcttggccttggtactcggcctggtccatttatctcacagcagccactgcctgctccatcagcgtctncagcgcctcgttgaatcantcncgcttcagctcccggctaccttnagttgctacaaacgcgtatacactctggantcgcccggcnacgccctggcctggaccatggagatttcattggtcaagagcccataacgcaccaccacattgcaatgtgggatgtccagcccctccttcgccacactcgtggccaccagaaggttcagggttccatcttggaacttctggatcacttcttgctggtccctctgggtcatgtgggtgctctggctgctgttcccagccccaatcagtagctgggcccggatgtccacagtctgcaggccctgctgctgctggagccagagcaggagggagtgtgcgctttggcgggtgcgggtgaagatgataccccgagggctgttagagctactgaactgcctttgcaggatcttttccagcatctccagttttggattctctgggccatgagttgccaagtgggccagctcattcttgcggtcatcgaacagggccagcagccggcgctcggcacacaggatctgggttttagtgacgtgctccctgtgatagaaatcctgcagcgcagccaaggcatccacggcgcggacggtgtcatggatgagcagcgcgtcattgtagcgcctcaggtgaagcgcatacacccgttgctcctgaagcccagccaaagccgcagcctcactcagcttcaccacctgctgctcatacatttgcgtcccaaatttccg

SEQ ID NO: 312912 - DNA, 532 bp, Homo Sapiens
  misc_feature (30)..(30): n is a, c, g, or t
  misc_feature (42)..(42): n is a, c, g, or t
  misc_feature (49)..(49): n is a, c, g, or t
  misc_feature (72)..(72): n is a, c, g, or t
  misc_feature (90)..(90): n is a, c, g, or t
gggaaaaaagggttggggcggaatgccacnccctgaaggaanacggtgncccagggttccctggccccagtnagtcaattgctttcaccnagatctttcgacacagtaatacacagccgtgtcctcagctctcaggctgttcatttgcagatacagcgtgttcttggaattgtctctggagatggtgaatcggcccttcacggagtctgcatagtatttattgcttccatcatgtggtgtaactgccacccactccagccccttgcctggagcctggcggacccagtgcatgccatagtttttgaaggtgaatccagaggctgcacaggagagtctcagggaccccccaggctggaccacgcctcccccagactgcactagttgcgcctgacactggacacctcttaaaagagcaacgaggaaaacccagctcagcccgaactccatggtgagtcctctgtgttcagtgctgatcaccgaatggaaacaccgccgacttctggtgctgggctggtcttccagacccagagct

SEQ ID NO: 312913 - DNA, 677 bp, Homo Sapiens
  misc_feature (80)..(80): n is a, c, g, or t
tataatccactttataagtttttaaacaaatatacttatgcatagagaaaatctggaaaaatatatgccagctataaagnggttcttgctcatgggataaattgtgggagactttttccctttttgcttctctgtgttgtgatttcctaaagacagggcagtggtgtccctagactgctctggaactgcaggacctaacagcctcactgtgtttgctcacccaagtctgacaggtggcagggcagcgtctgaggcccactgggatgcagacccaggaaagctggggtggggggcttttggtccccatctctgcagcctcatcctctccccagctacacagacccagatggtcactgtcctggaccagatgaaggcaggcacctacaagctcacctttgacactgagggctactggaggaagagggggcaggaaaggtgggctgaatcaaccaggcgcaggaggaagccacagtgcccaggggaggcagggggatgggggaggaggcgggaggccccgggttcttgccctgtgggccgcgtgggcgcccaggagcatggtgggcgccggcctcacttggacaccagcacacggacaaactcctcgtagttcacctgtccgtctccgtccgtgtccgcggcccggatcatctcgtccacctcctcgtcactcagcttct

SEQ ID NO: 312914 - DNA, 626 bp, Homo Sapiens
tttccagcgacacctaggcccccaggagggcagcagcacggagcctccggacaacctactgaccacccacgtgctggacaccgcctcagggctcccagccagaggcctctgcctccgcttttccagcgacacctaggcccccaggagggcagcagcacggagcctccggacaacatactgaccacccacgtgctggacaccgcctcagggctcccagccagattcctctgcctccgcttgtgctggctggaggaccacggccattagtgggcggagctgaggacaagctacacagacccagatggtcactgtcctggtccagatgaaggcaggcacctacaagctcaccttcgacactgagggctactggaggaagagggggcaggaaagtttctacccacatgtggaggttgttttaaccatcaccagcaaggcccagaagttccacgtgcccctggtcctacatcacctaccgagggagttagagcgaagactggcagcgggagagcttctgtggagtgtccctctggttgttttaaccatcaccagcaaggcccagaagttccacgtgcccctggtcctacatcacctaccgagggagttagagcgaagactggcagcgggag

SEQ ID NO: 312915 - DNA, 946 bp, Homo Sapiens
  misc_feature (47)..(47): n is a, c, g, or t
  misc_feature (52)..(52): n is a, c, g, or t
cttacaaaccagaatttgagggaagctgccgtcaaggcccaaggtgnctttnattaattaaatactcgcatgtggcccttggaattccttagctgtaatgattaaaggacttgtaacccagctgcatttgtccttctctaaacatctctttctggaatacacccttctttgttaatggggattatataaccatcactattgcccctgctgatctggtagcacatctgaagctgatggccagctccaagatttggcatgcttttatagtaaatgtcctcattctcactcctcctggagggagagaggtcttcttccatgtcagggctgctctccggatagggagagtctctaagattgggcatgcttgtataaagagagtctctgttgggggactgtaggtgatcttcagcctctgctgtcagttgggagacatagctgtcagcttccctcggacttcactttcttctgggagttggtacagcaagggagtgagtccgctgaggaataagtggtgcctcgagttctttgtgatggagctccagccctgggttgtcgctgtgcattaaagatgaagcatctgccacaatagcatcatcttcactgctgctacctccaatcacaggtttgactggtagcgtgagctcgaggttgtgagtcttgctgctgccccgtaagttgttgtgcactaattctgaaatgatcattttctcaaaagcagtatcattcagacttagtccacagtccacaacttgcacgctgtcattatagtcacccttgtgcagcgagtagctgttgttaaaattaccatttagcggtagagtatccatggcacttgtatccctggcattgttcagtgaatgtccttgattaagtgttgaagtgctattgatgtcacctgagataaaagaagattctgattgttttgtacacagtatcattccacatt

SEQ ID NO: 312916 - DNA, 1200 bp, Homo Sapiens
  misc_feature (643)..(643): n is a, c, g, or t
cttgtgcatattacacatgactgattattgggtgtgcctggcaagactaaatgctgattcgttttcagcgtttgaattaaaagaattccatatacagcagatagataacagtaacaaatattgaactaaaatcgctggcaacattatatattaaggttccatcataaactcctcattattctctatgtattctgttacagcttctagcatgcttcactcgtgacaacctaatattatcaagcctcatattttcacagggattatatacttattagatgtttgtttctagaaattatactacatatgtgttactaggcatatttaaaataagttactggtaaatggagttgcattctatagtcacttaataaatattaacaaaatatttataactggaaccttaatgaaatgtatcatcaaatcaggtaaaagcaacttgtccgcagttaccaaagcctagatacgcgttagatgcgccttttccagcctgtgcgtctgctctggttcctctcaggcagcaaagctggggaaggaagctcaggcaggagcctccccgacgccacagcggcacaagcagcagctaaagcaccgcactttgctctgctaaccttttacttaaatgaggttttgccaaatccacatnctggaaccgcatcacacccatttgcaaggatgtttgttctttgatgaaactgcatctctactgcacatgagggctttcattgtaggacaagaggagagttcgtttatttttgtaactgttttacatgttccgattagttaatcggtagcttatgtcatttgctatgcctgttgtcttctaatctctccttactaaaacattacttcaaatttgaattgacccttgtttataatttatttaacgggatttgtgtgtcattgtagagcaactctaattcaagaatagtgacaactttaagcaccaaaagtagttcagcaatatttttcatgcttaatttatcataatggcttatgcacagtattcccttcaactccatatacacataaatacaataagtaattacattttatatgtaaacgtcattctttttaaacaaacaagaaaaagcaatgtaatggcatgcccaattttcactccacataaagtctcatatatcaccaaactggtttcctctagtgggttagatgttcatctctgagttccattgataccggccg

SEQ ID NO: 312917 - DNA, 1323 bp, Homo Sapiens
  misc_feature (15)..(15): n is a, c, g, or t
  misc_feature (402)..(517): n is a, c, g, or t
  misc_feature (779)..(789): n is a, c, g, or t
  misc_feature (1150)..(1150): n is a, c, g, or t
cccaccttttagganggggaattggcagaagcctgcatccaaaagtatgcctttgggggtatatatagtgaaacagagccctttctgaagagaattatatcaaacctaattacaacccaagaaataatagtatgaagcggatgctgtttggaggacaggaaaatttatcaggaaaattacataatccctctgattccactatccagagatagccattattattaatatttggtatgtacatccttatattatttttttcttatgcatgattttgtatatatggttatttttctttccataaaaatggtattaaactgtatatactgttttgtagcctacatatttcatatagaagtatattgttaacattttccatgtcaataaatattcttctatggcttnnnnnnnnnnnnnnnnnnnnnnnnnnnnnnnnnnnnnnnnnnnnnnnnnnnnnnnnnnnnnnnnnnnnnnnnnnnnnnnnnnnnnnnnnnnnnnnnnnnnnnnnnnnnnnnnnnnntaaccgggcggccaccatcgccccccaaaaaaagtcccaaaacctctccctttcggggcgcggcgcccccaaaaccgacgagagaacttctccttaccttcccctcctaaccggccgcccccggcacacacatctcacgtcgggttctctccttccacaaaaacaaaacccgcctcggcgggcccccccgacttcccctttccatccaactacctcaaatcggagcgtccccacggttatccctcactgcggggctctgttnnnnnnnnnnnggcgatgcctcagggcggcggcgatcgcaaatgcaaaaatttctccccaccgcccccccgtttgtaactcccttgttgcaaaaaacgcggggggggtgcgaagcaaatcgcggtaaaaaatagctgattgtcgcgggggtaactggtgcacaccaccccatggtccccgccgggagggcatccatgcaagaagccacccccccgactttgtccgccccggcgcacgcgactgtcaggagagcggaccttcccgcccctctgcttgacgagagagatatacatcttcttgccgcccgcgtgagaccaacaacaaccgcgcgagccccaaacaacaacgagtgccgtttcccttcgtattggntgcatccgccgctatttagaatctatcacgacctagcgggcgcgacgatcccccctcgccaaattaggtgcgcgtcgcgtacgatattaccaaccatagacccttattgtctccccgattatagcccgcctcctctttatcgcggataacaagagtgcgcacattgcgccctc

SEQ ID NO: 312918 - DNA, 1173 bp, Homo Sapiens
  misc_feature (1025)..(1025): n is a, c, g, or t
  misc_feature (1035)..(1035): n is a, c, g, or t
  misc_feature (1108)..(1108): n is a, c, g, or t
  misc_feature (1115)..(1115): n is a, c, g, or t
  misc_feature (1120)..(1120): n is a, c, g, or t
  misc_feature (1127)..(1127): n is a, c, g, or t
  misc_feature (1139)..(1139): n is a, c, g, or t
gttcatatcgtcgacccacgcgtccggaatgaagccaagaagcaggaggctgcatcatggactataagccgagatatcgaggagatcatgaaggacattcgcaatctggaggacatcaggaagaccttaccatctggctgcttcaacaccccgtccattgaaaagccctagtgtctttagggctggaaggcagcatccctctgacaggggggcagttgtgaggccacagagtgccttgacacaaagattacatttttcagacccccactcctctgctgctgtccatgactgtccttttgaaccaggaaaagtcacagagtttaaagagaagcaaattaaacatcctgaatcgggaacaaagggttttatctaataaagtgtctcttccattcacgttgctaccttacccacactttcccttctgattgcgtgaggacgtggcatcctacgttactgtacagtggcataagcacatcgtgtgagcccatgtatgctggggtagagcaagtagccctcccctgtctcatcgataccagcagaacctcctcagtctcagtactcttgtttctatgaaggaaaagtttggctactaacagtagcattgtgatggccagtatatccagtccatggataaagaaaatgcatctgcatctcctgcccctcttccttctaagcaaaaggaaataaacatcctgtgccaaaggtattggtcatttagaatgtcggtagccatccatcagtgcttttagctattatgagtgtaggacactgagccatccgtgggtcaggatgcaattatttataaaagtccccaggtgaacatggctgaagatttttctagtatattaataattgactaggaaggtgaactttttttcagatctttggggcagctgataatttaaatctgggatgggcagcttgcactcaccaatagaccaaaagacatctttttgatattcttattaatgggacttacacaggaggaataggggtaaccacttaaagtttgttttcaaatcaanctaattcttncagcttttttattagttagtcttgggactagtgttaagtatctggccgagaccgttaatccctaaggtcttgncaaaccngaggnaaccagnctcctcgtcctngcttttctagcaagggttaacttggtggcagctt

SEQ ID NO: 312919 - DNA, 919 bp, Homo Sapiens
  misc_feature (138)..(160): n is a, c, g, or t
  misc_feature (458)..(705): n is a, c, g, or t
  misc_feature (724)..(764): n is a, c, g, or t
tgaccaaggtttttctcttttgttaattaactgttaagaatgaatagaaataagtgctatacaacaaatagaaatagtgttagactatgaggaaaaaaatacattaatgcaactactatgatagctctttgaagatannnnnnnnnnnnnnnnnnnnnnnacacacacatataaaataagagttatgttcagaaaatcaaccagacataagttttgtgtgcatttttttcataagtaattgctacctatggaactctatgagactaagaggattgtaactagtgaaaggaaaagaaagagaaacagctgaaaaccttgtgtcaacatgtattcctaggttattttgagggtcctagcccagagttcaaaattgcttaaggtctactgttttatcttaaattaatgtgggttttacatcccacactgcaaaatgtttttgtttgtttgtttcagatagnnnnnnnnnnnnnnnnnnnnnnnnnnnnnnnnnnnnnnnnnnnnnnnnnnnnnnnnnnnnnnnnnnnnnnnnnnnnnnnnnnnnnnnnnnnnnnnnnnnnnnnnnnnnnnnnnnnnnnnnnnnnnnnnnnnnnnnnnnnnnnnnnnnnnnnnnnnnnnnnnnnnnnnnnnnnnnnnnnnnnnnnnnnnnnnnnnnnnnnnnnnnnnnnnnnnnnnnnnnnnnnnnnnnnnnnnnnnnnnnnnnnnnnngagccactgtatccggtcnnnnnnnnnnnnnnnnnnnnnnnnnnnnnnnnnnnnnnnnnagtcaagatctccctatgttgcccatgctggcctcaaacacttgggctcaagcgatcctcccaggtagctaggaatacaggcatgtgctgctgcgccctacttgaatgcattttaaatgaccgtaaaatcgttcaccaattttctacctgtctta

SEQ ID NO: 312920 - DNA, 1137 bp, Homo Sapiens
aggtcccgagtccaacacagttttattgtgccgggggcaacgagttactccgggggggccccaaaatcttctctccaattgaattatatgcaattctctaagatatgtgtctgattggaagtagcttctgattagtggttcagattgaagatcatctgtctgcagtaacagtaagctctaagtctggtttacaggcagtgagcgaaggacgacaatacatgcgaaacatactgtcagcgcaggccaggccgagcaagccagggttaaatgtagggcattaacagcctttagaaacgccaggtgactatagagggattcgatacttcatcctatttccaaagtgatgatggagcagtgcaggggtccttctccggccagcccagcctcttcgcaccctcagaagcacctctgggaaaagccaggccccagtctgctccccactggtgttctcagatccactgatgggcccagcctcagcttcctccagcaaccccagctccagtcctgatgacgacagcagcaaggactctggcttcaccattgtgagtcccctggacatctgaccacagtgcccagtcctgccccacagggatctagccacccttcagtggccccaaggccagactgaggctcatccagtggagaaccttcttaaaccactgcttccttcccggcatgcatttggcattggtccagccctttgaaaccccttagagagaagcatatatggccacaaagcacagaggcttaggtttgccacatgcagacagggctttctgggcccttacctaatccccacccgactcttgctctgagttagagctgagttacgtacccagtatcacactcacagttagaaaagaccgaatcacaaatttagaatcacttttcctctgtccccttctccccagctaagaatgtgtggcacctccatcagttatacttagaaggagcagaaatagttattttcgtatcttctatccctcaaagcatcagacatgggaaaattggtttataccaagaaagcttcctctgtggaaatctgtctcagcctactttattcctgcattgggaagccatatcgcagagctaaatgcaatagaatgaaccagaactagtggattccagggctggggg

SEQ ID NO: 312921 - DNA, 659 bp, Homo Sapiens
  misc_feature (17)..(17): n is a, c, g, or t
  misc_feature (136)..(136): n is a, c, g, or t
gtgcccccaccaatttnaaacacattcaaatttggagtgttagttctgccctttgttatgaggcttttcatcctatggtgaacatcctgttcttggactctgaatactgtaaagaaagcagatgccttcacttcancaattgcatacctaaatgaagatttagtacatttcattatggtaatcctcagcccagcctccaccctgcgtagctactggatttataaattacagtccagtacagtggcagttggagtcccaaattactaaaagccagagccaggaaatcttcttggattgtgccagtctcagagtttgctcttgattctgattttctatgctggtatatggaaatcatcttggacaggtctccagggataccagggaaagagcatgggtaagagtggctaagctcacccacttggatatctaagtgcacgttagtttgcatttccaaatccgcttctaatttggatagtacattttacaaagcttattagaaaactggtctaaaagaacacgtttgaaagagcattaaaaagcataaagaggaggccttctaaccccaatagcaacattttgaggtttgacacagcaagagatttttctttctttcaaagaacattacttctttctttcaaaggacagccagctctcaagag

SEQ ID NO: 312922 - DNA, 739 bp, Homo Sapiens
cggttattagctatctgggcctcaatgtctttgtccactgatggaccagtttataccatcgtctccttcagtaacagagttttcacatcccacaaggttgagaaggatatcatcatctttatcatctacttcacatcccagtagcatccagctttccacattatcaccttctgaaatggtgctctcttcctcttcacttgaactgacctctataatcatgacctctcggattacacctgatctctcttcagatttaggcttctcaatatcactcttgcatttcttatcaaccagctcattagattgaagagaagaagaaagaccatgggcattttcttgtgcttgaactctaacattctttcctttacatctataaatactgtcttcatcagacaaagtgatgacctctgacccatctgacagctggatgacctcactatctgaaaggacgattagcttcttctgatttggtttactactcgaagattccgaattcccagagttcttttcttcatgctcttcctccctgatgacatcatcaagatcttgggcataatgaatttggctatagagttgaaattccacctcactatcaacactcagttcactagatgactcatctcgataaagatcatcttcgtatgcttctatagtctcatagccaccaaacatcataaaaagtcagtaaccttgaagtgccgcagctgcgaacaggaagcaccaaccgggaaccaaaacc

SEQ ID NO: 312923 - DNA, 886 bp, Homo Sapiens
  misc_feature (475)..(483): n is a, c, g, or t
gttccccttctacataaaaacctcagtcaccactcctgagtggagatgggcagaggctctggcccctgctcctctggcttctcagcagctgctttcttattgctgcagcaaggcttgaagagatgtgtgtcaatgaggacttccccaaaacggcctttatagatgatcccacaacatatcttctgtcttttccagtaagtgagatctaaaaaggaaaaaactggtgttctgttagaaccagaagccatctctgtatctgagccgtcatctgactggttactgtaacaaggagattgagctggggaggcacttgaggtggtactgtgagcatcagaattatgacgtttaaattccttctgcagtttactgatctggttgctttttatcctgttcccagatagagttttcactttctttggtttcaatgtagtctttagactgggtccagcccttgcatctaccacatgattccagnnnnnnnnngatcctgctggcaacttcttccatcttttcacaagcaggacacaggcattgcagatgtctcctgaacgagtctcatgcaatccaaaacagctctggaagtccttttcatagcgtttactgtcagtgaatcgagaactggaggacttagctctgcaaatacagcagccctctatacttcggtacatctttggcttgtgaaaaccaaacatcttttcttctgggcaatagtcttccaaaagcagccgttccacgcgcaataatgtccccgaggtgcggagtgcacgccaggccagtccccctcaagcgctccctcctcctcaactgccttgtctagaaagatagtctcctgcagttctgcagttgctaccgctggccgggaaggtgtagattccgctttcccccc

SEQ ID NO: 312924 - DNA, 454 bp, Homo Sapiens
atgcagccactcactcgactttttttcagctgtgaccattcctgggagctctttgagcctttctgtctcatttggaaccagggggaaccaggaagagggctcctggcctctctgtgtcctctgcagtgggggttgtggggggcgcagcatccacgccttgctgcccttctttcatgaagtctgttttttaagtgctggttcccccgaatattttatgcagaggagggaaaatttatagtggcaattattttctcacagtctggtgagcaggcaattaattaggagtaagggggcctagtagagcgtggcgtgtggcagaatcgcaccgccccggctccccagcccaccgccatgcagggctcgcgtgcgggaaaactaatatgccggcgtttaagcctgtgcccctctgctgggtgtaactgctctgaaataaatgatctgacattgtggaaaa

SEQ ID NO: 312925 - DNA, 712 bp, Homo Sapiens
  misc_feature (104)..(112): n is a, c, g, or t
gcttggctacccggagtgaagcggccgggttgggcgattaacaggccgtggttaggaaggacggagaaggggcgttcgctcctttgggacttttcatgcctcgnnnnnnnnncagatgtggcttggtctgggcgcaaggtcccagcagccagcttaagcttactcttctgtgaaaggggaaagtatcccctgtggaaagcggttaaacttgtggagggggtgcgggacgtgagttcttccccatgccaggcgaatggtgtggccttgagctggtccaggagccggctcgacgtgtctgagggaggccccggagggggcggggaggtggcccacagaacgcgggttctgtaaagagacgttgggaagattcgattccgagaagaggaagaaccggattgaaagagagccaggccgctgagggggagggggctgctaagatggcgtcggcctcctccgggccgtcgtcttcggtcggtttttcatcctttgatcccgcggtcccttcctgtaccttgtcctcagcatctggaatcaagagacccatggcatctgaggtgccttatgcctctggcatgcccatcaagaaaataggccatagaagtgttgattcctcaggagagacaacatataaaaagacaacctcatcagccttgaaaggtgccatccagttaggcattacccacactgtggggagcctgagtaccaaaccaga

SEQ ID NO: 312926 - DNA, 1722 bp, Homo Sapiens
  misc_feature (47)..(47): n is a, c, g, or t
  misc_feature (58)..(58): n is a, c, g, or t
gcaggcaaaataaaaagggagagagaataaaataaattaaaaaattncaaaatttccncaaacacagcagtcttccatttaggtgaagtataataattttcagagggtcaaaaaatagttgtaaagaatacagggaaaaaacagccagtcagggtttttattgttgttgctgtttatttttaaaatcacacattgaatacacacaacaatcagatttcttcaccaaacccccaattttttagcaactggctctattcagcaccaaaaactccagtctgtgggaagtgcacagacacagacttcacttctgtgtcttggtcgagcaatccatcaggtcattggttaggttcaggacttgccctcttttccttccctcttcatggctctccagacccaaggttctcaaggcttcagatttatggcccacagcccctattaccacctaaatccagcagccatttgggaagaattcaaaataatttgagatgaatgaaatgacaggacctgtattacagatgggtattctccattccaagtaaactgtttcttaatgagttctgagactctggtcttggatgccatgatcatactgggtaattatttctagtctgagactttgtgactttgtcagatgcctcaaaaaacaaaggtgatcagtattctggaaacacttccggacaagttgggaaatcaaatggcaactgagaagctgtggaatgcagactaacgagatctaacacagaaaccaccaaaatgatgagagctcagcagaggcagttttaaaacttgcagagagccaccacagatggtacctgagggtgtggaatttttgatgaaaagagcctgaagtgaggactagtcatctttctatgcataatagcatggtgacacaagaagatcggtgagaacaagcagttggtcatcagtgaattgctgtttatgttcctgccagttgtcatggtgagtccttcggaaattggataaggttttttttacagtcatctcaataggctgaggatcatttagatgtgcactgagattcatgaggagctggggcatccaggtgggaacatcgtaaggactagaaagaacacatgcaccaagtcctagcaccccagcatggcgtttgaccaactctgcagaaggaatggtatctcctacagaaccagggtctcgctttcttttcttaggtagttttgttttgcaaagttgctcaaaatgaatctgcataggactgtccatggtaagaaagttacactgtagcagaccgcttaaggtagtagcagccatttctcgaacctccagttgttcgtcctccaaaagacttataaccagccacctgatatctttaactgcatcttcattgtttaggaaaataaagaggttataaaataccatggtctggaggtaggtcagtactgtgtatcgtgcatgccaagaactgcttcttgctgtttgttttagcacctgaagtaccaaaggcacttgatgagggtaaagcaacccctgagacattaatgataaacataactttgcatctcttttcagttcatcgtagctattgtcattttccactggggcaatcttgaaaaacaaaggtagaagctgaagttgttctgtaactgctgtagaaaaggatcttcctgcacttgccatcagccatttcaatatggttttcaagagtttaatgccctgagttcgctcatcttcttcaccaattcc

SEQ ID NO: 312927 - DNA, 430 bp, Homo Sapiens
gtttatttttaaaatcacacattgaatacacacaacaatcagatttcttcaccaaacccccaattttttagcaactggctctattcagcaccaaaaactccagtctgtgggaagtgcacagacacagacttcacttctgtgtcttgggtcgagcaatccatcaggtcattgggttagggttcaggacttgccctcttttccttccctcttcatgggctctccagacccaaggttctcaagggcttcagatttatgggcccacagcccctattacccaccctaaatccaggcagccatttggggggaggaatttcaaaataatttgaggatggaatggaaatgacagggaccctggtatttacaggatggggggtatttctcccatttcccagggtaaactgttttctttaatgaggttcttgagggctct

SEQ ID NO: 312928 - DNA, 424 bp, Homo Sapiens
  misc_feature (355)..(355): n is a, c, g, or t
aaaatgacaatagctacgatgaacctgaaaagagatgcaaagttatgtttatcattaatgtctcaggggttgctttaccctcatcaagtgcctttggtacttcaggtgctaaaacaaacagcaagaagcagttcttggcatgcacgatacacagtactgacctacctccagaccatggtattttataacctctttattttcctaaacaatgaaggatgcagttaaagatatcaggtgggctgggttattaagtcttttgggagggacggaacaactgggagggtaaaattttaagtttttaggaaaacgggaaatttcagtccaattttaaaaggaaaccctccatgggttcccnttttttaataaggtattttgcgggccggggtgccatttgttttatatttttattaaaccctccaactct

SEQ ID NO: 312929 - DNA, 1046 bp, Homo Sapiens
  misc_feature (979)..(979): n is a, c, g, or t
tacctttggcaaggggtatgatcatttcttggcctgcaagcacaatcatgccaaccattaatgtggacaatgtggaaaaaaccctaaaaatccctgcaaagcccctgtcaagacatccaaatgccgcttgctaacagtttttgaggtacctatttgggagagccaagtggaactcttgaagcaaaataagtgtttcccagccttcacatcctaacactgtcaatgaactctcttaagttgagtgaagtggaagcgtgctgagttactgaagtgccaggtctttaatccaatcagctcacaacctctttcctgacttttgcaatatagattgtcaataaaggttagctgtcccttgaatgctcatggcaaagaaggtaccagctggccctggctaagcacacagcatgattaaccatttctgagcaccaatcctaatgtcctttaagaatcacccccctaatataagccctggcaggaaatcagctgcttcttgatcccaacttttttatgaaagttagaatggtaatagaatttgaattttcagtaggaatcagttctcttcctttccacactttttcttccctgacttcctttggatacaaacatctttaattgagccagacagggaatctgaaaaggaaggttttccatcggagcccattctcagttccttggcattctagggtcagacctctggttagccctaaagcccttctcctcaagctagaaacataaaaatactttttctgattttgtagttttttggggtcctagaattttaaagtgctgacacttcctctggctggctttcctgtaacctattattaattgttattattagaagtttgcccaatgatttagattcaaacattaaatttaattctagttaattctcttcccctagatatgacaccaagagatattctcttagtaaaataatactatgtgcgttaaacttctctaagagaggacgaatgtnattctgcggaggagatgcatgtcaggtggtctcttgaataatgtgtatgtcctgcatctctcaccac

SEQ ID NO: 312930 - DNA, 491 bp, Homo Sapiens
cccttttttcttctttttgtctttctccccactacagtaaactttttatgagggtaaaagctgttctgtcttgttcaacactgtgcactgagagcctagaacagtacctttgcatagcgtaggtgctcagtaaatatttgtcgaacgaattaatgaaggactgagaaaattaagatccagtgaggcaaaaaagcggccagataaaaagtacatgcatgagtgaacataaagaggatgggattagagaagttctgtaggcgaagtcctaaaatgattaaatgctgaggaaacatgccaaaaaagcttcttagggcagctatcactgataggtatggtttagtgtgaatcctaataaacagtcgaatggattcaggactggacataaaatgataaaagggaccagaaaaagagaaccaagttttttgcacatagcatttattatcattaggagtgtaaacatcatgataaattattgtaaatgataatagcac

SEQ ID NO: 312931 - DNA, 2418 bp, Homo Sapiens
  misc_feature (902)..(917): n is a, c, g, or t
  misc_feature (1692)..(1692): n is a, c, g, or t
  misc_feature (1695)..(1695): n is a, c, g, or t
  misc_feature (1697)..(1697): n is a, c, g, or t
  misc_feature (1699)..(1699): n is a, c, g, or t
  misc_feature (2325)..(2325): n is a, c, g, or t
ttttttttaaagaaaaccttttgcttcatgcccgtaattaacataaagtaagtaaattctttgtctttttatttaggaaaataatcatgctaaaagcaagttgtactttatatagattttcaaacaaaagattgattgtgctttttgaataaaaaagatagggtatcttccaacctcactgacttaaaccttgtggaatacagcacttctaaactaaaaacacacgtcaaaaagaaaaattaaataatcccagtgggatgctcaaaaatcgtctttagaaggttttaggattggctaattctgctattatcttattggctgcggcaaaaaaagaacacagagctgctgtctaaaatttctccaaactcccctccgagttcagcaggcaacactcagatttgaaagaaactctgcagcaacctggacatatggttagctgagtcgacatttgattagcaggcattttaaactgatttcctcttaacatacgcaggagagaaaacattttcttcctgcagggcatgttctactacatcatatttctgaatcccttcttcctattcggtcactctctgaaaaaagctggtttgtttttcccatgtagaatcactctgggtacaagaacctttatttgttccaattattatttgttttaaatttagaacctgtgttgggtctaaaatacccatttcccactcccacaagcagatgatgaccaggctgctgccaagagcagcagaaaaagggaaaaccaaaccagaacatgaaggcaagtacccagggctttgcagtcaccacgtgggtcgtcttctcaagtctaatggtccatgagcggcttgtccaaggaggcggccgctctttggtaggtgaagatgaaatctgcaacctttctaagcacaatnnnnnnnnnnnnnnnncaaaaaaataacccccccagaaacacaaccctcatatttaaagctcttaagttcagggtagcggtctcaaactgccaaacactaggatgaggatgtgactctgcatgtgttttggatgagaggaagcatcgtcccagtcacttttctcctcctgtgctgtcctttcaaaaacaggtctggatttcacgctctaccccaagaaaaagaactggttcagaaaacacttccccaagtttctccaacagaacactgtggctgcagggcctggtagtgtgaagggcagcaactgacatataaaaatgtacttaaaatcagagtcaaaaaaatggttttaagttttaatactcttaattagctccctgctttatactgtaactccacagaagacatagggccacctaggattcacaggaaggagcagctctgattcttacatggctggctccgatgcccccacagcaggcctcttcctccccaactttttcctctccatttcaaaaaagcactattttatcttcacatccaagagctggttggtttggtttgtttctttggaaaccaataaaagaagcaattttttcctgttctttttactcacatctacctatcagagcggctatttccttcgacagttcagtagcacacaggctgacttggccacatggactcatgaatgcatgcattcagaccgcatattgctaccaaatggaatgtgggaatatgctatgcacctcaggttgagaaatgaccaagaaatcaagatctaaagggtganatntnanatatatatatcaatgctattattcataaaaaccttgtttagtaataaaaaaaattgctttgtttaaatatgaatattatagtctgcttctcatggttaggaaataatagtctttctgaaaagcaggtgctttttctactacaactccatatcctgggcctcatcttcggaaaagtcagacatagagctctccgatgagctgtcctcggtaccctcttcctgttctttcagcgcctcctccgtggcgtatttctggatgtactctttaattttctgcttgtattcttctggtcggtggaggtacatggctgcagcgtcaccattgagaggatctatggggttaggataggccaataactgaggcaggaaggactcaaatatattggtaagatcatagagagctgtccaagtttgattaattacatctagacacacagttcctgacgcttcatcaatgttgggatggaaaattttattcatgaatcctatagatggagatttgaaagggtatttatcaggtaggtccactctaactttccatactccgccttcatatggtgttccttgtggtccataaaacttcactacaaattcattaagtcctcccaggatcgtaacctcatgttnactctcgatgagcttgaccacgtccgtgtccatccgcctcttgcccggactgggagatgacatggtgtcgccgccgcctctctcccatcccgg

SEQ ID NO: 312932 - DNA, 754 bp, Homo Sapiens
  misc_feature (437)..(437): n is a, c, g, or t
agattttgagaattaaatattactgaagatttcgacttccactgttaaatgtacaagatacatgaaatattaaagaaaatgtgtaactttttgtgtaaatacatcttgtcttgttttcattcaaaaacatttcacttttggggttgcgtgtcagatttggcagtataaattctggctatattttttgttgttagatttatttggctgttaagtattgcgatatgactaaacatactgtatacctgatgatcatctgtaaagttagagtatatctttttgctttctttggagttagtgttattccaggatattttacttaatctaaaagttaatttatgttgctcatatattactcaagtatttaaatttagagagaatgccgctctgtttaaagcaatgtgtaaagatgagtttttttaagcatggaatttagggtntggggtacaatttgtttctattaagcaagtaccagtttaccaatacatgagtaactgaagtgtaactgttaaatgcttgtatactagtttttctttctgattgtcagtgatttataagctataaatgaccaaggtcctcagactgcttttagcatctgcaacttaaaaatttgggagtttgataaagaacaaatgctaaatagagtaacaggttaattgtttgtgtacactcttcccaaatgccaagagtgccgcggtggggtgagaatcactaagcccaactttggcaacagtggtggattccaggcttatgtctt

SEQ ID NO: 312933 - DNA, 1443 bp, Homo Sapiens
  misc_feature (698)..(862): n is a, c, g, or t
taaagataagtaaatgcatccagaaatgtatgcacagatttaagttttccccatagttttatctgctaggtgataggttggagcttcttagtgcttctgctgggaattcagataggacagacttgcagcctcagaggacacactgcaggtagtgcagagagacatggaaggaaaacacactgcctgctacatagtttttatcccaggtataatttgtgaggaatgtataacaaatgtttcttaaagcatgaatcctcttcttgaattcttgtttttatgaaagccatccaactacttactcaatcctcttgaaatctgccttttgtaatgtaactgataggccagcgttttctttcactgtgggaaataaaggctacttggttgctttagggagggcaacaatgtcagctgcataagcagcaagaatattatattttattactagtccacccttaataaagagagaaaccttaggaaatggaaagaggtgtctgttttatatttcctttgcttttcaaccattgtttagacactctcccttctagtgcttggagaaccttcatggaaactctgttcaggttcttgactctcagcgacagatgtggaggtctttgtgtcttagctctctaggcctgagaatcacatacacctgcagaatttgcctccaagtccatgtccttgtggctaatccctaggcnnnnnnnnnnnnnnnnnnnnnnnnnnnnnnnnnnnnnnnnnnnnnnnnnnnnnnnnnnnnnnnnnnnnnnnnnnnnnnnnnnnnnnnnnnnnnnnnnnnnnnnnnnnnnnnnnnnnnnnnnnnnnnnnnnnnnnnnnnnnnnnnnnnnnnnnnnnnnnnnnnnnnataacttctctagggtggctgggcccaggcttggtaagactgttggtgaactaaccaaagtgtgctgaacattattaggctctccagacatgtctagtttatattggtaaatgcatatcaattgtaaatataaaaataaaatttgcattgaagtcacattatatatataaaccaacaaagtgctatgttattgcttttcttacatgtacagggttacactggcagatgatgagagtatggcatgcaactggatttttctagtagtaacaacagtgagccctttccattaacactgccccaacagaacctgcctcagaccaagctaaatgtgctttccatcatcttttaaaatttcctaaatataaaaacgatgcttctcttcttcaccatgacaatgacctagcttagctccccaatgaggttgtgcctttttataagagagagaaagggctttcctcttgcctcaacttaacccctttaaacaaagatttcagtttcaaattttgattctattgcagtctctctaaagtaaactgtgtttgttttagtagaaaaatgagtttctaaaaatatattgtacc

SEQ ID NO: 312934 - DNA, 555 bp, Homo Sapiens
  misc_feature (120)..(120): n is a, c, g, or t
  misc_feature (122)..(122): n is a, c, g, or t
  misc_feature (125)..(125): n is a, c, g, or t
  misc_feature (128)..(128): n is a, c, g, or t
  misc_feature (459)..(459): n is a, c, g, or t
  misc_feature (520)..(520): n is a, c, g, or t
  misc_feature (538)..(538): n is a, c, g, or t
ttacaattgaaacaggtctttatttacacggaagcagagagacagagggatgagggcaggcaccccaaaagtgacttcacattcaccaatgtttcagtggcttctaagaccacagcagangnatnccntgggactcacagggtatgaaaatgtgttaccctcccaaagccctcaaaacaaaagggttggattaaaaacaaatacccaagtgtttctggcatcagttgaaaaagatctgagaaagaggaactattgaatgtccagaaaaatcaaagttctgggaggctaggaaatctgacatttctctgatagagagatcactgggtcatcagttcattttggggaaattctttacagttaaggtgatgtgtttcctttcattggtaaatttaacagggagaggcatcattatggggatacatgcagggctcgtgccgaattcttgggcctcgagggccnaaatttccctataggtgagtcgtatttaaattcggtaatcctgtccataggctgttttccngtggtggaattggttatnccgcttcacaatttcct

SEQ ID NO: 312935 - DNA, 481 bp, Homo Sapiens
  misc_feature (20)..(20): n is a, c, g, or t
  misc_feature (34)..(34): n is a, c, g, or t
  misc_feature (39)..(39): n is a, c, g, or t
  misc_feature (44)..(44): n is a, c, g, or t
  misc_feature (56)..(56): n is a, c, g, or t
  misc_feature (255)..(255): n is a, c, g, or t
acaaagttttaacccccccngtaaaaatggtganggaangtaanaaacaaaagttnccctaaaagccaggaaacccctcctccctggaaatccctggttttttaatgaaaaagcccaccccaaactacctaactccaatccctcctgaaaaatctgcccttttgtaaatgtaaactgaaaaggcccagcgttttcctttccactgtggggaaaataaaggcctacttggttgcttttagggagggcaacaatgtncaagcgcataagcagcaagaatattaatattttaattactagtcccacccttaataaagagagaaaccttaggaaatggaaagaggtgtctgttttatatttcctttgcttttcaaccattgtttagacactctcccttctagtgcttggagaaccttcatggaaactctgttcaggttcttgactctcagcgacagatgtggaggtctttgtgtcttagctctct

SEQ ID NO: 312936 - DNA, 557 bp, Homo Sapiens
  misc_feature (452)..(452): n is a, c, g, or t
caagggatcaacctgtttaattgttcatatttttattcctgtatcagtagattaagaaagtaaaattttcccaagcactgatttatagatcatgtttataagcagcatacaaaaagttaagtttcataaacaataacattcagtgatctacttaaatccaattgtaatccttactttaaactaagggcaataataatttaatacatagagtaaatacacacaaaacctgtgtattcagaactacaaacatggtttccatagccacgtatggttttagtcaaggacacatttccacaatgaacaagtacttacaaatatgttaataaaacactaacccaaatgcttaccctgccatcagctttttaaacaatgccattcccgctactgaaagcatttatttttagaagcttgaatctgctctgggaaaacgggttctcctaaaacttaacagngatgttataaatccgaaaagattttaaatcaaaaagccttccaacacagcattattcatgtgaaacttgctttcttttcgtttttttgagacggagtgctcgctc

SEQ ID NO: 312937 - DNA, 1863 bp, Homo Sapiens
gcgaaaaccatttttattatcattaccacccagcttatctgtgctggattatgtaccaaatggccagatcttctaaagaacatctacataacatttctttcatgtttcaagagatgaaaataactgtacaaggttaagtacaaaagtacacaagacagcggacacgaaaaaatccatgtatgagattttatccccacctgcagcttttatatatttgaaaagtagaattcatgaactaaaaaatattatccttctatagtcctgtcaagtttaatggaagtgggtttaacctgattacaacactaacaccagtatcactgatctgatatttacaaaaatttgtatttttcaataaattaaagtcaatgcaacacccatgcaagctagagtgctagctgtttggtgaacaaggacgtgacatcagaacaagaagtctataagtcccaaactttacaagtgtgatcattttcaaactgcatccattcctcgcattgaagatgtgaaacccaaacccattcctctttgtgtgtgggtttgtgatcttgccatttcatactgagcatctaaatttcgaaatacttcttcctgctgcttcagagtcttgtaactttcttcatcaactgagctacatccagcttcatcttcactcttaatacccatcaatttcctaaatttgacattttggtccttgtttccaaaattcaatttttcccatatttcagcagattgggatttgtccccttctttcttgccctgccaaagcattttcctttttttctcttgttcagcaaatttcattggattaacagcggctgggttatagtagctaggaacagctattcctgtctctgccaaagctttagcttgcagggctgccatctgagctgccatggctatctgaggtgttacttgtgttcctgatgccaacagggcagcaacattgagaacagaacctccagtagctgcagctgctgctaatttcttgttgtttttgtttttcaaccatttccttttctcgctgttcttgtaatttctttgccctttccaaccttctagctaaagcttcctgtgcatccattgctgtgtttctgcctctgaaggggggtggacttggagtccggcttaaacttctgctaaatcttctcggcttttcaattctcttctttctatctcgactcctactccttgtcctactcctgcttctagtcctatgcctgtgtcttgatcttgagcgggaacgagacctgatccgccgttttctttccctgcttctggatctcgatttcttcctctctctgcttctggatctcgatttcttccgctccctactcctggatcgagacttcttccgctccctgcttctactacgatggcgtctttcacgagacctagatcttgagtgacttctgcctcttgatgactttctttctttgcgtttgtgcctgtcctcaccattttcagatgaatttagtcgctctcttcctttatcagaagaatgttctttgtcattatgttcctcagacttatgtttcttagaggatttatctttggattcatgtcttcttccctctttgcttctgctccggctcctgtgttttcttccttcattatctgactttcgttttctttctcttgaccttgatcgtgatcttgaataatgatgttttgaagctctaggagaaacagatacttctgactgctcttttttcttatctctatctggtgatgtcttttctggggctagtccatctcgctctgtatcactagccgccatagttcagagtcccggccgctagagcggcgcctccacttgtcgctttcaacagtaccggccgctccgaagcttcgcctcagactaaatcc

SEQ ID NO: 312938 - DNA, 731 bp, Homo Sapiens
  misc_feature (669)..(669): n is a, c, g, or t
  misc_feature (671)..(671): n is a, c, g, or t
agggacatgatttcataatttttatggctgcatagtattcaatggtatatatgtaccacattttctttatccagtctactgttggtaggcatctaggttgattccatgtctttgctattgtgaatagtgctggagtgaacatacatgtgcctgtgtctttgtggtagaatgatttattttcctttgggtatatacccagtaatgggattgctgggtcgaatggtagttctgttttaagttctctgagaaatcaactgctctccaccacagctggacccatttacattcccactaacagtgtataagtattcccttttctccacagcctcaccagcatgtgttacattttgacgttttagtagttgacattctggctgttgtgagatggtatcttgttgtggttttgatttgcatttctctaatgatgaatgatgttgagattgtttcatgtttgttggctgcctgtatgtcttcttttgagaagtgtccgttcatgtcctttgcccatttttaaatggggttgttttttgcttgttgatttaagttcgatatagagtctggatattagacctctgttggatacatagtttaagaatattttctcccattctgtaggtaggtagttaaatctgttgatagtttcttttgctgtgcaaagctctttagttnantaggtcccaatcatcaatttttggttgtgttgcagttgcttttgaggacttagccataaa

SEQ ID NO: 312939 - DNA, 1625 bp, Homo Sapiens
  misc_feature (1585)..(1585): n is a, c, g, or t
  misc_feature (1610)..(1610): n is a, c, g, or t
ctttaaataatcgtaattatattaaaccagatgtgaagtctccccacgagtagtcggccccactgtaaattgggactaacgacccgttttaaggttttagcgtttaagcccgtgtaccgtgctttaaatctgggaaagaggggtaccggttgttactaaggaagaggatgtgtgccaaccgtccaatatagaggtaatgggcttagattggtaatagaggatctaacttttaaccccggctattcacgtcttgatagtgtagccttccaatttggaaaaatattgtattcagaacctgaaatacattataaaactggaaatgaatcttttaggtgaattctttctttcaaaccctcataaatcagaaaaaataagccaaatttgaaggcaaaagatctttacatttagggatagtttctaatgaaagaaatcaagataagaaaaatcaattaaaacaatgtggtttaagaaattatcctcctaatgtagggggtgggaaacagatattacattttaaaatttaatgaagacctaaaaaatgataaatgcagttttaaaatatttgttgtcatcattaagaaaacattaggcatgttgccaacacacacacaaacatcactccactcacagtaggaaatgactgaaaaacagcagagttgaactgcagcaggagactgcagattcctttcagctttctgtctaaagttccagaatactttcagctctacagatgctcatgaagaaggggagctaaatgttttcaaggcacttttaaatgaggcattctaggtaaaaggaagaaaaggagaccctaatgtttccctaccaaaaaatatatccatgagctaaatctcaactttttaaaaggctaaaatatcttgaatattcattagagttatttgaaagagcagaaaaggtattaagaccttaatttataacagttgatcataatattacaaatgatcttttaactaactactattcagatcatgaataatacaaaatgtgtccaagagcattatctatttttatatactaaaatatgtagacgtataaagaggtattcctaaaaagttgcttgtagttcaaatatgcactagagcaattagtaattttgtaaaattgagtctgtaatataaatatttatgttttagattcatgctttaagattgagattttattactatgaagggcacatagtatctttattgaaagaaacatttattgaaacattatataaaatgttgactaaattctgtagtgtatttggagtgaacatcatcttgaatagagattctaaaatttcataatcttaacctccgacgatatgattatacttgtttaaaaagaacattatatccagatataaacttaacaaatgaaatattacaaaatatgaacatagatagttttgtttcccattataattcccagcattttcaccctgtcctgttcatacgagtcaattctcttcttcaattcctgtcccatcagccgtctgctggaaaaacactgctttgtcttgggctaaggctggcaccaaggttcaggctcggcactgggcctccggcctcccctttcaggncaacacccatttccctaccgggggnaccaggctggtttcc

SEQ ID NO: 312940 - DNA, 620 bp, Homo Sapiens
aagaagtataggcttgtctgtattcctctgtgccgggagctggagtcaagattggaagtggaacctaagtgtcaagagttgacagtcatgtccttcctactggcaaaactcttctgagcccagtgggcatggtgggagctggtctcataacctttgtgactagagaaaggatctttttcttaaactatgctttatgagtttgtccctggagagctgcttcttgaagtgtcttggcgcttgcttcggaactttcttgagtaaattaagacattcataattgcaaacacaactctaaaaaatttgacagtaatatgatcagctagatcataccaaaagtaggacaacctagtttatagtttttaattgttgaattattagtgtatttcatctcgattaccttgttcctagagaagtttacttcagattatgctaatgtggttatacagagtcacttagattttttggaacaaatcttaaaccttatacagtgactacgttttaattaaaagagaggtagacatagcttcatttaaagatgagtattatatttcattctaacattttcatgtgtatttcattttaagagtactgctcagcttagatctttagaagataatctt

SEQ ID NO: 312941 - DNA, 526 bp, Homo Sapiens
cttatttaaaaattaatttaatgcttggctaaatcttaattacatatataattatcaaacgatagtccttaatttccaaaaaaattcctcttttgaaaatcacagaatcagaaagcataaactttaaaacaagttctctgaatatttacaatgtggtataaacattatagaagaccatggatattaaattgcctgggtgtggctaatcagcaaggcgtattctttattgcatatttaactcacatatgtgggattttaaatatgacagactactaaaattcaaatgcatgtatctgcaagctgggcagggagtaaaatcatgaatgagacaggacggtcagcccaaaaccatgcaattaggttgtgggtttattattttcaaaagtgaaatttctatgttccatttgaaactatgttgcatattcatttagcattcacattaaacccacatttgactctaacgctgattcaaggaagaaagttcaacattcactcaatgactaagtccacaactcaactctcaatg

SEQ ID NO: 312942 - DNA, 665 bp, Homo Sapiens
gatgaaagatagtttaatagctttactagaaatgtttggaaatacagacgttagcttggtgatggcaggatttatgtatggatgtgccaagtgatatacatcagtaaaaactctgaactttggccttcttattattgactgctttttcattccctaccttggtctcatacagtctgaagcctttatgttcaagatgatgtagctgttttccacttagacttaatatgaaaaggggccagtaccctggcattggctttttgaaagtttttcagcctctgtttgaaagtctgattgtttctgtgtggctttattctcaagggtcacatgaggcaataaactttctgtgtatacataccatacagctttgacttgggtccttcatcttttagcctatttgggtaaggtgcacatttgtgtgtggttttgcatgcttgtgcctattggcctggggtcagagagtaagggctaatgttgcctaagttctatttcccacttactgctttaggccactggccagctgttccttctgggctattgccactacatgtaggtaagagtgtggttacattatagagcagggcttcttgagtttgacaaagcacgaatcccaaaatggggcataggctgtaattctgatttttttccacattcaagttatggctttt

SEQ ID NO: 312943 - DNA, 595 bp, Homo Sapiens
aagggtatgaaggaaaatgtcacggcacttcctgtgtatggcccattttcttcaattacccaaattgtctttagaagcatagaccaattacctattgctttgtattctactctctgactcctgtacacatgctacatgcaaaaggagccaaataagtgctttttaattacattcctctgccttacaaggtacaagtgtgtcaatatacaagtctagggtcttaacatgtttttccttttgactgcttaaatccccctgtccttgttcccacctgtgtggtctcggcccccagacttcctcatcttcactggtgtaatggtgtacttggtacgactcttccaggacacaaagttggcattaagggccacagaagtaagaactgggcggcaggggagcaacatcaaggcagagggctgttggaggaggccattgttcatcatctgggcggcggggaacagactcggggcaggggcggcgacggtcgggggcgccaggttcagagagcgcagagcgcgggtcagtgcgcacagggccatcagcacgacacccttacttttagccaagctgctcggtgctcctagatgacgttgactcc

SEQ ID NO: 312944 - DNA, 1088 bp, Homo Sapiens
aacagattaaaacggggcgcggggcattttattagagtacagggatatcagctttgggcagaagcagaaggcagcttcacgtaactcttcatggggggtagtggccgaatctttcggccagcccagccccccttgcggtgccaccgcccactgttaggcctcttgcccagccagcggttgcgacctgccttgccaatgacccgtttgttatgatcaacgttggatactcggcctactgttgctacgcacgtttccagcacctgcatctgcctcttagagggcagctggataatggctgtgccattcaccttccgcagtagcacaccacacgtccctgcagctcggatatattgggcaccccggcctggctcactttccacgttgttgatgagggtccccacaggcagagccccaagaggatgcgcatccccttcccgagcagcaactgccattcggcctatgtggttagagttcaagattgtatctccagcctgcatgttttctgtggcgatgatccagcgtttccggctgcccccagcaaccagagctatgtctgctgacctacagggatcatagcggacttggataaccttctcctcaaagggtcctgacttggtctcctcaggccggaaacgcagaaagtcaatcattcgataacgttgcttgtggcccccgccaataccatgcacccggattcggcctgtgtggtctcggcccccagacttcctcatcttcactggtgtaatggtgtacttggtacgactcttccaggacacaaagttggcattaagggccacagaagtaagaactgggcggcaggggagcaacatcaaggcagagggctgttggaggaggccattgttcatcatctgggcggcggggaacagactcggggcaggggcggcgacggtcgggggcgccaggttcagagagcgcagagcgcgggtcagtgcgcacagggccatcagcacgacacccttacttttagccaagctgctcggtgctcctagatgacgttgactgtccggcgccgtcgctccgcaataacgtaaaaggaggcgggcagaaaactggagcccaagctggat

SEQ ID NO: 312945 - DNA, 730 bp, Homo Sapiens
agcatttttcatgaacctatgtagatgttcttatctgtaatatttatacacagaacatttacttacaaattagttcatcaaatcttgaatgacaaactatattgtttcattctcctctaatataaatgattttgttggacaaaagttttgataatgtttgatatacatttcagatggcaatttactacattaatgcaaaaattatgaacaaattaagtgtttgtatgacagtattctgttaaatttattgttttctggaaaatgtttactttgtttattcaacagttattgagcatctaataagagacgcagtctctgtcataggcagtaagaatatataaaaatgagtaagctatgtaaaaatgagtaagaaccattttagtgcaatgctgcttgatctttttaggttactaatccctttcaaaatctgatgaaagctgaatctttcaccccaaaaaaagaaatgcacacttgtgcattgcatatacacaagatttagcatgtcttttttgccttggtctccttcaagccctgatgacattactggactgaaattttatttaatttgtgtgagcttttgaggtagaaaagcgtcacacaaataattgttttcataattatgtgaagtgttttaagaactttgttcaaggtgctatgagaacccagaaaaggaaatgtcaaagctaggatactagttcaaaaaggctagtctaaattgattccttagagg

SEQ ID NO: 312946 - DNA, 785 bp, Homo Sapiens
  misc_feature (244)..(244): n is a, c, g, or t
caaaggtgacggatggacaagagctcggagacagaacggtgaagaaggctacgttcccacgtcatacatagatgtaactctagagaaaaacagtaaaggttcctgaagagggtttctgaggaaatgggcaagatgttgaaggaggttacatgcagctgcttttgggggagggtattagagttgtcaggctcaaagagagtgagagaagcaagttgcatgagtgcatgcagacatgatttttttnttactaacttcattagcatttccatacattgtttttaaaaatcataataccaacccttaagttcctagttcacagttattcccacaaaagaaaaagccaacaatagtgtaccatttttctattttattttattgctgtctaatcaataaagaatgcagagctgtcaaaaaatgtgtcttacattagctgtcccaacaggattgtcttccctcccagctctgttttaattggcttttagacccactatctgtcagatccttgccatctgtcagtgtctgcctgcgccacctccgtgcttgcttaacatcctgttgcatgtctagcgtgattgagctagatttttcaggcatgtctttagattcccttgttcttgtcaaagccttgttttgttttacatttgtagtgcaaatcactttgtcaaacatctccagcactaatgtttccatcttagtatttgtgcacactgctataacttccccactgcaaacattccagttttggcattacgaagaagtagctgtgaacctgaagtatttatgat

SEQ ID NO: 312947 - DNA, 1149 bp, Homo Sapiens
tctgattctgtgaagaatgttattggtagtttgataggaatagcattgaatctataaattgctttgggtagtatggccattttaacaatattgattcttcctatccataagtatggaatgtttttccatttgtgtcatctctgatttctttcagcagtgttttgtaatttttgttgtagagatctttcatctccctgggttagctgtattcctaggtattttattctttttgtggcaattgtgaataggattgcattcttgatttggctctcagcttggatgtcgttggtgtataaaaatgctaccatattttgtatattgattttgtctcctgaaagttagctgaagttgtttatcagatctaggagcttttgggccaagatcatggggttttctagatatagaatcatatcgtctgcaaacagagatacttcgacttcctttctttttggttgccttttatttctttctcttgcctgattgctgtggcgaggacttccagtactatgttgaataggactgaagtgccttgttctacttctcaagagtaatgctccagcttttgctcattcagtatgatgttggctgtggttttgtcatagatggctcttattattttgaggtatgttccttcgacgcctggtttgttgagggtttttaacatgaagtcaagttgaattttatcaaaagccttttctgtatctattgagatgatacgtgagttttgtttttagttctgccaaaccttttcttttaaagcccaacgaataaaacccatcacctttcacaagaccaccacagcaagtaggcaggaatgccagtgttaaaagtgaaatcttttgaatttgtagtacctttccttttccaaatctagctgaaatttctcacttgttttccttttgatgaagctaaccaccggcatttctcctgatgttgatttaggatcggcaggggaagcaggatgccacactgagaacatctcctcagaatgtcataggctgctttatctcctctaggggagctggtcctgggcttgggctctgacatcaaaagtggatccaaggttttgtttttgcttcttggtgctttctttgatgaactttcagaatgaagaggaaatctgtttatacttcttgtctttggacgaac

SEQ ID NO: 312948 - DNA, 1012 bp, Homo Sapiens
  misc_feature (911)..(946): n is a, c, g, or t
ccaccagatcctcttgcaagatgccccaacttaaacgccacataaaacagctcctaattgacatgggcaaagtacagcagatagcaactctttgctctgtatgacaacagtgaacacttaatgaaagaatgtggctttcttcagtcaaagcatttttattatccacgtgatggctaagtggataatttaaaagcttagtaatgtctggtcattcactgatttgtgatgtcaataggatggcaccttggaaagaaaaatgaagaacaactttatcaaggaagctagtatttaagaaacaaattcatgagcaagctgcaaatgagaatgtgttatatgccaaggaacaatgaagtagaatataatgtatactaagggatttcaagttctcagaatttttgagtagttgcttacgtgaagctcaagatacctgtagaaagaaatatggtatatttgtatagtttttaatagaaagatctatgtttataaaccagcacttggccaaaaacaaaattgtaaaggaaatttaaattctggagaattctacagggttgctctaagaactgtcttctcagcagttgatccagctgtacggaaatttagggtatttaaacttttaaaggatcatgagctgtttcttgggcgatgaatgttctcaatcagaaaactgacagtagaaatctcacttctggggaaaacagttgtggaattcttacttcattatgaatgtatttaaaaaacaaacaccaaataattggaatatattgcaggcattaagctcattaaaaacaaactggcttgcagaagggtccgatgtgccaagtgatcatgattctgctggaaagaggattttaaatattgtgggagttctcccaccctaagtcttacataatgccaccagtccatccaaaacnnnnnnnnnnnnnnnnnnnnnnnnnnnnnnnnnnnngttgaatggcagtattcaagctcaacgtacagtttgatcctgagtatgcttggtgtttgccttcag

SEQ ID NO: 312949 - DNA, 690 bp, Homo Sapiens
actgtttgaatagctgccttagacatttgctttcttaggaatgtagagaatacgtatttgctttgcagtccttttcccgggggcctagttctccattcaaatcttcattgttcttcaaattatatgactcggtgctgctgactgcctcacggtcccactgtggttccagagacccatggtgacttggattcttgtgaaaagagtttaggtaaccttgtattcctcaatccgttccctccctgggtaaccagggttatgcagcctctgctctgcccatgacaatttcatgccttggcaaatcccattagcgtcatcctctcacagttcagccaccaggtagggagttttagggcccaggattaccttgttttggcttcctctactccctggtttcaatgcaaacttctgcttttcctctgagaactgcctgactttccttttgctattcccaatccctagttgtcgctttttctatttatcaccaagaggagtgattctactcaatatatcccagaccacacttctcaaaactgaagaaagcttttcactcctactcacagcatttaaggtcccctctgacatatactcaatgaacctacccaaactctattcttctcattcaggagagagtgactgtttatagtttcaacacacctaacatgtcccacctttgtgcctatactcatgtcc

SEQ ID NO: 312950 - DNA, 845 bp, Homo Sapiens
  misc_feature (629)..(629): n is a, c, g, or t
  misc_feature (668)..(668): n is a, c, g, or t
  misc_feature (689)..(689): n is a, c, g, or t
  misc_feature (697)..(697): n is a, c, g, or t
  misc_feature (705)..(705): n is a, c, g, or t
  misc_feature (800)..(800): n is a, c, g, or t
  misc_feature (832)..(832): n is a, c, g, or t
gaatcactaatgagaatgtgtaagttaaatcactttggcaaatatgagtctcaactattgccatttcctcatgtattatttttcagtttcagctagcgatgcagaaactggaaaatgtaaaacttagatcatgaagggcataaaacttatcacccggaaaacctcaatgttacttttttctgataaattggaattttacagaaaaagtccctcagtgtgcttaaaaaccaccccttctaaagtagaatggattcttttttttctgtttgattattttcatttctgtctattctcaggcgcatgatctcctttatttttaagccatgtttcatttcttcacttggctagatctgttccagggtcatcttttccttacagtaccatcattatagatttaatttaatagctttcatgtgattaaaaatagctaactagactcaaggattcacaatatttaggtgtattttcaatacctccagaaaggaaacctcagttaatcagaggaaatagtttcagtcttcatttgagcatgtctttccatctcaaaaaaatactcttagtaggttggagtgaagatagcaaggttttgaagcatatttgtcctaatccacagtgacactttttatctntccagagcactcctaggaggttccgtgcctaatcaatgntgactgctttgcagatctcangggaatanaatgacanaagcagggaaaagtacagattcaaacagcattttaactcatgttgatctggattaataatcttttctaaagatgtgaagtttcttggaaaacagngatatcacatgattaaaatacatttttatcancataaatgtctga

SEQ ID NO: 312951 - DNA, 210 bp, Homo Sapiens
ggggatatagggtagacttgactctgctttatccgggaaagcttttaaaactctgagccagttaactttgagtaagtataaaacatactgtattggtgtttgtatttttcatgccacaatattaaaatggaattttaaatgtagattattataatctataaaagataagtatgcatgtattaggatactggaaaatatgcaaatcatagt

SEQ ID NO: 312952 - DNA, 909 bp, Homo Sapiens
  misc_feature (887)..(887): n is a, c, g, or t
aaaaggccaaattgtagctgggttcttttcagtaaagacacaatcaactagcagaattaagatgctagtccaccttatatgcattttaggatctggtatattagtgcagaggtacttgcagcaggatgcatgaatcctgcctttatataaggctttgtgggtgtcaccgttctgtgcactttattaaaactactccaccccccaaacctaataaaaataattgttgcttatgacttggggaatatttggtgaagttgctaataaagtacattgttaaatgcaacatgatttcacattgtaaatgtcttgaaaattcagtttccgctacatattttcttcataaaataaaatttttatacaacccttgtcctccaatttttccaataatctgctttattagggccatcacaataaaagtttggggcaagaagccatgcataaagtgtttctaaagtagtgaatgttttctgttctgtatctttttttcttcttataatttctttacaaatgtcagatatttctcttcatatttttgttctaggcttctgtgcgacgatagccatttttttaatttgttttaactgacaaaaattatatatatttatcatgtataacattgttttggaatatgtaagttgtggaatagttaaattgagctaattacacattatttcatatgcttatcattagatattccattttaatggcacttgtttttaaaaatgaaacagagttttaggcacaatagtcagttacttctggctctgctttgtggagaaaggtgtatggactgaaatctctgcactctccagataataactttctaatgctttaagataactagattgtttttaactgtctggaaattaaaagagaccttaaaaaanattcacaagtgtaactaggtgt

SEQ ID NO: 312953 - DNA, 1015 bp, Homo Sapiens
aaaacaatttaaagcagaaaattgaaatgacagtattttcacttatattatgaagacagaaattcgtaaaatggtacagaaggcttctgtgtaatgtaaaaaagaagtatttgtataattttaaaagtggagggttctaacttttaattgagagtgggggaaactttttttctttaaatctggaagctgtagtaacatatttatgaagttaaatatttttagttcagcaaaaatggaaataattgtcattacaagattacttaagtcttttctgtcttttatgatcctatcatgatcaactttaaatttagagaagtcatttgagatatgcttaagttgaactaaagacttattatttgtctaatttctgtatatatggaaattagattcacattgggatatctaaaatttcaaggtttttttgtagaaaaaaattaacaaccctaaaaataggaaattattaaattacatttttaatttcctttagcttggaatcatgactcaaagaacggagctctattaatataacagtgtataaattcactgcttccaggaatctaacctcacaaaacctaacggctaactaaaaaataaagaaaagtcttattaagcactgagaggctaaataaatgagtactgacattaaccaaagccgacaaaccctatttccagttcctgtgatctcactgtgtagccacaactgttggctatttttactctaaaaccaacaagctgaatcatttccttacagaaaaatttctacaaaagggaagagaatgcaaaacaatacacagtctcatatgcaagatacagttcacactaatttacaaatttttatttacattttttatatacattccaggcagacctacttgatgagttttgtgctcatattgatctcagatgatcgtgtgtactgtatgatttactaccacatctctttgatttccagaaaatggtggtagcatggggttaggaggaaaagaaatcactggtcaggtgagatcatacaagt

SEQ ID NO: 312954 - DNA, 333 bp, Homo Sapiens
tctagttttgagagtgtgcacttcacacaggggaatggggttacttctgtctgatcctgggcctttttttcatcccaaatgacaaggaatgtggctcagagaagggtttttcttttttgacctttcttctcccaacaggaacctgcctgaggacacccttctagagcaaggaattgacttttaggagccgttctccccacaagacaccacatgacaaggggtataagccccagccctgctcattcccactcaccagctgaggtctgtcaggttttgaaggcttgattttgtggtgggtttggggcttagttttcctttttttcattttgattt

SEQ ID NO: 312955 - DNA, 385 bp, Homo Sapiens
aggaattaagatgatcctaacgtgttttgtactggtcgaagcttatccttaggtgacaggttctagagtctataaagataatttagtaattttcactttttgactcatgggatttacaagaatatttaaagggcttagaaagtaaagacttgcgaagaaaagctttagcaggagagattgttcaatatagaagagaaaaatatcccagtgaattcctgaaggaaggtatggcatatttaatagcagccctgatttaaaatagtgggaattaggtgatcctgtagatccttccaactttatgatttttagagattttatttttgcccaagtcatcagtaagtatgaggacattttttgtgtgtttttccaagtgggttgtttaaaa

SEQ ID NO: 312956 - DNA, 706 bp, Homo Sapiens
agtggggtggagggggcagggcgtggtgaggtaaggtgagtgccgtagtggggttccctggagccatggcctgctccattgtccagttctgctacttccaggacctccaggccgcccgggacttcctctttcctcacctgcgggaggagatcctcagcggcgccttgcggagggaccccagtaaatcaacagactgggaagatgatggttggggagcatgggaagaaaatgaaccacaagaacctgaagaagaaggaaatacttgcaaaacacaaaaaaacttcctggctccaagattgtgttttatccttatctccaaccaatgatcttatggtgatagctcgagagcaaaaagctgtatttctagtgccaaaatggaaatatagtgataaaggaaaggaagaaatgcaatttgctgttggctggagtggttccttaaatgtcgaagaaggggaatgtgtaaccagtgctctatgtatcccactagcaagccaaaagaggagttccactgggcgtcctgactggacctgcattgtggtgggttttacttcaggttatgtacgcttctacactgagaatggtgtgctcttgcttgcacagcttttgaatgaggacccagtacttcaacttaaatgcagaacctatgaaataccacgacatcccggcgtgactgagcagaatgaagagttgagtatcttatatccag

SEQ ID NO: 312957 - DNA, 1606 bp, Homo Sapiens
gtttctgaatccttttattttttaaaggacttttaaaatttgaaactacaaaacggatttcatacattctgccataaataaaaacaaacaataaggcaggactctacataagcaaaccaagaacaattgttttcagaaaatgtgataaaatgctttacaatcataagccatccagtttttaaaataaaactgttgaaaaactcacaaatcttcaagcggcacatacaagacacccttgaagggggaacaaaatgtggttctgccactttgtactgttctcacatttttgaaaacctaattttgcttagagcataggtctgttccgtattctaaaattcacacaggttggtttgttttttctcaagaaccatgtgatagaggcaccaatgacaatacaactttgtttccaagaaccttgtaacaaagcgttgtctcttttaaacataccacttgaggcaaaaggaatcctggacaggagttttctgtagaggcgtttaaaaccctaccgaatccgcttctgctgccgtgctctgtaaatgtcatgaacaggggggacaacggctcccttttcttcatcttcatctgaatcctcgttgggccttttgacggccttggtgagtactgcattactttccacggggccgttgccttctacagctagctctggggccccaccagtaatgatcctcacagcttcctcaacagtatttggtatcttgcatcttcggaaaatttccatcagttcatccacttgtacaaaaggaccctggaaacagataggaggagggagaagtttcattaaaacaacagctgcaggagggactgggaacactccaccaggtacagggtgtaaacctggaggtgctaaatgtcgtggctgaaatggaatcatctgctgagtgtctggtttagggtattctggttttctatccacttcatctttcagaacaggcactatagaaggagctacaactgggtccggaattatagctgctagcttagcacgggagacatccttataaccaagtgcttttaattcacttgcagagcaaggatataaatccatgaacttgtatctatctactagtaaagccgtttctttcccttcatactcttctttgaatgctgtaaaccgtcttttctccactttgagtatactagctagatcaccaatattactttcaaatgctagaaatcgggcccagatttctccagacttctcaggaggaaggcttccagatgttaaaactcgttcaaacaaaactcgggtattattgtcctcattgaggtgagaaagatagtcaatataggccaggacatactctggaatgtctccatatttttttagccccagctcaaaaatcttaaaggtaacagatttgtccttactacagtaatattccatgagtgctgcagtaacatagacatggtggcgggttctggtatcttctcttgcttttttaaatatcattcttccagatttgatgccttctgctctccgtgcaaatttcatatattggatatataccaaggtagggtcaatatcctcaattgccagaagtctgttatatatactgtgaaccttttcatacttcatgcgactctc

SEQ ID NO: 312958 - DNA, 1017 bp, Homo Sapiens
gtacgaaatgtgttagaactcctcttgcctatgttaaaatgtgaatgggtcagtctccctcccctgtaggttgagcactctcccagggggcccaggactgctggggttggcgtgctgctccctgcaggtgcagccgtagagtttacggccctgcccctcagctccccggctgcacagtgctccgtccccaggccgctgaccacactcacaaccccttgttgtacaccactgtccggctgctcgtggcctgggctaatctccggctctaattgggatgtttcaatctctgacatttgcgggaagaggctgatggccagcggcagggccaggccgaaggctgccaggcacacgaggctttgcacagggaggagcagccgggggcgtgcctgcaggagagccgtcttctccagcatggacatgacgatcgggggtagcaccaggatgggcatgggcaggaccactcgcgtcagcgccgtctccagcagggcgtgtcgggctgcgatcttggaggagcccacgaggttgccatcgctgtccaggacatcaatcccttcctccagctccccgtaccgcatcaggaccacattgcagatattggcactggctacagcagggaacggcacaaacctctggatgagaaggcgggtggctggggtgaacttgttggctttctgaaccaggacattaaggcccacagcaatggagacagcgctgatgacagctcccaggtatccctggatgaacttggatgcaggtgaaggcttggtcgcattgcggtttgcatagttgacacaggcattgtggctctggttcagccactgccagaagacagtggatgccagtgtctggttgggcaagagaagaccgactacaattggcgtcccaaaaggaatataacctgacattctaaatggcatgaagatcttctcattggtgtccggatgtagaatagcctgcttgattttctgtgcactccagagctgttcattggtgacccccgggcgcagggtcccatgc

SEQ ID NO: 312959 - DNA, 736 bp, Homo Sapiens
gatcaaaacagtctcaccagcaccatatccacattctagcccatggaaagggtaaagaaaagaaagtggaagatattagtttccatttaaggaagtgacatggagataatataagtcacctgtgttcacattccactggcaaaaattcagtcacaggaatgtacttagctgcagaggaggctaggatatgccctccaaaaactcaggggggatgtcctacttgtaaaaggaagaaatgaaaaatggacactgagaggaaatcagcagtctcagaggtaatatacttacacaagttttttaaaaaccataaaatgatgcagaatgaagtttccactctattcaccatctatccagtcctcatgcctcccaacaagaggtaaatactttattattgtgtcatggtatctttccagggtttttctaagcaatttgcaacagatataaatatgtatccttatttcctaccttaccccatattgtacatgaaagaaaaaatatactatgtataacattctgtatctttttttcacttaatatattttgcagttccttttatatagatacatagttaccttcttcattcatttatacagctgcctactgtttctaaggctatatcactgataaagtctcatggatacactcaaggttttttcagtcttttatcatgataaaccatgccgcaataataaccttgtactagtcatttttaacatgtgaaagtatatctgcaaga

SEQ ID NO: 312960 - DNA, 1664 bp, Homo Sapiens
tttttctcactttttttagttgctccttgagtttttattcattgttttagcaggaactattaacaaataaaggctttagtttcatacaaacaaactgacaaaaaagatcttatttctctagagggtagggaaagtataaaattctgaattttcatgtcgagtgtgagccaagttagaggaacttggccacctgcaaaccactccctccctccatgggaaggaatctgaggcttcctaggtgaccaggagccgggcttcttttgttgccttaatttcctttcacctgagagaaaatgaaagccagggtctttgtgctccaggccaaggcccagatgctggctgcctgctccccagatgagacttcctgggctgcctctcccagcctgaaccagcaccatgtaccctagagagaggccaagtccccagtgttcccctggggcccatggaggcccctgcctgagcctgtggtcctgggagctggggagaaggtagagatgctgctgtcagaggtccaggctaaggacaagtggggcaggtagggcaggtgctgctggccatggatggaaaggcaggcaagttccaagaccttagcaggccaaggactgctcaggccccttgggagcagacccgctccccagacagtcacctggcaaaggcagaatctcctcatgacgtctcagaagcttgtccgacaccagaaggcaagccccgcctatttaacatgaggccataggaccagcctccctggatccgaaagggccactcactccctccaaatgcactcagcctgcaggggatacaagggaccagggaaagagaaagacttgagggcctctgtctaaggggctggccatctgtgctaggacaagttgctgcttctgctccaggaagcccagataggactggactggacttagaccacttaccccagaagtccaaaaacccaatctctgcatgtctctgagtggtcagggggctgggattctaaagctgctggtcagtccctaactccagcctaccctgatgggccaggtaagccaactcaccctcagtcatcttctgggacacatgaagcaaacaaaatagccctgtggttctgtcttcacttttcagacaattcccacggctcaacaagagctagtgggttaatcccctaatttccagtaacctcaggccttcaggacagagtccatggcctcatttctgaatctgctttgtcattgtttgagcctgttactggcatgagacaacggtgggggagggggtatgtcacaggctcctgagtcaaagctcctagttatacatctaggtctaaacacgtggctgtgggaccctgtggaagttatccagactctctgtgctttgctttcccccatctataaatgggatataaaaggtactacctcatcatgttgcagtgaagaaaaaacgagatcagttattagctgggtccctcgcacattacaggtgcttaggagacatcagtcctgctctaacccctgccacatgcctggcctgggtggggctttctggagaccctggctcagggcactggctgcctgtgaaaggggggtccaggagcccaggcccacaaggagccctgaggcctgttgagatgtgctgacctcacctggcacaggcaaggggagggagggggagctggt

SEQ ID NO: 312961 - DNA, 475 bp, Homo Sapiens
  misc_feature (31)..(31): n is a, c, g, or t
  misc_feature (64)..(64): n is a, c, g, or t
ctgcttctggctccccaggaaagcccaagantaggaactggactgggaccttaagacccacttnacccccagaagttccaaaaaaccccaatctctgccatgtcctcctgagtggtcagggggctgggattcctaaagctgctggtcaagtcccctaactcccagcctaaccctgatgggcccaggtaagccaactcaccctcagtcatcttctgggacacatgaagcaaacaaaatagccctgtggttctgtcttcacttttcagacaatttcccacggctcaacaagagctagtgggttaatcccctaatttccagtaacctcaggccttcaggacagagtccatggcctcatttctgaatctgctttgtcattgtttgagcctgttactggcatgagacaacggtgggggagggggtatgtcacaggctcctgagtcaaagctcctagttatacatctaggtctaaacacgt

SEQ ID NO: 312962 - DNA, 903 bp, Homo Sapiens
ttggatctggtgactcataaaattctataagcatcttatctttgatttcgaaacgttcatgcagccatcttctcatatgttcttgttcttctgggacatcttttttgtcgatacgatcaatgtgaatatgaatttttggacattctttgcagagaaattccgtcatggtcggtgactctcttcgctgccctccatcgtctttcccttcataaaccaccgtaacatcataaattgcatctaaataattcttcatgcaatcaaaagcaacgtgagttgcctttattcgtggtgttagcacatgttttaatactgcaaggccacgttgggcagcaaatgcctgactagctgaaaggacttttgtttgctctggattataccttgtaccttctggaaaaatcacaagatacattggagttcctgcgtccacgtagctctgcaacttgtttcgcatctctttctcgttaaatttggcactgcgctttacatagattcctccatgctgagcaaagtaacacccatacaatggcagccattttaacccttctttcagcacgtagcgcacatgtcctagcgcattctgcctgatggccaagatgtcagcaacaatccagtcaactgtgctttgatgatttgctaaatatattatattttctttattttttggcaaatctccatatagcaatatctggaccccggtgtaattctcgaagaagaagagcaccatgctctggtagacgcagtacagccggtcgtccagcgcttggtagaagcgggcgggcaggaaggcggagagcagccgccagaccccccaggccaacacgtaggtgggcgccgtgcccaggagcacgacgctgggcagcaggtagcgcatggagtacgtgtggagcaccagggacagcagcc

SEQ ID NO: 312963 - DNA, 802 bp, Homo Sapiens
  misc_feature (547)..(652): n is a, c, g, or t
cttatggcaataattgaaacttctattgcttggtgttttcagttaacaaagtgctgtcacctatattgtttcatttgatcctcacaaaaagtttatgagattgtttaactctccttcagaggcaggacagcctaggcccagagaggacaagtggcttgccaagaggaatacagtttcttagtggcagaagctcaaatccaggttttctcactccaagtcacagtgctttttctagaacacagtttatattgactcatattgtctgcttttttcctagattccctgttggcaaaactcatgggattctacctcctactccttttactatacagtactatactggtatctgatagttaaaaagggtgtgtggactcttcttatccacataagcatatagtaactgttgttatagctgcaaacctaacactcatacacagctgctcagagagtagaaaggatcagtcacttgtatgagccaaaaacaagaaaactcaagacagttgtcatttgtcccttattaccaaagggcagccatggtagcaactgnnnnnnnnnnnnnnnnnnnnnnnnnnnnnnnnnnnnnnnnnnnnnnnnnnnnnnnnnnnnnnnnnnnnnnnnnnnnnnnnnnnnnnnnnnnnnnnnnnnnnnnnnnccagtgagtaagtgctaagtgtttttatgtgcattatctcacctaatcttcctcataaatctgagaagaatttttatccctgaaggagaaaaatgaagctcaagaaggttaattttcccagggctccatggctagtaattagtaaaagga

SEQ ID NO: 312964 - DNA, 1026 bp, Homo Sapiens
  misc_feature (227)..(467): n is a, c, g, or t
ttgaagcctcctttaatttagggagtaaaatgttagctaaaccaattatatactatatactatacactgtatctcctgtggccatgagaggtgtggctataccgaacagaaacatgcctactgttcaggaaagatgtcagttctggtaacacctctctgtattgggatctgttaattttgtaaatctaaattcttctgctcttggccaggtgcagtagttcatgccnnnnnnnnnnnnnnnnnnnnnnnnnnnnnnnnnnnnnnnnnnnnnnnnnnnnnnnnnnnnnnnnnnnnnnnnnnnnnnnnnnnnnnnnnnnnnnnnnnnnnnnnnnnnnnnnnnnnnnnnnnnnnnnnnnnnnnnnnnnnnnnnnnnnnnnnnnnnnnnnnnnnnnnnnnnnnnnnnnnnnnnnnnnnnnnnnnnnnnnnnnnnnnnnnnnnnnnnnnnnnnnnnnnnnnnnnnnnnnnnntgacaaagcaatattctgtgtcaaataaataaattcattcttctgctctcctgacttagagaaatggtttgcttaaaatgctagtaacaaacatcacagtcaacaggagcttgcttcatgcgaaggatcaatgtgatttgtggatggagatgatagtgatgaaattcctgtttcatggggctgtttttcttttcatctcactgggcagcaggtttagtgaggcagtgagatgctgctgctgtggattcttgtagctatgcctcggcttcttggcatatcaggtaggaacctgttacaagtgaaatacttgaaacctctctgaccaagagcctctgatggagtgggaggtgagctaattctctgaccagcttagggcactgtttcagccactggtcacattccttgcttcaaactgaaattcagtttggctttgagtatagggatacatggtggattcatgtacttcagtgtttgttttgaccaaagtttatttttctagtgcattttctaagtcaaagtggtgaaaatatgtaataattttagtatgcatgactcagtc

SEQ ID NO: 312965 - DNA, 440 bp, Homo Sapiens
  misc_feature (397)..(397): n is a, c, g, or t
  misc_feature (417)..(417): n is a, c, g, or t
tcacatttttcagagatttttattgtttcagactgagtcatgcatactaaaattattacatattttcaccactttgacttagaaaatgcactagaaaaataaactttggtcaaaacaaacactgaagtacatgaatccaccatgtatccctatactcaaagccaaactgaatttcagtttgaagcaaggaatgtgaccagtggctgaaacagtgccccaagctggtcagagatttagctcacctcccactccatcagaggctcttggtcagagaggtttcaagtatttcacttgtaacaggttcctacctgatatgccaaggaggccgagggcattaggcttacaaggattccacaggcaggcagcattcttcactggccttcactaaacctgctgncccagtgaggttgataaggnaaaacagcccctggaaacaggga

SEQ ID NO: 312966 - DNA, 1244 bp, Homo Sapiens
  misc_feature (20)..(20): n is a, c, g, or t
gggtgggaatgccatatatntggtgttaatcacttggcactttcttgggcaccaatattagcactgtttcatttttaataactggaagcacttaatgattattttgtttgtttaatttcaacttaaggatattgagggtcagagaagtaaggtttatttcttgtttatgttttctggaatttatagggtgtttgtagaagggataaatgggttacctaatgagccattcttctaggctctgtaaggtatgcccttttggctaggatattttaaaataatttgcaagcttttaatattgtgctttgtagaaatttacgatttttaaaaataatttgcaattgatagattacacttaaatttataaagtatcccattttaagtttcttttctgtttggtcattgttgcttattgtctattgtgtaggggacacaatcctgacatttcattgttttgttacttggggcagtattaaccagtggcctttgtatgtacattcattgcttacatttattgtttaagtggtagagtagcatttttatgaacttccctgttcagtattagtgaaattgacagatgcgtatatgtaaagatagaaaagaaacgaatacaattaattttttattccttgtggcctatttatttgttttggccctggatcttttctaatcacaattatatttctttatttttgcctttgagcagtttcatttatctttgtgggcagggaagattaaatatgaaattcagtccagtcattttgctactggttagctttagtttgaggcaagtaaaaatttttgattaaaattagtttcttaaaattatgcccttgctttaccaaataatcaaattggctaaaaaataagggtatgtaactttgcattttgaagagcacaccactaatttttcatgagccctactcgatcttctttaaagaagacctttctatgagacacttagggatgagtttgattaatgggaaatagctctaggttagattattttaaattccatacaccaagtgatttaaccacagtggcagtggcagtttctgaaccgtcaagtatgaacatcacttaaaaattaaaagatgcttaataataaactcttaattttcattaagccaatctgtgattcagaagcaggagagatatggtattttatgtgtatgtcttagattgtgatatgtggtagtaagagacatgtcaagagtgctttcttcaaacctgtgagctcaactgag

SEQ ID NO: 312967 - DNA, 541 bp, Homo Sapiens
tactcatagttcaagaaaggggcagcaactctgcagacatttaacgaaaacaagaaactcaaacggaatgaaatgacatactgtgcactcagattaccgtgctaaacgatttaacatttaacaaaaatgtgaataaatatgcacacaacaggcttctatgaacattctcctcacagtgcagatacattcagtgttggactggtcctgagcagcatcattctaaggtgctggtaagcactatttccgttttgcttctttttttcctttgttgctatatatttatttcaacaggaagccctggcggctgttggttaacagaagatgtcttttgttagtgatcaggtggctccagctcaccacaatcacaatcaaagctaccgtccatcttactctgatacaacgggacttctccgactcatcgagagagtgcggggctcgcggactgcccccagtgtcggctcaggtctccggctgtgctggcggcagcggcgtctccgaggctctcgctttgccgcagtcgccgccatgtaaccccgacccc

SEQ ID NO: 312968 - DNA, 713 bp, Homo Sapiens
ttagccaataaaaaaatagaaatcactccccatgattttctgtataggcctcaatgtggacactgaggaacgaagggaaatactggacaagctgagaagcctcaggccaaactaaacccttcatagttgtcaagggcctgggtcagccgggcactcagaatctctttgctgctgtaacttggggaggtcaaagaaggttgtcagcaagtgtgggccaccggcaagtactcctccccgctggctgtggactggatgacaatctgcagactggccatgccgtagatgggaatccgatcgctgcctgtcaggaacaagagaaacttcttcttcttttccaatggaaactcatgaaatgtttcccaaaatagttttacagtgggatgtgtggccgagtaatctcccttgtagatggcagtctcttccagttcttcccagttgtagttgctgttccccaccatcatagccctcagttctgaaggctggaagagctcaagtactttgccaccacacacctttaggaagccactagagaaggctgtgtaccattcatgaactgagatttggaagacataattcacataagcatccacaaattcctgcctgttgtccttgcacacagttacattatctcccccaggtatcagcttcttctgttcaatcactccatagctttctcggcagatcgtgaagttgaggcagaaagtttcctccac

SEQ ID NO: 312969 - DNA, 1819 bp, Homo Sapiens
  misc_feature (150)..(150): n is a, c, g, or t
  misc_feature (154)..(156): n is a, c, g, or t
  misc_feature (158)..(212): n is a, c, g, or t
  misc_feature (352)..(388): n is a, c, g, or t
gggggggaattccaagccttttgttcatgccccgggttttcttggggaacacggtttggcccaatttcccctttccttagggggcccgcgggccaaaagaaatggttttggaaagtttttctaagggccgaggcggccccacaatttttntttnnntnnnnnnnnnnnnnnnnnnnnnnnnnnnnnnnnnnnnnnnnnnnnnnnnnnnnnnntcccacattcagttcttttatttaattttctagtggacaatttacatatctccctcaccctgtcttttaagttagtgtgacaattttccataataaactacttaaagagaagctttggtcaagaatggaatgaaatcgcnnnnnnnnnnnnnnnnnnnnnnnnnnnnnnnnnnnnncaacactttcaccaattttatattcaaacaaaaccacacggcattggcgtgatatgtgttttcagtgtttccttggggctggcttcctcgccatcgtgccacggcacagctgcggtcggccacagtttgtcatgctggatggcggaggctcactcagcttcacattatccggaggccctggatggaagactcgagggtcttgaaatcccaaattgtcatggctccatcgatgccagtagtgcaaaatttgcgacaatcttgcttgtccacctcataaatagagacttgagtgatgctattctggtgcagcgtctccaaggccgtgttgcggtcctcagttgtggctctcttgtccatgttgcggaagcgttccatggcagacatgttgcgttggatgctctgttttggaatatctaacttggagacgaaggtcaggcagccgcggtcatcgtagttaaagagcattgggcagcagtcatggccagcagccacgacgctgttctctgagacaaatgacacacttaggagcggcaggaactctgtcttcagagtcgagacctgcacactttttgaggcatcagcaacagacacggtgctgtcgtggctgacccaggccaggcggctcccactggcagagaagcttaccccgtggacccagccaccagtgccactgccaccaaactctgacatcagctgcccaaaaggcatcttgctgccccagggcgtgctggctggcttttcatccacttctttaatgtaggcagaaaacactctgcatttgaagtcacatgatcctgctgccagcaaaacgttgttgggatgccaatccaagctgaggactgtggagcgaatcggctttttaatgtgcttgctcacccaccagtcattttcagactcaaagtaacaaacagaaatgagtcgtgctccacttcccacagcaaatttgttctctaggggggaccacttcacaaaagtagctgcgcgattaattctcaggatcaccagggttggcttccaaacaccatctttctgactccagacataggcattgcggtctgccccacaagtgacaatgcggtcgctcttgggagcccagtcaatacctgtgatgtgtccgttgtgctccttgagttcatgagctttcacccactggctcccgttcttcttatagatgtgcacttcgtgattattgggactgagggcaatctgagtacgatccctgttccaggcatgacaggtgattggctctagtaaaaactgatgcagtgacattattcttagtgttttcaaaggagagaaagctgggatcgggggagtccggacgggctcggagcggaggattcgcggactctgggcagtcgacgcgaacaggctcccggacgcgtgggtcgacgatatcccggaattccggccgggaccagcctgcgtttt

SEQ ID NO: 312970 - DNA, 540 bp, Homo Sapiens
  misc_feature (20)..(20): n is a, c, g, or t
  misc_feature (63)..(63): n is a, c, g, or t
  misc_feature (91)..(91): n is a, c, g, or t
aactcaaccttcaaaattanccggaagaccccgggaaggaaaaactcgaagggtccttgaaanccccaaattgtccatggctcccatcgangcccaataatgcaaaaatttgcgacaaatcttgccttgtcccacctccataaattagaaaacttgagtgatgcctaattctggtgacagcgtctcccaaggccgtgttgcggtcctcagttgtggctctcttgtccatgttgcggaagcgttccatggcagacatgttgcgttggatgctctgttttggaatatctaacttggagacgaaggtcaggcagccgcggtcatcgtagttaaagagcattgggcagcagtcatggccagcagccacgacgctgttctctgagacaaatgacacacttaggagcggcaggaactctgtcttcagagtcgagacctgcacactttttgaggcatcagcaacagacacggtgctgtcgtggctgacccaggccaggcggctcccactggcagagaagcttaccccgtggacccagccaccagtgc

SEQ ID NO: 312971 - DNA, 2145 bp, Homo Sapiens
  misc_feature (1445)..(1488): n is a, c, g, or t
  misc_feature (1506)..(1506): n is a, c, g, or t
  misc_feature (1620)..(1627): n is a, c, g, or t
gctctacgtactttttcattcaccaaccacctttccatgcatcagaacctatgctgtgattgttagctgaacttcaatagtttccacctacttaagagagatgcctcaaacaaattaactttattttcagacaacaggtccaagaagacttcacagctcaatcatgacgaacatgtggctgtttcctcacagccaggaaccctcggtattagaagaaaactccaaccccccacaccatcatctagcctcttttctcactgtgaagaactgatgagacagaattcctgagaagggaacatttaggtaatctgggatagaagggcatggaaggactggacaaactaagcctccccatgaaggaagggaaaagaatattacaaaacagactaacagaaaacaagacccatcagtttcttcaggataaacaagaggccactctagatgctctgattaaaggttgtccatgcctacagaggcggaggataaatctaagaaacagaaatgtataaccagcccaatgcttccatactctgcattaggtcagtgtgaacatggctttgctcccaatggtcagacctgacatgggtccttctgaagatggtgggtcaggtatatcccagccaccctcaccagagaatacatctatgacaaacccaaattcctaatcctgaagtactttgagccactctacattgtggccactcaataatagaataaatttgtgaaaaagctgcatgttttaatttaggaaatgagtagaagttcacaagcaacccagaataggtgccagcagtttgctccagtgggccacaccacagcagcagctcaggctctgcagaatcactgtgtccagtgcttcctgagatgttctttcagctgaggaatggaaggcagcagctgctggcactcatgacaacgaaggggcagcttcaagagctcaggcatcccatctcggacagttactctaccagcctcttgtaccatctcgatcacagcttgtgattctaggaagtattctgtattgaaagaattccaatgttttttgtttttaaggcaaggagaatcaaaatcctggctgatcacatgaagatgtacatggctcatactcggaatggcgtggtagcccaatcggaagcggagtttgctggacccagcaaaatctacaatcaccttttcccccacagtgtgcatatgcttaaggagttcaaggtgttccctggccacagccttcagactggaaatggaggtccacggtaagaccagccaatggtaacgggcctttgggtatttatcctttatcaccaccacctgctcatctttgtaaacctgcattttggggtcctgcatagaaatcttcaagccttgactccagtggcccagggattcctttttgataggtgcatcttttcccttctttaggggcacagagcattggccagagtggnnnnnnnnnnnnnnnnnnnnnnnnnnnnnnnnnnnnnnnnnnnnatccctttctatagaatnactgttgcctgatctctttctcttcctgctttgtttccagtggcccagggattcctttttgatctgttcctcattttcccttctttatgggtacagatcattggccagtgttgnnnnnnnnagaacctggccaggctgcagcttcacctcttggtccttcccaatttctattgagtcactgttggtgtgatctctttctcttcctgtgtgtttccttgccatgtttcttgttgcactcttctttcaactcttgctgtcgagaacatttcttatcagtgatcttggtctctgggccacgcccaatcacaactgcttccaaatgtggaagtctgattcgctggtgccggctgtcctgtctcaccaaccagcacacccgcatcatcactgtaagggacaaaacaaaagaatcactagaaaaacagatccactagcacgagtcctccagggccacacccggtgccaccacgcatgtgatctaccagctgttcatcttgaggcaagtgacttcaccaccctagtctcaatttcctcacctataaaccatgataatgatgggactcaggaggctgttgtgaaaattaaatgagataatgtgagtaagtatttacctccctgcctgaatcatgctaggcaatcaaa

SEQ ID NO: 312972 - DNA, 436 bp, Homo Sapiens
  misc_feature (244)..(244): n is a, c, g, or t
  misc_feature (394)..(394): n is a, c, g, or t
ttgttttatccaaatttattctcagggaaaaagaaagtagtggctctacgcaacttttttcattcaccaaccacctttccatgcatcagaacctatgctgtgattgttagctgaacttcaatagtttccacctacttaagagagatgcctcaaacaaattaactttattttcagacaacaggtccaagaagacttcacagctcaatcatgacgaacatgtgggctgtttcctcacagccagggnaccctcgggtattaggaaggaaaactccaaccccccacaccatcatctaggcctcttttctcactgtgaaggaactgatgaggacaggaattcctgaggagggggaacatttagggtaatctgggggttgggaggggcttgggaaggggnctggggccaaacttagggccttccccttgaaggggaaggggg

SEQ ID NO: 312973 - DNA, 974 bp, Homo Sapiens
  misc_feature (232)..(240): n is a, c, g, or t
  misc_feature (881)..(881): n is a, c, g, or t
ggaaaatcagttcttttaaaatttcttcaagaaaatccaggctatcacatagtctttctgtgtgacttattaggagataggaagagcattgggaaacttgcacagctagctatgcatctacattttggtttggggttagttatgaaatgttcttaatatgacgtgttcaataacttcacataaacttcctgttctccaaaacctcaaagagatagagttaatgagttgttgnnnnnnnnnaaatgggggtagttttctatctgtcatgggctctagcatctactccgctacccaattctgtcatctccaagctgagtttcctcttctgaggcagaggctggagcagttctttttcagttctcatcctctccatcccaatccagtatatcaatcaactctaactcggagacgtctagctggcaatgtttctaaaactttcactggatttctttagacattgaagcaaacatttttttctaagaattgcttctcagatgatgatatcaaatgtatatgcttttgcaagtttgaaaagttcaaattaaccacttttgactaggtaagtctttctaaaaaccatttaaagctaactgggtcttagcatcctcctgtgtatggaagagacaggtgaccgctccaggttgggtgctcacagaacccttttcctgactctcgtggaagatggtggaaggaaaatagactgtctcatcaaccctcctgtgtcctctgaagcaatctcagtttttattaaccacctcttctgtgtttctggtagctatttaacctgtatttaatctgtacttcctatgccagcctcaattttatttgatttttaaaattattctcttctaaccaatgaagtgtttgtcagtatgccccanagcttgctcttttgtgctcccttttgaataactttctatccagaaaaagagattatttgggacttgagatttgcagtgataccaacttatagc

SEQ ID NO: 312974 - DNA, 640 bp, Homo Sapiens
aataagcaactctaatgatatttcaaacaatggtccccttttaggtcacactatcaaatcagagaaagatatacttgactagctgtaaaatgcaatttgaggtctaggtgaatgaacaagtaacctctaaatcataaggctattgttacaaactgaatgtttgtatcccccccagaattcaaaggggagacagtatccccaaagtgacagtatcagaaggtggggcctttgggaggtaattaggtgatgagggtagagtcctcatgaatggaatttgtgcccttaaggatatacttgagagtttgcatcctctttttctgccatgtgagaacatcaaaagactgacatctggtaagatctgggagcatgccttaccagacaccagatatgctaccacttagatgttggatttcccagcctccggaactgtgagaaataactgctgtttaagtcacctggtctatggtaatttggtatagttgcccaaatggactgtgatggttaatactgagtatcaacttgattgaatagaaggatgcaaagtgttcccgggtacatctgtgagggtgctgccaaaggagatttaacatttgagtcagtggactgggaaaggcagaccatcctcaatctgggtgggcac

SEQ ID NO: 312975 - DNA, 839 bp, Homo Sapiens
  misc_feature (731)..(769): n is a, c, g, or t
ggggcgcaccgcagacggcgcggatcgcagggagccggtccgccgccggaacgggagcctgggtgtgcgtgtggagtccggactcgtgggagacgatcgcgatgaacacggtgctgtcgcgggcgaactcactgttcgccttctcgctgagcgtgatggcggcgctcaccttcggctgcttcatcaccaccgccttcaaagacaggagcgtcccggtgcggctgcacgtctcgcggatcatgctaaaaaatgtagaagatttcactggacctagagaaagaagtgatctgggatttatcacatttgatataactgctgatctagagaatatatttgattggaatgttaagcagttgtttctttatttatcagcagaatattcaacaaaaaataatgctctgaaccaagttgtcctatgggacaagattgttttgagaggtgataatccgaagctgctgctgaaagatatgaaaacaaaatattttttctttgacgatggaaatggtctcaagggaaacaggaatgtcactttgaccctgtcttggaacgtcgtaccaaatgctggaattctacctcttgtgacaggatcaggacacgtatctgtcccatttccagatacatatgaaataacgaagagttattaaattattctgaatttgaaacaacatatttttatacttaatgaattgtatctcgttaatctcttcccttacatcttcatgtattgttgnnnnnnnnnnnnnnnnnnnnnnnnnnnnnnnnnnnnnnngggataagaactaacatcaaaaggcctgtttaaagggaaaggttaatgggctacttcatattatgacccc

SEQ ID NO: 312976 - DNA, 988 bp, Homo Sapiens
  misc_feature (437)..(437): n is a, c, g, or t
ggtttccccaaaggttcaattttgcgcaagccccgggggtttcccgggtcccttgggggattcccaaaaaggggtgggctttcaagaaaaggatttgttttttcccaaggtgggcccccgggggaaaccgggtggaattcaaaatttgggccattggggcttattctaaacagccaaggggcaggggccacgggcaaatcccagccatgatccacagggaaggggcctgctgggctccccatgctgtgtggaagcccactacccggccgtcctgtacctgagggccctcgaatcgcaggccgcccaccagccccacaggccacactgagacaccacgggtccagcgcatctcctcaaacagctcccggctgtaggtgttgtcatcgtcagcaaagtagacgactccttgggtccctggtggtggtgggtccttctcncccacccacagcaccccctctgccccggagccagtccagggccttgttccgctgctcgacaccacggggatgaacccagccaggctcgccctcccgaagccgctgggctttgggcgtgaggaccaccaggtgtgtgaagaggaggccagaggcagccagcagccctgagaccagcggggtgggaccctcagcatcctccaccagcagccaatgcagccggggcaccaggctcagtgtctgggacagtcgtaccagctctgccttctgtaccagcctggcataggtgggggtaacaacatagatagtaggcagggcctcgggttcagggggctgggcaggggcagggggtggccgtcggagttccgcttgcagctgggaaatcctcagatccttctgccgtagctgctcggctgctgcccgcaggggaggaaggcagtcacatggctggccgagctgtaccagcgcgtagaggaggccggcgatcgacaccaggaagtaggcgagaaacacgttcttcagcttcagcttcatggccgcgccgccgcccgcgc

SEQ ID NO: 312977 - DNA, 1284 bp, Homo Sapiens
  misc_feature (23)..(23): n is a, c, g, or t
  misc_feature (258)..(258): n is a, c, g, or t
  misc_feature (306)..(306): n is a, c, g, or t
cgacgtggggttctcataggggncgacagaagggtgctggtccaggacacccgaagtagtcctctgtgaaggggcgccccaccagatgggctagagaggcccagagtcccccaaaaaaaagtggtgccccgcggtgtaggtcagagggtgacccccttccctttaccggggggggcccgagacgggccgcctttcgggttccccccccgctaagaacaaggggccaaaaccttactttcaaacccacaagggggttgntttgtgtcccccaagcctgttggggccagtgccccccacgggcaaggncttagggggagggggttgaagcaagccagggaccattgcccctggggcctgggaggggccagaggggcccactttctgctctccaaggggtcagggacttggaaaacccacatcctggggcaggcctggggcccagtccccacaaggtctgtgcctgaaaagaggtggtagttggggtggggccgccatcacacctcaattgctgggtctgagtcccggcccctgccgctgcagctgttcctcttggttcatcttggggttctctttccgagtatgccccacccagtccccgagtgcagttggcagcccgtggctccaggtccttgggatccacaaggtggctcagaagactgctctccaggtggccccggggagcggtggaatcaaattgggcattgggcttatctaacagcaagggcagggccacggcaaatccagccatatccacagggaagggcctgctgggctcccatgctgtgtggaagcccactacccggccgtcctgtacctgagggccctcgaatcgcaggccgcccaccagccccacaggccacactgagacaccacgggtccagcgcatctcctcaaacagctcccggctgtaggtgttgtcatcgtcagcaaagtagacgactccttgggtccctggtggtggtgggtccttctccccacccacagcaccccctctgccccggagccagtccagggccttgttccgctgctcgacaccacggggatgaacccagccaggctcgccctcccgaagccgctgggctttgggcgtgaggaccaccaggtgtgtgaagaggaggccagaggcagccagcagccctgagaccagcggggtgggaccctcagcatcctccaccagcagccaatgcagccggggcaccaggctcagtgtctgggacagtcgtaccagctctgccttctgtaccagcctggcataggtgggggtaacaacatagatagtaggca

SEQ ID NO: 312978 - DNA, 1302 bp, Homo Sapiens
  misc_feature (97)..(143): n is a, c, g, or t
gggcccgtcaggacgtgcgaaaagcgacggcgcagcacggtgcggcgcagctcctgctcgcctttcccttcgctgggcgagaggtgtctatggggcnnnnnnnnnnnnnnnnnnnnnnnnnnnnnnnnnnnnnnnnnnnnnnnagtgctgtctctatggcgaggaggaggaggaggagcgcgagctcagcgacacaagtacataaataaaggataaaatattttatgaaacaaatcttcaatcaagtataacattttgatgcttggcatctagactcccttgtgccctcactatgccagcggcaactgtagatcatagccaaagaatttgtgaagtttgggcttgcaacttggatgaagagatgaagaaaattcgtcaagttatccgaaaatataattacgttgctatggacaccgagtttccaggtgtggttgcaagacccattggagaattcaggagcaatgctgactatcaataccaactattgcggtgtaatgtagacttgttaaagataattcagctaggactgacatttatgaatgagcaaggagaataccctccaggaacttcaacttggcagtttaattttaaatttaatttgacggaggacatgtatgcccaggactctatagagctactaacaacatctggtatccagtttaaaaaacatgaggaggaaggaattgaaacccagtactttgcagaacttcttatgacttctggagtggtcctctgtgaaggggtcaaatggttgtcatttcatagcggttacgactttggctacttaatcaaaatcctaaccaactctaacttgcctgaagaagaacttgacttctttgagatccttcgattgttttttcctgtcatttatgactttgaggtacttcatgaagatctgtaaccaactctaacttgcctgaagaagaacttgacttctttgagatccttcgattgttttttcctgtcatttatgatgtgaagtacctcatgaagagctgcaaaaatctcaaaatgttctttgaagatcatattgatgatgccaaatattgtggtcatttgtatggccttggttctggttcatcctatgtacagaatggcacagggaatgcatatgaagaggaagccaacaagcagtcatgacatgaaatagtccttttatttttatttcgagctacacacatgcttgtatataggttttatctctggttgaatccctcgaacaatagacagtacctttcccccccctttcatggcccattttattgtctgcctttcagtactaagtatgaccgttcctatctc

SEQ ID NO: 312979 - DNA, 674 bp, Homo Sapiens
  misc_feature (12)..(12): n is a, c, g, or t
tggaacacgttngggactatgacttaatgattgtgcctcatctttgaactcattttgtgctctgacatcacttgccaagtcttcaaattcagaatccagctctctactttcagtatctactgtcaacctggcagcttcctcttcatgacccgattggcatgagcttgacaaaaagttttcttccaactggccaaagttatcttgcagcactgcaccttgattactactggccaacaggcctttcatagtacaccaggactcggtcaccagcctgcttgataagcttcaacacttgcagtgttgatgtgattttcacacctccaatggcgataagtcgatctccccgctgaagatctgcaattgcagcaggcgagtttggagccacagtttcaatgatgacgtgcccagcatacccatcagttgactggacaagacgaagtgtaagtccaacactttgtaaatttccttttattaattcaaccgtcttaatagaactcctctgtttttcttcccaaacactactgcttaactcaagtgtgcaatgaacatttgcctctctgtcataggatccaaaaatgagtaacctgctacattctaacaacgtaactttaagacggccttcagtaagtgcccattgttgtatatggatatgctcttcatcttcttcaaatcct

SEQ ID NO: 312980 - DNA, 383 bp, Homo Sapiens
agacttgcagcactgcaccttgattactctggccaacaggcccatagtacaccaggaccacacctccaatggcgataagtcgatctccccgctgaagatctgcaattgcagcaggcgagtttggagccacagtttcaatgatgacgtgcccagcatacccatcagttgactggacaagacgaagtgtaagtccaacactttgtaaatttccattaattcaacctgatcttgtaattcggtagggtgtgcttgcgcttgatgatcttcttgagctggttgacgatgatggaggtgagctggggcatgggccgcccttcaaactgcgagcgcacctcgaagtcgatcagcctcgtgccgaattcctcagcccgggggatccacta

SEQ ID NO: 312981 - DNA, 582 bp, Homo Sapiens
  misc_feature (22)..(22): n is a, c, g, or t
  misc_feature (49)..(49): n is a, c, g, or t
  misc_feature (124)..(124): n is a, c, g, or t
  misc_feature (242)..(255): n is a, c, g, or t
aaacactttgggaaggcccaangtgggtgccatcacctaggtccaggantttgaaaactaaccctggcccaacatggtaaaacccccatctcctactaaaaaataacaaaaaaccccggcatantgaatgcatgccctgtaatctcagctactcaatcgcttgaacctaggaggaggggttgcagtgagctgattgtgccactgcactccaacctgggtgacagagcaagactccatctaannnnnnnnnnnnnnaagagaaaatggctgaaagaccttcccctgtctgtttattggtagttgtcagtgtgtgcatgtagcctgtgttcagaagcacagaccaccagagtaagaacatcactcccttctaggccacaccccaggcacatgtgcagggggtgaggcagctgaggaatcttgaaagggctatttatttcctacgagagtcctggggaaaccgcctgggaggaggctggctcagcaatcagagcctcaaatttgctccatgcccccttcctccagatcatccagcctcagagaggttgtgttcatttcatagatcagggacccatgatgcgtgtt

SEQ ID NO: 312982 - DNA, 1224 bp, Homo Sapiens
  misc_feature (13)..(13): n is a, c, g, or t
  misc_feature (31)..(31): n is a, c, g, or t
ccctcacccccangaaggccccctacaaggnattaatttttccccctaaagccaagggagaaagagtatagattttaaaagggtatgtgaccccttatttttcctatccttaggaaaacagtagccaaaccacctagtcacttgtgtacatatttacatttatttacaaaagtatctacatcatcagtaaaaacaatttactgacaaaaaaagcaagcacctagtcatataataagttgatgacagccaaaactaatgcttgttctttgttagtgggtatttcttcttaaagcagctgcttcaagttacatttccaacagttgttcaaaaattgtaatactcaaatgagaaatcagatggctttttagtttttaaaataatttagttatgctgttgtcttcatcttctgttaccaatcaattggagttggttctgtctggttttctgtcacatttcagaataccattcatatacagcacaatacatgttgtaattactgctaatggtatgggtataagtgcatatctgtgtcttgaatgaccgctgcttgggatacaggttgtcaaaatgattgatgatgttgtattaaataatggattgctaagagtacactgtattttttgtggaagatcattttccatcttaaaatatatactggttgagttacgtttacattgctccataggacaatcccatgagtacattataagtcctcgatggctgttgtaatgctctggtatcatgcattggacttcaatgcttccattagtcaatgcacaagttagtgtgggagatggaagagactcaagcacataaagaaagaacttcatggtatcagtaatatttggcgattccatttcatactcatcttcatctgatgatgttaagttgtagatagtgaggctacctgacacagtgtctaaataaaccctatttttaaaagatgagaaagctctgaattcagaattttccagttctgcaactttatccttttgttttttccataggacctcttttaaaggcacattgcttggtacatggaaagttacattcccatacacaacaccatatatttgttgggaaaaacagctgatgaaaccaaagcagtgcagcaggcagaccacgctgaggacccccagggcccgccccgcgtcgctcccagcaaccatggctcgtcgggccggcctctgcgcgagtgcccagccacaagcagccctaagttcc

SEQ ID NO: 312983 - DNA, 1063 bp, Homo Sapiens
  misc_feature (144)..(144): n is a, c, g, or t
  misc_feature (160)..(160): n is a, c, g, or t
  misc_feature (344)..(344): n is a, c, g, or t
  misc_feature (464)..(464): n is a, c, g, or t
  misc_feature (589)..(589): n is a, c, g, or t
  misc_feature (596)..(607): n is a, c, g, or t
  misc_feature (611)..(705): n is a, c, g, or t
ataaccgccaaaaaaaatcagtacaccgccatccctcacccagacacagcccctctccaacaccttcacgaaacactgattttttttcttagagctaaaatgaacacccagtcaacaactacagccctgccctgcaccacctcncaatggcctgctcagnttcccgcactgcaaacctggccgcctttagcctccctcccttagcgtagtgtcccaaggtcacctagcctgctttttgcctgtaggatatgggtcccctttcttaaagcccgccctgacttacttcctcatttgcatagtccttcagctctatcctgtcgcaactccacccaccccagacaacnacctgtaagaaaccaggtttgaaattcaagagaccaggtttccaagctcccagctgcttccctgtgggcctcggtgcctcggctgttatgtgacgggcatagacattgattaaggtcatncatttcatgatttggacgagaaaggagggaaggagatccagaaatacgcaagagaggtgataagcagagacagaggataaaaggataagagtagagaggatttgggtggtttggtggggaagaanggttgannnnnnnnnnnnatannnnnnnnnnnnnnnnnnnnnnnnnnnnnnnnnnnnnnnnnnnnnnnnnnnnnnnnnnnnnnnnnnnnnnnnnnnnnnnnnnnnnnnnnnnnnnnagcataagccactgcacccggccgagaggggggaatgaaggtagaggcagggggatgaaggcgccagagctgaagaccagcccccagaagccacacccctgcccttctagcagctacgggtcctctggctccgggccttgtaaacctcgatgagcaggtccttgacgtactggatctcgcgctccacggactctgcccgttccttcagctcgcgattccgtgcctccagcccctggcactcgccctccagggcctcaccctctgcccgcttgcggtcccctcgggtggtggcaggatgtgggtagggggccaggcgagaaggttgaggtggagaaggaggagggggctgctgtggcgg

SEQ ID NO: 312984 - DNA, 1206 bp, Homo Sapiens
  misc_feature (607)..(715): n is a, c, g, or t
  misc_feature (892)..(892): n is a, c, g, or t
  misc_feature (1023)..(1023): n is a, c, g, or t
  misc_feature (1047)..(1047): n is a, c, g, or t
  misc_feature (1079)..(1079): n is a, c, g, or t
  misc_feature (1083)..(1083): n is a, c, g, or t
  misc_feature (1098)..(1098): n is a, c, g, or t
  misc_feature (1106)..(1106): n is a, c, g, or t
  misc_feature (1155)..(1155): n is a, c, g, or t
  misc_feature (1157)..(1157): n is a, c, g, or t
  misc_feature (1161)..(1161): n is a, c, g, or t
  misc_feature (1181)..(1181): n is a, c, g, or t
  misc_feature (1184)..(1184): n is a, c, g, or t
  misc_feature (1190)..(1190): n is a, c, g, or t
ttatttttgctcataacctcccaaaaaaatcagtaccccgccatccctcacccagacacagcccctctccaacaccttcacgaaacactgattttttttcttagagctaaaatgaacacccagtcaccaactacagccctgccctgcccctcctcccactggcctgctcatcttcccgcactgcaaacctggctgcctttagcctccctcccttagcgtagtgtcccaaggtcacctagcctgctttttgcctgtaggatatgggtccccttctcaaagcccgccctgacttacttcctcatttgcatagtccttcagctctatcctgtcgccactccacccaccccagacaaccacctgtaagaaaccaggtttgaaattcaagagaccaggtttccaagctcccagctgcttctctgtgggcctcggtgcctcggctgttatgtgacgggcatagatattgactaaggccaaacatttcatgatttggacgagaaaggagggaaggagatccagaaatacgcaagagaggtgataagcagagacagaggataaaaggataagagtagagaggagttgggtggtttggtggggaagaagggttgannnnnnnnnnnnnnnnnnnnnnnnnnnnnnnnnnnnnnnnnnnnnnnnnnnnnnnnnnnnnnnnnnnnnnnnnnnnnnnnnnnnnnnnnnnnnnnnnnnnnnnnnnnnnagcataagccactgcacccggccgagaggggtttggaatgaaggtagaggcagggggatgaaggcgccagagctgaagaccagcccctagaagccacacccctgcccttctagcagctacgggtcctctggctccgggccttgtaaacctcgatgagcaggtccttgacgtactggnatctcgcgctccacggactctgcccgttccttcagctcgcgattccgtgcctccagcccctggcactcgcgctccagggcctcaccctctgcccgcttccgctggcggtacctcagagccggcgacttgtnctggtctctctcttttgcttgcgncccctcgggtggtggcaggatgtgtgtagggngcangcgaaaaggttaagntgaatagnacgagggtgtgctttgcggcggcaaagcggcatctcacttctcctgccngnctcngtgcgcagtaatgacaccantcnaagtancaaaaagggggttggg

SEQ ID NO: 312985 - DNA, 981 bp, Homo Sapiens
  misc_feature (8)..(8): n is a, c, g, or t
  misc_feature (77)..(77): n is a, c, g, or t
  misc_feature (81)..(81): n is a, c, g, or t
  misc_feature (134)..(134): n is a, c, g, or t
  misc_feature (143)..(143): n is a, c, g, or t
  misc_feature (153)..(153): n is a, c, g, or t
  misc_feature (289)..(397): n is a, c, g, or t
  misc_feature (968)..(968): n is a, c, g, or t
ctctaggnccccagcgaagcggcagagggtgagccctgagggcacgtgcaagggctgaggcacggaatcgcgagctnaagnaccggcagagtccgtagagcgcgacactccagtacgtcaaggacctagctcantcgaggttnacaaggcccngagccagaggaccccgtagctgctagaagggcaggggtgtggcttctgggggctggtcttcagctctggcgccttcatccccctgcctctaccttcattccaaacccctctcggccgggtgcagtggcttatgctnnnnnnnnnnnnnnnnnnnnnnnnnnnnnnnnnnnnnnnnnnnnnnnnnnnnnnnnnnnnnnnnnnnnnnnnnnnnnnnnnnnnnnnnnnnnnnnnnnnnnnnnnnnnntcaacccttcttccccaccaaaccacccaactcctctctactcttatccttttatcctctgtctctgcttatcacctctcttgcgtatttctggatctccttccctcctttctcgtccaaatcatgaaatgtttggccttagtcaatgtctatgcccgtcacataacagccgaggcaccgaggcccacagggaagcagctgggagcttggaaacctggtctcttgaatttcaaacctggtttcttacaggtggttgtctggggtgggtggagtggcgacaggatagagctgaaggactatgcaaatgaggaagtaagtcagggcgggctttgagaaggggacccatatcctacaggcaaaaagcaggctaggtgaccttgggacactacgctaagggagggaggctaaaggcggccaggtttgcagtgcgggaagatgagcaggccagtgggaggaggggcagggcagggctgtagttggtgactgggtgttcattttagctctaagaaaaaaaatcagtgtttcgtgaaggtgttggagaggggctgtgtttgggtgagggttggcgggnttttgtttttttg

SEQ ID NO: 312986 - DNA, 1471 bp, Homo Sapiens
  misc_feature (121)..(140): n is a, c, g, or t
  misc_feature (241)..(261): n is a, c, g, or t
  misc_feature (677)..(677): n is a, c, g, or t
  misc_feature (922)..(1030): n is a, c, g, or t
  misc_feature (1148)..(1148): n is a, c, g, or t
  misc_feature (1311)..(1311): n is a, c, g, or t
  misc_feature (1320)..(1320): n is a, c, g, or t
  misc_feature (1333)..(1333): n is a, c, g, or t
  misc_feature (1343)..(1343): n is a, c, g, or t
  misc_feature (1345)..(1345): n is a, c, g, or t
  misc_feature (1353)..(1353): n is a, c, g, or t
  misc_feature (1373)..(1373): n is a, c, g, or t
  misc_feature (1378)..(1378): n is a, c, g, or t
  misc_feature (1415)..(1415): n is a, c, g, or t
  misc_feature (1419)..(1419): n is a, c, g, or t
  misc_feature (1430)..(1431): n is a, c, g, or t
  misc_feature (1437)..(1437): n is a, c, g, or t
  misc_feature (1443)..(1444): n is a, c, g, or t
  misc_feature (1446)..(1446): n is a, c, g, or t
  misc_feature (1448)..(1448): n is a, c, g, or t
  misc_feature (1451)..(1452): n is a, c, g, or t
  misc_feature (1456)..(1456): n is a, c, g, or t
  misc_feature (1461)..(1461): n is a, c, g, or t
  misc_feature (1466)..(1466): n is a, c, g, or t
ggggggaaataacccaaccccgtctgtttctagtcccccggtgtttttctagggaaccacactatataggccccgttttcccttacaccagctggcgccccggcggggccccaagggaggnnnnnnnnnnnnnnnnnnnnaggggggcgaagggtgaccaaaaaatttttaacgggatggcggtcatggaagtagataaatcaaagaaggacgaggggaggtagtgggtgttggagttgcnnnnnnnnnnnnnnnnnnnnnagactacggagagggggttgggggcgaggtatcatctagaggaaatgtttcgttttatttttgctcataacctcccaaaaaaatcagtaccccgccatccctcacccagacacagcccctctccaacaccttcacgaaacactgattttttttcttagagctaaaatgaacacccagtcaccaactacagccctgccctgcccctcctcccactggcctgctcatcttcccgcactgcaaacctggccgcctttagcctccctcccttagcgtagtgtcccaaggtcacctagcctgctttttgcctgtaggatatgggtccccttctcaaagcccgccctgacttacttcctcatttgcatagtccttcagctctatcctgtcgccactccacccaccccagacaaccacctgtnagaaaccaggtttgaaattcaagagaccaggtttccaagctcccagctgcttccctgtgggcctcggtgcctcggctgttatgtgacgggcatagacattgactaaggccaaacatttcatgatttggacgagaaaggagggaaggagatccagaaatacgcaagagaggtgataagcagagacagaggataaaaggataagagtagagaggagttgggtggtttggtggggaagaagggttgannnnnnnnnnnnnnnnnnnnnnnnnnnnnnnnnnnnnnnnnnnnnnnnnnnnnnnnnnnnnnnnnnnnnnnnnnnnnnnnnnnnnnnnnnnnnnnnnnnnnnnnnnnnnagcataagccactgcacccggccgagaggggtttggaatgaaggtagaggcagggggatgaaggcgccagagctgaagaccagcccccagaagccacacccctgcccttctagcagcnacgggtcctctggctccgggccttgtaaacctcgatgagcaggtccttgacgtactggatctcgcgctccacggactctgcccgttccttcagctcgcgattccgtgcctccagccctggcactcgccctccagggcctcaccctctgcccgcttccgctggnggtactcanagccgccgacttnttctggtctntnttcttttnctttcggtccctcgggtggntggangatgtgggtagggggcaagcgaaaaggttaaggtganaagnaggagggggtnntgttgngggggnnangnggnncccncttcntcttnccggc

SEQ ID NO: 312987 - DNA, 1449 bp, Homo Sapiens
  misc_feature (55)..(95): n is a, c, g, or t
  misc_feature (179)..(273): n is a, c, g, or t
  misc_feature (770)..(878): n is a, c, g, or t
ctgacctggatgactgagcgagttgatttcacagctctcctccctctggagcctnnnnnnnnnnnnnnnnnnnnnnnnnnnnnnnnnnnnnnnnnacctgacctggaagctatggcctccctcctcaagaaggagctggaacagatggaagacttcttcctagatgccccgctcctccnnnnnnnnnnnnnnnnnnnnnnnnnnnnnnnnnnnnnnnnnnnnnnnnnnnnnnnnnnnnnnnnnnnnnnnnnnnnnnnnnnnnnnnnnnnnnnngtcttggatactctggacttgctggccatctactgccgcaacgaggccgggcaggaggaagtggggatgccgcctctgcccccgccacagcagccccctcctccttctccacctcaaccttctcgcctggccccctacccacatcctgccaccacccgaggggaccgcaagcaaaagaagagagaccagaacaagtcggcggctctgaggtaccgccagcggaagcgggcagagggtgaggccctggagggcgagtgccaggggctggaggcacggaatcgcgagctgaaggaacgggcagagtccgtggagcgcgagatccagtacgtcaaggacctgctcatcgaggtttacaaggcccggagccagaggacccgtagctgctagaagggcaggggtgtggcttctgggggctggtcttcagctctggcgccttcatccccctgcctctaccttcattccaaacccctctcggccgggtgcagtggcttatgctnnnnnnnnnnnnnnnnnnnnnnnnnnnnnnnnnnnnnnnnnnnnnnnnnnnnnnnnnnnnnnnnnnnnnnnnnnnnnnnnnnnnnnnnnnnnnnnnnnnnnnnnnnnnntcaacccttcttccccaccaaaccacccaactcctctctactcttatccttttatcctctgtctctgcttatcacctctcttgcgtatttctggatctccttccctcctttctcgtccaaatcatgaaatgtttggccttagtcaatgtctatgcccgtcacattacagccgaggcaccgaggcccacagggaagcagctgggagcttggaaacctggtctcttgaatttcaaacctggtttcttacaggtggttgtctggggtgggtggagtggcgacaggatagagctgaaggactatgcaaatgaggaagtaagtcagggcgggctttgagaaggggacccatatcctacaggcaaaaagcaggctaggtgaccttgggacactacgctaagggagggaggctaaaggcggccaggtttgcagtgcgggaagatgagcaggccagtgggaggaggggcagggcagggctgtagttggtgactgggtgttcattttagctctaagaaaaaaaatcagtgtttcgtgaaggtgttggagaggggctgtgtctgggtgagggatggcgggg

SEQ ID NO: 312988 - DNA, 930 bp, Homo Sapiens
  misc_feature (19)..(20): n is a, c, g, or t
  misc_feature (24)..(24): n is a, c, g, or t
  misc_feature (26)..(27): n is a, c, g, or t
  misc_feature (35)..(35): n is a, c, g, or t
  misc_feature (43)..(43): n is a, c, g, or t
  misc_feature (45)..(45): n is a, c, g, or t
  misc_feature (47)..(47): n is a, c, g, or t
  misc_feature (59)..(59): n is a, c, g, or t
  misc_feature (63)..(63): n is a, c, g, or t
  misc_feature (66)..(68): n is a, c, g, or t
  misc_feature (75)..(75): n is a, c, g, or t
  misc_feature (96)..(96): n is a, c, g, or t
  misc_feature (108)..(108): n is a, c, g, or t
  misc_feature (123)..(123): n is a, c, g, or t
  misc_feature (135)..(135): n is a, c, g, or t
  misc_feature (149)..(149): n is a, c, g, or t
  misc_feature (163)..(163): n is a, c, g, or t
  misc_feature (165)..(165): n is a, c, g, or t
  misc_feature (168)..(168): n is a, c, g, or t
  misc_feature (172)..(173): n is a, c, g, or t
  misc_feature (183)..(184): n is a, c, g, or t
  misc_feature (189)..(189): n is a, c, g, or t
  misc_feature (194)..(194): n is a, c, g, or t
  misc_feature (207)..(207): n is a, c, g, or t
  misc_feature (210)..(210): n is a, c, g, or t
  misc_feature (213)..(213): n is a, c, g, or t
  misc_feature (219)..(219): n is a, c, g, or t
  misc_feature (222)..(222): n is a, c, g, or t
  misc_feature (224)..(225): n is a, c, g, or t
  misc_feature (227)..(227): n is a, c, g, or t
  misc_feature (248)..(248): n is a, c, g, or t
  misc_feature (250)..(250): n is a, c, g, or t
  misc_feature (252)..(253): n is a, c, g, or t
ccgtcccctcggtggtgcnngatntnntaggggcnagcgagangntnaagtggagaagnaganggnnntgctgtngcggggcagaggcggcatccncactgcctcctncccggcctcgttgcngcaatagatggncagcaagtccagantatccaaaacaggngntgngganntaaaaggagnnaaggnacagngggaggagggggntgntgntagtgntgntnntngtagtggcggcgggggggccntngnnggagcggggcatctaggaagaagtcttccatctgttccagctccttcttgaggagggaggccatagcttccaggtcaggtggggttggggaaggttgggggaggcttccgggccccaagggacgctccagagggaggagagctgtgaaatcaactcgctcagtcatccagtcagagaagccatcacctgccaggggctctccccccactggaagcccgccctccagggctcccccaaggacctcatagggagccaggggggcaggggccggggggagtttcccatagtctacgagccatcccagcccactagctgggagcagggccctgtccagctccagccccagggtcgccaggagtgacatggctgtagcacaggtgctgggcactgatggcaacaggagaggctgcaccagcagctggcacgaggctctggaggatgctcaggtgggcgaagacaggcaccaaggcgaaagtggaagactccatggctgcagcaaggagaggcggcggcggcctcggctgaagaaagaaggtgggagcggagagcgcaggcgtggtgagcgcggagacgggccgggggcacaaaggggtcgaggctacagagccatggccggggtacgcaggcagaggcggcgacactgtagtgagaagagactgtatccgaggacagggaat

SEQ ID NO: 312989 - DNA, 1126 bp, Homo Sapiens
  misc_feature (4)..(4): n is a, c, g, or t
  misc_feature (11)..(11): n is a, c, g, or t
  misc_feature (373)..(373): n is a, c, g, or t
  misc_feature (618)..(726): n is a, c, g, or t
  misc_feature (798)..(798): n is a, c, g, or t
  misc_feature (953)..(953): n is a, c, g, or t
  misc_feature (957)..(957): n is a, c, g, or t
  misc_feature (976)..(976): n is a, c, g, or t
  misc_feature (985)..(985): n is a, c, g, or t
  misc_feature (1020)..(1020): n is a, c, g, or t
  misc_feature (1031)..(1031): n is a, c, g, or t
  misc_feature (1060)..(1060): n is a, c, g, or t
  misc_feature (1065)..(1065): n is a, c, g, or t
  misc_feature (1075)..(1075): n is a, c, g, or t
  misc_feature (1082)..(1082): n is a, c, g, or t
  misc_feature (1088)..(1088): n is a, c, g, or t
  misc_feature (1091)..(1091): n is a, c, g, or t
  misc_feature (1094)..(1094): n is a, c, g, or t
  misc_feature (1101)..(1101): n is a, c, g, or t
  misc_feature (1103)..(1103): n is a, c, g, or t
  misc_feature (1108)..(1108): n is a, c, g, or t
  misc_feature (1116)..(1116): n is a, c, g, or t
  misc_feature (1122)..(1122): n is a, c, g, or t
  misc_feature (1124)..(1124): n is a, c, g, or t
ttcntttctanttttgctcataacctcccaaaaaaatcagtaccccgccatccctcacccagacacagcccctctccaacaccttcacgaaacactgattttttttcttagagctaaaatgaacacccagtcaccaactacagccctgccctgcccctcctcccactggcctgctcatcttcccgcactgcaaacctgggccgcctttagcctccctcccttagcgtagtgtcccaaggtcacctagcctgctttttgcctgtagggatatggggtccccttctcaaagcccgccctgacttacttcctcatttgcataggtccttcaggtctatcctgtcgccactccacccaccccagacaaccacctgtnagaaaccaggtttgaaattcaagagaccaggtttccaagctcccagctgcttccctgtgggcctcggtgcctcggctgttatgtgacgggcatagacattgactaaggccaaacatttcatgatttggacgagaaaggagggaaggagatccagaaatacgcaagagaggtgataagcagagacagaggataaaaggataagagttgagaggagttgggtggtttggtggggaagaagggttgannnnnnnnnnnnnnnnnnnnnnnnnnnnnnnnnnnnnnnnnnnnnnnnnnnnnnnnnnnnnnnnnnnnnnnnnnnnnnnnnnnnnnnnnnnnnnnnnnnnnnnnnnnnnagcataagccactgcacccggccgagaggggtttggaatgaaggtagaggcagggggatgaaggcgccaganctgaagaccagcccccagaagccacacccctgcccttctagcagctacgggtcctctggctccgggccttgtaaacctcgatgagcaggtccttgacgttctggatctcgcgctccacggactctgcccgttccttcagctcgcgattccgtgcntcancccctggcactcgccctcnagggctcancctctggccgcttccgctggcggtacctcaaagcngcgaattgttntgggttctcttctttttctttcggtcccncgggnggtgggaggngtgggtntagggncancgnaaagttnangtgtnaaagaggnggggtntntt

SEQ ID NO: 312990 - DNA, 1007 bp, Homo Sapiens
  misc_feature (66)..(66): n is a, c, g, or t
  misc_feature (236)..(236): n is a, c, g, or t
  misc_feature (239)..(287): n is a, c, g, or t
  misc_feature (307)..(307): n is a, c, g, or t
  misc_feature (311)..(311): n is a, c, g, or t
  misc_feature (406)..(409): n is a, c, g, or t
  misc_feature (411)..(412): n is a, c, g, or t
  misc_feature (414)..(414): n is a, c, g, or t
  misc_feature (416)..(417): n is a, c, g, or t
  misc_feature (420)..(420): n is a, c, g, or t
  misc_feature (423)..(423): n is a, c, g, or t
  misc_feature (427)..(427): n is a, c, g, or t
  misc_feature (430)..(430): n is a, c, g, or t
  misc_feature (436)..(436): n is a, c, g, or t
  misc_feature (440)..(440): n is a, c, g, or t
  misc_feature (447)..(448): n is a, c, g, or t
  misc_feature (549)..(549): n is a, c, g, or t
  misc_feature (596)..(596): n is a, c, g, or t
  misc_feature (609)..(611): n is a, c, g, or t
ctggcggtaaccctcaaaaacacccaacttgttcctggtcctcctccttccttttgccttccggtntcccctcgggtggttggccaggaatgtgggttagggggccccagcgaagaaggttgaaggtggaagaaggaggagggggctgctgtggcgggggcagaggcggcatccccacttcctcctgcccggcctcgttgcggcagtagatggccagcaagtccagagtatccaanacnnnnnnnnnnnnnnnnnnnnnnnnnnnnnnnnnnnnnnnnnnnnnnnnntggtggtagtggtggtggtnttantggcggcggggagggtggtgggaggagcggggcatctacgaagaagtcttccatctgttccagctccttcttgaagagagaaccatagcttccannnnanntnannttnaanaaanttnggaganggtnccgaggnntaaaggaagctccagagggaggagagctgtgaaatcaactcgttcagtcatccagtcagagaagccatcacctgccaggggctctccccccactggaagcnccgccctccagggctcccccaaggacctcatagggagccaggggggnaggggccgggggnnntttcccatagtctacgagccatcccagcccactagctgggagcagggccctgtccagctccagccccagggtcgccaggagtgacatggctgtagcacaggtgctgggcactgatggcaacaggagaggctgcaccagcagctggcacgaggctctggaggatgctcaggtgggcgaagacaggcaccaaggcgaaagtggaagactccatggctgcagcaaggagaggcggcggcggcctcggctgaagaaagaaggtgggagcggagagcgcaggcgtggtgagcgcggagacgggccgggggcacaaaggggtcgaggctacagagccatggccgggcgtacgcaggcagaggcggcgacactgtagtgagaagagactgtgatccgagatcc

SEQ ID NO: 312991 - DNA, 1015 bp, Homo Sapiens
  misc_feature (571)..(679): n is a, c, g, or t
  misc_feature (770)..(770): n is a, c, g, or t
  misc_feature (778)..(778): n is a, c, g, or t
  misc_feature (795)..(795): n is a, c, g, or t
  misc_feature (799)..(799): n is a, c, g, or t
  misc_feature (803)..(803): n is a, c, g, or t
  misc_feature (807)..(808): n is a, c, g, or t
  misc_feature (814)..(814): n is a, c, g, or t
  misc_feature (827)..(827): n is a, c, g, or t
  misc_feature (858)..(858): n is a, c, g, or t
  misc_feature (865)..(865): n is a, c, g, or t
  misc_feature (875)..(875): n is a, c, g, or t
  misc_feature (889)..(889): n is a, c, g, or t
  misc_feature (894)..(894): n is a, c, g, or t
  misc_feature (900)..(900): n is a, c, g, or t
  misc_feature (904)..(904): n is a, c, g, or t
  misc_feature (906)..(906): n is a, c, g, or t
  misc_feature (916)..(917): n is a, c, g, or t
  misc_feature (923)..(924): n is a, c, g, or t
  misc_feature (931)..(931): n is a, c, g, or t
  misc_feature (938)..(938): n is a, c, g, or t
  misc_feature (949)..(949): n is a, c, g, or t
  misc_feature (956)..(956): n is a, c, g, or t
  misc_feature (963)..(963): n is a, c, g, or t
  misc_feature (967)..(969): n is a, c, g, or t
  misc_feature (983)..(983): n is a, c, g, or t
  misc_feature (992)..(992): n is a, c, g, or t
  misc_feature (997)..(997): n is a, c, g, or t
  misc_feature (1004)..(1004): n is a, c, g, or t
cccgccatccctcacccagacacagcccctctccaacaccttcacgaaacactgattttttttcttagagctaaaatgaacacccagtcaccaactacagccctgccctgcccctcctcccactggcctgctcatcttcccgcactgcaaacctggccgcctttagcctccctcccttagcgtagtgtcccaaggtcacctagcctgctttttgcctgtaggatatgggtccccttctcaaagcccgccctgacttacttcctcatttgcatagtccttcagctctatcctgtcgccactccacccaccccagacaaccacctgtaagaaaccaggtttgaaattcaagagaccaggtttccaagctcccagctgcttccctgtgggcctcggtgcctcggctgttatgtgacgggcatagacattgactaaggccaaacatttcatgatttggacgagaaaggagggaaggagatccagaaatacgcaagagaggtgataagcagagacagaggataaaaggataagagtagagaggagttgggtggtttggtggggaagaagggttgannnnnnnnnnnnnnnnnnnnnnnnnnnnnnnnnnnnnnnnnnnnnnnnnnnnnnnnnnnnnnnnnnnnnnnnnnnnnnnnnnnnnnnnnnnnnnnnnnnnnnnnnnnnnagcataagccactgcacccggccgagaggggtttggaatgaaggtagaggcagggggatgaaggcgccagagctgaagaccagcccccagnagccacanccctgcccttctagcanctangggncctnnggctcngggccttgtaaanctcgatgagcagggccttgacgtactggatntcgcgcntcacggactntgcccgttccttanctcgngattcntttntncagccctggnntcgccnncaggggntcacctntgccgtttcgntggggancttaaancgcnnnttttcgggcctctncttagttgnggccncgggggnggaagtattgg

SEQ ID NO: 312992 - DNA, 2454 bp, Homo Sapiens
tcctttttggcagcggggagagggaaagaggaggaaatggggtgtgatgggtcaaaggcaggaaaggtaagccatggtcctcaaaccaaagagccctctctgtaggtcctctgatctttgagtgtgagctcaagctctccagtggacacagaaaaaggcctggtagtaagtggtttgcattgtgaggtatgaggatccctggtaaattcagcagcatgtggtttttggaaatcagcccacaagataagaacactgcaaccaaactcataactaatactgctaatttaactattgtccaaaagagaaagggaagaagaaaaaaatccccactctactgggaggttctaggctttcctataagttatccaaatagtctttttttaatctcagggtttcttaagagaattcccattcagtgaccatttctttcgttaaaggcactttcaatgacatgattggaaaggagtgaattttaattgtagtgaaaccaagattaattccttggcacacctgggaagaagaggaaccggatgggggcatttacagtgatttcaaaaggcaaataattaagtcttgagcatttcaacagatgcacacccagaaaaaaaatgtatgccccgaaaacacttgtatttttcctttagttttccagctgtttctatctatagctctgcaaagagatcacattcactacttgattgattttcaagacactggccctaactcttcccaccacagctgtgcttgacaaaattagccaacagtcagtcctacagggggaaaaagaagaaaatcaatttgggccaagctttcctagagcaaagggatctttccttgcccaggtaatggcaggttcagttgctggacctatagcaactgaatgtaatatgtggcccctactacctatgaaatgttggactttttgacaggcaagactaagtgttctctctctaaatataaattgtggagcatatattttttttctttcctctctcctgaacatttcttattgatctcaggcttacaaaattagttaagtgagaattattaaaatcatataaggggttgagaaagagtaaagagctaatgtttgtctacatgtgtgagttgaggatcttgatccttcatatcatactcccaacccagagaaaaatacaaaaataaacacgccatgttaatacataatacaaagtgtaaatctacaaacacaagtgtactaattagagttgttcctcagaagcacggcttccctccagtccctcagagaggaggaggaatggggacgggatggttttcattacgccttttcatgtcttaaaaagtttgtagtaacagtctcagtagcgcaaacaatttcatgtgaaaccagaagctgtaaaaataaattacttttgaggaaatgagggttcctccgcagctcagaactcatcatgccgtactaaggcctccccaaaatctgtggcctggctgccaacaaataagtcatacttgtcaacgatctcctccttggtaagcttgccatccttgttttggtctgattcatagaccaggtgcctggcttctgcctctgcatgatcatagtctgagggaaggatccagtctttggtctcttccttgtccatcttcccatcacggttcttatcccgaaactcaacaaactgctctcgctctgtctttacccattctggctcatcagtattcccatcatggctgtacatgtcaccaatatactcttctagatcaatgaaaccatcagcattcttatctatatcttccattgtttcctgtactactatatctttcatgtagtcatactcctcagggtgcaggaaagctgtgaactcctccttggtggcaatgaggtctccatccttgtctgccattttaaacctccgctcatctctaaccatcatctgtttatagttaaatccatcatcaggatctggatcatctaaaacgtagccgtaggtggcatttttatactcctcccaggaaacgaggccgtcctcattgaggtcatgccccttccactgtcgctctacatcctcgtaaatccagcgcttttgtgcaaatttaatccagtctttgagctcatccacagtgacaaacccgtccttgtcgccatctattttacttacaatctttccaagcctttccttgctctcttctggtgtcagctgatcaaaggtctttgcttcttcagcacccaagaaggcatcatggtcataatcaaaactctgagcatcattgtgaaccttgtcactgagctgaggctcatgatgtacacggtccttcttttctgtgggtttgctcaaggcaaaggctgtgcacagggacaggcacataagaaactgtcgcaggtccatgataattagatctttcctcgtagcccccacagcacaggatgccgtggccgccgctcacccaccggctcagctcacgcgcgcaagcacc

SEQ ID NO: 312993 - DNA, 1333 bp, Homo Sapiens
  misc_feature (162)..(171): n is a, c, g, or t
caaggggcatgtggaaaggcgggtggtggtaacggagtataattgtgaaaaagggatttaaccccaatttttggcgggggggtggttcgcgcgggctttggcgtgagaggcgtttgtattggagaaaaagggtttgtttcgtcctgcggggcaaaattcccnnnnnnnnnnttttccccccgatttgtggttcttgaagggcggagcgggaatcattgggaaaagggttgcttgcgcctctgtgttctttaaagcgaggggggaaaaaaggaaataaaaggtctaagaggggcccaaaggggaattcactggggcgggagggggattccccagggttttcattctataaccggttgggggaaaaggttttaccaagttcgggcgggcaacgcggtttttgaaactaccggcccggttttttttatgagagggccggcccaggggcctaaatccgatatggaggttcgcgttcgcctccccggtgataggatgggttaaaggcctccgaaatgccattaggatttgtcaccagcactcggttaccgccgggcggtggttattagtgagaatgcaaccagtagtcatgcccaagatctcctcggaaacggctatgaacatgctcatttacgtgttgggaaagcgcgcctaccgaagggtctagtaatttgtgggagggccaaggcgaccgacaagcaggatttccttgggaacagttttgccagggattttaaaaatatatctattttgaaaatattctgaaagtaattaagatcacctattgggaaggaaagaaatcaacacaatgaaatttaggaagagaaatgcaaaagcagctgcagaatcctgccccttccaccccaaggggcacagcccggagatgaagcttattttaggatcacaagtgcacgctctggtagacggaggatgactttgtcagtcttctggctgaagggccttgtccaaagtcaggatcagaaataggtcagctcatcatgcttggctttgttggtctggtagttagataaggtcaagggcttgttttcatgagggagagattggaacactcgcaggtgtacgaagtcctcgtcgccgacgtgcaccttgatgaagtagtttgtccccgcgaccacctggctcttgaatgacacggccttaaacacagggaacttcttgttttctttctcttcaagctgggacctcacctggtcggcgatgtgctgggtctcggcggtggccggctgcgtggcggagggcgccccgcacatcatcttggcggcgacggagggaatctggcgaggggactcggcgaggggacgcgcgggctctgtgccga

SEQ ID NO: 312994 - DNA, 462 bp, Homo Sapiens
  misc_feature (446)..(446): n is a, c, g, or t
ttttttttgtaggcactcaatatttattgaatacatggatgagttcttcctcccccatcttcccctgccctccactccccagctccaccttccacctgcccttacctgccaggggctctccccccactggaagcccgccctccagggtccccccaaggacctcatagggagccaggggggcaggggccgggggaagtttcccatagtctacgagccatcccagcccactagctgggagcagggccctgtccagctccagccccagggtcgccagggagtgacatggctgtagcacaggtgctgggcactgatgggcaacaggagaggctgcaccagcagttggtcacgaggttttgggagggatgttcaggtggggcgaagacagggtaccaaggcgaaagtgggaagattccatgggttgcagcaaggagaggcggcggcggctncggttgaagaaagaag

SEQ ID NO: 312995 - DNA, 521 bp, Homo Sapiens
  misc_feature (39)..(39): n is a, c, g, or t
  misc_feature (46)..(46): n is a, c, g, or t
agaacccccttcttccttctccaaccttaaaccttctcnccttggnccccttacccaacatcctgccaacccacccgaggggacccgcaaagcaaaaagaagagagaccagaaccaagtcggcggctctgaggttaccgccagcggaagcgggccagagggtgaagccctggagggcgaagtcccaggggctggaggcacggaatcgcgagctgaaggaacgggcaagagtccgtggagcgcgagatccagtacgtcaaggacctgctcatcgaggtttacaaggcccggagccagaggacccgtagctgctagaagggcaggggtgtggcttctgggggctggtcttcagctctggcgccttcatccccctgcctctaccttcattccaaacccctctcggccgggtgcagtggcttatgcttgtaatcccagcactttgggagccaaggcaggaggatcgtttgaggccaggaggtcaataccagcctgggcaacatagtaagaccctgtctctattaa

SEQ ID NO: 312996 - DNA, 520 bp, Homo Sapiens
  misc_feature (357)..(357): n is a, c, g, or t
  misc_feature (377)..(377): n is a, c, g, or t
  misc_feature (440)..(440): n is a, c, g, or t
  misc_feature (466)..(466): n is a, c, g, or t
  misc_feature (487)..(487): n is a, c, g, or t
  misc_feature (505)..(505): n is a, c, g, or t
ataaggaaatgtttcgttttatttttgctcataacctcccaaaaaaatcagtaccccgccatccctcacccagacacagcccctctccaacaccttcacgaaacactgattttttttcttagagctaaaatgaacacccagtcaccaactacagccctgccctgcccctcctcccactggcctgctcatcttcccgcactgcaaacctggggccgcctttaggcctccctcccttaggcgtaggtgtcccaagggtcacctaggcctgctttttgcctgtaggggatatgggggtcccctttttcaaagggccggcctggactttactttcctcatttggcatagggtccttcaggnttcttatcctggtcgggcantttcaacccaccccaggacaaccacctgtaggggaacagggggggtttgaaattcaggagacngggggttttccagggttccaggtggnttcctgtggggggctcggggngctcgggttgttatgttnacgggggggataggg

SEQ ID NO: 312997 - DNA, 691 bp, Homo Sapiens
  misc_feature (620)..(628): n is a, c, g, or t
ttgtgttatacctgaaatactgggatggtgtaatttctattttcatcttttgagtccttgattattataagttaaatattttacttacctctcaacatgaatgagttcaaatcacattcattcctatagaaagtaccaattaaagatttagaaaggatacatttccagttattaaaactaaaacccaagtataaatttaagatccagtttattatacagccatatccagctctgtcagaattaagttttagttcatgcccgttatcattcagcagttgaacagttaaattcatcatctgaactgtaatcattatttcccaaaagattatactgccaccaattaaaacttacctaagcgatcactcaagaatggtacagatgtgtggagtatgccaatacctaaggtaaaaaagtagattatctggtttttcatgacgtttagcaaccgtctttttcaaacttttagcaactgtcttgtaattccttcccacagatctaacaatagtcctgtgagtaaagtaaaaccacagagttactctatgaggcgtttccaacgatgtgcaggctacaggaaaagccccatcgggatagacctcaaccactatttacaaggttttgannnnnnnnnaaagacacaggatctgccatgtcttttaaaaatcgtgtgattcttgctgaatcacttgagccc

SEQ ID NO: 312998 - DNA, 1461 bp, Homo Sapiens
accaaaggtggtcgtgagataaccccccctggtgccaatttccagggttttctattacaattgccccgttttatggagaaaggggcttttccccacgtgttcgggcccaggaaaatggccttagaagggaaaattttccgcagccccatgtttcttgttgcgaataagaattttatcacagggacccggggggtgcgtgtaaaaatttagggataattcgggaaggctccccgcctgtggggacgcttccctcgtttggagtaaagaattctcccaggttaaaatgggcccctctccaaggaaacggtgcccactttgtggggaattttttgtttccaaggtaaaccgggctttcggggttttgtcccgacccggggggcagtttttgtttatttggggggagagaattcccaaagccacttaggttcatgggcccagggattcttcctatggaaaaccagcttatggaccagtgtttcaggttagcgttatggggcgccggcgcgcgcaaacggaatgggtttaggaaagcttctggagggcccgaggcggccgacaagatttttttattatttgggttgtttgtggttacacaactgaaactcaaatttttattccttccacagaaaacactagagaaacttcgagccaaaaatacatgctgactttctagaaatagtgtaaaggttttttaattgtgtatatgtagcattagacaaaattatttaaagtcaataaattgttattcgaggaattccatgttgtgatttcttccactgtccatcaaggtcactttagatcctctaaagagctggagtcaaaagatttatcttcaagtttgccctttttaatgaaactgatccagttgtcctgtcagcccataattactttggcttctgtcatctcgttttaatatggatatactgatgaagacttcaaaattcaccaagaatctttgggatctaatttcttcaaccaatttactttagggtcctttttactgtaggtggtggggatctacctggttctcaatttgacaccctctcaacatgaatgagttcaaatcacattcattcctaagcgatcactcaagaatggtacagatgtgtggagtatgccaatacctttaactccagacaccatgttctcaagataaaagcctttgacattcatgatcctgtcacattttcaggcctctctgtccagtatttttggcttttgtagctctctttttagacaaagcagcttcttcagtaatatcctcttcttctaagtatacactcagtcttacagggaattcagaacttactatgaaactatcccctgccaatttgatatcacattcgttatcttcaagatgtgttgcatcctcatcctctgctgttgactcctcaataggagaaatggatccatcatcatccaaaaatttgtatctacgactgtcaaaatcttcattttcta

SEQ ID NO: 312999 - DNA, 1279 bp, Homo Sapiens
  misc_feature (48)..(81): n is a, c, g, or t
  misc_feature (158)..(158): n is a, c, g, or t
gagttcaacttgtgatttctgaaagaactgatgaaattgggtactgcnnnnnnnnnnnnnnnnnnnnnnnnnnnnnnnnnngaatttcatggtatatacttttagttcaaactcagctgtttgtacagtattgtattaggatttggtattagaaaagntgtgtaaatatcttagtatataattgtttctcatttgaggtttttcttctaagggaccttaaagagttttatatacttttgctcacagaaactgctggtgagattaccattttttgagtatctagtcttctagtctttcttttaggcattaggaagccttctttagagttcaaaattttagaagcctaatttgctcttacttccttcaattatgtgccatgtgttttggtttgtatatgttttaaattgtatatttccttggaatatgcttgaaatatttaagaatacattttcaaaatgtataatactgtattgttttgttgatcagaataataagtctcagttaaatgtttgttattactgatagtcaaaatgctcaatagaaatgatgagaggcattggttccaattcattgtcaaatgaacgttttctaattttgttcacagattctttccctttcgattgttctgtatgttaagatagtggcttctgctctcactgttttcctatttatattactagcaggtaggagtgctaattagaaaaacttagatggtattgaaattacagttgacaacttatatttttatgagatggagaaaaaagattaagttgatataacaacaaagtggactttttttcttccttatcctgcacgaaatattgcccttgtttcctctactttcctcttggtgttttctctttttttcaaacagaaacaggccaattccattttcttgagcaagaaagcttagtgtgttacttcatcaaggccagctaatactgtgttaaaccgggctgaaaatgagaaaacttgggagatggaggaatggggaaatggcagtgggataggtagggaaggattactcttaattgttttaaaagccataggaaagtcttccttgtacgtggctgtaaatttataagaactattgtgtcacataaaccaacaagaatcaacctttgctgcttcagataatttgatttttccagcaaggaaattaataagttactgattcttcagcatagaaacaactgagaagaattaatgcaatgtttcttcactagaaaacccacccttcatttcttttcattgctccaaaacccagttttcaactaat

SEQ ID NO: 313000 - DNA, 538 bp, Homo Sapiens
tggctgttgtttttggcaaccattcttaagacaagctgaaagaagaactgtgttttgggaggtaaaacaaattattaaatactatcgatgtggtcctgctcttaacagattttgcaatacagtaacatatagctacttttaaagtaatttttctaatgcttctttctgcaagagggccaaaaccagaacatactgttttagtgtctttgttaacaaaaataattatttataacttttatattagaactgtatatttgatataaaaatatgtttataattaagctatccaaatttgtatattaaacagaattaacacaagtttgcagcatgagattagttgcaaacttattccctattattaatacttccttccattgaacagtcagtaagtaattcccttaacataaatccatcctaagtgtgtgcacaaatcggttagcccatcagttaacttcagaggaccaggtgataaccagatgaattctactcctctactgagacatttagatatttatataaatctatcgctattcctttc

SEQ ID NO: 313001 - DNA, 804 bp, Homo Sapiens
  misc_feature (18)..(18): n is a, c, g, or t
  misc_feature (37)..(37): n is a, c, g, or t
  misc_feature (77)..(77): n is a, c, g, or t
cgtttgtccctggtgggnaaaaaattggtggctcccntgtttttggaactcaaaaaccccttttccccatggggttnaacccaaggtgtcgttccttggctggccccgaatctgtccctgaaaaggcattgctgtggcctttccccaggcttctggtgtgaaacaatgggctccctggtcctccttcccagggatcctgtaggtggtcgaccgtacatctgatgaggacttggtacaagatggaggggattgaacatggccataatcagaagactcagggtctgaagagtaagttggtgacattctgtgacacctctttctctcatctctcctctcatgaccgtgagacactttgtgaggtctctcgagctccgagagtttcctatgtttcttctgcctgtggtcagggctataggatcggctccccgtggctttccaggtttcttggtagtccccctccatctcctcctccttctgcagggcatcccgagggcgctttcgggaattgctcttctcaaagtcctgttcatcaggctcagcatttcgttccacaggaaccagcttcttccactgggccactaggtccctggcaaagcttccaacatgctcgtgttttcgcaagctatttactgttttcccaaccccagtctccgcaagaatgtctactgtaataggcagggtggagagtttcttcaaatatttcaatagcttcttagggtccgggttcgcggccaggcgcgcctgcagcttctccacaacttggagcgccgactccgccgccatcgctgtcactggcgcggcccc

SEQ ID NO: 313002 - DNA, 1367 bp, Homo Sapiens
  misc_feature (538)..(552): n is a, c, g, or t
  misc_feature (1204)..(1266): n is a, c, g, or t
gattaaaatgccaagataagaaacgatttattatagagagaagaaaaatttctcatccaaaatatagaaatctgtacaactttgccacaatcaatatacatgaactgtacaaatttacaccagttcataatttaccaaataaaagatgactaacaaagttcacaaaatagatggtggtttgtggaaaagacttttacccaattaagtacaaggaaagttacaaaccagacctccactttctaaaaataagaagtttactcagtcttagaaaactacaagctagcaaatgtacagagagctggctggtgctaacaccacagttgagacagtgtctttttaagggtcttttttaaagcctgttgccatggcagattctggtcacttgctactttcaaggccaaaaacacaatacaaggtctgaccatttccccaggtcatgcttactagtttgtctttatgtacatttacttggactcacaggctattaaaattaatcattgaaaggtactgtccaaactatggcactgtcacttaaaannnnnnnnnnnnnnnaccattctatcttgtgccagatcttcacagctgtgacatggtttaaattccataatccatccccaagaggagcccacccaaagcaaaaatcaaatttatccatcatcatcagatgatccatccacagactatatcttaacctgatacagtcatcatattgtagtttttggaagggctcgttctgcccaagagaagttcctccttacagctgattcggctgtctaccatttgcacgttggtgctgttttgagtgctacctcctgctggtgaggcttcatacagcacacagatggagccatcctctccaattctgtaggacacttcataggggtcaacccagagtgtgagttcacttgggagaagcctgaacagctcctgactgctcagtccaatccgctgtgctgcctgtccaatcagaggatccattttatggttgatgcgaatacaacggtaacccgatcccttgcatggcttttctgggaaccagtgatgtttataatgttctgccagcagctcctgcaggctctggctgaaggtctgcagctgtcgctcgctcgtgagccccttggtgcggagaaacttggagatgaaggacacggcggcggcgatctcgcctatcatggtggcggcccgggtgtagaagggatgcatnnnnnnnnnnnnnnnnnnnnnnnnnnnnnnnnnnnnnnnnnnnnnnnnnnnnnnnnnnnnnnngcaaccaccccgggcttcctcaccgggcggaaggctgagaggaagagagggcgtgaggggcggacgactacttttgtctttctttctttagactaaaaaag

SEQ ID NO: 313003 - DNA, 956 bp, Homo Sapiens
  misc_feature (16)..(16): n is a, c, g, or t
  misc_feature (33)..(33): n is a, c, g, or t
  misc_feature (41)..(41): n is a, c, g, or t
  misc_feature (688)..(688): n is a, c, g, or t
  misc_feature (696)..(696): n is a, c, g, or t
accattctatcttgtnccagattttcacagttntgacatgntttaaattccataatccatccccaagagagcccacccaaagcaaaaatcaaatttatccatcatcatcagatgatccatccacagactatatcttaacctgatacagtcatcatattgtagtttttggaagggctcgttctgcccaagagaagttcctccttacagctgattcggctgtctaccatttgcacgttggtgctgttttgagtgctacctcctgctggtgaggcttcatacagcacacagatggagccatcctctccaattctgtaggacacttcataggggtcaacccagagtgtgagttcacttgggagaagcctgaacagctcctgactgctcagtccaatccgctgtgctgcctgtccaatcagaggatccattttatggttgatgcgaatacaacggtaacccgatcccttgcatggcttttctgggaaccagtgatgtttataatgttctgccagcagctcctgcaggctctggctgaaggtctgcagctgtcgctcgctcgtgagccccttggtgcggagaaacttggagatgaaggacacggcggcggcgatctcgcctatcatggtggcggcccgggtgtagaagggatgcatgggggcggcgtgcgggggcggcccggggcggccggggntcggcggngcggccccgacggcggagcaaccaccccgggcttcctcaccgggcggaaggctgagaggaagagagggcgtgaggggcggacgactacttttgtctttctttctttagactaaaaaagttattttcgagacaggaggcggcaggagagaggaagagacgagcgatggcggcctggtcacatcgctcggacctccccagctgcctccgcctccagtccgcagcattcgaagatctcaatagctgcatttccaatcccggga

SEQ ID NO: 313004 - DNA, 937 bp, Homo Sapiens
  misc_feature (6)..(6): n is a, c, g, or t
  misc_feature (24)..(24): n is a, c, g, or t
  misc_feature (28)..(28): n is a, c, g, or t
  misc_feature (43)..(43): n is a, c, g, or t
  misc_feature (65)..(65): n is a, c, g, or t
  misc_feature (646)..(708): n is a, c, g, or t
accatntatctgtgccagatcttnacantgtgacatgtttaantccataatccatccccaagagngcccacccaaagcaaaaatcaaatttatccatcatcatcagatgatccatccacagactatatcttaacctgatacagtcatcatattgtagtttttggaagggctcgttctgcccaagagaagttcctccttacagctgattcggctgtctaccatttgcacgttggtgctgttttgagtgctacctcctgctggtgaggcttcatacagcacacagatggagccatcctctccaattctgtaggacacttcataggggtcaacccagagtgtgagttcacttgggagaagcctgaacagctcctgactgctcagtccaatccgctgtgctgcctgtccaatcagaggatccattttatggttgatgcgaatacaacggtaacccgatcccttgcatggcttttctgggaaccagtgatgtttataatgttctgccagcagctcctgcaggctctggctgaaggtctgcagctgtcgctcgctcgtgagccccttggtgcggagaaacttggagatgaaggacacggcggcggcgatctcgcctatcatggtggcggcccgggtgtagaagggatgcatnnnnnnnnnnnnnnnnnnnnnnnnnnnnnnnnnnnnnnnnnnnnnnnnnnnnnnnnnnnnnnngcaaccaccccgggcttcctcaccgggcggaaggctgagaggaagagagggcgtgaggggcggacgactacttttgtctttctttctttagactaaaaaagttattttcgagacaggaggcggcaggagagaggaagagacgagcgatggcggcctggtcacatcgctcggacctccccagctgcctccgcctccagtccgcagcattcgaagatctcaatagctgcat

SEQ ID NO: 313005 - DNA, 1006 bp, Homo Sapiens
  misc_feature (808)..(822): n is a, c, g, or t
  misc_feature (840)..(840): n is a, c, g, or t
  misc_feature (844)..(844): n is a, c, g, or t
  misc_feature (847)..(847): n is a, c, g, or t
  misc_feature (855)..(855): n is a, c, g, or t
  misc_feature (859)..(859): n is a, c, g, or t
  misc_feature (861)..(861): n is a, c, g, or t
  misc_feature (864)..(866): n is a, c, g, or t
  misc_feature (887)..(887): n is a, c, g, or t
  misc_feature (890)..(890): n is a, c, g, or t
  misc_feature (920)..(920): n is a, c, g, or t
  misc_feature (931)..(931): n is a, c, g, or t
  misc_feature (945)..(945): n is a, c, g, or t
  misc_feature (948)..(948): n is a, c, g, or t
  misc_feature (952)..(952): n is a, c, g, or t
  misc_feature (966)..(966): n is a, c, g, or t
  misc_feature (971)..(971): n is a, c, g, or t
  misc_feature (981)..(981): n is a, c, g, or t
  misc_feature (984)..(984): n is a, c, g, or t
  misc_feature (989)..(989): n is a, c, g, or t
  misc_feature (997)..(997): n is a, c, g, or t
  misc_feature (1001)..(1001): n is a, c, g, or t
tttgaaatgccaagataagaaacgatttattatagagagaagaaaaatttttcatccaaaatatagaaatctgtacaactttgccacaatcaatatacatgaactgtacaaatttacaccagttcataatttaccaaataaaagatgactaacaaagttcacaaaatagatggtggtttgtggaaaagacttttacccaattaagtacaaggaaagttacaaaccagacctccactttctaaaaataagaagtttactcagtcttagaaaactacaagctagcaaatgtacagagagctggctggtgctaacaccacagttgagacagtgtctttttaagggtcttttttaaagcctgttgccatggcagattctggtcacttgctactttcaaggccaaaaacacaatacaaggtctgaccatttccccaggtcatgcttactagtttgtctttatgtacatttatacatatttaagtgctaggtaaaagtcttgtaaaatttccagtactaccatgtttaaaacgtttaactttcctattaaaagctgccgaaaaggttaacaataacaactttcaagtgtaatagtgcaaattcccctgcgagatttactgcagagaaagattctttgaaatacagattttctttaaaaggattgatgtaaaaatttaggtatgtctgggagaaactgaaaccaccctaggacttccctccctagcaaataaagtgatcatttacttggactcacaggctattaaaattaatcattgaaaggtactgtccaaactatggcactgtcacttaaaannnnnnnnnnnnnnnaccattctatcttgtgcnaganctncaaagaantaananggnnnaaattccataatccatccccnagnggggccccccaaagcaaaatcaatttttcntcatcatcganatcaacacagacanatnttanctgaaaagtcacanatagnagttttgganggncgtcngcccaganagtnctcct

SEQ ID NO: 313006 - DNA, 361 bp, Homo Sapiens
  misc_feature (47)..(98): n is a, c, g, or t
cgatctcgcctatcatggtggcggcccgggtgtagaagggatgcatnnnnnnnnnnnnnnnnnnnnnnnnnnnnnnnnnnnnnnnnnnnnnnnnnnnnccgacggcggagcagccaccccgggcttcctcaccgggcggaaggctgagaggaagagagggcgtgaggggcggacgactacttttgtctttctttctttagactaaaaaagttattttcgagacaggaggcggcaggagagaggaagagacgagcgatggcggcctggtcacatcgctcggacctccccagctgcctccgcctccagctccgcagcattcgaagatctcaatagctgcatttccagctccgagaggcgaaga

SEQ ID NO: 313007 - DNA, 494 bp, Homo Sapiens
  misc_feature (19)..(19): n is a, c, g, or t
  misc_feature (29)..(29): n is a, c, g, or t
  misc_feature (61)..(61): n is a, c, g, or t
  misc_feature (73)..(73): n is a, c, g, or t
  misc_feature (79)..(79): n is a, c, g, or t
  misc_feature (167)..(167): n is a, c, g, or t
ttaccgttgtatcccgccntcaacccccnaaaaagggaccccctctaatgggaacgggacngccaacaacggnatgggnacctgaagcaagtccaggagcctgttccaggccttcctcccccagtgaaacctccacacctctgggttgaccccccctatgaaagtgncccctacagaattggagaggatggcctcccatctgtgtgcctgtatgaagccctcacccggcaggaggtagcacctcaaaaccagacccaacgtgcaaatggtagacagcccgaatcagctgtaaggaggaacttctcttgggcagaacgagcccttcccaaaaactacaatatgatgactgtatcaggttaagatatagtctgtggatggatcatctgatgatgatggataaatttgatttttgctttgggtgggctcctcttggggatggattatggaatttaaaccatgtcacagctgtgaagatctggcacaagatagaatgg

SEQ ID NO: 313008 - DNA, 276 bp, Homo Sapiens
  misc_feature (101)..(101): n is a, c, g, or t
gggacggccggggctcggcgcgcggccccgaacggcggagcagccaccccgggcttcctcaccgggcggaaggctgagaggaagagagggcgtgaggggcnggacgactacttttgtctttctttctttagactaaaaaagttattttcgagacaggaggcggcaggagagaggaagagacgagcgatggcggcctggtcacatcgctcggacctccccagctgcctccgccgtccagtccgcagcattcgaagacctcaatagctgcatttcgcc

SEQ ID NO: 313009 - DNA, 621 bp, Homo Sapiens
  misc_feature (172)..(276): n is a, c, g, or t
aaagagatgggatcttgctatattgcccaggttggtatgcagtggctattcgtaggcacaatcacagcatgctatgaccctgaactcctgggttcaaaagatcctcccacctcagcctcccaagtaactgggaatacaggtacccacacccacacccagctaatttttgtannnnnnnnnnnnnnnnnnnnnnnnnnnnnnnnnnnnnnnnnnnnnnnnnnnnnnnnnnnnnnnnnnnnnnnnnnnnnnnnnnnnnnnnnnnnnnnnnnnnnnnnntgagccactacgcccagccttttggtttcttatgtgtaggagaggataagtttctttctcagagtgtgctgcagccagacataatatttctccttggcagaaactctgctgttccaatcatacatgtagccattgagttcaatgtgaagatccaggagtgggcgttttctggagaaaacaagaaaggcaaaatttaatgccatgcaaatatcaaagagaagactgtcattagggcgaaatgagccaacagatgtgaaagttctttgaaactgttcctttctgaaggcaccacaagctgcttagcaaatgatccaaactaacttgcaatactctggcctgatggcc

SEQ ID NO: 313010 - DNA, 378 bp, Homo Sapiens
gtgtgagccactacgcccagccttttggtttcttatgtgtaggagaggataagtttctttctcagagtgtgctgcagccagacataatatttctccttggcagaaactctgctgttccaatcatacatgtagccattgagttcaatgtgaagatccaggagtgggcgttttctttcttgtctcagtttctgggagaggcactgcaggtacagggatggtgagctgtgagactgctccagcaggggacatgtccgcagtacacaggctccagaagaagtcagcttctcggtgaactgtgcacagccctcgcttctgagccttgaattccacattcttcatcgctggcccatccacctccaagaggctgctgtcctccag

SEQ ID NO: 313011 - DNA, 530 bp, Homo Sapiens
gagatcttctaggtttttaattccttcatttacaaacttccttgcagcagatggaccaatgccactaactcgagtcaggaaattgatggatgaactcgtatcatcctgccgaatcttttccagtttacgtaattttccagttgctaaaaactcatcaatcttttcagcaatttttgttcctactccaggcaatttcttagcttcagctccactctttattttgtgtgggtattttgctataacagatgctgcttttctgtaagcattgtacttgtggatagcttggctcacgttcttctcaaagtttgcgagttctgtgagcatgtcggtgattcccccgttgagagtctcctgcggcgccttccgtttgctcatggcggcctgcacccgagaaccccagagtgttcagaaccagggactagagccctctcccagcttgaaggaggtaccaggacttggagacgggagcaggagcaacccagctccggcgcgaccggcggaacaatggttgcccccgatggggggcgggg

SEQ ID NO: 313012 - DNA, 1871 bp, Homo Sapiens
  misc_feature (55)..(63): n is a, c, g, or t
  misc_feature (160)..(168): n is a, c, g, or t
ttttttcactgccacaagcggcccccccatggggtgtgggtgaatgaaccccccnnnnnnnnnattttcagggggttcccatgcaagggcccgttttgttgtggtgcgggtgttttcaatggtgggggcgacagaaattgcttttaaattggaacttttnnnnnnnnngggtatccgtcccatatgtaagctccccccagcgcgcccgtgggtgccccttaaatctttagaaattatgggaagcgcttcccccccggggggaatttgccccggtttgtaattggcacccccccaagtaaataggaccctctcaagagaaaccttcccatttttgggggattttttgttctcaaggaagatcccactctcgggtttggcgcgggccgcgggggggctttattcttaatgtcgggcgggagagattcccaagagccgcttagttccaagggccccagggagtttttcgttagggaaacacaggcttatgggccccatgtttcccctttaccctaacaggggccccgggggggccaaaacgaaatggttttagaaagtttctcgagggcccgagggcggccgcaatgtttattcgcccattgctgtagtgcggttggtttaatagtacatgaggttttattgactacattgcaagcaaaagcatgaagaagaaacaatcatttaaaaacaccaaagacccttacatagcaaaggttaagaaataaattaagactcctattgggttgtgtctgccagggaggatacaggcctcattcgctccggtccttgggttcccggtatttccactggatgtaatcaaagatgtctttttcactatccactggcaggggttctcctgcaactccagtgactcccaagggacggatggtgtactcattgattgtgaaacccttttctagggcatgagccctcatattcttattgaaaatatcactcccagtgaaatagagaacaccacagtaatactgatctttgggtatcaacctgatatcaattcttctgtgtggatattctttttcatcatttttactgggaagctggcaaacacccatgaactttgtctcaccctttgacagggtatctgtgataaaatgaaccttttgtaactgctccacaacctgatgtaacagttttggctgtttggttgattctgaagtgaagctgggatgggtcaggaggacatccatgtcaccacttgactctgcagctcttctgaaactgccacagactgtagcaatgtattcagaatccacttttttaacttcatttagtacaatatcttgcatttgtaacatctcttcacgaggaattcttttttcaaagtccccaaaatatttcagcccaattcgctgatgatggttcaatttatcttcattttttctgagatcttctagtgttttaattccttcatctacaaacttccttgcagcagatggaccaatgccactaactcgagtcaggaaattgatggatgaactcgtatcatcctgccgaatcttttccagtttacgtaattttccagttgctaaaaactcatcaatcttttcagcaatttttgttcctactccaggcaatttcttagcttcagctccactctttattttgtgtgggtattttgctataacagatgctgcttttctgtgagcatgtcggtgattcccccgttgagagtctcctgcggcgccttccgtttgctcatggcggcctgcacccgagaaccccagagtgttcagaaccagggactagagccctctcccagcttgaaggaggtaccaggacttggagacgggagcaggagcaacccagctccggcgcgaccggcggaacaatggttgcccccgatggggggcggg

SEQ ID NO: 313013 - DNA, 1439 bp, Homo Sapiens
  misc_feature (911)..(911): n is a, c, g, or t
  misc_feature (1134)..(1142): n is a, c, g, or t
  misc_feature (1427)..(1427): n is a, c, g, or t
cgagtagctggcggtcccgggtgctgctggttagtgtgctctgagggagggtccgagccagccgctgttttgccggaggagcccctcaggccgtagtaagcattaataatgtctttcatctttgagtggatctacaatggcttcagcagtgtgctccagttcctaggactgtacaagaaatctggaaaacttgtattcttaggtttggataatgcaggcaaaaccactcttcttcacatgctcaaagatgacagattgggccaacatgttccaacactacatccgacatcagaagagctaacaattgctggaatgacctttacaacttttgatcttggtgggcacgagcaagcacgtcgcgtttggaaaaattatctcccagcaattaatgggattgtctttctggtggactgtgcagatcattctcgcctcgtggaatccaaagttgagcttaatgctttaatgactgatgaaacaatatccaatgtgccaatccttatcttgggtaacaaaattgacagaacagatgcaatcagtgaagaaaaactccgtgagatatttgggctttatggacagaccacaggaaaggggaatgtgaccctgaaggagctgaatgctcgccccatgggaagtgttcatgttgcagtgtgctcaagagggcaaggttacggcgagggttttccgctggctctcccagtatattgactgatgtttggacggtgaaaataaaagagttttacttctctggactgatcctattcacagcttcctcatgaacttttctaatagaacaaggaaagctctccaaccatgtctggcgttgagaagccaagagtctctgtcaactctctcattgcccagtggtgacatgtgctcttctccacactgttgggaggtaatgctgccccacngtgctggtgcagggtcaggtatcctgggacttggaagctggcaggatttgccgggtaaagctgtatgccatcatggggcacctgaaaagaaaaacacgtctcaccactgtggttgattcaaaagaaagtgattctattttttaaagaaagcgttgttaatgtaattggtatccctcctaactttttgagttcacaatttacttggtccagagttttctattcnnnnnnnnnaaactaatgaatgacatttagatacttcataaaattatgaacagatatggaggccagagctcatttgggtaaacttactcctgctgagttagcaggttggtgagagaagctcccctgagctcacctgtctctctgactgccttggagtaggtggcataaccttgtgcacagagaactagaaaaggggcagaaccccggccttgcagttggtggcaggtttccactgtggtaagctaaggttcattcctcatcaaggaatgggtagcagattgttcctggggggangagttaatatag

SEQ ID NO: 313014 - DNA, 1235 bp, Homo Sapiens
  misc_feature (131)..(143): n is a, c, g, or t
  misc_feature (584)..(584): n is a, c, g, or t
  misc_feature (595)..(595): n is a, c, g, or t
  misc_feature (600)..(775): n is a, c, g, or t
accttcagaggtgcttgttggaattagttttagggggcctgtcctggtggtagagctgctagatgttaggactcttgctgggacctcagaagttgtgatcctatcaccaattctatataagctgttccacnnnnnnnnnnnnngcatgaaaactgaccagctacttttataaagataataaaaataaatcccaaacttagagatgaaccaaacaagaaaagtataggctcacttcacttgcaaaatcctaaatatcacttaacagaatccaacagtacattaaaaagaatgttattatcaaatatggcctatcccaggaaagtaagaatagctcaaattaaaaaaagtataaattaccagaactaaaggaaaaaaagagagaattttattgaatgtggataacttttgttagttcctgaccaccatgtatttattatttaaaagacaaaacatttttaccaaactagaaagagaatgtaactttctcaacttggtaaaggttatctaccaaaatctttaagcaaacattatcctgaataagatgagatacatttcctttaaaagtgaagtcaggggcagggacncagtggctcanggctnnnnnnnnnnnnnnnnnnnnnnnnnnnnnnnnnnnnnnnnnnnnnnnnnnnnnnnnnnnnnnnnnnnnnnnnnnnnnnnnnnnnnnnnnnnnnnnnnnnnnnnnnnnnnnnnnnnnnnnnnnnnnnnnnnnnnnnnnnnnnnnnnnnnnnnnnnnnnnnnnnnnnnnnnnnnnnnnctgcttgagcccaggagttggaggctgtgtggtgagctatgatcacaccagctgtactccagtctgggtgacagaatgagactcttctctacaacaacaacaacagcaaagagtgaaattagctaaagataaccatgttgactgagactgatactgtctgacacagtactgaaagttctaatcaacatttttctctttttggaaaaagatacgttaagaattggaagagataaaactattagcttacagatgatatcatccaatttaaaaaaccatacaaactattagagttcaacaatgttcctgatctgaaattaacctatgaatattcattaatttaattactcatataacactatttgccatgtactactctagtaactgcacaaatgttaactattttaaaattcttctaacaaccctaaaagttggtacttttattgtccccatcttacctggg

SEQ ID NO: 313015 - DNA, 622 bp, Homo Sapiens
ctaaatgcctatattttaaaagttattattctcatatttaaggtaggtgaactttttttctagttgtaaatatttaagatatgatgaatttctcatggtacattattttccctcccatcccactacctgttttaaaatacagattaaatcggatttctttgaactattatctaatcatcacttggacagtcagtctcgatggagcaaagtaaaagacaaagtagaaagtgatccacgttacaaagcagtagatagttcatcaatgagagaagaccttttcaaacagtacattgaaaaaatagccaagaatttagactcagaaaaagaaaaggagcttgaaaggcaagcccgcattgaggcaagccttcgagaacgagaaagggaggttcaaaaggcccgttcagaacaaacaaaagaaatagatcgagagagagagcagcacaaacgagaagaagctatccagaatttcaaagctcttctgtctgacatggtacgttcttcagatgtgtcatggtctgatactcgtaggaccctccgaaaagatcaccgctgggaatctggatccttattggaaagagaggagaaagagaagctttttaatgaacacattgaagcacttacc

SEQ ID NO: 313016 - DNA, 1086 bp, Homo Sapiens
  misc_feature (430)..(445): n is a, c, g, or t
  misc_feature (743)..(771): n is a, c, g, or t
gggaagcagtgaaacaaaattggggtaacaaggaagctctgttgtggcaaacatgtctatgaggaatattaaaactaagcatactcccacaggctttaaactcaaaccatgaacatttaaattaagttgttccttattttgcctatacccatttttatctttcattgtcgtttttgcttgacagtatggtgacagagtatttttatttggaaagtcctcagcaagatgaattagccaaaagcaataatggttcagattaaacaataaagtggaattgattcaatcccaggctcaactaagaacagtcgctctctggatctttcattttagacgatagataagttgagatgttgtaatatttatggggggttaagcctgtgtcagttatgggatgaagacttgtagtaccagtaccatcagtggtcatacnnnnnnnnnnnnnnnnactaaactaatacagttagacatttccactctatcgtgattatatttttatgatgggaaaataagaacacttccatgtttttataaatagtctctgcaaagatttcagatgttattggtatctcggtttggcagtatttgaaaaattgagattgtctttgaagtgtttgtgctacttttacttaagtaaacccccactgtgcaagacccaggccggcttcagctaataccaaggtttctgtgtgcataatagtttacagagaacttaagagtaaggactgcgggttaaaaacaaaacnnnnnnnnnnnnnnnnnnnnnnnnnnnnngttcaaagtacctggtttataaagtcaaattcttttattagttcctttctcgtttaaattgactgatgttgctgatgaagcttaaagtcccaggcacggttgtggcgatatgctgataaaattggtgcctagtggtgggaggagctccagtgtcaggacttttattaaaaggcccttgttttcccaaatgccaatctagccacatttagatttcattattcaataaaacagatgaaaaatcatcccataaatgaatgttgaggttaccaaagtacatcacctgctgaggaaggataaatcttcctgctttaaggg

SEQ ID NO: 313017 - DNA, 685 bp, Homo Sapiens
aaaagtttttatttatctattggaagattatcagaaaaataccaagttattttataaaagaaaaaatatttctaaatcctgatgcattgtggctaattagtaattcaccattacctatagtttttggttaaaacttggcctagttcagaaatctgtagtagtagctgagagtttgaatttcaacctggattgcagggtagctctgtagagctaattaggataattatcagacaaaaaggaactcacaggaatgctgtgtgatcatgtgatcacatatttgagcagtggtcacttataccaaagtttggggtttctggaaataatgtcagattttgtggatctctgaagtgggcaacttgaactaacttgaagaggaaccaatatgattctcagttctgaaccttggttttaaagaagttcatttatatggtagactaatacccaaattttctttctgccatctaacataaatcctgaaggtcacagtttagtactcatagtttttaaatgctaaagttgtgtgagtatgaataaaagcaaatacctctcagggttttagtgccatcgggaaggatatttctaaattttgttgacattttgaaagaattagttttgctttcctcctatcattgcctaatgtttacctaatatgagtacatttcaatcaaagctggttatcacagaa

SEQ ID NO: 313018 - DNA, 1468 bp, Homo Sapiens
ttttttgtatggaataataatttaatgctcactgtggccctgactgaaagtcaagctcaggcacaattagggccatggctgggctcccaccaatgaggatacaggcaggcaaggaggttggatgtggtggtgtgggatacaggagaagggcaaagggagctcataaatagggcccagcctggctctgggttcaaaggtggaggttccaggatggcacaggctgtgagggctaggcagctgaggaggtagtactcgtattggctcccttctcccagtcctctacagacacgatggtggttttgcagaagaagcagtccttgttgttcatcaggtgctggttgatacaggctttgcaggacttgtggccacagggcttggaacacagcagagatggggtgggcatagcagatggggcagaggtcctcctcactggtgggcagggaggcagctgctgcctgggcagatgcagaggtcaggtgcgccagcatctgttccacttgggccagctcatcggcactgatataatccgcatagctctgcagggagaagcgcttccggtcaggggctggcagagcagtgccaggtgctgggggctctggctgtcccaggagatagcatattgagcgtagctggaagcagggatctgccaggagcactgatgtggcttgctctctctctgaggctgggccacgcaccaggagctgcaccaggatgcccgtcactgccaccagaatgggatagtggtccacgctctctaggccaggcagccgtagggtgaccacacgatcaaacaggttcctctcagctgtcacccggttcagcacctggtttagcagctgtgcaagacgccgcagcagcatctcagaggtaggccgggtccagtcaaggaatatctcaggcaccagtgtgatagtcatctccaagacacgcagcaggctgaccgagaggtcaaagcaggtggcacataccttgagctgccggctgtccacaaagttccgctccaggcgctcagcagcctgctggatctcttggatcatgccaatgaattcagagaaggcccagttgagctgattgaggacgctgttgaggaagctgggtgccacatcaggaccctgctgtaggaggtccgccatgtgctgctgcagcagggtggaagggcagggcttctggaggctgggcaaattggcgtcctcaagtttggttttcagcagatgtggcagccgtgtatagcggtacccgaagccacagcccctccagagccgcaccaggatccagttggtctgggcccagggccgctgctcatagggcgccaggaggttcctcaccatggcgatacgctgctcctcggggattcgctccacagcccgcagggagtgtgggtagcacacgtagctggccagggcctgcatcagtgagtctcggatgtcagtgcccacaatgcgtgcgtcggcaaagtgtttggcgagaa

SEQ ID NO: 313019 - DNA, 977 bp, Homo Sapiens
ttcaagccagggtggaaagggccagggccttttgaagggctgggcaaaattggcttcctcaaagtttggttttcacgcagatgtggccagccgggtaataggcgttacccgaagcccccagccccttcccaaacccggcccaggatcccagtggtctggggcccagggccgctgctcatagggcgccagagggttcctcaccattggcgatacgctgctctcggggattcgctccacagcccgcagggagtgtgggtagcacacgtagctggccagggcctgcatcagtgagtctcggatgtcagtgcccacaatgcgtgcgtcggcaaagtgtttggcgagaatggcagccaggcgggtcagggtctcttcatagcctgggagctcctccatgctgtgcacgggaccaaagtaattcttgagagcactgtagctgttgatggccacgctcaggtagaactcgggcatgaaggcaaagagagaccctgtgcgatcaccgtgctcaatggtccgcaggcagacgcgcagcagccagtagatgtccagcatcttctcctgggagtagacagtggcatggacccaggcaagacggcggctcaggtggtccagcttttctgagaaaaccttctggctcttggtcaactctgcaaggatgtccttcctcctcttggggcaccggcggagcttgtcctctgtgtccctcagagccatagcgtattcattgacatcatcggagacacccaccatcttgcccagctgctggtgtacgctgaggttgtacatcatgaccgccccatccaggacttccagcagcgagttctcggtgaggggctgctcaggctcctcggggggccgccccagcagcaagccctcattccagtggctgccttcaatgtcctcacgggtcctctgctccacgctcagcgtgcggaccttcactttctccgaggcctcgtgccgaattcgccacccaggcc

SEQ ID NO: 313020 - DNA, 872 bp, Homo Sapiens
gggattgtctttacataaaaccagcctgctcctggagcttccctggactcaacttcctaaaggcgtgtgaggaaggggtagattccacaatctaatccgggtgccatcagagtagagggagtagagaatggatgttgggtaggccatcaataaggtccattctgcgcagtatctcaactgccgttcaacaatcgcaagaggaaggtggagcaggtttcttcatcttacagttgagaaaacagagactcagaagggcttcttagttcatgtttcccttagcgcctcagtgattttttcatggtggcttaggccaaaagaaatatctaaccattcaatttataaataattaggtccccaacgaattaaatattatgtcctaccaacttattagctgcttgaaaaatataatacacataaataaaaaaatatatttttcatttctatttcattgttaatcacaactacttactaaggagatgtatgcacctattggacactgtgcaacttctcacctggaatgagattggacactgctgccctcattttctgctccatgttggtgtccatatagtacttgattttttatcagatggcctggaaaacccagtctcacaaaaatatgaaattatcagaaggattatagtgcaatcttatgttgaaagaatgaactacctcactagtagttcacgtgatgtctgacagatgttgagtttcattgtgtttgtgtgttcaaatttttaaatattctgagatactcttgtgaggtcactctaatgccctgggtgccttggcacagttttagaaataccagttgtttcatattctagccttcagtcttgttcttcaaccatttttaggaactttcccataag

SEQ ID NO: 313021 - DNA, 353 bp, Homo Sapiens
gatgaccggaagcatggccttgattgttttggattgggtacacaatgcacctggaggtggccattaattggcaccactcaaactcaaactcagtccatctgatgccagtgttgagtaaactcaactactatgaaatttcacctaatgttttcagtttcacttccttttgaagtgcagattcctcgctggttcttctgagtgcagaataagtgaacttttttgctttgcttagtttttttaagaaacttatctgtatgttagaaatggatatgaacaactggacctcttaacttttatcaagccacatgcttggctgtgtcattgattaacttggatattctatgattgtcttg

SEQ ID NO: 313022 - DNA, 987 bp, Homo Sapiens
  misc_feature (249)..(249): n is a, c, g, or t
  misc_feature (654)..(677): n is a, c, g, or t
gacagaaccgggaagtagtgtggtatcagacgtgaccgagccccacttatggagtctatcgggtcacggtgtgcccgtggttcgttatgtgagccctctctggcccgttgggggcaagattgtcccgtgccttgtcggtggctaaccatctctagtgcgctttaatgacacctgctctatcggcccatccacgagcacgtgtctgcagaagtatttgggaagaagtatttggcctgtaggcccccaagngcacccttgctaggttaaatctgctgaattccaggcatatttatggatttattgataactgcttctgaataaagttcaaaaaagcaatttcttaaaagtaaaagagtgcttctgaggtctttaagtatttttggtacaaaaaataatagtgtttttgtcaatggttattcaatattttgctgtaaattaaaaagaattgtttctcacatcaaatggttccattaggcacattcaagtaaaatcataaaatatccaagttaaacaatgacacagccaagcatgtggcttgataaaagttaagagtttgtccattctctggaatggaataaaattgtcacttcccttaacccgagactcgtggttttgttgttcatatccatttctaacatacagataagtttcttnnnnnnnnnnnnnnnnnnnnnnnngttcacttattctgcactcagaagaaccagcgaggaatctgcacttcaaaaggaagtgaaactgaaaacattaggtgaaatttcatagtagttgagtttactcaacactggcatcagatggactgagtttgagtttgagtggtgccaattaatggccacctccaggtgcattgtgtacccaatccaaacatcaagccatgcttccggtcatcaccagtacaccacattaacaggaagaacaaagccccgatctttcgtacagatttccgacgcgtgggtcgacgatatcccgtaattccgaccggtacca

SEQ ID NO: 313023 - DNA, 836 bp, Homo Sapiens
  misc_feature (36)..(36): n is a, c, g, or t
  misc_feature (57)..(57): n is a, c, g, or t
  misc_feature (81)..(81): n is a, c, g, or t
  misc_feature (83)..(205): n is a, c, g, or t
  misc_feature (209)..(209): n is a, c, g, or t
  misc_feature (480)..(531): n is a, c, g, or t
ccacaacctctgcttcccatttcaagcaattctggngccttagcctcccaaataacngggattataggcgtgcaccaccanannnnnnnnnnnnnnnnnnnnnnnnnnnnnnnnnnnnnnnnnnnnnnnnnnnnnnnnnnnnnnnnnnnnnnnnnnnnnnnnnnnnnnnnnnnnnnnnnnnnnnnnnnnnnnnnnnnnnnnnnnntganaccaatgcctggccaggcataagtacattctatgatgttcacacaatgacaaaattgcctaacgacatttcttaaagtgtatccctgttgttaaggcgacacagggctacactatcttctcagccactaaagatatataaaagtacgctaatcctaataatctttaatctgagggtactgcttaacaaatctcaaagtttccataaactagccatctcactgctttaaagtaaacaaaatctccatattctgtttcaagtgtctcattaannnnnnnnnnnnnnnnnnnnnnnnnnnnnnnnnnnnnnnnnnnnnnnnnnnntcctaaacctaaattttaaaaacttaaatcacaaatactctaaattctaacctctttcaccctagagactcaatgatcttctcccactagtaaatataggtcctaccacccaaatttgattctcactatactgtcaggttctttctttcccactgagactggtcaacccagctggcctggaaaaacagttaagtggagaagtaaaaggattactttcccttctaaactaacccaaattaaagtctattctctatgaagaaacaataatgaacctattctgcagctgtagagtatgacagaaagag

SEQ ID NO: 313024 - DNA, 588 bp, Homo Sapiens
ttttgttgctgaatgatattttattagcttgataatttgggcctgcccttagcattaataagcttcagcactagtcacaagactttcattcactggtggggaaactttcttgttttaaaaaatgcaattcaagaaagggcatctatttcttgggggctgcggtgacagcaggcttctcttcacgggtgatgggaatggtgcgctcagggccagagacctgtttccttggtccattcacagtgaggaccccatcagatgacagggatgaagtaatggtgagagggtctacatcagctgggatccggtatttcctgtggaactccctggagatgaaaccatgttcatcctggcgctcttcatgttttccatgcacctcaatcacatctcccaacaccttaactttgagttcctctgggggagaagtgcttcacatccaggttgacagagaacctgtccttctccaggcgcatctctgagagtcagtgtcaaaccaactgggtgcccgcagaacgacggtggccgaggtagataggactcagggactagacttcgggaaaattcgacctccacaggtctctccgagaactg

SEQ ID NO: 313025 - DNA, 375 bp, Homo Sapiens
ctttgggatgacctgtaagattttggcttagatgactgaggaagcagcagatgcagatgaagcagcccttgctggcctgttgagttcagggagcttcctgaagagtgaaaagaaggtcagtagacactgaggttgatgactctagacctagaggcaagagtctgggccatgatgagcctctgactggcgttaatatggagctgggaggtgaaaaccacagtgccttggagtgctctcggaaggcacatctgtctttcagaggaaagactctcactgaggccagaagcttggcgcccatttgggataagcgggagaataggggcagcagagcgtctacaggggcgctcttggggagcgagctacatactgattcct

SEQ ID NO: 313026 - DNA, 652 bp, Homo Sapiens
  misc_feature (19)..(19): n is a, c, g, or t
  misc_feature (69)..(69): n is a, c, g, or t
  misc_feature (150)..(150): n is a, c, g, or t
  misc_feature (209)..(209): n is a, c, g, or t
  misc_feature (270)..(270): n is a, c, g, or t
  misc_feature (302)..(302): n is a, c, g, or t
  misc_feature (311)..(311): n is a, c, g, or t
  misc_feature (320)..(320): n is a, c, g, or t
aaaacttgcaatatccttnccccacttccaacacccctacaggtaaatgcagacccttgcattatgganttggagaacctcagtttctcaggttccccatcaatacctttacaattctcactgtggatttgcctgtgaaatgcaatttcnagtttcatattcctattcacagtcagctgacatttgggtaccgattcaagtacttaaanagatatggagtgaatcttgtcccctgcttttcaatgtcctagggtaacagtttactctggnatctgcttgggacctgtagaaccaagactacnactttcttncctgtgagnttttttgaggcttcagtaaaaaggagaaatagtttccaatatttccagattctgacccacaacacatttataacaaaaaatctaatcagaaacactcagcgttcaattctatctcagataaacacacttaccacagagccagatacttaacaggaccaagaaagcagggtcatctctggcccactggtccttcgtctgttttcgataatgaaaatttctgtaaactctctgtggggatgtgaacaggtagagcatctgccaggcagcaaattcaaagtccatttgccgaaagcggaaaagccttctcagatatttgtagcgtttcgctccgg

SEQ ID NO: 313027 - DNA, 1119 bp, Homo Sapiens
tagtttaaaaaatatttattatagaaatgtacatttaattagttttaaggaatgtacctgaccacagtgttaatatatatttcttcaaatttgcaaactttacacctttaagatatctacaaagatgatagtttatttacaagttttacaagaaatgatcacttcacaatactgttgacacagttacgattgaatcttcttctcactttttatttcactctgtacttatagaaagaacagagagtatgggtgaagttccatcccagtgccagggaaagcccgtagagcagaatcagaggtgcaaatggatacagaagaattactgtatttttcaaaaatggcaatgcactgtatcccaggaaagttacatagatataatagccaactgcaaccaaccataaggtatttccaactaaatatccaataaatgtgtctgtcaggataacatggttgatgaaaaaaagctggataaaatgcaaaatgaccaggagtggataaaaagcattgagatgcacatcaaaagcatagccccattccacatcatagtctctgctctgtcgtttcactaaatacttgttagagatgaaccacattaaagttgctatcagaagaccaacgcctacacaatctatgagtacaacccaaaggagaagctttattgtctcaaagaatcccatgtccagcacaaagccaaatcctatagtggacacacagagccagatacttaacaggaccaagaaagcagggtcatctctggcccactggtccttcgtctgttttcgataatgaaaatttctgtaaactctctgtggggatgtgaacaggtagagcatctgccaggcagcaaattcaaagtccatttgccgaaagcggaaaagccttctcagatatttgtagcgtttcgctccggctgtgtgtcttgccgcatccctggaattcaagactccgttcccctgcactaaggaattcactgaagtactcggtaacatcttcctggagtcctgctacagcctcaacccacgtccgaaccagcccaccacctcctcccagcagccgacccccgccgccaccgggcgggcttcccttccctcaacggagccggcccttggggcgcgccgc

SEQ ID NO: 313028 - DNA, 457 bp, Homo Sapiens
  misc_feature (371)..(371): n is a, c, g, or t
attcggcacaggtcacatcatccctgtctctgtaatggtagctgcccctggataagtgttattaggtgattcagaagggtgggctgttgcctttgcctgaggttgcagtctgcggttcccaagccccaagacccgcctcagaactaactgcatttgcttttgactcctggcctttctctagggttgggaagaacatggaaagtgacctccctgccaaataactcagaagaggagtgtcggtagccaaatgtttcttcagaatacgtgtaaaagaaatgtttttcttccatctaggaagatgttaccgagtactttcagtgaattccttagttgcaggggaacggagtctttgaattccaggggatggcggncaagacacacagccggagcgataacgttacaaatatctggaggaaggctttttccgcttttcgggcaaatgggattttggaatttg

SEQ ID NO: 313029 - DNA, 1164 bp, Homo Sapiens
gaggatctgcaccaggaaagggtctggtagaagaaagttggaaaggtgaagaccggatcttgtcctttctgctacaacctaaggacagaggcacatgactccagcaagggcccaagaaaggtagcagctacttgggtcttgttgggagatgcccagacgactccaaggcaggtcaactggctttgtcagggagtggaatgctggcccaataagaatggagacaaactgttcccaatttctgtgcagcttgtttgccagctgctaagacttcttcatggttggccttctccaggctttcataatccatgatgaccttgttagtgatgagtgagaagccaaagactcgaagtccacagtgccgtgcaacgataacttctggtactgtactcatgccaacagcgtctgctcccagcttctgcagcacacgacattctgccacagtctcaaagctggggcctgccaccatcacataggtgccttcctgtagctcacgttgctcccccatttgtttccaggtactgagagccctctgcctcatagtccggtcgtaggcatcagacatggcagggaaacgatctccaaacctttcatcattgggccctctgagagggttctgaccactgaaaccaggtaggttgatatggtcacggatcagcatgatatctccaacctcaaacttggggttcagccctcctgctgcattggtgactaccagggtgtccacacccagaaggtggaaaaccctcactgggaatgtcaccttccagagtgggtacccttcatacatgtggaacctgccctgcatcatcacacaggccctgccattcaggaacccaaacaccagtcggccagcatgacctggcactgtacttcggggaaagttggggatttcaccgtagtcaaagatctgggcctgagttaatttatcagtcagacctcctaatccagaaccacagattattgcaacttgaggtcggtgcttagtgtgagacagaagccattctgcagtgttcttataatcttcataggtgtatccgttctccatggtctcgcagacgccttctcgatgagcctgctccggtgtgctccgatccgctccgatccgatcggatccgctccgctatgctgaactgagcaaggctgccgggtctggttcgcacagtt

SEQ ID NO: 313030 - DNA, 2036 bp, Homo Sapiens
  misc_feature (226)..(306): n is a, c, g, or t
  misc_feature (375)..(385): n is a, c, g, or t
  misc_feature (397)..(503): n is a, c, g, or t
  misc_feature (1740)..(1740): n is a, c, g, or t
  misc_feature (1746)..(1746): n is a, c, g, or t
  misc_feature (1958)..(1958): n is a, c, g, or t
ggggcgaaaaattttttatcccaaggggggccaaagggtttggattccccgtgcggatttcaggttcttccaaaccgcctttggaaagggttcccccgtgggcgaaaaggtttaaggaatttcacccatcctccgaaagatgcaagggcgggggggaattttaatttggatcccctggggctccctttgaaaaatcccgaaaagccccccaaaccccctttgggtnnnnnnnnnnnnnnnnnnnnnnnnnnnnnnnnnnnnnnnnnnnnnnnnnnnnnnnnnnnnnnnnnnnnnnnnnnnnnnnnnaaaaatattggccctttttcttttcttttgggggcccgggccccaaaaaaagtttttaaaaattttttnnnnnnnnnnngggcccccaagnnnnnnnnnnnnnnnnnnnnnnnnnnnnnnnnnnnnnnnnnnnnnnnnnnnnnnnnnnnnnnnnnnnnnnnnnnnnnnnnnnnnnnnnnnnnnnnnnnnnnnnnnnnatttcatctttctctttattctgacaacattatgacattaaataaaatccaagaggtattggattagtccttgtttggtctctggtgatttagataaggcagaactgagcccctcggaatgtattatctcaaagagctagtagcagctgctatgcaaagttctaaggcccgagtcaaatcctgggcatctccacagatgtgtggtagggcacgggctccagctcttgtgtaagaaagaacaggaatgagaacagctttattttgtagcgccaaggtctcactatgctcacacctgtaatcccagctttgagaagaggatctggcaccagaagggtctggtagaagaaagtgggaaaggtgaaggacaggaatcttttcctttctgctacaacctaaggacagaggcacatgactccagcaaggggccaaagaaggtagcagctacttgggtcttgtgtgggagatgccagacgactccaaggcaggtcaactggctttgtcagggagtggaatgctggccataagaatggagacaaactgttccaatttctgtgcagcttgtttgccagctgctaagacttcttcatggttggccttctccaggctttcataatccatgatgaccttgttagtgatgagtgagaagccaaagactcgaagtccacagtgccgtgcaacgataacttctggtactgtactcatgccaacagcgtctgctcccagcttctgcagcacacgacattctgccacagtctcaaagctggggcctgccaccatcacataggtgccttcctgtagctcacgttgctcccccatttgtttccaggtactgagagccctctgcctcatagtccggtcgtaggcatcagacatggcagggaaacgatctccaaacctttcatcattgggccctctgagagggttctgaccactgaaaccaggtaggttgatatggtcacggatcagcatgatatctccaacctcaaacttggggttcagccctcctgctgcattggtgactaccagggtgtccacacccagaaggtggaaaaccctcactgggaatgtcaccttcgaagcaaacaatccgaaaaaaatttacaaaatttcattaattcagctacactgaaatgcatgacatacatcgtgaaagaaaaggaaggagaggaccaaaaatccacctagcccagatagctaggtagtgaaagaggctagatagttctctcctgcctcttcnagatcnaaccggacctatccctctgacttaccttccagagtgggtacccttcatacatgtggaacctgccctgcatcatcacacagccctgccattcaggaacccaaacaccagtcggccagcatgacctggcactgtatacaaaacagaaagagaaatgaatgggattatattttcatgcaacacatatccattaagcacctactgtgagttaacanctctgctcaaaatgttaggttgtaattaagtaaaagactcattattatctctactttcagaaagtttaagtctggtga

SEQ ID NO: 313031 - DNA, 1383 bp, Homo Sapiens
tttttttataagcaatatgactttatttagttcctttggaaacaaaaccccccaaataatgcctgaacccaaaggtacataaaaatgacccaaaatagatttgaacatcacttgtagtttcttcctcgtaacatgagtgctttcagctggacagtagattacaaagcatctccgatcacgttaaggcagatgatcaatctgtggctgcatctgtaactcctcctgggaaaataatcctgttggagttgggggctcttcccagttgtttggttagttggcccgggaaggggcagtcctgggagctggcgggtgggggagccagggccccacctgtctttgtcactggctcgttctgctggccctctgtcactggatgctgatacggagccctggcccttgttgacatcactgatgcacacccactgcccatcaactgactccttcccacagggtcaccttattgtctccacccgagacagccaggatgttggctgtgatggaccagctcacatgccacaccacatcgttgaacttgtgcaacaatttaggggaccacgtattgcttgaggcatcatcacaggtccaaatgaacacacgaccatcctgggagcagctggcgatggtgctggtgggcaggccgatggagggggcccaggccacatctcgaacccagtcactgtgcgcttctagcttctgctcctccttccactggccgtcctcctcctccttccacagcttgatgaggttgtcacagccacctgatgcaaacctcttgatgtaattgggtttctgccccgatgggtggtctatgaggcttccaggtacaacagcaggggcccagctgacggcattgcagccaatggtgtgagcgttgttgatcttctttacttcccattggccttccccggtgtaagtcagcagggagatggccccatccgagctcccacaggccaggatcaggccgtagtcatggggggcccagcacaccgagttcactgaggagtcgtgtcccgcatgctcgtggctcttctcccaggtgccgttttcctctctccagataatgactttccggtcataggagcacgatgccaggatgttgccgtacatggggtgagcccaggccacttgccacacaggaccctcatgacccctgaggtcggcgataaggatctgccctccattgcgcacatcaaagattttgacggacctgtctgatgagcaggttgccaggcgggtgccatagtagtccatctgggcgtcgtgaatcatgtcctcatgggaggtatccacagtgttaattactgacaccatgattgcggcggtggctgctccaggtctcggacgtggcagctcccgcctcgtgccgaattcgccacccaggcc

SEQ ID NO: 313032 - DNA, 766 bp, Homo Sapiens
acaccactccattctacagggtcccaatgactactgcagggcatgtcacctggaggcaaccatagctaaggtggcagtgagcaggctgctgctgcaccagccctcccctgcttgggagcacacaacaaggaagcagtgccaagccctgcctggtctggcttcagggcagagaggctcaaagctgctctagagcaatcatgtctggtcagctgaccactccccggcccactgtccagcggggaccctcccgtgccaccctctagggaggctgcagcagacacggggcaaggcaggcgctctcactgcacgaaaggcaggggatggactcacggtgtgagcgttgttgatcttctttacttcccattggccttccccggtgtaagtcagcagggagatggccccatccgagctcccacaggccaggatcaggccgtagtcatggggggcccagcaacaccgagttcactgaggagtcgtgtcccgcatgctcgtggctcttctcccaggtgccgttttcctctctccagataatgactttccggtcataggagcacgatgccaggatgttgccgtacatggggtgagcccaggccacttgccacacaggaccctcatgacccctgaggtcggcgataaggatctgccctccattgcgcacatcaaagattttgacggacctgtctgatgagcaggttgccaggcgggtgccatagtagtccatctgggcgtcgtgaatcatgtcctcatgggaggtatccacagtgtt

SEQ ID NO: 313033 - DNA, 696 bp, Homo Sapiens
  misc_feature (47)..(84): n is a, c, g, or t
  misc_feature (215)..(255): n is a, c, g, or t
ccaaagtgctgggattacaggtgtgacccactgtgcccggcctggtnnnnnnnnnnnnnnnnnnnnnnnnnnnnnnnnnnnnnngatgtttagtatgtatgacttctcccaatttttggatgcagtctctgcagaagtgatcggcagttatgttcagttttggagctcctagggccaaagtacttgagttcaaattttgcctttccactttctannnnnnnnnnnnnnnnnnnnnnnnnnnnnnnnnnnnnnnnntttattaatataaatatgtaacaatacgttctgggaattaaatgtgatgtttaaaaagagtaatgatattattaacacacttgaaatgtatctccccttcagttaatagaatggtaaacatgttaggatgcctgcctagaggatttagcagaaaatgctttgtaaatgttctatatctgaaagtacatgtcgatgtccaggttagcaagatgaacaaagatgcgcagatgagagcagcgattaaccaaaagttgatagaaactggagaaagagaacgcctcaaagagttgctgagagctaaattaattgaatgtggctggaaggatcagttgaaggcacactgtaaagataatgattttaaatgatatgatttgttttttgcttttgcataagaggtaattaaagaaaaaggactagaacacgttactgttgatgacttgg

SEQ ID NO: 313034 - DNA, 848 bp, Homo Sapiens
  misc_feature (92)..(92): n is a, c, g, or t
  misc_feature (148)..(151): n is a, c, g, or t
  misc_feature (157)..(157): n is a, c, g, or t
  misc_feature (159)..(160): n is a, c, g, or t
  misc_feature (190)..(190): n is a, c, g, or t
  misc_feature (193)..(193): n is a, c, g, or t
  misc_feature (197)..(201): n is a, c, g, or t
tggggggattccccagcccctagttcatggcccgggttttcctggcgtaccacggtatggcccattttcccttcctccccggggcccccgcnccccctaagaatggtcttagaacatttttcgaagggccgagggggccgaacacggnnnncccccncnncgcgccccgcgccgcggggcccgctcccgnccncgcnnnnntttttcaaactcattcatgagatatttattaaaataacacatttagggaaaaaaatcaatacaatgtatacatcattactgaaaactgtataccatcatacaaaaaaggattttattttgggaaattgttttctaatttatggcaagttttactttcagaaataaaaccacaacaacacaatctaattcaatcttaaaggctggcatgctgagcaaggaatgttcttattctttgtaggagctccttctttacactgtcaggtaccagggctctgccttttggagtgatttcagccaccaagtcatcaacagtaacgtgttctagtcctttttctttaattacctctttacagtgtgccttcaactgatccttccagccacattcaattaatttagctctcagcaactctttgaggcgttctctttctccagtttctatcaacttttggttaatcgctgctctcatctgcgcatctttgttcatcttgctaaccaccatcaccgcgggcgagggccgtcccttcccagcgacgaaatgacccttgcgctgaggaccgttacctaccacactcttcggctgcccggacttagaccctcagtagctcgggcacctaagcacacagaaagctagaacacgcatttccccc

SEQ ID NO: 313035 - DNA, 455 bp, Homo Sapiens
  misc_feature (61)..(61): n is a, c, g, or t
  misc_feature (235)..(235): n is a, c, g, or t
  misc_feature (253)..(253): n is a, c, g, or t
  misc_feature (261)..(261): n is a, c, g, or t
  misc_feature (276)..(276): n is a, c, g, or t
  misc_feature (328)..(328): n is a, c, g, or t
  misc_feature (352)..(352): n is a, c, g, or t
ccacaacaacaacaaacctaaattcaaaccttaaaaggctggcatgctgaaccaaggaaangttcttattctttgtaggagctccttctttacactgtcaggtacccaggctctgccttttggagtgaatttcagccaccaagtcatcaacagtaacgtgttctagtcctttttctttaattacctctttacagtgtgccttcaactgatccttccagccacattcaattaattntagctctcagcaactctnttgaggcngttctctttctccangtttctatcaacttttggttaatcgctgctctcatctgcgcatctttgttcnatcttgctaaccaccatcaccgcngggcgagggccgtcccttcccagcgacgaaatgacccttgcgctgaggaccgttacctaccacactcttcggctgcccggacttagaccctcagtagctcggg

SEQ ID NO: 313036 - DNA, 1215 bp, Homo Sapiens
  misc_feature (451)..(460): n is a, c, g, or t
tttataaaaagggttggtttattgtagttcaaatacataaactgaacattcaaacatcttaaaattaaactttagcaacaaagtttaacattcaaacaggagtatagtttacaagaaacacccagaaaggtaatttgttgtctaatccagaatattgataaagatcacttaatggtgaataaaatatgtttaaccagtggttctattctggccaacatgttagttatgaccgtggttccatacctgagaagaaattactacataaatcttctcttaggctaaacaacaagactcggtctataattcagaggggataatcaaagcacgtaagtgaacaaataaaactaatctgatctttagagacaaaggtaaaagtattgtccattataataattgtagcctctggaagataagaattcaattttcagtgttttctcttttacccgctttnnnnnnnnnnaatcaaaccaaagcaaaccccaactcgggttttcttggagtctgtggtatttgcatctggcaagttcaagccacaaatgctcttacttcttgcatgtattaacactgctaggaagaacgtcaccaagtcactgacttccacacctcataaaaggatgaattttagcttcaagattttaagatttactagagacagcctatatttgagtatgtatgtcagtcatgccacacaaagaaaagcataaatatttccaaagtgttctgttcagaaactgttcacaaatgcttctccttctgtttgtcagatggtttcgcaataggttgactaatgcacatatatgtaaaaacctgaaaattggctcatgcaagcattttgaatagatgtccctatggaagagtatttagaattattttgttgatcgtctcgtgggctccgatgctgtgggaggtgggggtggaccccggcgatccaggtcatcaacatatgccacaatcagtttacgcctctcctctggcacacagtccagtactagataccgtttgtcattctgtaaaattttttctacatctttcaggtgctgatccgattcttggattaattttttggatctatatgttataaatttggtctctttcaaaagcgtcctgaagtcagctttggctgtgatatatttgtctctgatatattcttcaaattctctttgttttttcctgtcactggaggagaacttaatacatcgaggatcttccttaatg

SEQ ID NO: 313037 - DNA, 727 bp, Homo Sapiens
  misc_feature (364)..(424): n is a, c, g, or t
tcaggcttggaagtatttaatagcagacaaaatatagttcaatatgaaaagcattatatgagacaaaggcaattttcaaaaattgataaaacattccaccaaaaatcatgactatgcatctaacagcttcaaaatatagaaaatactcaaatgcaaaatcaacaaatctgcaattacagaaaaagacttcaacatacttttagaaagtagtaactcaagtagacaataatagctaacacttaccgggcacttcttatgtgagtggcactgaaacatgtgctttcatgcattacctaaggctagagaaaatgttaataacttagacaagtcatacatgtatcataaatatctttgtacctgacannnnnnnnnnnnnnnnnnnnnnnnnnnnnnnnnnnnnnnnnnnnnnnnnnnnnnnnnnnnncctacccctaaagaacaataacaaccacaataacaactatcaccccagtaaacatggctggcaagaatacaattaaatgaacattatcactgatttggcaacagctcttatgaagaataatttggcattatgtatcaagtgcccatactctttgacaaagtaactgtctttctgataatctatcttaagtaatactaaaatggggggaggggaataaaaatacaaaatattagaaacactatcgtcaaaatgaaagggcatggctgagtatggtacaaccgttcaacagaatattgtcattaa

SEQ ID NO: 313038 - DNA, 1244 bp, Homo Sapiens
ttacctctagcatcaattcttttataaagaatgctaaatatattacattttttgttcagtaaaactgaagatagaccatttaaatgcttctaccaaatttaacgcagcttaattagggaccaggtacatattttcttctgaacatttttggtcaagcatgtctaaccataaaagcaaatggaattttaagaggtagattttttttccatgatgcattttgttaataaatgtgtcaagaaaataaaaacaagcactgagtgtgttctcttgaagtataagggtctaatgaaaaataaaagatagatatttgttatagtctgacattttaacagtcatagtattagacgtttcgtgaccagtgcattttggactctctcaggatcaaaatacgagtctgccaactgtattaaatcctcctccaccccctccaccagttggtccacagcttcctggtgggtcgttgtcatcaaatccattgggccgaaatgaacatgaagcagatgcagcttggagggcccgggctcgagcattcaactcttgttcctgtaaatatagtttattgtcttttgttatagcatccataagttctttctgtagaggtgggtctccatttatccagagtccactggttgggttattaccacttaaaccattagtactatgctgttttttatacaaaagcacataagctgtgtcctttggaaacctgctcgtaattttctggactgactgaaatgaagtaaatgtcactctactgtcattaaataaaaacccattcttttgacatttccttattttccaaatcctgttcaaaaactgcactgggactatctctccttagtaaatgactctgggaggatgctaatgccagagcctcagactggtggtacatctgatatgaagagtctgtacttgtgatatttctggcataagaatagtaatgcccactttcagaggatataccagagtgaaccacaacggaacttaatagatagggcaccaattttgtgcaggaagcttcatcagtccctgaaggctttaattttttagcaaggttctcactaagatcagtgaagtcaacatctacagaccaactttctgacaatgaagagaaagaagtaattcttttaactggcaactccaaaaccagtggcagtgatacattgtctaaaattttccttctcacatgatacttctgatcatatgaaaatctcaggagagtaagaataaggtattcaggttcc

SEQ ID NO: 313039 - DNA, 1535 bp, Homo Sapiens
ccctctcctgggtcaacgggggttgattcaaggaatttcttacctgggaaaggccgtttgaaaggggaccatgtttggaaatccgcccggggtgttatgaaattgagggggcacggtggggggttcccggttgaaaatactttgtgcgggggaagggcccccgtggtccccccgcatagcggtggcacccccaggggctggcccactaaaataggccaccacccatgaggaaagagagaggaggatgattccaatgacgggcccgatggcactgctgtgggccgggctgtcgtctgagggcggcttggtgatttcacacatgagctcgtcggagcggtcgatacagtcggggaaggagtcgcactgctgtttgatgaggacacactggccgctcgcacaccggaactggttgggcaggcagatggcgtcacagtccgcctcgtctgagcggtcctgacagtctgcctcgccgtcgcagcgcaggcgcaggtccacacactgaccccgcgcgcaggggaactgggcggcggagcacacggggcagccctcctcgtcgctttggtcatcgcactcgggaaagccgtcacagcgccaggccccggggatacagtcgatctcccctgtggcacatgcaaactggtccggggagcaggtgggcggctctccacaggtcagcaggttctgccggagccacgaggtggatctgggcatgagcccccgtggtgtccccatcaccccttggcaatacagatgtgggagccagcccaccattgtccacgggcacatgggtgggctgagaactcctccaggctgacttcctccactgcatggatgccagtgaggtgggcgacacggccctggatgcgagtccgcttgtccccggtggtcttctccacacgctcgatcatctgctgctggcggtcgatccagtagagatgcttgccaaggatggtcaggcccagaggctgcacgatgttggcgtcctccagggtcaggcggttggcccctgacaggtcacagctctcaatgcgcttcaggtccgcgtccacccagaacagcttgcccagtgtgttgtctacccaccagggccacagggcggatgaggccggtggtgaagaggacctcgcgctcggtgccgtccagggctgcgcgttcgatcttggctgcccggtcctgcatgttggtgaagtacaggtaccctcgctccgcgttgacgacgatggccctgggcttgtcgcggtccccacgcagcaccacccccatggcttccccgctcagcctgtggacgttgatggtattggtggcctcgcacgtccagaacagtgtccggctgtagatgtcgatgctgaggtcgtggggctgcctgtctgggttttggccttggctcagagaggtcaaaacaaagggctgggtcccgtcgtccttggctcgcttgatgttctggcgcccatccacccagtagatgaacttgtccagtgggtcatagtcgatggctttgacgttcctcagtccatgcaggggcaggatgagatccg

SEQ ID NO: 313040 - DNA, 1896 bp, Homo Sapiens
accaagcccggggaagaagactgaggaagagtcctaagccctccccagagatgctttattacatggtttcatcagtcatcaatgatgggtccctatgcccatgcgaggagacaggaacatctgtgtggtacatggcactgttcccctctcagctacgcagtcagatgggggcagggggatgaatgggtgcttggcttccctgctgttgggcaggctctgagatctcagcagacagaaatgaaagcctggcaaatagggaggcaggaatgttcaagcatcggtgacctccatgttctgcagcctgttttctagggtgacgtctcttgctgctgctttctttttgctgccctcatgttgcttcttctgcttctttgatggctcctgctcaatgggcgcaggcttcacaaaggggatcagttcttgcagtcctggcggcatgaactccttcaatttctcaggcacagtgatgcccttctctgtctggtagttctccaggatggcgcagatggtacgggtagtggcgcacatggtagcattgagcatatggacaaactccaccttgtccatcatcttcttggtttgcccatatcggattcgaagccggcgagcctggtaatccgtgcaattagaacaggagaccaactcacggaaggctcctgagcccggaaaccaggcctccaggtcaagcttcttactggcagcatgattcaaagaacctgagacaatattcacaatgtggtaaggaatccccagggactggtagaactcctctgcggtggtaatcatctcttcaaacatctcccatgacttgttgtcatggggtgatgagtacacaaactgttcaatcttctcaaactgatggactcggaagatgccacgggtgtcacggccatgggagcccacctcctgacggaagcaggtagacaggccagcatacttgatgggcaggtcctccggccggagccactcatcccggtgcagggcagcaatgggctgctctgaggtggcaatcaggtacttctcatcataggagttgtcatcagacttttcactgcctttgccaatcaccttataaagttcttcatcaaactggctgagctgtgccacctcctgcatgacctccttcctcatgaaaaagggggtataaatgggaatgtagccccgacttcccaaggtgcgaagggcatactggatgagagcctgttccaggaacaccaggacccccttcaagaagtaccctcgactcccagccaccacggcccccttttcgccttcaaagccatctaccatcaccaccaggtccacatgagagtacttcttcctgactgtacaatcaccccaaatcctctctactttgttgtccacatcctcatcgttactgatgggtacagaagggtgcagaaggttcccaatctctcggaggttctcaaaccgctctgcttccaactttatccgctccgcgtcacacttcaggatggcttcatcaatgaggagtcggacttttttgatttgtgagactttcaggttagctaaagcgtctgcagtaaggtcatcgaaactcagcacattctctgggacagactcatcatctcccactggctcttttttcttcattttctctccgattgtcttgctgcataggttcttcagcttgttcaagttgtctgcccgaaatctacatcgtcgccactcgctgtctgccttcaccagctggtccactagtcccgggtccttgaagcgcttctcctgcgtctctcggatgagggctgggtcccctcctttatccacccgaaacaaatccagatccagcaccatcttctttcctcccgggccaacgctcagggaagcaaggatcgcgccgcagcactcagcctgtgaccgccgcactgcgccccc

SEQ ID NO: 313041 - DNA, 754 bp, Homo Sapiens
  misc_feature (424)..(424): n is a, c, g, or t
acaaatggagccacagtctgttcacattcacggattctctaagagcgttgtgagagtccatataatactgttcacgtttagtctaagttaatatgtctggggacacagtgatataacaaactggttaaacgagcagaggtaataggacagtaaactgtaactgcacaatttaaaatatccacccttcatccaccactaccatacttcttcccagtggtattaaattctcaaagccaaatcatatcagaggtgcaggatgccaaacactatttgcatagaaaatcagtcttcaagactaaacaaaaaagaaattcataaaattaaactttttgaatagttgcattcgttgctttcaatttcttcatccatatctgttcgggtcatacatattttttccttctttttatccagagagattaatacncagattaatacacaaaacttttgtaaatagcattccagttcaaagttgcttgtgatcatagccacgtgtgaaccgttagacaagtgtatgctatgccccaaaatgttttataattcttcagtgcagtttcttactgatgtttcccttaaaattaaggcttaatgaaagagaaatccatagtattatgaactgattttctttagcttctgaattaagtgcactctttccaaaatcaagtggtcctggagtaacgttaagacaacttgtattaatcagtgtcaggactgaagtagtatcttactggaggtcccggcaaatcttcatctccat

SEQ ID NO: 313042 - DNA, 934 bp, Homo Sapiens
tatgatgtcgctacgtgacaggaaattttcagctccattataatcttatgggcttatgggaccactgacatataggcgatcagtcattgaaatgctgttatgtggcacatgatggtatatatgtagaaaggagaatagtcactcaacacatattaagggaaaactgcaatgagccatgaagagtccagcaagatgctgaaattagaatggtatgatttagtggtatactccatctccctctgttactttaggataaaataacatgattattataattctactaaattaagaaaaatgtgcatgaaggacagccaaaggaatgttttaaagtggttctactttctgccattaataactataaaatagagcaagtattttaaaatattttttgaagccacaaccaataaaacagagatgaaaagggaatataactaaaatatgagatttatacctattaaccaaagaaattaatcatccttctcactgaggagcattcacgaatcttctttgcatttttgtttattagtatactgtagcaaatcagtttaagatttcaaaagatttaattcatacctccattggtatgtggtttccttttaaatgaaactgtattaaccatgtcccattctgcttcgtaactgttcagatgttctgatcctcgatgacctctttcttttggggcctgagtccattctacaactgaactggagtcctttctagcatagagaatactagaggaatctaatgcatcatccaatggtctccagtccactattacttcggcatccttttctaaaacacgtaatattcctgaaatcaagccgtcttggtcattggtctttccacaagatgagtgaatatatactccttcttgttcatatataatcttcccgctcacaacacccgccgccgccatgtttcctgcgcgtgcctc

SEQ ID NO: 313043 - DNA, 511 bp, Homo Sapiens
tttatattcatacccaagagattaggtgaggatttacctagtaacacaaagaaggtatctgacattctttaaagttaaaatgtaagtccaaaatataagtcatcacaaaaggctgaactcagtaaagtggcaaaggtgataatcatccaaagtactattaagcaattggttagaaaaagtataaagaaatagatctaaattggtacatcagatgttctctatcacagaagtacagcactttgataggtactatcaaactttttagagtttctctgctgttggaagaatttcattttttgtatacacattctcttccaacaaaatactaccacacaggggaaggaactgttccccacaggtaccctcaggtaatatggaaggtttttaacatgaaccccagttctaatcttgacaacagatttcaggtatgagtacttaataatcacttcacatcctgaaggatatcttactctcaaatgttatgaaaggtataaaatagctacatcctcta

SEQ ID NO: 313044 - DNA, 597 bp, Homo Sapiens
  misc_feature (99)..(99): n is a, c, g, or t
  misc_feature (255)..(255): n is a, c, g, or t
ggcaaactcctttgccagggcctgttccctttccaggtgttgggttggtgtgtagggtggacaagtcagagattccaataaactctgaagagctttttntagtctaatggaaaactcgtaaaatctctttagcctcacaacaaagagggcacaccgcattccaagctttttcttgaagcttgaatgtccattgggattttgaattgcatcttcgggatcttcttgggcctgcgccttttgtaagcctgcaggtcntgcaaggatgcttctcagaatcctgaaggacgggcgctgatctggttccagatttctctctctccttctgtaggctgagcattttcaaaatccaggaaaaagtgtggatagttttcaatttccctggtaaggactttgagcaggtttcccatcccagcaaacctggaaatatctcctgtgattcagtttcaccaatccaggctgatgggatgaaccagcttagctgctgtctggccaaagtaggttggacttcccaaatcaggacggtggcctcctagagtcctgtagcttttctgtccttaagatggtggtacccgagtcgccgccgccctgctctccccg

SEQ ID NO: 313045 - DNA, 881 bp, Homo Sapiens
  misc_feature (826)..(826): n is a, c, g, or t
  misc_feature (846)..(846): n is a, c, g, or t
  misc_feature (857)..(857): n is a, c, g, or t
cctgtttgccattaagtcacaacattttatcaaaatatacacacagcacaaatacctttaaaatgtatggttggaattctaattcaactcaattgactgctgcaaacagcatgcatgggccattgatcttgaatgatgcctacggaggggcttatgagtcatgaaatcaccagtcatggcacgagaaggggttaaggttcttttcccaggagacttatgcacttcatttcttttcttgttatagtgtgagaatggcagtgagtgactgtgccaatactggagtctgctgagaatgggtggatggaaaggtttttactggcaagggtgaaatgatactatcttttctatcttgacaagataacaagcgaaggtgtctagcaaaccttccctctcactttccacttgtcctcttgaccatggatttcatgcccaatcaggatgaatggatttgtagatctcaagttacaagctatgtttattgtaaagaattcccataaaaacctatccagggctggccccccagccatttacacatccacagataggaatagaataaaacgggttagtgattacttgtctgcggctgagtgagatccgctactagaccaggcaatggggccgtttcagtcttgagacgtctgtactccgtttgcccctgattcaacaagcatttcgttgatcagcagttggcgcccagggtgaagagccataatttattgcagtatcaagtcttgaaaacctttccaagtgcggagacccatctttcaaggtaaataactatgggttaggtaatgacctaacttcagggagcgtctttgaggacatntcagggagacgaggacacangggcattcgtncattaggtgaagtaggacttgggt

SEQ ID NO: 313046 - DNA, 1087 bp, Homo Sapiens
  misc_feature (605)..(657): n is a, c, g, or t
ttttataagtgacaaatatatttctctttattacttttaaggttttctctaatgtcttttggtagtggaagcattttatttgattccactgttgctcatggtttgagccctacatactcccttccctttcacctcaaagggaactcctttgtatgtagccacacactcatcattagtgtgaagatcaggctggatctgctcccaaatcttcttcttaggattcagctccttgtcaggctctcctgggaaagcatcaaaagtaattctgtctccaggaacagacccatttggaggagccaagatttcaattttctctggtgaactagcacacatgaccattgcttgagataatactcccctcatctttgcaggtttcaggttacaaagtaaaatcaccatccgattttgcatctgttcaagaggaacatgattcaccaggccactgacaactgtccttggggctatttctccgacatctacttcttccacatacaaagaatctgcatcagggtgttttctagcagttatgatgcaaccaattcgaagatccagacgggaaacatctattggcttagagtcggcacttccagctattgattgctgtnnnnnnnnnnnnnnnnnnnnnnnnnnnnnnnnnnnnnnnnnnnnnnnnnnnnngtctcctgttcctccttttatctgttctttggtaccagaagatacggttgttactgctgtagactgtatcacattttcagaaaccatagaattagcgtgcagtggagtaccagatggaaatggtatttgcttcactccattttgaatttctgcctgaattagctcttgtttcagttcttcaatttctttcttcagtttagcattttcaactcgaagtttcttctcttccctcaaagttgcctgcaaaattgctttctccttaagtagagaaacttgctgcttaagatattcaatgatttgatctgcctctgcacccttctgctccagtctcttcagaacagcatcattatttgccatttttgccaagagacggcagaaaatcatgaagcggaggaccacgggttccgagacagccacagcaggaagcccc

SEQ ID NO: 313047 - DNA, 802 bp, Homo Sapiens
  misc_feature (678)..(730): n is a, c, g, or t
ctgcagtatgtacagtttcatgacatcacatgaagaaattaaatttctaataaaaatggcaaattatattactgagcagatcgcatcaaatttggttgtgtaaacaccagaattcttactatgaatggtaatgtgcctatattccagtattgctaatactgggatactcttggaataatgtttgcaatgggattaaaaaattcatgaaagtagttgtgtgaattctttatgtttaaaagtggttgacgattaaacaaattctttaagacccttcgaatcaaagcacattctttcacaaagcttaaaccacagacgtcatgtccagaaatggaatactgtcatgttaggatgaacatctgatctgatttgttaagacattttgccaaatgcacagatgcacagggtcccccatgcacttttcatgcagcaggtaatcacaacttaaataaaaggtttattctatacatttgtccagacttgcaactgtatacatacatgcacaacttttaaacctgtctgattatatttacacttatacatggaatatacaggaaccaaagagattaaaaggcttttctgttgcattagaccaatacaaaatatgtatttttcattaaggaaatcactatttacatcacctttgaaaaccgattttaacatcttcatgtaacaagtcannnnnnnnnnnnnnnnnnnnnnnnnnnnnnnnnnnnnnnnnnnnnnnnnnnnnctctcaccagtttactcttctgtaagatgcagcagagaatacacaggtaatgaatgctaccttactgatgtc

SEQ ID NO: 313048 - DNA, 1679 bp, Homo Sapiens
  misc_feature (298)..(319): n is a, c, g, or t
ggcaggcaggcggttatggtggttccctcccatcccaccacataaagtttctgagacttgagaacagcaaaatgctgttaaagggaaatattaagaatgagaatctgcagtaagggtgattctgtgcccacagttcttcaattctttataccgttttacccacatgtggtgttaccaaagccgggcagaaccatgctagcggaagatgtgaaatccagatagctcattattgccaagagctaggcagctttgatctccaaattgttattgctttcatttttattgtaatggaattgcnnnnnnnnnnnnnnnnnnnnnngtattgaagagggttgttttccctttatttttcataagctaatgtaaatgaagaaaaaatgtcttctctgggctgtaggcctggctcagcgtacacaggtatacatcctaagctctctatgttctctaatctgtggtgactgaacatgtgtctcaatgcacggggcatttctacctgtgtttctgcagcacccccactgccttgagtccccagcagtgctgttatttgcctaacacctgtagccatctgccacgcagccagacgtgaaacgctgagacagagaccatttaggttaaatacgacagcttatcctgctgggtggggaaagtaaaaaatatgctggttcaaggcctaaagtaaaatgatcaataatgtttgtagcattaatgaaatattttcaagaaatgtgtccaggggtagcactggctatgttgacgaggcctttggtaactcagagagctcttggccctgatggggacttgcccttacgctttctttatcaggctctgagttcacacggagcctctggcacttccctgctgtcttgggagaaaggaaactggttgccgcggcaggttgtggaatctgttgctggaaccaggctggaagcccacctggtagtgaacagggcccagtggggcaggctgggcatgttgtggtctatgggtttgtttcctggagaatgttcaggaatgtcttcccagctgctttggtgctgagctctattatctcacagcacgtccagaaggctaacccaggtggggaggatgctgacaccagctcccaggtggagttggtggtcttaatttggagatgcaggggcaacctgtgaccctttgaggcaagagccctgcacccagctgtcccgtgcagccgtgggcaggggctgcacacggaggggcaggcgggccagttcagggtccgtgccaggccctcctcagtgccctgtgaaggcctcctgtcctccgtgcggctgggcaccagcaccagggagtttctatggcaaccttagtgattattaaggaacactgtcagttttatgaacatatgctcaaatgaaattctactttaggaggaaaggattggaacagcatgtcacaaggctgttaattaacagagagaccttattggatggagatcacatctgttaaatagaatacctcaactctacgttgttttcttggagataaataatagtttcaagtttttgtttgtttgttttacctaattacctgaaagcaaataccaaaggctgatgtctgtatatggggcaaagggtcagtatatttttcagtgttttttttctaccagctattttgcatttaaagtgaacattgtgtttggaataaatactcttaaa

SEQ ID NO: 313049 - DNA, 1517 bp, Homo Sapiens
  misc_feature (190)..(310): n is a, c, g, or t
cagagcagctcactcgagatctttgtgtccagagttttttgtttgtcttgagacagggtctggctctgttggcagactagagtacagtggtgagatcacagttcattgcagccttgacttctcaacgccaagtcatcctcccacctcagcctcctgagtagctatgactacaggtatgtgccaccacgtnnnnnnnnnnnnnnnnnnnnnnnnnnnnnnnnnnnnnnnnnnnnnnnnnnnnnnnnnnnnnnnnnnnnnnnnnnnnnnnnnnnnnnnnnnnnnnnnnnnnnnnnnnnnnnnnnnnnnnnnntcaccatccacacggctgacctcatacatcaagccaataccgtgtggcccaagacccccaccataaatcacatcattagcatgaaccacccagagtggcccaagactcccagatcagctaccaggcaggatattccaagggcttagagatgaatgcccaggagctgaggataaagggcccgatctttctttgggcaaggttaagcctttactgcatagcagaccacacagaagggtgtgggccaccagagaattttggtaaaaatttggcctctggccttgagcttctaaatctctgtatccgtcagatctctgtggttacaagaaacagccactgaccctggtcaccagaggctgcaattcaggccgcaagcagctgcctggggggtgtccaaggagcagagaaaactactagatgtgaacttgaagaaggttgtcagctgcagccactttctgccagcatctgcagccactttctgccagcatctgcagccagcaagctgggactggcaggaaataacccacaaaagaagcaaatgcaatttccaacacaagggggaagggatgcagggggaggcagcgctgcagttgctcaggacacgctcctataggaccaagatggatgcgacccaagacccaggaggcccagctgctcagtgcaactgacaagttaaaaaggtctatgatcttgagggcagacagcagaattcctcttataaagaaaactgtttgggaaaatacgttgagggagagaagaccttgggccaagatgctaaatgggaatgcaaagcttgagctgctctgcaagagaaaataagcaggacagaggatttgctctggacagagatggaagagccgggaacagagaagtgtggggaagagataggaaccagcaggatggcaggggcaaagggctcaagggtgaggaggccagtgggaccccacagagttggggagataaaggaacattggttgctttggtggcacgtaagctccttgtctgtctccagcacccagaatctcattaaagcttatttattgtacctccagcggctgtgtgcaatggggtcttttgtggaaatcaaggagcagacaggtttcatgtgtactgtcaccacgtgggatggaaccagaggcatggaagcaagacgctaaatgaagagggccataagggctgggattcccaggcaccttaggaacagcttgtc

SEQ ID NO: 313050 - DNA, 1180 bp, Homo Sapiens
cccgttttagggaaaatggggccacactgcccttgaaaagggggaggatcccggttatgtccacccgggaaaggtatgaagctgtcccaagggccatttacaaaaaaaccccccagggaaattaagataaaaacccccaagagaaaaacaaggacaccataaaccaatataggaaaatgccagatatttacagcctccatctgaaatgtgacttgtgttctactttcagcataaaacaaaaccagagaacatttcttgaagggtatcacagatgaagctggtgccagccagttttgggggagacattcattctaagaagggagaaacgcacagttagcaacttgccgggattacaacattgtcttgatcttcctgcagttctgttactaaaaatcacataaagtaagacccaatgtcttacagaaatgacttgtttgtcaccacatttagaacaaactactcaaagtcacaggcactgggtctgggagagcagaggtggatggccacgaactcaggtgaaggatgtttatctttgtgaggtcagagaagggaagcagggctctacagcctggaagcttctgcactaatgtgtcttctaatagtcagctcgtggttttttgtttaacttcagatcaatcctgtgccggtttttattctttcgctttttatggctgctgtggtgactccctgaggaagtagaagaagcagccttctgaggtttcactccctgcacagatccatccagatcctcagggtcctcctggctgggctcattttcctgattgtggaagtctggagaagtgtcactttccgtcccacttcctggctccctcttttcaatgagctggtcctgaactcctgccaatgcacttactgcagctgctgaggtaaccgaggatttactgaagagccgctcagcttccttaaacttccggttccttcgatcatttttgctattggagtttttttggttggtcagataccgatcccagccacgaataatattgccatacatctgagtgtcttccaggtagcttccctcaaaagcatagatctgtcgctccaaatttgccaatgtttccgccagctcctgcttccgcttcacgagctccgccagctcccgccgggtgtccgggatctgcggcggcgccgccttgttgtgcatcgccatgttgggctc

SEQ ID NO: 313051 - DNA, 649 bp, Homo Sapiens
  misc_feature (558)..(558): n is a, c, g, or t
  misc_feature (560)..(561): n is a, c, g, or t
gccgccgcagatcccggacacccggcgggagctggcggagctcgtgaagcggaagcaggagctggcggaaacattggcaaatttggagcgacagatctatgcttttgagggaagctacctggaagacactcagatgtatggcaatattattcgtggctgggatcggtatctgaccaaccaaaaaaactccaatagcaaaaatgatcgaaggaaccggaagtttaaggaagctgagcggctcttcagtaaatcctcggttacctcagcagctgcagtaagtgcattggcaggagttcaggaccagctcattgaaaagagggagccaggaagtgggacggaaagtgacacttctccagacttccacaatcaggaaaatgagcccagccaggaggaccctgaggatctggatggatctgtgcagggagtgaaacctcagaaggctgcttcttctacttcctcagggagtcaccacagcagccattaaaagcgaaagaatcccggcacaggattgatctgaagttaaacgtagagccctgctttccttctctgacctcacananngattaacatctttcacctgagttcgtggccattcaactctgctcttcaagacccagtgctgtgactttgagtgtggttccttgtgtgc

SEQ ID NO: 313052 - DNA, 943 bp, Homo Sapiens
gcctgggtggcgaattcggcacgaggcagatcccggacacccggcgggagctggcggagctcgtgaagcggaagcaggagctggcggaaacattggcaaatttggagcgacagatctatgcttttgagggaagctacctggaagacactcagatgtatggcaatattattcgtggctgggatcggtatctgaccaaccaaaaaaactccaatagcaaaaatgatcgaaggaaccggaagtttaaggaagctgagcggctcttcagtaaatcctcggttacctcagcagctgcagtaagtgcattggcaggagttcaggaccagctcattgaaaagagggagccaggaagtgggacggaaagtgacacttctccagacttccacaatcaggaaaatgagcccagccaggaggaccctgaggatctggatggatctgtgcagggagtgaaacctcagaaggctgcttcttctacttcctcagggagtcaccacagcagccataaaaagcgaaagaataaaaaccggcacaggtatgtatattaggttaggctgggaagttttttttaaaaacagaaaaacgtgatggaggattgatctgaagttaaacaaaaaaccacgagctgactattagaagacacattagtgcagaagcttccaggctgtagagccctgcttcccttctctgacctcacaaagataaacatccttcacctgagttcgtggccatccacctctgctctcccagacccagtgccctgtgactttgagtagtttgttctaaatgtggtgacaaacaagtcatttctgtaagacattgggtcttactttatgtggtttttagtaacagaactgcaggaagatcaggacaatggtggaatccccggcaagttgcgtaactgggcgtttcctccctttcttagaatgaatggtctcccccaaaaact

SEQ ID NO: 313053 - DNA, 329 bp, Homo Sapiens
ggtggtttgaaataatctttattttgtaaacatctgtgtttaaaatagatgaaccctgctcacaattcatatatggacccgagacacagtacacgaagttcacccgtcacagggagatagtggaggctcaggagcaggtggcgtgcctggggctggatggagtctcaagacagcaggtgcagaggtggtgacgagtaaacaggccagcagagcctgcttaacagtctgggcctcaagacatgccccaggccaccaaaagtttagggtgagcgtagctaatgtgtggcttaagaatgaccctcttcctaggcctcgcccaccttgggacc

SEQ ID NO: 313054 - DNA, 882 bp, Homo Sapiens
  misc_feature (158)..(158): n is a, c, g, or t
ctcttcttctatctgggctttcttttgagctcttctttgtttattacgtagcttctttagctctttgtcagacatgtttgctgtatcagcttcgtgttctttattctcatctgtaagggggttgtcatgaagccttcaaatagatctcctatagcaanttcttgcctgcccttgaagtaaaatggatgctgtcgaagtacatcttctagttttaataagtccacatatgatctaagggtaatcttcctcatacagtatgtatgaaagtcaaactggtcatcagtgatttctataaaatgtctctcaatctcatgacatttcttaagtgcttcaccaaatttattcattgctttataagcctgggcacattctgtttggaaccacatgcactgcatttcattcaaattctctaccgctgatgttccttcccttgtaaactttgagcacatttcttcagcttctttaatcaggttggcttttagcatgtattttgcacatttggagttgataaatctgtctgctgtgtccaaggcctgggcctcatccatccaccttgcagcttctttaatatttccagcatgcttatagattttagctttcacgagaaagagttctattaatgtaggtgtactttcaatagcagtatttatgtactccaaagcaatagatggctgaccaattttgtcataatgttgtgccaagtagtactggacccaaagtaatgtggttggtggttcctcctttccatcatcattggggttaaataaccggcagctttttagagaggtttcataacctactactaactcttctatgattgccaccttttctttgtctttgtataatgatcttaaagtattgaagactggtgggcaacccttg

SEQ ID NO: 313055 - DNA, 835 bp, Homo Sapiens
  misc_feature (58)..(79): n is a, c, g, or t
  misc_feature (795)..(795): n is a, c, g, or t
caacaggaaatatcctttcctatatattgtgctattctgtattcactaccttttcagnnnnnnnnnnnnnnnnnnnnnnaagttaaatgcttttcagtaatggattctcccaggcactaaactacttaagccaggagtataactacttcaaatacactatgagaacctaaacttgggtctctggagatctgctgccagagtctacttgttctaacctgtgtatgcgcaagatacaccacattataatagttttgcatttgctatcatacattagttatgtagaatctgtgtcagcaaatgctggactctccctaatactgaaatttaaaaatcacctcagaaaactgccagttctgagttctcaaggcagcttttagaggtaggaattccttctctacagaaagctatcttattctttcagaacaaaatgactgttttatttccacaagtaaagtagataaaagtgaaagctgtctgaggcttactatacccaagagaaagtctactcactacgtagcaacctaggtaggtgccacccagctacatttccagttctcatgaaaagatctgaaaatcccatcaatagacaattcagcacatttggaaataggaagagccctaacaaataattgaatactccaaattactgagtgtttgcacacagcatgctgcaaacaggaaatgtaaatggtctgcagattagaaaagcactcactggggcaattaacagcatctcggtaagaccatgcaaaatgtggtttcttgacatacaaggggtaggaaaataatgaaacngaaagacatgccatgttaggacatgaaaagagcaggcgga

SEQ ID NO: 313056 - DNA, 2090 bp, Homo Sapiens
cagaacgtacaattcatgcataaccgaatgcagtacagtatggagtattttcagtttatgaaaaaactgcttacatgtaatggcgtttacttaaaccctcctcccgggcaagatcacctgttgcctgaagcagaagaaatcactatgatcagtattcaacttgctgctaggttcctctttactacaggatttcacacaaagaaagtagtccgtggctctgccagtgattggtatgatgcattgtgtattctccttcgtcacagcaagaatgtacgtttttggtttgctcataacgtcctttttaatgtttcaaatcgcttctccgaataccttctggagtgccctagtgcagaagtgaggggtgcgtttgcaaaacttatagtctttattgcacatttttccttgcaagatgggccatgtccttcaccttttgcctctcctggaccttctagtcaggcttatgacaacttgagcttgagtgatcacttactaagagccgtactaaaatctcttgagaagggaagtttcagagcatgggcgtcatttacagcagtattttaatttgtttgtaatgtatgccaatttaggtgtggcagagaagacacagcttctgaaattgagtgtacctgctacttttatgcttgtgtctttagatgaaggtccaggtcctccaatcaaataccagtatgctgaattaggcaaattatactcagtagtgtcacagctgatccgctgttgcaatgtctcttcaagaatgcagtcttcaatcaatggtaatcctcctcttcccaatccttttggtgatcctaatttatcacaacctataatgccaattcagcagaatgtggcagacattttatttgtgagaacaagttatgtgaagaaaatcattgaagactgcagtaattcagaggaaaccgtcaaattgcttcgtttttgctgctgggagaatcctcagttctcatctactgtcctcagtgaacttctctggcaggttgcatattcctatacctatgaactgcggccctatttggatctgcttttgcaaatcttactgattgaggactcctggcaaactcacagaattcataatgcactgaaaggaattccagatgaccgagatgggctgtttgacacaatccagcgctctaagaatcactatcaaaaaagagcataccagtgtataaaatgtatggtagctctatttagtaactgtcctgttgcttaccaaatcctgcagggcaatggagatcttaaaagaaagtggacctgggcagtggaatggcttggagatgaacttgaaagaagaccatatactggcaatcctcagtacacttacaacaattggtctcccccagtgcaaagcaatgaaacgtccaatggttatttcttggagagatcacatagtgctaggatgacacttgcaaaagcttgtgaactctgtccagaggaggagccagatgaccaagatgctccagatgaacatgagtcgcctccacctgaagatgccccattgtacccccattcacctggatctcagtatcaacagaataaccatgtgcatggacagccatatacaggcccagcagcacatcacatgaacaaccctcagagaactggccaacgagcacaagaaaattatgaaggcagtgaagaagtatccccacctcaaaccaaggatcaatgaaatgcacataattaactggttccatcaagactgtgcacccaggccttacagtccaacctttttctgtgtctggctaatatttaaaactagaaaaactattcctaatcaacatggagtggagagtttattcactgtcttatctgcagaaatttgctgtcaatatataacccgcctgcagtggaaagtgtatagtgttttgtaataaatggcctgatgctaatgtgtaaatggcaaaggtgtatatagtatattaatgttgactgttaattcttaagcaagaaacttttttcttgatgagactcacagatctacacaaactacaaaagttaattttcttgttacacccactgcactctgcaaccagtgttgcctcctcatggcagttggatcagctcctttttta

SEQ ID NO: 313057 - DNA, 433 bp, Homo Sapiens
  misc_feature (311)..(320): n is a, c, g, or t
aaaagtcttcttaaattttatttgtgaattcagcaaaataatttctataaaacaaaacagccaaacatttaaatagtataggataggctgtatctatttgcaggtatatttggtttttaaacaggttccaaaatattacacacattcaaaatttaccaattctcttttaaatatagtattaactcacaggtttcttggaatcttaaaacaaatgttttttctaaaatggtaccttagaattacattaaataagcaggagcttagatcttaattaaatcttgtatctaacaacaagagttttagaataatgnnnnnnnnnnctacaacaattctttctttcaaataaaagtgtgactatgaattcagtcagacatcttggtgcaatggtacttcaaagtactatggattcttatgatgtacacttcaccgggat

SEQ ID NO: 313058 - DNA, 1057 bp, Homo Sapiens
  misc_feature (55)..(55): n is a, c, g, or t
  misc_feature (60)..(60): n is a, c, g, or t
  misc_feature (71)..(71): n is a, c, g, or t
  misc_feature (105)..(105): n is a, c, g, or t
  misc_feature (275)..(275): n is a, c, g, or t
taaaaaaaatacaatcccaagtaccattaaaaggaaccatggaaccaacaatgcnacccncccaggcccangtggaaaatggcctttgcccacagtgcttgcctnaagggcacaagtgaaaagctgaataaggccaaacacttgaagaggcagttttctgtaaacttctgggggtggggggaatttcctctcgggacagatactggtttgggatggctaagatcagaaggtgtgatatttggctgcacctgacacatcacagatttaagatagcntctgctggatgagaccagttaactcttttaggagagaggttatcactacagctttctgcctttactgttacaatgtgcagccgcccagatggtatcctcctatggaaaaaaatcacctccaaaatcttccttaagtgaaaagatacaaaataagctaagtcactaaaaggtttccttagcttaaagctccttaagaatcctacattgataactaagtaactttgttagcggtgtgtagctagacacaaatgctttaactagaatatgtattcccactcacttggtacctaatagtgatacatcgtaatgacacttggaaaacaaactggtcctgaggaattttggcctcttctcatgtcctcacttggaactttccagctttcgtgacgtatttgactcctttaaatggcttatatttctccccatacatgtccaaacggtttacttttaagcctgaaatagcaagctgctggatcttaaactgtatgttgaggctcggattctcttctggtttgggggctccagactgtaaatttaccagtcctttaagacttgggagcttttgtggagtaatttttcccacatcccatgttagtaccttggtgactggatcaaatgtatagctgccttgtgtgggtgtcaggttcatgttcagcacaacttttggcatgtgaactgtcactgtaattccttcaatagttttccccatattctgctttggtccaattgttatatcaaatctgccgcaagaactgttctccttaaagctgatactatgtttc

SEQ ID NO: 313059 - DNA, 623 bp, Homo Sapiens
  misc_feature (484)..(484): n is a, c, g, or t
ctaggaatctaagccagcagatagaaattcaacctctagaaagggaagtaggtgtctgtcctgccttcatgctcaagcaaagggtcccataaagagaactttgtgaggttattttcctccatcaacctatctttaaggaggaccatcctaaacccttccagcaactgccaactctctcacttacattaaggctctggataagctaccataagttctctgaacttcagaaatattgtattaaacttgatataccaaatgtctaccttgtagtttgctgtgaggtatagttatagcacatttgagtagtgctctgttgttttaaaaatgcttttgtttatgtattaattcatctggaaggtcaagattcaagttgccctcagtaattttatcatatcttgaatgaatactgctagtccttttcattttccaaataacatctctttattcctatacttttaaaaaatgcatcatgaattcatactgnattttttcaattcaaatgtaagagagttcaataattctaagggattctttataaatttgaggtaaattttacatgcaattaagtgcacaaatatcaagtgctctatctgatgatgagtttgacaaatgcatacacccac

SEQ ID NO: 313060 - DNA, 761 bp, Homo Sapiens
  misc_feature (404)..(404): n is a, c, g, or t
  misc_feature (469)..(469): n is a, c, g, or t
  misc_feature (625)..(625): n is a, c, g, or t
  misc_feature (650)..(650): n is a, c, g, or t
  misc_feature (697)..(705): n is a, c, g, or t
  misc_feature (711)..(712): n is a, c, g, or t
gtttgctgtgctgcagacgtatggggacaccacacacaccctggtggagaagatgaactacatcggccaattcttgcctggatatgaggccccagcgttcatggaccccctacttcctaaactgcccaaatgcagtctggagatgatcgaccacattgtgggaaaccagcctgatcaggagatggtgtccgcctccgaatggtacctgaaatatagctctctgcgatccattgtggtggccaactatgaagagtccatcaagatgcccatcaatgagccagcgcctggcaagaagaagtcccagatccaggaatatgtggactataacgggggcgctggggtccagcacatcgctctcaagaccggagacatcatcacagcgattcggcacttgagagagaganggcctggagttcttatctgttccctccacgtactacaaacaactgcgggagaagctgaagacggncaagatcaaggtgaaggagaacattgatgccctggaggagctgaaatcctggtggactacgacgagaaagggctacctctgcagatcttcccaaaccggtgcaggaccggcccacgctcttcctgggaagtatccagcgccacaccaccagggttntggagccggcacttcactcactgtnaaggctttgaagaggacagacctgcggggaactaccacatggacaannnnnnnnncccgcnntttattcccccccacccaacgggcgccagcacacacccgccctgttttg

SEQ ID NO: 313061 - DNA, 1463 bp, Homo Sapiens
ctggcagtaactcctcagggttaaaggtagcgaggcctgggtggcgaattcggcacgaggggaggtttgactaagatcaatcatgacgacttacagtgacaaaggggcaaagcctgagagaggccgattcctccacttccactctgtgaccttctgggttggcaacgccaagcaggccgcgtcattctactgcagcaagatgggctttgaacctctagcctacaggggcctggagaccggttcccgggaggtggtcagccatgtaatcaaacaagggaagattgtgtttgtcctctcctcagcgctcaacccctggaacaaagagatgggcgatcacctggtgaaacacggtgacggagtgaaggacattgcgttcgaggtggaagattgtgactacatcgtgcagaaagcacgggaacggggcgccaaaatcatgcgggagccctgggtagagcaagacaagtttgggaaggtgaagtttgctgtgctgcagacgtatggggacaccacacacaccctggtggagaagatgaactacatcggccaattcttgcctggatatgaggccccagcgttcatggaccccctacttcctaaactgcccaaatgcagtctggagatgatcgaccacattgtgggaaaccagcctgatcaggagatggtgtccgcctccgaatggtacctgaaaaacctgcagttccaccgcttctggtccgtggatgacacgcaggtgcacacggaatatagctctctgcgatccattgtggtggccaactatgaagagtccatcaagatgcccatcaatgagccagcgcctggcaagaagaagtcccagatccaggaatatgtggactataacgggggcgctggggtccagcacatcgctctcaagaccgaagacatcatcacagcgattcgccacttgagagagagaggcctggagttcttatctgttccctccacgtactacaaacaactgcgggagaagctgaagacggccaagatcaaggtgaaggagaacattgatgccctggaggagctgaaaatcctggtggactacgacgagaaaggctacctcctgcagatcttcaccaaaccggtgcaggaccggcccacgctcttcctggaagtcatccagcgccacaaccaccagggttttggagccggcaacttcaactcactgttcaaggctttcgaggaggagcagaacctgcggggtaacctcaccaacatggagaccaatggggtggtgcccggcatgtaagccccgcccaccccacggaggccacagccacacagccacgccccctgattctggaactcgcccaacttccctactggctgctccccttgggtcccgcccaccagcggactcggcccccaaggtccgcccacactgaccacgcccctcggcggggccgccctctgctccagccctcccgattaaagcgtgccccggtcca

SEQ ID NO: 313062 - DNA, 571 bp, Homo Sapiens
  misc_feature (35)..(35): n is a, c, g, or t
tctcgaaaatagtgtgatttagattctgccttggntgagctctgagggctacatttacctgtcagtttggggattttagtgcagattttttttaaaaaaattaaactctggtaagtactcaggaggctgagaacacaggccccttctctccccgatcctctgtatgcaggctgacttaagcccctttatgtttggctagtgccacaaccaaaacagccccaaacagattgccatgagcatgctagcctggcttggtgtttgacgataaaatcagactggtaagaaaatcagcattcatacagctgcttaccatctctctgtcctctgcagatgacccggtcctaggcagggaccaaaattccttgtcagctgaggaagtcctgaagaaacatcctgaagatgatgactgcactgccatcgtgggcagatgcagcttccatctacctgagggctgaaggggaaaacctttcacacacgtgaggaaggcgcagctctgtggaaaggtcactagaatggcagcggcagcaaatagggctccaatgcacgtttgcagggccagccccaaggctgc

SEQ ID NO: 313063 - DNA, 927 bp, Homo Sapiens
attttttgtgctacattaacacgaccacaattaagttaaagaaagctgaatttatttaacttattgtatatgtttatgtatactaggtagtgacttaaatttcttttatttacttgtgcttctgttttggggcactttgattgaagagaaattcaattcacaggattacatcttgctaaagcattccttagcattggtccaaacttgaattccctttttgcacatactgatctgcatgactgcatagcttatgagggcctcctttaagtctcggttcttttgttctttgaagcgttcaatatcagcccatgcgtttttcacaaattctctgccttccagatttttagactttagctgttgttctccttcatttatttgttcttctagcacctttattctggcttctctctgctctggagtttcttgaccaaagagcttggtagtcattcccttcaaagagaatgttctcacagtcccagttaccagttcctcacactgctgcttcttggatgctaagtcctgagcagccatctccaagtcatactgcataagttcatgtttcctgcacacagcccgcaatgcttctgcataaaaaagatactcttttaactgatctgcataatgttcttcatcttccaaaatatcatcaatagaagatgcatacacatccatatgatgaccagcactctgcagtccatcacccatttctttttctatggcactccattcactgaaaactcgaccataattcccatgtactttatatacaccatagagtcgatctgctactctagctctgactcgaagaagatgtgagatgacagactgcagttcatcactatagtgcttaaggtcagtaaatctcttgtctgggtttttcactctgaatgttgcattaagcgcttttaacctggagtctgccttcag

SEQ ID NO: 313064 - DNA, 2766 bp, Homo Sapiens
  misc_feature (28)..(28): n is a, c, g, or t
  misc_feature (128)..(147): n is a, c, g, or t
  misc_feature (434)..(446): n is a, c, g, or t
  misc_feature (454)..(454): n is a, c, g, or t
taacaagggtggttaatagccgcggggncaatttaagaggttcattcagtgcctattggggggggagtttacgaggtggagagcgaatggcctttagaggagtttccgaccatgtttttccgattaannnnnnnnnnnnnnnnnnnntaaatttttaatattgaagctcgcgttggaacttccgggtttataggaggccagtgaaagggcctcaagagctgccattctgggatttgtttcggaaccgcttaggttggcggcccggggggtttttttgttgggtgaaggatcgcaagccactagttatggggcccggaatttcctttggaaaacaggttatggccaaggttcgatttacgtactggggcccggggcgccaaacggatggtgtagaaaaactttttgaggggccgagggcggcgggcatgggattnnnnnnnnnnnnnaaggtggnggggacataaatttattaatttatttttagttgtaggaaacatcagaaaaaaagtaaacttgcccagcacttcatagctgtattttgggtttttatcaaattcagctccatttgacataagcaatgattatcttctcaaatacaccacccaccaatttcatagcatcattctttttccccaaagcaagaaatcatatgctgttctcagtgcactccaagccattcattcatttcacctacactctaaaggtacaaagcttcccttctttaaacacacaaggtggcacctatgaagcaggacagagatgaggactgaccattattggttaaggatcaattgcaaccatctgcagaagccaaaagataagattaaaactgccatttgcagtaggggcagcggtgggaccacctttgaatcccgcactcccaaacaggccatgtttcagagtaagaaaagtaatctagaatgccagcctgtctgcacgtcctctgaaaaatggcacatgtcatcctgatcaaagacaccggagggggcacgatacatattcaaatatctttactgactagcgagtctattatttttatttaagagaattttttaaagcactctggggctgattaatttatgcaaagtatttccttaataagaataaaatgaatttaacactgattctgttttcaagtttggaaatgactagggaatggttcaaaattttaccttatttcccacccacttctcaatgggtcttggatttgtgggctttcttaactcgcccttttttccccaagcatttccggtagccataagcacaacatttaaaggtgatgaaggccactgtcagcacgacggccaagaggaaaccaatcacgtccaaggaatggtactggtaccaggtgaggtcgtgggctgcggggcgcaggtgtggcgcgcccttgtgcctcatcacaaactccacccagaacacggccaggtccagcggctccaccgggcggtccttgtgaaggctggagaggcgcatgatgttctccttgtaacttttgtcattgatgactgcttttagagcattttctaaatcttcagaagtcatttccagaacattcagggtcactccagctcccttagtctccatgcgctttgcattgtccatctgatcaccaaacaagggcatcatcaccatgggaacgccattgcatatgctttcataaacaccatgggaaccagcatgggtgataaaggcacgggtcatcgggtgaccaagcagatcgttttggggtagccacttaacaagtatcgtgttgttcgcaagattcgatggtcgggttccagtgtaccgccacaggactgtctgagggattttgcccaaagcatcagcaattgccatagctttcttctctggaatttctgagaccattgatcccaaagagaaaaccacaattccatgttctccagaagcattaatgtaggcttcaaattccataggcaacggctttccctgatggcagttgataccaccaatgaagatcatgttgggcatcacgggtttgggatagtccaaaacaaagtccgttcgcaacaaccaaattgatgtgtggctgtagagatcatactccgtaacaggtgtttggagaatttcagaggctatttctagggcatgaaaaaacggtggcataataaatgttcctccaagtgcatgatgtggttccgtactctctccttgaaagtcatggcatctgagaaccctaagagaattctggggacatagaaaagaggagcagggcactgtgcaccttcttcaagatagtggcaaagtattcccctggcgaagaccacggaggggagggagaaatatttggcaacaattaagccacagttatcaaaaggatcgagaaacactgcatcaaaagaactctcctttaagtattctactaattttttgtctttaaacaaactcctgcaatttgaaaaaaataagtcaaaaatgtcattgtatgaacccattaatagagaatatatacttcgtacttgtgctttccattgagcatgggcaaaagccttgaactcccggtccagatcctccagggtatatgaagttgaataagtcttcactgtgcaattcagtgatcttcccagttgccaactcacctctggcatgactacaaccacctcatgccccctgagaatgagtttctccaccaccgacctcatggtgaaccagtggctcccatccatgggcactaccagtagcttccctgcctcggcaaagccacaggtcagcagcagacacacacatagaggaagggggctggtccac

SEQ ID NO: 313065 - DNA, 415 bp, Homo Sapiens
tcctggcacagcagtgagcactggtttctctgccatccctctcctgctgtttctgcatgtgcttctctctcatggtctcacatctcttgacttgaattttagtgatgtcaactcctgtggtctcacctgaagcctctttagcttctgttctaatactgctctgagaatcaacttcatttccttcctgaaggttcttctcttctttcatccctgttcttttggtgattcgcagcagccgccttgcccctggagtggcctcgtgttgagacggggagctggtgctgctctcagagctctgctgcaccctcagtgccttctccagtttaatctcttacagcgtcttgatgtgcacctcctgcatagactttgttttacccgcaggcccccccgattgtcccacgccggcaacaatggg

SEQ ID NO: 313066 - DNA, 2991 bp, Homo Sapiens
  misc_feature (48)..(93): n is a, c, g, or t
  misc_feature (303)..(312): n is a, c, g, or t
  misc_feature (447)..(544): n is a, c, g, or t
  misc_feature (549)..(549): n is a, c, g, or t
  misc_feature (1854)..(1854): n is a, c, g, or t
  misc_feature (1857)..(1857): n is a, c, g, or t
ccgccccggttttttcccccagggggcgagataaaatatatgccaaannnnnnnnnnnnnnnnnnnnnnnnnnnnnnnnnnnnnnnnnnnnnnttacacatccgcgcttttgggaggggtttcgccatttggggcgagaagggttttaattattttcacccccatttgttggaagagaagggcaagggcggggggtaaaattaataaaagagatccggctgggaatcccggtggttaaaccccggtaaagccccccggaattcccttttgggttttttcaaaagcttcgttgccccccggggnnnnnnnnnnggggagaatccagcccctttttctgaccccgggtttcttgggaaccagttatgcccagtttcctttccctatggggccgccgccccaaagaaaaggtttgaaaaattttttaagggccgggggggccgcaaaggnnnnnnnnnnnnnnnnnnnnnnnnnnnnnnnnnnnnnnnnnnnnnnnnnnnnnnnnnnnnnnnnnnnnnnnnnnnnnnnnnnnnnnnnnnnnnnnnnnggtgnggactttcctacatcagttttatttaaaacacaaacaagtatttctctttctgtaagggcaaatggttcaaataatgcggaacacgaaacattgactaatacaagtgctttaaatatgaaacaaaattattttttaaaaaagcaaaagaataaagaatatatacaaaagggacctggaatctgtaaggtgattccaaaaacgaaataagtagaaaatccatggtgaaacctgaacattctacctctgctttggagaagggctatcatacaacattcagtcagctgaagatggattggtagaggtgtgtctatacataaacttcagtcatttttgcttgtgcagaatcatcccaatcttcccaagactgaatgggcagtcctgtggctttcttccttttccatattcccaacaaggctacgtgaagttcaactcttgatgagccgcttacaacagcagttccttaggagccaacatgacaggtgggtcagatttccctatgagaaacaaaactggccacctacagcaaaatatcaaaatgggtaagtccttccttcctcttcctcctgattatatacaacatatctcctttcaagactattatttccatcatgcttattccttcacaaatctaaaccttgaggtgatatgaaggaaaccaacatcaagaaaagaaaactcaattcagaaatgaagaaaactggcaggtatacaatacacccccagagcatctcaatatccctggcacagtacaattcagtgtactgctacagcccatagataaatattggcagcttgaataagctcattttttccctcaggtggttaaaggccaccaaacaaatactgggcaacaggggtttgttgggagagttagaaataaaaaattaaccaaattttgtccctgtgttaattcaatgccagcaaggaggcaagtactgaagaagaaaagggacaattttcatactaaaaaagaattcctctaatcatgtcaccatctcatataatgaatccagggaatcccagaaatagaaaattagtttcaggggacccctgaggcactttaaagccttttaaaaaattacagtaataataaattagatattgctcttcagaggctaacagagcagcagaagcatcaagatcaggtccaaagagttatgcccacattacaggcttcctgagctgctcagccctctttaaagcttagttgaatctttaaatacctttaaaaagacatacaatttaacacagactgagtgggtatttttgtttagtggtggcataaaatttggtccttaatggtngcngctgtcttcatccatttcaaactcaggtaatattaagtacatcaagacaatacataaagaatacaacaaagaagaaaaaagccaaacctgtctaacacgtcaaggagtcactaagttcgcttggcaccctgtttcacttgatctccctctcagtcgtcgttttttgtggagagaagggtatgacagaacttttttctcaaaagatgatagacaatggcatcgaatggaccaaatggttataaagtaactttgagaatctgaccccaaggaatccaggacacatacagataattcagaggtatacttctgatttggggcaaattctagactaaagaaatgatcatctcaggtaaatgttacaatagatgaaactaagtccagttttttggcgattttttgttttaaagtgtcctcactaccaccttcagctatcaatcatttctgatagctcaagcagaaggtcatcttcatctttcccaggatccaggtcaatctcagcttccaatttgcctcctgaaatctcccatattagtttctcaaaatcatcctccacagagagtgggggctttcctgttgaggcagagctgagtcggcgagttttcatgctcatttgggatgaggaagggccagacacctccgggggtgaggaatctgaagacgactgggttggaggcagcacaagactgtctctaggattttctgcttcaggcacagtgactgatttgtcctcagagacaagcgggacaacagccacagctgcctttttggctgggggttcctgtaggacactgctggagctgagtggcttcacagcggcaatgacagcagcgtgcatctccactgccttacgttttggggccaatttgggggatgacacaactttaaccacagatggcttcacgttcactttgggtttagctacaaagggcagaaaatatctgataagcagtgagaatagactcttttaaatggggaataattcagaataaaatatcaaaactccttcagtactagaaataccacaaataattcatttaaaaagagactgaaaacgattcaaaggcaatttgtggtcacatggtggtcactacaggtggtcaccatgtagatacaataccacttaaatttgttacc

SEQ ID NO: 313067 - DNA, 399 bp, Homo Sapiens
  misc_feature (377)..(377): n is a, c, g, or t
tatttaaaacacaaacaagtatttctctttctgtaagggcaaatggttcaaataatgcggaacacgaaacattgactaatacaagtgctttaaatatgaaacaaaattattttttaaaaaagcaaaagattaaagaatatatacaaaagggacctgggaatctgtaaggtgattccaaaaacgaattaagtaggaaaatccatggtgaaacctggaacattctacctctgctttgggagaagggctatcatacaacattcagtcagctgaaggtgggattgggtaggagggtgtgtctatacataagctttcaggtcatttttgcttgtgccggaatcctccccaatcttccccgggacttgaatgggggcagtccngtggggctttcctcccttttcc

SEQ ID NO: 313068 - DNA, 884 bp, Homo Sapiens
  misc_feature (105)..(105): n is a, c, g, or t
atagataaggaatttaggctccaatgggttaaataacttgtacaagtacacatactgaatgactgccatgagaagggatgtgaattttggtcacgtgccaacacntacactcttcctaccataccacactggacaggtaattgtctagtccctcctgaaccactggtcacctccccaagctgttaagaggagcgaggggagcagtgaatagcaacagacattctaaaggtgagccagtgactggaatccaggaattggtgctcaggaggatagagaagcatcccggagaactgagccgccttcacttctggctgcaggtctaggcctttctgctctcatcattggctagtgaactgctccgccgacctcatcaaagagtctgtcttctatcatgtgaagggatcttccctagtgtccaaggtctaccaaacttgtcccgtcatttcctggtatttccttgtcacctcctgggctttctcggtgaggtgcatgaggatgtgatggaggctggagaagtgcaggtggaactgggcttccaggtccagctctcctgaggcactctcgtcctcgacttcctctgtctctgcggttccattctcttcgctgcctgccaccttggcctgccactcctcccgcggcagcagcccatggtccacatccacacagatggccttgagcatggtgaagtaggtgtagagatcaggggcctcagcctgggcctggcccccaggcccactcagctgcacgtcccgcagaaggctggggatcatcaccacctgctccatgttgtgcacctcggctgcataccggtccatgacggtcagcaggcagttcttggggtaacgcttggttagcacctgcatggttgcttcctctgacacaat

SEQ ID NO: 313069 - DNA, 1041 bp, Homo Sapiens
  misc_feature (27)..(27): n is a, c, g, or t
tttcaagacccattgtaactctgtgantcccagaaaatccagcattttccagaaatgggcatgctgaatgccccaccttcaaaaatgtggctcccaaggtccatatgtgggcagaaaagggaaaaactttggaacaaacaagtcaacccatcccttctgtagtaagcggttcccacttccttcagtgttttagatgacatggcagcttccactgactccatctgtccctccttgggaagaacaaagagtgccagagcattcttgctgtagtccatttgcagaactgtgcagttcaattccatatccactaggtgatagtattgttccatctggtgcatcatgggcacttgaacagtggtggtcttgtctattaagaagctggaactgtcttctgtcttggatggatcaaaaggattttcccactgggctttaaagtgaatatagttcactaagaccatgatggtgtttggcttgaggttttgaattagacccacaactttccctttggtttgcatctccacatgactgttaatctcctgcttggctgcagaaatgttggagaagtcggtagaaaagacttcagtctcatagagggtcttgacatcattcaagaactttgccagtggtttcagatgcttgccaatgaagagggcatttcctatctgcaattccagttccttctttggaaaattcagtgaacagatcagatgctggaagccatgctggatctctaccattggagtgtctgtgaggttgaaccccaaggtctccacaatctcagtttgggtgctgcagcaggccccaaaggaaagcataaccaaagctgcagaaatgctcacaggggaaaagaagatgttcttatctggggtctccacagtgaacctccggtacagattgaatgcaaagtcagcattaatggatgacatcttgtagagagtggcatttggttgggatgaatggcaggctgttactttgccttcaggtgatgcacagtggatggaaggaagttaatagcaaatgcccaagaatccacctgcatct

SEQ ID NO: 313070 - DNA, 1423 bp, Homo Sapiens
tttcaatcacaccaggctatattatttatttatttcccattgcaatacacacgtgcaattagccaatggcctttttcccaactacgcttccgttgggttcacaactttccctagaaagagaatactccttgtgcttctctccaaaatcaacaacatgaaagatctatcaatttggataatagggtgtaggaaagtgttttcaggctgatccgaaagttcaacttcagggacagctgcagcttcagttcccttttcaccaatgtgcagcacagccttatgggcagcattggaaagtttcagaccattgtcctctgtgagtccagaaaaatcagcattttcagaataggcatgctgaatgcccatcttcaaaagtgtggctccaaggtcatatgtggcagaaatggaaaactttggaacaaacaagtcaacccatcccttctgtagtaagcggttccacttcttcagtgttttagatgacatggcagcttccactgactccatctgtccctccttgggaagaacaaagagtgccagagcattcttgctgtagtccatttgcagaactgtgcagttcaattccatatccactaggtgatagtattgttccatctggtgcatcatgggcacttgaacagtggtggtcttgtctattaagaagctggaactgtcttctgtcttggatggatcaaaaggatttgcccactgggctttaaagtgaatatagttcactaagaccatgatggtgtttggcttgaggtcttgaattagacccacaactttccctttggtttgcatctccacatgactgttaatctcctgcttggctgcagaaatgttggagaagtcggtagaaaagacttcagtctcatagagggtcttgacatcattcaagaactttgccagtggtttcagatgcttgccaatgaagagggcatttcctatctgcaattccagttccttctttggaaaattcagtgaacagatcagatgctggaagccatgctggatctctaccattggagtgtctgtgaggttgaaccccaaggtctccacaatctcagtttgggtgctgcagcaggccccaaaggaaagcataaccaaagctgcagaaatgctcacaggggaaaagaagatgttcttatctggggtctccacagtgaacctccggtacagattgaatgcaaagtcagcattaatggatgacatcttgtagagagtggcatttggttgggatgaatggcaggctgttactttgccttcaggtgatgcacagtggattgtagcatgaagcccaagtaccaagagaaccagatacaggaatggtgacattttggaaggaagttaatagcaaatgcccaagaatccacctgcccccggccggtaatggccgaattcccgggcatatgtccgggtaccgtcgact

SEQ ID NO: 313071 - DNA, 528 bp, Homo Sapiens
acaggctatattatttatttatttcccattgcaatacacacgtgcaattagccaatggcttttttcccaactacgcttccgttgggttcacaactttccctagaaagagaatactccttgtgcttctctccaaaatcaacaacatgaaagatctatcaatttggataatagggtgtaggaaagtgttttcaggctgatccgaaagttcaacttcagggacagctgcagcttcagttcccttttcaccaatgtgcagcacagccttatgggcagcctgtgtggggagaacaaatcctgcgggtctctgaaggaaacaggaacagtctttggggaaggtctaggaagtaaggaaaggggaaaggaaaggtgggggccgcccctttgctatactatgttgatgggtgctagaatatgaagtttcctctgctaaatgtagtcaatcattctctggcgattctacggctagccattgggaaacacctcattcactatggccttgccgccaggagtcacctcttaagcattccc

SEQ ID NO: 313072 - DNA, 407 bp, Homo Sapiens
aatactatcacctagtggatatggaattgaactgcacagttctgcaaatggactacagcaagaatgctctggcactctttgttcttcccaaggagggacagatggagtcagtggaagctgccatgtcatctaaaacactgaagaagtggaaccgcttactacagaagggatgggttgacttttttgttccaaagttttccatttctgccacatatgaccttggagccacacttttgaagatgggcattcagcatgcctattctgaaaatgctgatttttctggactcacagaggacaatggtctgaaactttccaataccttcccaaaggactgttcctgtttcttcagaggacccgcagggtttgttctccccacacagggttgcccattaagggttgtgctggca

SEQ ID NO: 313073 - DNA, 1158 bp, Homo Sapiens
ttttaatttttcaacccagtcaaatttattagagcaaatgagttgaggggtattctgacaaagagaaatatacaaacatagagccttcctatgctttggataataatgaattactcattgacattctgaatgctctgccataggattggcctcttccacagccaacaaagttcagccagggttcaatcttcatcccatcataagggaatgcaagtccaagctcacatcaatcacaccagggctatattatttatttatttcccattgcaatacacacgtgcaattagccaatggcctttttcccaactacgcttccgttggggttcacaactttccctaggaaaggggaatactccttgtgcttctctccaaaatcaacaacatggaaaggatctatcaatttgggataataggggtgtagggaaagtgttttcagggctgatccgaaagttcaacttcaggggacagctgcagcttcagttcccttttcaccaatgtgcagcacagccttatgggcagcctgtgtggggagaacaaatcctgcgggtctattggaaagtttcagaccattgtcctctgtgagtccagaaaaatcagcattttcagaataggcatgctgaatgcccatcttcaaaagtgtggctccaaggtcatatgtggcagaaatggaaaactttggaacaaacaagtcaacccatcccttctgtagtaagcggttccacttcttcagtgttttagatgacatggcagcttccactgactccatctgtccctccttgggaagaacaaagagtgccagagcattctcgctgtagtccaattgcagaactgtgcagttcatttcatatccactaggtgatagtaatgtttcatctggtgcatcatggggacttgaacagtgggtggtcttgtctataaagaagctggaactggtcttctgtcttggatggatccaaaggatttttccactggggctttaaagtgataaagttcactaagaccctgatggtgtttgggcttgaggttttgaattagaaccccaacctttccctttggtttggatccccacatagactgtaaaaccccggcttggctgcagaaatgttgggagaatccgtaaaaaaggactcagtcccaatgaggggtctggaatccttc

SEQ ID NO: 313074 - DNA, 359 bp, Homo Sapiens
  misc_feature (77)..(77): n is a, c, g, or t
  misc_feature (249)..(249): n is a, c, g, or t
aaccatggcaagccttccccactgaactccccacctgtccccctcccttggggaaagaaacagaagagtgcccaganccatccttgcctgtaagtcccatttgccagaactgtggcagttccaattcccatatcccactaggtgaataagtattgttcccatctggtgcatcatgggcacttgaacagtggtggtcttgtctattaagaagctggaactgtcttctgtcttggatggatcaaaaggatnttccactgggctttaaagtgaatatagttcactaagaccatgatggtgtttggcttgaggttttgaattagacccacaactttccctttggtttgcatctccacatgact

SEQ ID NO: 313075 - DNA, 477 bp, Homo Sapiens
  misc_feature (261)..(261): n is a, c, g, or t
  misc_feature (314)..(314): n is a, c, g, or t
  misc_feature (394)..(394): n is a, c, g, or t
  misc_feature (411)..(411): n is a, c, g, or t
  misc_feature (424)..(424): n is a, c, g, or t
  misc_feature (456)..(456): n is a, c, g, or t
aatttttccaaagaaggaactggaattgcagataggaaatgccctcttcattggcaagcatctgaaaccactggcaaagttcttgaatgatgtcaagaccctctatgagactgaagtcttttctaccgacttctccaacatttctgcagccaagcaggagattaacagtcatgtgggagatgcaaaccaaagggaaagttgtggggtcttaattcaagaccttcaaggccaaacaccattcatgggtctttggtggaactnatatttcactttttaaaggcccagtggggggaaattctttttttggattcccntcccaaggacaggaaggacagtttcccagctttcttttattagggaccaaggacccaccactgttttccagttggccccntggatgggcacccagtngggggaccattantttttcacctagttggggttttggggggtttnggacctggcaccgtttcttgg

SEQ ID NO: 313076 - DNA, 398 bp, Homo Sapiens
  misc_feature (17)..(17): n is a, c, g, or t
  misc_feature (30)..(30): n is a, c, g, or t
aattacttatttgggantaaaggggaatgnactctggagtgattcctagcttaggaggagtccacaccggcctcctcctaggcatccagattgcctaattgggtaaaataagaaagttgaaatccaattgactccctaattgcctcttcccagttccatacatttaagaactcctagtttatcaacttacattggaaagtttcagaccattgtcctctgtgagtcccagaaaaatcagcattttcagaataggcatgctgaatgcccatcttcaaaagtgtggctccaaggtcatatgtggcagaaatggaaaactttggaacaaacaagtcaacccatctgtgggaaaagaggaagggaacacatggcaatcaccatatcaagcttatgattctctc

SEQ ID NO: 313077 - DNA, 336 bp, Homo Sapiens
taccattagtgcttttcatgtgctctgtttcttctaggcatgtggctatatataacctgtaaacttggtagcttgttggtatttcagtcttcaaagagctggaggaaatatctaggtccccaaatgtggtggtggacgcattgcgccttccaatgcatgcactctgattgcaattgatagcatatcagcatggaatctttgccatttttgatgaatgtattggctcatttattcactcatgcatacattttcattcattgtggtggtttgaaggaaggaggtcctcacaggctcgtatttgaatgtttggttcctgattggttgaattccattgag

SEQ ID NO: 313078 - DNA, 998 bp, Homo Sapiens
  misc_feature (82)..(82): n is a, c, g, or t
  misc_feature (450)..(458): n is a, c, g, or t
  misc_feature (460)..(739): n is a, c, g, or t
caggctgccaggctcattcaagagagccccaccctgagcaagctggccgccattactgtcctccagcccttctactatttgngcaacagaccatccactggctcttcatgggtactccatgactgccttctgcctcttcacgtgggacaaatggcttaaggtgtataaatccatctatttccttggccacatcttcttcctgagcctactattcatattgccttatattcacaaagcaatggtgccaaggaaagagaagttaaagaagatggaataatccatttccctggtggcctgtgcgggactggtgcagaaactactcgtctcccttttcacagaactcctttgccccagagcagagaatggaaaagccagggaggtggaagatcgatgcttccagctgtgcctctgctgccagccaagtcttcatttggggccaaaggggaaacnnnnnnnnngnnnnnnnnnnnnnnnnnnnnnnnnnnnnnnnnnnnnnnnnnnnnnnnnnnnnnnnnnnnnnnnnnnnnnnnnnnnnnnnnnnnnnnnnnnnnnnnnnnnnnnnnnnnnnnnnnnnnnnnnnnnnnnnnnnnnnnnnnnnnnnnnnnnnnnnnnnnnnnnnnnnnnnnnnnnnnnnnnnnnnnnnnnnnnnnnnnnnnnnnnnnnnnnnnnnnnnnnnnnnnnnnnnnnnnnnnnnnnnnnnnnnnnnnnnnnnnnnnnnnnnnnnnnnnnnnnnnnnnnncaaaggggaaactcttgtgggaggagcagaggggctcacatctcccctctgattcccccatgcacattgccttatctctccccatctagccaggaatctattgtgtttttcttctgccaatttactatgattgtgtatgtgccgctaccaccaccccccccatgggggggtggagaggggtgcaaggccctgcctgctccactttttctaccttggaactgtattagataaaatcacttctgtttgttcagtttttcaa

SEQ ID NO: 313079 - DNA, 2049 bp, Homo Sapiens
  misc_feature (69)..(69): n is a, c, g, or t
  misc_feature (1722)..(1960): n is a, c, g, or t
  misc_feature (1988)..(1988): n is a, c, g, or t
  misc_feature (2007)..(2007): n is a, c, g, or t
ccggaattcccgggatcggagctggggggtccctgtggggctcccggagttaagatggcgtcctcagcngagggggacgaggggactgtggtggcgctggcgggggttctgcagtcgggtttccaggagctgagccttaacaagttggcgacgtccctgggcgcgtcagaacaggcgctgcggctgatcatctccatcttcctgggttacccctttgctttgttttatcggcattaccttttctacaaggagacctacctcatccacctcttccatacctttacaggcctctcaattgcttattttaactttggaaaccagctctaccactccctgctgtgtattgtgcttcagttcctcatccttcgactaatgggccgcaccatcactgccgtcctcactaccttttgcttccagatggcctaccttctggctggatactattacactgccaccggcaactacgatatcaagtggacaatgccacattgtgttctgactttgaagctgattggtttggctgttgactactttgacggagggaaagatcagaattccttgtcctctgagcaacagaaatatgccatacgtggtgttccttccctgctggaagttgctggtttctcctacttctatggggccttcttggtagggccccagttctcaatgaatcactacatgaagctggtgcagggagagctgattgacataccaggaaagataccaaacagcatcattcctgctctcaagcgcctgagtctgggccttttctacctagtgggctacacactgctcagcccccacatcacagaagactatctcctcactgaagactatgacaaccaccccttctggttccgctgcatgtacatgctgatctggggcaagtttgtgctgtacaaatatgtcacctgttggctggtcacagaaggagtatgcattttgacgggcctgggcttcaatggctttgaagaaaagggcaaggcaaagtgggatgcctgtgccaacatgaaggtgtggctctttgaaacaaacccccgcttcactggcaccattgcctcattcaacatcaacaccaacgcctgggtggcccgctacatcttcaaacgactcaagttccttggaaataaagaactctctcagggtctctcgttgctattcctggccctctggcacggcctgcactcaggatacctggtctgcttccagatggaattcctcattgttattgtggaaagacaggctgccaggctcattcaagagagccccaccctgagcaagctggccgccattactgtcctccagcccttctactatttggtgcaacagaccatccactggctcttcatgggttactccatgactgccttctgcctcttcacgtgggacaaatggcttaaggtgtataaatccatctatttccttggccacatcttcttcctgagcctactattcatattgccttatattcacaaagcaatggtgccaaggaaagagaagttaaagaagatggaataatccatttccctggtggcctgtgcgggactggtgcagaaactactcgtctcccttttcacagcactcctttgccccagagcagagaatggaaaagccagggaggtggaagatcgatgcttccagctgtgcctctgctgccagccaagtcttcatttggggccaaaggggaaacttttttttggagaaggcgtcttgctttgtcannnnnnnnnnnnnnnnnnnnnnnnnnnnnnnnnnnnnnnnnnnnnnnnnnnnnnnnnnnnnnnnnnnnnnnnnnnnnnnnnnnnnnnnnnnnnnnnnnnnnnnnnnnnnnnnnnnnnnnnnnnnnnnnnnnnnnnnnnnnnnnnnnnnnnnnnnnnnnnnnnnnnnnnnnnnnnnnnnnnnnnnnnnnnnnnnnnnnnnnnnnnnnnnnnnnnnnnnnnnnnnnnnnnnnnnnnnnnnntgagccacccgtgcccgggccaaaaggngaaaactcttgtgggaggnagcagaggggctcacatctccccctcctgattcccccatgcc

SEQ ID NO: 313080 - DNA, 756 bp, Homo Sapiens
  misc_feature (142)..(159): n is a, c, g, or t
gtgggtgggggatttcccacccccctttttttcctggccccggggttttttctgtgggaaaaaagctatagggcccacttttcccttttcccttaggggggcccggggggtccaaaaggaaatgttttgaaaaatttttttnnnnnnnnnnnnnnnnnnccacaaaaaaaatattgttattgttgatgtttcgtacggggggtgtttatcttcttgcagcatggtcccgttgtgcatattgttgctttgtgttaatgtttcttgagtttgtgttcggttttctttagttttgcttttaatgaaggacaagggattaagacacacagagactggccagacaaatgggaaaccgaccagaccagcccatgaccaaaatatcacaggcagaccacccgcaaatgcagaggcctcagagtccacagtgggcggttggaaccaggccccagggaatctttcagctgcattccggctgtgatcggcgggcaacaggtagaggtgctggagggggctgagtcgtgattttcggtgtctgtcatattcgatcaagtgtgtcatagagcttcctgtttcatctcccagttattcagggagaggctggtggctccaccttcccaggaactgtgctgtgaagatctgaagacaggcacgggctcaggcaccgcttgtctggaatgtcaatttgaaacttaaaaagcagcgaccatccagtcatttatttccctccattcccaatgatgtacacacgactaagaaccc

SEQ ID NO: 313081 - DNA, 430 bp, Homo Sapiens
tcctacttagtcgtgtgtacatcattgggaatggagggaaataaatgactggatggtcgctgctttttaagtttcaaattgacattccagacaagcggtgcctgagcctgtgcctgtcttcagatcttcacagcacagttcctgggaaggtggagccaccagcctctccttggtgagtatgtttctgtcatttttagggttgcttctgcagtttgccttggagtctgggctgtgggaaaggctgctgcgtcctgggtgaggacactgcgtttctttcagactttgaagatctgtcgttttagaaaagtggctgcctctgtcaccagccccatggttactgtcctttagtgtgactgtcaggagggtgtttctcagtccttcgttgtaagaatgtagatgccggttgcaccttctgttgtcttgggaagag

SEQ ID NO: 313082 - DNA, 731 bp, Homo Sapiens
attaaaccctcaaaagacccagatgccgttttagggggacaggatgtattgaagatttataaatggagcaatctcctaatcaaaataaacatcatccaatcatgctcacagggtggtggcaaattagtggcagcatattttgttttctttagcggtgatccatgattgatttatggattaaattgtgccctgtgaagtacatatatatctgtgaactgtctccctaagcatttcctgttcacctctgtgccacatgcctggctgaaggagagaattgtttctcctctaggcaggagctgtctgcatagctccttgggctgggatagtgtctgcttagggctgcattcggctttgtcttctgctctgtcctctgagctcagcaaaaggcctataaaaaggaaggccgactctcctacacatcccacagggccccccaagctccttcatctgtcgaagtgggacaataatgcttgtcttaccagtctgatagtgttcttttgaggatacagttcattaaggttggaaaagatgctggtgactgcagcctttgctgatccactttgcttgtcagggagaggctggtggctccaccttcccaggaactgtgctgtgaagatctgaagacaggcacgggctcaggcaccgcttgtctggaatgtcaatttgaaacttaaaaagcagcgaccatccagtcatttatttccctccattcccaatgaatgctgtgccga

SEQ ID NO: 313083 - DNA, 484 bp, Homo Sapiens
ggggggggggtataggtgggggtcaaagtcagtgtgagcgacagggggttctgcccagatgggaaagacgcataggggtgacatggtacacccctgccctccaatctgggaagacagtggaaggaaggaaccagggtccaggctccccaccagcagctcaccgggccacccaggcgttggtgttgatgttgaatgaggcaatggtgccagtgaagcgggggtttgtttcaaagagccacaccttcatgttggcacaggcatcccactttgccttgcccttttcttcaaagccattgaagcccaggcccgtcaaaatgcatactccttctgtgaccagccaacaggtgacatatttgtacagcacaaacttgccccagatcagcatgtacatgcagcggaaccagaaggggtggttgtcatagtcttcagtgaggagatagtcttctgtgatgtgggggctgagcagtgtgtagcccactaggta

SEQ ID NO: 313084 - DNA, 1024 bp, Homo Sapiens
agttttttagggcgtcaattcttcctatagaggtttgcctaaaaacttcagaataagctccatatagtggtgattgcccccccgcttttttgggtgggggaggatccctaccctgtaaaagcttatcaaaacccccggggtccgtggatgccttcctcccggatttcaatgccttcctcccagttttcttaaatacctttggaaatttaaggaattttgagaaagtcaccttcccagttaatgcaaaaaacacagcttaattctgtgtgaattccctgttgagatcagcttttcaggtcagggagggaaggtatgggttttagggtaccctctcctatcacacacatcccccctgcccacagtaccctgacttaccttgcctgagactcctagacactatgagctcccttctggctgccactcagactggccaggaaggctcccagattgaacacaggtgacctggtatagatacacactgtactgtgggccagaaccatggactacattttaagccatgttgtgggcccttcctgcctacagaaaaggacacttgagtggagtcacacttgggttgcctaatttattaccttaactagaaacattctaagtatgggagcctgttctggaggatagcttctaaaccaaatctaaaactatctttgcacacaagtgttgtgaagaggtaagcaggggatcagagctccatcttctgtgaccacttctccagggactgccacctatagggctcaggttggtaccaacagccctgcatagtagagtcactgtcaatcatcttcccacttgtaagcaggaagacaaaaagtctcatgaaatagaaacgaaaacactgaagcatggccttcatcgtcctaatgccacaagtttcctgggatggccaagatactaccttagcttattgtccctgcttcacctccagagactggagacagaggattttccggggttggggtttcttctctgccttgtgccgaattcgccacccaggcctcgctacctagga

SEQ ID NO: 313085 - DNA, 1120 bp, Homo Sapiens
ttcagttgtggagtttttttcaaaggtgggacagatcaccccctcagggaagtcatccccttgtaagcacaactagaattttatcataaaggccaggttcggcttgttagtttttctttgtcccccagcatacattgagccaacaacttaagtcatgaatgggttgtttagggctctgtctgtcttaaatgattcctaaaagcttcatatagctcatatagtcttattgttcactgctcttttggtgtggtatgatcctacctgtaaagctatcaaacccctgggtcctggatgcctcctccagatttcataccttcctcaagtttactaaatactttctgaatttaagaattttgagaaagtcacctaccagctaatgcaaaaacacagcctaattctgtgtgaatccctgttgagatcagcttttcaggtcagggagggaaggtatggggtttagggtaccctctcctatcacacacatcccccctgcccacagtaccctgacctaccttgcctgagactcctagacactatgagctcccttctggctgccactcagactggccaggaaggctcccagattgaacacaggtgacctggtatagatacacactgtactgtgggccagaaccatggactacattttaagccatgttgtgggcccttcctgcctacagaaaaggacacttgagtggagtcacacttgggttgcctaatttattaccttaactagaaacattctaagtatgggagcctgttctggaggatagcttctaaaccaaatctaaaactatctttgcacacaagtgttgtgaagaggtaagcaggggatcagagctccatcttctgtgaccacttctccagggactgccacctatagggctcaggttggtaccaacagccctgcatagtagagtcactgtcaatcatcttcccacttgtaagcaggaagacaaaaagtctcatgaaatagaaacgaaaacactgaagcatggccttcatcgtcctaatgccacaagtttcctgggatggccaagatactaccttagcttattgtccctgcttcacctccagagactggagacagaggattttccggggttggggtttcttctcctcc

SEQ ID NO: 313086 - DNA, 268 bp, Homo Sapiens
gaccagcgctcaatggaattctttgttaactcgagctttgtgttttcagagtcgctgcatttagggtcaactctgacatcccatgaggttactcaccacctacaggggagcactgccacatgacaagactcagtgaccatcactgagttcccagctccttactaaagagctcattcctggaaaaatgaggatagcatcctgccaaccacacatcgagtggagtctcgctcttgcttactgcagccctctctgacaccgtccacctgat

SEQ ID NO: 313087 - DNA, 609 bp, Homo Sapiens
gcaacaaaacactcttctgtcctttttaatgtaaacagagttacaaaaaccactccaaagtgaaggctcccatcctacacacagatatttgcttactgtgtgggccgatagctgtgaactatgtaaggttttttaaacaatagtttaaatttttagactttaaagacactaaccatataacttttatgtttcttccagtttctctccctccccccgcattttgctgcatatgcctttaaaatcaatgcagtattaccattaaaacatgggactctaactaaagccacttaggagcagacagcagcgttgttaggtactgaagggttcttcctccctactgttaaccattgaagctgctagtcattggcaatcattttaaaccaaaaagctgctgggataacatttgtcattcatattctttggcaagcattactttagcatttttagcatgtttgggggtcataaacagaggaagtatcagttattgatatctacttctattggagtccatgttgcatttcttgtgaactataaatggtgcttctcattttctgataatttttctcttgctaaataaatgtattaaaagatattttcataatgccaacc

SEQ ID NO: 313088 - DNA, 221 bp, Homo Sapiens
aaaccaatgttttctcagaggttttgacagccatttgtaaattcattctgtcagtaatttccagctgactctgcaaatggcatcacggtagagaactgtctgcagaagaggcagaaaccaacagctcagattctgctctataactgtgtctctttaaatttgcatatggttaaagccaagctccgtctatactctctcacacgagaattccattgagcgcc

SEQ ID NO: 313089 - DNA, 298 bp, Homo Sapiens
aagtataatgagctctgtgagattgcaattcagccctctctttagtttatgaaaatttttttccatatcactttaattattatctcttctgtcttttctctcttttcctttctggaactcttcttatgactgtatgttgaggtttccttgatccattcaaggcttttctcttttcctattacgactttcatcgttttgtatttttacttcgtgctttgaaatttcattaatttgctcttttatactgccagttagcatcgatcttctacttgacctaccgaattattcagcttgagaa

SEQ ID NO: 313090 - DNA, 502 bp, Homo Sapiens
  misc_feature (210)..(247): n is a, c, g, or t
ccaaagaccatccgacccaccacagccttgctgtaggctcagggtctctggatcagccctcaccctcttcccactggtgtacgggatggacagttgaggtaaaatttacataacaaacattctgaagtatacaaattcagtggcatttagtacattcacctctacctagtccccaaacatttccaataccccagaagtaagcagcccctnnnnnnnnnnnnnnnnnnnnnnnnnnnnnnnnnnnnnntgcctgggaattttaaaaccaacctggacaatgttattggggagaacctggacatgttaagcctgccacacttgctaatccactggggcagaggtgtcttcctcaccccaaggcaggcactgaagccggctactctttcacgatggtggggctgtagttggacttgacagcttcggcgagctcccgtgcgtacatctcatacctgcccgtcatcttgaagttccagacatcattcacctgctggcagaggtttag

SEQ ID NO: 313091 - DNA, 1032 bp, Homo Sapiens
aattcagtggcatttagtacattcacctctacctagtccccaaacatttccaataccccagaagtaagcagccccttacccattaagaagtcactccccatgccactctccccctgcctgggaattttaaaaccaacctggacaatgttattggggagaacctggacatgttaagcctgccacacttgctaatccactggggcagaggtgtcttcctcaccccaaggcaggcactgaagccggctactctttcacgatggtggggctgtagttggacttgacagcttcggcgagctcccgtgcgtacatctcatacctgcccgtcatcttgaagttccagacatcattcacctgctggcagaggtttaggtcgagcttagcaactagcagtccatcccggctacgggacagcccaggagtccggctgctgtcaggggctgccacatagctcgagccataaaagtagccaaagtcctggtgagctttctttccatctcccgaggtaaactcgttcgggaagtgctcggtgcccactcgattgatggcgcaggtgaagcagtgattggcaatggctgcgtttctggcctcgatgggccacagggactcgctgtaagagaggaccaagaggacccaggttgccgactttccaggcagactcagtggatgctcagccctgagcctggcctggctgcaggctttcctgggccagtggtggggacagagcctggcctggctgcaggctttcctgggccagtggtggggacaaccaggagactcaccggtcacaccccaaacctgcaaccaggccagcctgtcctcagcaccttgccctggcctgaacagcctttgggaagggcctgctgcaggcataagccacgtggctgtgctctgtcagaagaattagcagccctggatcaaatcctcatcctgagcctcagtttccctgaaatgtcctcaaaagaagactatgaagactgaatgaccatgcaggtgaagatccaagtggtaggagttccataaccaccacttccc

SEQ ID NO: 313092 - DNA, 688 bp, Homo Sapiens
ctgagcgagtctgttttccaggagagtccctgatcctagttaacttactgcaaatagagatgcagaaagggcaggggaatgagcgtccactgggtgcctgctgcatctgggccatgctaggccctgcccagccccacctgctccttacacatgtgtggggtggctgctagtcctccctgactggtgaagggaccaaggcctggagggaggataagggtgacgcagctggcaaggcagatgaaggcagagcctccagctcactgtgagggcccccataggaagcccccagagtgtgactttctgttttccttaggctgtgggtagaagtgacacctctcagaagggtgacatttagacatttccccaggggcgggaagcagcataagggggccatttgcagctttgctgggccttcaggcctgagatgagagacaggccttttgggcctcagcatttggcagacactggggaggatggcatggctccgtgtcctgggcctgcctcaaggtgcctgaccctctgtggagcccacagtgcatctacacaagctcacagatgtgtttctttggtcctttaaagctcaccaggactttggctacttttatggctcgagctatgtggcagcccctgacagcagccggactcctgggctgtcccgtagccgggatggactgctagttgctaagct

SEQ ID NO: 313093 - DNA, 1061 bp, Homo Sapiens
aaccgcggccagaattttttttgctaggcaaggagggatgattatttattagcttctacagattagacaatggggtgggggtgggctcaaggtgagatgattttttgggtccaagtctactcaagacaggcatcccagtcttcggtctccaaatccacctcctgtctgtccccccacactgctcctcaggccttgtggatccattgactgtgatttctgtggttcagctcccacatcaggcaggaagggcagctactgggtctgagatcccacattgcctccaacccttgcttcctagctggcctcccagggcaccacgaggggctgggccaggctgctgtgctgcacgtggcaggagtagggggctgtgtcctgcgggggcactgccaccaccacccaggactggtaagtgccatttccattgtgaagaacatctccccgtaactcaggctcctgcacctcgccggcccgagtccagtgcacatcaattttccctgggtagaagtcgtaggccaggcacttcagtttcttcttttctcctggggcctggtggctggtgaccaccacagagggaggatcttgccggtccaggatatttttgctgtatttcaggtatttccgcagagtcgcagggcactcctcctccaggtaagccttggcccgctgcacgtagactggttctgcctcccacttctgcttggttatctgggctgctgggtcgaaggggacccaggctgggatttctttgttgaattcaatgtagtcctttccatcatagtaatatttccagaatgctccgctgcttctgttattctcgatctcacaaccaaaccttccctgcaatacgtgagacccgttactgtcgttgtaatactccacaatgtctttcagggtctccataaagatgtcctccctggccttctgaagttggctgtcctgcttccaatcctccattccttccacctgtctccagagtcccatgggctgagacttcctgtctttactgttgtatctaaagaactggaggtcattgagtgagccaagggcctaaacgcgctcgt

SEQ ID NO: 313094 - DNA, 1127 bp, Homo Sapiens
ctctattaggggaggagcccgtcctggcactcccattggcctgtagattcacctcccctgggcagggccccaggacccaggataatatctgtgcctcctgcccagaaccctccaagcagacacaatggtaagaatggtgcctgtcctgctgtctctgctgctgcttctgggtcctgctgtcccccaggagaaccaagatggtcgttactctctgacctatatctacactgggctgtccaagcatgttgaagacgtccccgcgtttcaggcccttggctcactcaatgacctccagttctttagatacaacagtaaagacaggaagtctcagcccatgggactctggagacaggtggaaggaatggaggattggaagcaggacagccaacttcagaaggccagggaggacatctttatggagaccctgaaagacattgtggagtattacaacgacagtaacgggtctcacgtattgcagggaaggtttggttgtgagatcgagaataacagaagcagcggagcattctggaaatattactatgatggaaaggactacattgaattcaacaaagaaatcccagcctgggtccccttcgacccagcagcccagataaccaagcagaagtgggaggcagaaccagtctacgtgcagcgggccaaggcttacctggaggaggagtgccctgcgactctgcggaaatacctgaaatacagcaaaaatatcctggaccggcaagatcctccctctgtggtggtcaccagccaccaggccccaggaggaagaaactgaagtgcctggcctacgacttctacccagggggagatgttcttcacaatggaatggcacttaccagtcctgggtggtggtggcagtgcccccgcaggacacagccccctactcctgccacgtgcagcacagcagcctggcccagcccctcgtggtgccctgggaggccagctaggaagcaagggttggaggcaatgtgggatctcagacccagtagctgcccttcctgcctgatgtgggagctgaaccacagaaatcacagtcaatggatccacaaggcctgaggagcagtgtggggggacagacaggatgtggatttggagaccgaagactgggatgc

SEQ ID NO: 313095 - DNA, 521 bp, Homo Sapiens
  misc_feature (15)..(15): n is a, c, g, or t
  misc_feature (27)..(27): n is a, c, g, or t
  misc_feature (463)..(463): n is a, c, g, or t
  misc_feature (466)..(466): n is a, c, g, or t
aataaggggctgttntcctgcgggggnactgccaacaacaaccccaggaactggtaaaatgcccatttcccattgtgaaagaacatctcccccgtaaactcaaggctccctgcaacctcgcccggccccgaagtcccagtgcaacatcaaattttcccctgggtaagaaattcgtaaggcccaggcacttcagtttcttcttttctccctggggcctggtggctggtgaccaccaacagagggaggatcttgccggtcccaggatatttttgctgtatttcaggtatttccgcagagtcgcagggcactcctcctccaggtaagccttggcccgctgcacgtagactggttctgcctcccacttctgcttggttatctgggctgctgggtcgaaggggacccaggctgggatttctttgttgaattcaatgtagtcctttccatcatagtaatatttccaganatnccgctgcttctgttattctcgatctcacaaccaaaccttccctgcaataccgtga

SEQ ID NO: 313096 - DNA, 1442 bp, Homo Sapiens
  misc_feature (724)..(725): n is a, c, g, or t
  misc_feature (1401)..(1401): n is a, c, g, or t
ttttactgaaagaacatacagtagtatagcttagcacagcacagaacagaaatgctagaatgaaccacatgcagtaaggcccagtgttatgtagtgaaactttgattttagttttgtgggggtgtgtatttgtgtttgtacagagctgagaaacaaagtctaaaatgtcctaccatcaactatggtcgaaagagcttgctatatctgccctgaggcacacagggccgagggaaggacaggcaaagggggaggaagtcctcagtgtccagacacaccaacccacccactgtgcacaggcagggtagaaaggaagtggggggagggggcaggactccctttgctttggatgtgtcaaggggccaggcatgaggctgcagggaaccacatggcccttagtgaaaccaaatgccgagcttccaggctagcatttcttcctctactgcccaggctagaggatctagatttgatcctactttaaggaagcaaaaagtgtctgtttgtggcggatcctgaagggaaggagaatgtgggaaccccagagttcagcagcctcaccccacgtggggctcctctccatggccccgcttggagggcctgagtttaggtgaattaaaggagcccagtgaccctgcaggcagtcccaggtccacagccccagtgactgcatattcagaaggctcgcacctcttgaggctgcagagggcatttccagtccagtgcccgnnccccccaccccatacccaggatggccacgacgacgtcgccccgcaggatctcgatggagccccgggagatgaagtacagggcggtgagcaggtccccagcatgcaccagtttgttccctggcggtgcatgtttggtcttgaacttcatggccagggcccgaaggcagctctttggtggcccctcggaagggtttgcagtgctgcagcagtgagcggttcaggtgcaggcagatgtcagcctgcaggcactcagggaagcccttcagcaccgcgttcatgtcgatgccgttggtgtaggaccaggcgtgctggaagtactcctcgaggcgctggcgcaggggattggggatctggtggaagcggatgaactcccgcacccgcagcatctgtgtgtggtagcgggctgtgcccgagtacagccgctggatgatggccgacacgttgccgaagatgctagcatacatgagggagccaatgagcatgacgcagatggagaagatcttctctgagttggtgttgggagagacgttgccgaagcccacactggtgaggctgctgaaggtgaagtagagcgccgtcacatacttgtccttgatggaggggccgcccaggccgctgctgttgtagggtttgcctatctggtcgccccaggttgtgcagccagccgatgcgtgangtccatgtgtggcatcccgggaatccggaccggtccagccg

SEQ ID NO: 313097 - DNA, 1536 bp, Homo Sapiens
  misc_feature (42)..(42): n is a, c, g, or t
  misc_feature (67)..(67): n is a, c, g, or t
  misc_feature (404)..(404): n is a, c, g, or t
  misc_feature (427)..(440): n is a, c, g, or t
  misc_feature (443)..(726): n is a, c, g, or t
cagccgggtcttcacgggccctccgtgtgagatttgcgcacnagcttaaccatgagtgaattgtcgnccactactatgtacacattttcgcgcgggtaggtggcggctccagcgatacatcgctatgccagggccccgtctttgccccgcctaaagaccccgttctgccgcgtggggccctttttgggggttgggccccgtaggcttggtcttttaaaaatgcgggggttaattctacccgaagcttttaattccccatgaaagggcagggttagaccttcttctttgtttgctaccccgacggcctttcaagttttcggtggtcctccaagagggtctatgggagcccagtgaaacacggggaattgaggctaattcacctgaacttgaaagcagcgcccagnttcttcacggcaggcacgcgtcnnnnnnnnnnnnnnccnnnnnnnnnnnnnnnnnnnnnnnnnnnnnnnnnnnnnnnnnnnnnnnnnnnnnnnnnnnnnnnnnnnnnnnnnnnnnnnnnnnnnnnnnnnnnnnnnnnnnnnnnnnnnnnnnnnnnnnnnnnnnnnnnnnnnnnnnnnnnnnnnnnnnnnnnnnnnnnnnnnnnnnnnnnnnnnnnnnnnnnnnnnnnnnnnnnnnnnnnnnnnnnnnnnnnnnnnnnnnnnnnnnnnnnnnnnnnnnnnnnnnnnnnnnnnnnnnnnnnnnnnnnnnnnnnnnnnnnnnnnnccggcacgtatcttttaaggaatgacaccagttcctggcttctgaccaaagaaaaaatgtcacaggagactttgaagaggcagacaggagggtggtggcagcaacactgcagctgcttctggatgctgctggggtgctctccggagcgggtgtgaacagcgcacttcaacatgagcaggcgcctggctccggtgtgtcctcacttcagtggtgcacctggatggtggaagccagcctttggggcaggaaaccagctcagagaggctacccagctcagctgctggcaggagccaggtatttacagccataatgtgtgtaaagaaaaaacacgttctgcaagaaactctcctacccgctcgggagactggggctccttgcttgggatgagcttcactcaacgtggagatggtggtggactggtccctgaaaagcgggccttgcagggccaagtgaggtcactcaggtcctaacccagtggccctctgaaagggggtgtgcaggcgaggggagcaggaggcttctctctagtccctttggaggctttggctgagagaagagtgagcagggagctgggaatggtccaggcagggaagggagcaaaagtgattcggggctaatgcctcagatcgatgtatttctctcactggtctcccggagccctcttgtcaccgctgctgccctgcaggaggcccatctcttctgggagcttatctgacttaacttcaactacaagttcgctcttacgagacgggggcagcgtgatctcctgcttaactgagcgcctgcacggcagcttgcccttcttataga

SEQ ID NO: 313098 - DNA, 507 bp, Homo Sapiens
  misc_feature (39)..(39): n is a, c, g, or t
  misc_feature (72)..(72): n is a, c, g, or t
  misc_feature (95)..(95): n is a, c, g, or t
  misc_feature (116)..(116): n is a, c, g, or t
gtgaaggggaacaaggtcctttcctaaatcttccctccnaactcccctcaagcccacttgacttgcccctgnccatctgtgaattaatgttaaanaaggccaagatggggccctgnctcccctatctctgaacaaagagggatgaaaggaataagaagagaaccgttagtccctactgcccccggtccctgagggatgtggccaggctctggcccacaggaaccgcctcctaccctggtctcccggagccctcttgtcaccgctgctgccctgcaggaggcccatctcttctgggagcttatctgacttaacttcaactacaagttcgctcttacgagacgggggcagcgtgctgggaggagggagggaggtgagaggttggtatctcagggccacaggaagagaagggcccgctgtgaaggatgtggaatggatgagggctccttgctccagggccagcccagggcagggaagcaggtcatgagaccatgtggctgccgtgccgaa

SEQ ID NO: 313099 - DNA, 2193 bp, Homo Sapiens
  misc_feature (1483)..(1483): n is a, c, g, or t
ttgaagtaactgaagatatttaatctagagaagatttgggaaacacatgatagctatggttaaatacttaacagggcaatcacagggaagatgactagatttcctaacatccatgagtgaaatttatagaagtatactctctgacttgatataaaggaagattttaaaaaacatgactgttcaggagtgttcaagtagggtcagatgaccagtgattgggaatacttcgtaagcaggagcaagtaagatctgagccactgttctatcggtagggtgtctgtggtattccttggtcaaagaagtactctaagcaacttcagtctcacgaattactatcaccctcgtgggcatacatgatggttaccctaaagaggaagtttcagaaggcagtaatattggatcctggaatagtcagacaggagccttcatgcagatacccttttcagttctccatacacccattcacaagtggtcacaaaaacacccagtacctttacttggctttacccacttaacaatatgctcaatatgagcagtttgactcccaagcctaggtcaggcctgagtgtttctcatgagccatagtcttaggctgaggagccttgagagttggtggagggagagcccccctgcccgcagggggctgtgatcacagaagtctgtagaaagagtgggatctaaggagtcctggggaggcaggcctaaaggtccaggcctggcatgatcactgtccagggaaggcccccagttcctatggctctgtgcataggggccatttgttcttgaccgacttcactccaaggatctggtgtgggccaaggctagggagtgggcagaaggcgatggctggttggagagaagccaggccgtctagtgggggaggatggttggaacatagcattgaagtgggctcggctttcaagctgcatacggtggcccagtggggaggcgagtccacggacaaaatggattcgaaccagccctgactgccccccagataccagccatccataggagtccaggtttgggctgaaacgtaccttatgaatagcctccagctgcagcctgtccaggcagagttgagaatgcccctctccctcctgcatgcgcagcattggttctctacggagcagatcatggaatgaacccaaatctgtgtcttgaaagagcaagtagtgatggttgacagtttcagtgtaagttcgagccttgggagggttggggaccccagatgaagcagaagaatggtctggaccttcaggactgtcctgatacggtatcagatctgctttatatataggaaatcttcgctctacaggtcgcttgacatttattggattcagtgccatatctggtaatatagcagcaatgagctccccggatatattctcctgcagttattgtcccaagccagtcggatcctgaaagactccaaacggtgcttttcgaggagcagtgaagtaggccttgaaaccaaggtaanccagcgtcaatataatgaatcccacagagtccataagaggcatagcagttgtcctgagccacagtgacaccattgtagggaagcagccaggccagttctgtactcaagaagcgcttgatagagtttatgggttcgtaaggacgtcgaaggtcccagaatttgattttccggtcactccccgcagagacaaggaaatggctgttagctttgcaccattgaagggtacgcacagcctggtcatgggctaggaaacactggaaggggtagagctttaaggagccatcagagagccgtatccgctgcaggggtgagttagtgggaaggttccagaaaaccaccatgccattataatatccagcagctaggtgttggtggggcctggtaggcatccaggccaggctaaggcactgaccacactcagaggggtctgtagcttgcatagaccccacctgcagagttgccacacattgtaccttatatatggcaggcttcactgcatctgggggttgctgagccagcagggcctccggatggggtagactgaatagcagtactttcccgtctgagcaggccagagccaagagacccaaccggggcaggagaggagccttccgaggggtgcctggaagttcccatgctccactggggcagaacttgaggtcccagatgcaagcctcgtgccgaattcgccacccaggcctcgctacctt

SEQ ID NO: 313100 - DNA, 536 bp, Homo Sapiens
  misc_feature (29)..(29): n is a, c, g, or t
  misc_feature (85)..(85): n is a, c, g, or t
  misc_feature (95)..(95): n is a, c, g, or t
  misc_feature (243)..(243): n is a, c, g, or t
ggggtgttttggggacccacttggtgaanggggtgtatgggagaactggaaaaaggggtatcctggcatggaagggctccctggnctggacctantcccccggggatcccaatattaactggccctcctggaaaaccttccctcctttaaggggtaacccatccatggtatggccccacgaggggtgataagtaattccgtgagactgaaagttgccttaagagtaccttcctttgacccaanggaatacccacagacacccctaccgatagaacagtggctcagatcttacttgctcctgcttacgaagtattccccaatcactggtcatctgacccctacttgaacactcctgaacagtcatgttttttaaaatcttcctttatatcaagtcagagagtatacttctataaatttcactcatggatgttaggaaatctagtcatcttccctgtgattgccctgttaagtatttaaccatagctatcatgtgtttcccaaatcttctctagattaaatatcttcagttacttcaa

SEQ ID NO: 313101 - DNA, 419 bp, Homo Sapiens
cttttttccatctttaagcctttcctgcccaaaccactttcctctgcttttattctgtcttgagtattatagaacctaatttcatggtctcctttccagcctatatataaagcagatctgataccgtatcaggacagtcctgaaggtccagaccattcttctgcttcatctggggtccccaaccctcccaaggctcgaacttacactgaaactgtcaaccatcactacttgctctttcaagacacagatttggggttcattccatgatctgctccgtagagaaccaatgctgcgatgaggacgggagaggggcattctcaactctgcctggacaggctgcaagctggaggctattcataaaggttacgtttcagcccaaacctggactcctatggatggctggtatctggggggcagtc

SEQ ID NO: 313102 - DNA, 898 bp, Homo Sapiens
  misc_feature (836)..(836): n is a, c, g, or t
cctccaacctggagaaaaaaagtcttcatcccggggaggcaccatccccctttttttccaccctggacagggctgctggctgccggatctttttcggatttggtggggttggtcacctttggggccctcaggacaggacacaggggcagggcagggctgttgagagctcttcagccagttcctgaagatacagaagtgccactggggcagcctttcggcggggtcgttccccagaaggggtctcaaagtcctcagggggcctctttggagattgagattctggccgatctaggtcttttgacaacttcagcagcagcagctctgccttggactttcgacctcgtttcttaggcatgggggtggacagagggttggattgatctaagagaccaggaaccagtggggctgatggaggattaggctgttggggccttttggggccttttcgtgtcctaccacctctcttccggccaggctttgaggccctaggctttgagacctttgacatctctgaagaaagatctggctgttccagtctggagaggctttcctgctctggagggagcctcctctgatcaggagaatcctcaaatccaggcaaaggggtaggtaatgacatctctacggaagcctctgcactggtcatttctgaagaggtcttgacatcaagctgatttagcacctcttgtccaggagagtctaccacagtcatgttccccacggggccggcctcccccagggcaacatagccgaccccgcaggtatccatcagcaccccccaaaatggctgccccgaatcagcaattctggatggggccagcaccttgtgttttaanaagctcttcaggggattctgacgcacactcaagctgaaaaacacctcgccaaagtccttccg

SEQ ID NO: 313103 - DNA, 993 bp, Homo Sapiens
acaaggtttttgggttttgggtgttttatttgtgcggttcatgttctttattgaacaccttacatgggtatggacagggcctatgggtggggcaaggcagcaatgacagcctcagtgaagtcatggcaagtagcatagccacccatgtcagaggttcgaacctgtgggggagaatcatcatcatccatgtggcctgggctccatcctaacaatccccatcaccacccaacagtctgtcccctaaggaagccggcccaaggacaacctaggctctacccagcaaggtgaccatggtccactgcttagaggcacaaggtctcttccctggtacactgcactgaagggtatggggagtgtggtccttgcaaggttggaagaaataaagggctctagctccctttagtctgcaggtgaccgatgacagacttgatgaagtcggttgtggtgctgtagccgcccatgtctcgagtccgcaccttgccaactttgatcaccttcttcaccgcatctgcgatcatgctggagtgatactcaagattaagatgccgcagcatgttggaagccgacagcagcatggccgtgggattggctatattcctgcccactgccctgggcaaatttggtgccgggcacccgtctcaatagactgcgtattctgcactatagctctcaccagggaccacaccagctccccgcgaccaggccagcagccagattgtccaataatgttccccatagagattgggcaatcaacaagcacatcaaaactggtaaggattcctgcaacccagtgcatgcagcagttgtctatgatcattgtctcaaatttgattttggggtacagttcagcaacttcctcacagcactgcaggaacaacccatccccaagtttcatgatgttggccttgtggacagcagtgaccttgccccgccccttcttggtggcatagtcaaaggcgaactttgcaatccgctgagacttggctcgtgtga

SEQ ID NO: 313104 - DNA, 1315 bp, Homo Sapiens
aagagttggttcatgttctttattgaacaccttacatgggtatggacagggcctatgggtggggcaaggcagcaatgacagcctcagtgaagtcatggcaagtagcatagccacccatgtcagaggttcgaacctttagtctgcaggtgaccgatgacagacttgatgaagtcggttgtggtgctgtagccgcccatgtctcgagtccgcaccttgccaactttgatcaccttcttcaccgcatctgcgatcatgctggagtgatactcaagattaagatgccgcagcatgttggaagccgacagcagcatggccgtgggattggctatattcctgcccactgcctgggcaaatgggtgccgggcacccgtctcaaagactgcgtattctgcactatagctctcaccagggaccacaccagctcccccaaccaggccagcagccagattgtcaataatgttcccatagagattgggcatcacaagcacatcaaactggtaaggattctgcaccagctgcatgcagcagttgtctatgatcattgtctcaaatttgattttggggtacagttcagcaacttcctcacagcactgcaggaacaacccatccccaagtttcatgatgttggccttgtggacagcagtgaccttgccccgcccctttcttggtggcatagtcaaaggcgaactttgcaatccgctgagacttggctcgtgtgacaatcttcaaacactcaatcacaccccttgcactctcatgttccagagagctgtactccccttctgtctgctctcgaatgatcaccaggtctagattgttgtgccgagtcatatacccaggaagtgacttcacatggactacgttggcaaataagtccaacttacgcctcagccgcatatcataggaggctagctcccccttatactccatcggggtatgaatctttccaatgatggccactttgttctccttcatggaactcagcacctgctccagcttctcctcagatgccatattctgcacctcactcaggtggtgctcctggaactccactgggacagcggcagccttgaacacctccttgacggcgtgcatcagctcaggccccacaccgtctcccggaagcatggtcacgggaaaggagccctccaccctcacgtcctcggcctggctccgcgatgcagcgtgcgccgcggccgaggtactcagacctctccatgccccagggttcccggcggagaccagcgctcgggtcagccagcggactccgctcaatgccgccatgtttcccgcaggaagtcgcgtgggaagtccc

SEQ ID NO: 313105 - DNA, 183 bp, Homo Sapiens
tgtatagggatggacaacaaagatttttattggggcaatcagaggatgaaacatcattttttacacgtcatgaaaaggtctaggattataggacgctgctctgctcctgaaagaattgtctacctacactaagaaataacagaatagggaggtgttgctattgtggtcacctgaagcttgagg

SEQ ID NO: 313106 - DNA, 470 bp, Homo Sapiens
ctttcaaatgttcctttcattgtttcattcctttaatgtttgcagacatagattagtaataggacctagattagtaatgtttgcagacatagaccttagtaatggtctgcacatctgaccaaagtgacaggtttgaggattccaggcagcttgagaaaaggcaggaaaggccagaaccagtgtcaaagggtcagggttgagcacaggatacatggaagctcatcttccccagcaagagggaactcaacagctcacatctacaggcagcaatgggggctgcttgtccctgagagtaaggcataagcccagtgttcagactcctgaggggatgagggagtagtggctcaagcctgagccccagaatgagtatgaggataatcagggctcaggagaacaagcagagggcaggcggggccagggggggcagggtcaagcaacaccagggtactattcctgagcagttgacagcc

SEQ ID NO: 313107 - DNA, 1387 bp, Homo Sapiens
gcacgaacgcagacccagtgtcaacggtcagggtgagcacagatacatggaagtcatcttcccagcaagagcgaactcaacagctcacatctacaggcagcaaaggggctgcttgtccctgagagtaaggataagcccagtgttcagactcctgaggggatgagggagtagtgctcaagcctgagccccagaatgagtatgaggataatcagggctcaggagaacaagcagagggcaggcggggccaggggggccaggtcaagcaacaccaggatactatcctgagcagatgacagccacatcttcctggtgggtgcagtcgtgaaacccccaaaatctgtgctggcactgctcagggactgctcctcccctgagcaacgaacattatccagccagatgcggccaaccccagggccatagcatttccggtctctgaaggagggagagagggacttcccacagcccagttgcttgcataccacctggtcctccttttctccccagttgtcatcacagacagagccccatacgcccttgtgcagcacctccagtcgcccagagcagaggttgtctcctcctactagtctcaagtcaaagggatcttcacattcgacccacgtgtcttcatcatggttgcaggtgttcttcccccaaggcccagaagggcaatcctgaagggttgcttctcgtcctgagcatgacatctggctcagccagatgggttttcggccataggcatgcttgttgcagcgtttttgagtcagtacagccctcccacatcccagctgccggcacaccacctttgcggcccggaggctccagcctgtctggcacacggtataccactggttctggtgcttcacttccacgcgtcccttgcaatgcccagggccgtcagccagcctgacaccctctgggactggggagaaagagctctctgggttctcacacgatgccccagcatcttcatcatgtgaacaatcataaacttcttcttgctcaacactggagcccaatgtatcttctgttcctgtgcaactgaactgattggatgaggaccttttgctctttttctgctggtggctcatacaaaataccactaggggttccgctggcagctccacagcccagctcccggcacaacacagccacgtccttaatgtcccagccgtcatcacacacggtgccccactggcctttctgttccacctccacccgcccttcacagcggtggaggccccccaccagccgcactccagatggagacgctaggaatccaggtctggtgcaaatggcaaggatcaaggagaatagcagagccatgaccaaggcaggtgaaggtgatgagctgaaatttaaggctagaaggaggtccccaagcagctat

SEQ ID NO: 313108 - DNA, 1550 bp, Homo Sapiens
gtgttcaaatccactttatttaaattatttggtaattttagcagtacaaaatctttgactatgaccatgggacacagacatgagtttatgttttggtttgttgtggtctggggatcatgtacttttctaaatcctctgcacttcctttcattaacaaatggcagagtgccgtaagttcctctattattcatagaaaagaaatttgtaaggtaagactgaaaaaataaaatctacagattcacaaaattatcttccaatattaagaacatacaaagtatactaaagacatctacatttagtcctccaggtaacaaagcaaacatttgacgtttgacgtttctgtttttacttcttgctaattacagttcagagaccaaagtatttccaaaagctatgaaaaccctcactgacgctcctagtatggatttaatggaattagaggatagaactatgagagcacttgaaaacttgcctttaaaaatcacaagactttcttttcctcagtgggacttttcttctgcagtagctgagggcactatttgcttacttaatgccttataattagcatctgccttacagtagatctaagtattggcttatttaagtatattactggatagcacgtggtaggtagcctttttgtccaaggcaaacatacagcgaaccttaaagtaaaacctcagagggtttggtgccccttagttgttctccagcgagcccgaagttgcatttggagttctgattccaaatttactatggaatgtcattgtgactttgtttttatgtcctgttctttgatcaaaggcatggcatgtatcaaaaggtggactgtacaagtgaaggctcacagcaggttccgtatggctgatgttctctactcgatgtaagccaatggaatcattgatgtaggcacactggttttccctcaagactctttcagacttcttgaccatctcattggattttttgtcaggccaggcaaataatgtctcctttagatttccctgtagcatcttcagaaagcagtgggagttggtatgatcatgaatactgctgccatgtccttcaccccaacagagaatcatcagattaaattttccatttcctttgatccacaagatttcgggtatacctgtactggtcgaacttggcgtacattgcccactcggtggggtcgctctcgtaggcttccatgatggcctgcacctcctctacattgacctcatcgccggcaaagagctggtgcaggatgcggatcagatcagccagggtccgtggcttcagcacttcggtctgttccatctcgtggggagctgctgcgcgcgcgtctcactgctgggctgcggtggaggagctgagcgagccaaggagctgggggcgagggagcctaacagcccgctagaccgctaagcagacacacacgcacaaacccagcattagagtgccgaaacgtaaaggatgtcgtcgcagagacagcaagagacccacccccagcccctggcagcgcagtggatccgggatcgctggagacgcggtgcacacacaaatca

SEQ ID NO: 313109 - DNA, 338 bp, Homo Sapiens
gcaacacaagtcaatctttattgaaaactgcagtattaatacataacaattcttgttacaataaacgtgcttttgagatttttaaatctgagctcatctcatcagattgcataaaaaattaaaatagtatcaattgacacctaactgaactggctcaggatggaaattccattccttggcatggatacgtaagttcaatgcagaggtgagggatgcctttaacactggaagacaatgctgacttagcttaaaaaaagtaccgagagaacggtgtaaaaaacggtatttaaaaatcatttttaaacacgtgtggccagcacagcccctgctaggagccc

SEQ ID NO: 313110 - DNA, 485 bp, Homo Sapiens
  misc_feature (400)..(414): n is a, c, g, or t
tgctgctcttttccctgaagcatagtcaagtaagaactgctctacagaaggacatatttccttggatgtgagaccctattttgaaatagagtcctgactcagaacaccaacttaagaatttgggggattaaaaatgtgaagaccacagtcttgggttttcatatctggagaagactatttgccatgacgttttgttgccctggtatttggacactcctcagctttaatgggtgtggcccctttagggttagtcctcagactaatgatagtgtctgctttctgcatgaacggcaatatgggactccctccaagctagggtttggcaagtctgccctagagtcatttactctcctctgcctccatttgttaatacagaatcaacatttagtcttcattatcnnnnnnnnnnnnnnngagacagagtttcgatctattttaagtatgtgaagatctacttgtggctcagatcttaattgtgtgatgct

SEQ ID NO: 313111 - DNA, 1501 bp, Homo Sapiens
ctgtcatcaaaatggaacagatttattaggatgctcacaagaatggagaacacatgaactagcactctcctcatgtgacagagagtacatctgacccacatggtggcaggacacaggggaagggctctcagagctggtgccaagtgtccaccaaagaaagtcccattcaccagagacaggctgtttccttggactccaccatctctgttacagctaccagccaggtctccatgatcttcctggaatccttcatgccagcatcagttcatgctctctgagcttgtcactcccgactcttttcaagacccaggtcaactgccccatgggctcacccacccaggccgcctccggagtcctgcagcacatctctttggtatgctgctgccctgctaccctcaagggcatgggttgtgggtagggggagaacatcaacatcacattaccaaaagcaaacagcaggggtacattagtaaacgacacttggacatagccgaacaacctcacagaacacatgcttcctccccaaatgatacctaatcccccaagagcaaatgaaaccccttgatcacttgaacacgtatgaatgattctgtgtgccaggcacagggacacacaatgaatgctgtttaattccaccacacccccgcacacaacaggaagctagtggctgaaagctggaaccagatctctgtcctggctccatcagctttctcctggctctttctgcctttcaacggtgccaccaccctgcttctgtctgctctgaacacttgttccaaaaagggaggataaaaggatgaaggatggcagagggagggaggaaaggaagggggatagcaaccctgtaaaacagaacaaaaacaacacaaaaatccagaaaccagatttagtactacattttataacaatagagagtagctgaaaatactacatgctaacacagataatatgatacacaacctcaggggggaagctggcagggagcacgtggcagaggccacaggtttagactaagagcctttcaatggactgctgaatggattggatctgctgtttcagctgcgagccttctttgatggtgacagaacaggcgatgacaggcctggagaccccacaggctctccccagggcctgcttggagcgcacaaacacgtagggcacattcttgtcttcacacagcagcggcaggtgcagaatgatctccagtggctcggcgtctgcagccatcacgatgaactcagagatgcccctgttgagggttttggtggcctcattggctcctttccgaagctgcttatagttacatgactgctgaacgaggtccagtagcttcttggtgaggtgggcatcggcaaggggataggcctttggattcacatcagcctcagtcatggctgcggttccgcgggctcagcactcctaggggagcgcagctgacgtttcagaagcactcgcgtgcaccggaaaaactcacagaagcagcagcggaaatggccccccc

SEQ ID NO: 313112 - DNA, 863 bp, Homo Sapiens
  misc_feature (23)..(23): n is a, c, g, or t
cgacattttttggcggcggtttnttgtttgggttgttaagaaaccagatttagtactacattttataacaatagagagtagctgaaaatactacatgctaacacagataatatgatacacaacctcaggggggaagctggcagggagcacgtggcagaggccacaggtttagactaagagcctttcaatggactgctgaatggattggatctgctgtttcagctgcgagccttctttgatggtgacagaacaggcgatgacaggcctggagaccccacaggctctccccagggcctgcttggagcgcacaaacacgtagggcacattcttgtcttcacacagcagcggcaggtgcagaatgatctccagtggctcggcgtctgcagccatcacgatgaactcagagatgcccctgttgagggttttggtggcctcattggctcctttccgaagctgcttatagttacatgactgctgaacgaggtccagtagcttcttggtgaggtgggcatcggcaaggggataggcctttggattcacatcagcctcagtcatagcgtctgtcttggtagtctcttgccggacaccgcgaggataccacgcgtgtcggtttggacggtctgctgcccagcaccgcaaggacacggatgccccgcccccaagagcaggaagtgacgccactgccgccagcggaagtgacgtccagggccagcccgtacaccaggacgccctgtcttctacgtaactccttatcttaggcgaatttgtcttggtcccaggacaacatggctgcggttccgcgggctcagcactcctaggggagcgcagctgacgtttcagaagcactcgcgtgcaccggaccc

SEQ ID NO: 313113 - DNA, 536 bp, Homo Sapiens
tcagatttagtactacattttataacaatagagagtagctgaaaatactacatgctaacacagataatatgatacacaacctcaggggggaagctggcagggagcacgtggcagaggccacaggtttagactaagagcctttcaatggactgctgaatggattggatctgctgtttcagctgcgagccttctttgatggtgacagaacaggcgatgacaggcctggagaccccacaggctctccccagggcctgcttggagcgcacaaacacgtagggcacattcttgtcttcacacagcagcggcaggtgcagaatgatctccagtggctcggcgtctgcagccatcacgatgaactcagagatgcccctgttgagggttttggtggctgcggagagaaggacgtgaagctaataggtgatgtgggcttggggcagggcagccacaacaaactgggaagaatgcctaaggcacacacaattatgtgtcctagaccggccctggggatatgataaagggttcaacaccagtcagtc

SEQ ID NO: 313114 - DNA, 1647 bp, Homo Sapiens
gtgaacaatcaagctttatttttacaaaaatgaaaattgtagcatgtctcaacagccagcctgaggtagggctggctcagatctcactcagaactgctgggttccctttgctctttcttggtttcaaagcaaaaccaggccacagtgccccaggaatgaacccccagccccgagaggttggtcaagggtgaggtctggctggtgccaggaggctattggcagcctcacctttccttccaggaaggggcagaaaggaaccatctgggaaggtgggagcacctcaccctcactctgtaggctgtcatggctctaataaggggtataggatgggcctctccaggccagatccttgctctggccaaacagggacgcaaggcccgggttcagccgcactctaaagcagcaggtcctgcctctccaacaggttcctgggagggactgcatctctggtaagctccaaagtcccaggagtcagaagcctctagtgcaaggtgcctgagcactggggtcacaggcccaggagcacagtggggcagtgaggaggagctatcactgcaccctccaggcaagagaagtccctgagtagctggtttccctggcccagaggcaggggtggccctgacggtcatgggttttgaaaatccaggacgtggaggttgtaagacagggcagcatagagatgcttggtggtgagacgcaggcagtacacagggctgctgaggggagtcgacgtcagcgggaaggcgtgcaggcaggccctttgacgccggtcccacagccgtacaacaccgtagtaggaggaacctgtggccagcaggtggttgccatctgtctgcaggcagtacagggtgctgtcgtggggctcctcccactccatgacacatttccggacgctggtgcggaggtcccagtagcgaacataggtgtcatagccacaggacagcagtgtgaaaggggactcatacatgacatccagcaccccagcccctgggggaaagtcactgcccaagtgtgtcatcagctgcccactgttgaggtcccagattctcaggggtgagaagtgcccgcaacaagccgtccctgtcacaaaagagctgagtaatgggctgatagcaatggaccagactcggtcttcagtctggatggtgtgtaagcactgccccagccggcctgaggccaaaggccacaccttggccgtcctgtccctggagccactcacaatgatgccccctttgcaatccacacagttcacctcctgttcatgagccgagtacttgacagtgaaggtgctgtgaatcttatgaatgccaatcttcccatcccctcctgcactaacaatatgcgagttggccagcacaaagtggcaaacgtcctcatcatgcccagcaaagactcccagaggccgacgattcaagctggcaccatctggacggaactggtaggccaggatgaaattagcctgggatatgtacagagaatcatcctctagctgcatccagggcatctgactgcaatctccactttagcagaatcccctctcggcagcgccccagtctccagttctgagacacctttacttcgttctttcactgggacactggtcatcctagaaatactgtggttttaagagctgggtgtggtggttca

SEQ ID NO: 313115 - DNA, 367 bp, Homo Sapiens
  misc_feature (280)..(280): n is a, c, g, or t
tttttaataagtttactgaaaacttttattgtaatcaaaaagtgacataacagggttgtaatgaattcagcaaatcattctgctgatattttagaacttatatcagcttttgccaggcaattaaaaaattcaaatgtgaaaatttcacattacagtaaactccaccccaactaattaatggtggttaaaaataataggccctagcaaaacctctcatgttacatggtcacaactcacaattctgtacaaaagttcgtgttataaagctctgatgtaaaantcaaataatcaaggcaggcaatattttaggtgcagcacagggtcttccatgtcattatttacaagggcttgaatctctttacattat

SEQ ID NO: 313116 - DNA, 1897 bp, Homo Sapiens
  misc_feature (1736)..(1766): n is a, c, g, or t
tctttttcttcttcttcttgctgtcctgactttctgctgagctggcactgctactgtggcttcgggtctggcttccagaaggactgtggcttctgctggggctgacgctggggctgctgtggctctgattcctgcttatgcccacctggacaactgctgctgtgtccaggctctcttttgctttctccactattttatctttcaggtccttagaaatgtttcctgaagattcctcttcttttacagaaacattactttcactgtcactttcattatagtctggttcaaaagcagcttcatcagtttctctagttaagtcagaggaaagtctagaggaatgacttaactggggtttaggcttgacagtactcttgtcaatttgcccagtaatttgctctttttcaacctgtgtctctggtgggttaagtatataaagtagtttattgccacttgactctttattgttccttgcttctaatacatgcttctcacgatccttacaaggatttttatctacagattttgtctcttcatttggccgtttagtatcataagtggctttgtgatcatgaggttttctgtctcttgagggactagaattactttttttggaatctcctgttccttttttaggcaaactctctcttcccttggtttatttttctgtccagatgcagaatctttattccgagaaggagagtcttttcgtcttgttaattcattcttttcatctctacgtttggaacttgaatactctctggtgtcatagtcagtttttttgtctctattgggagtgaagtctttatttgaggaagcacgagtggaatcatgtttatctgacgttctagcctctttggaagattgagacagacttttaaaatttccttgttcattcagacggtccaaattactctctttctctggctgagtgctgttcttcctcttttcagggttctccttttccaacactgaataatctcgatctttggttttccctttttcactagatgcagagttttttgaacttttaacctcatgttgtatgatttcatggctcacgtccttggtgaatttctgaattttctcggatgggctcactttctttctccaggatacttgactatatttgatggctttgtactaacattttttataacactagcaggttttcctacacttgatataggctgtgtggatttaacatcttcttcttcagattcaaagtcatctttatcccatttggattgaggaacctgaatcataatgataacatcttcagctggcgcggtattgtcattattatattcttccatcgttttaatcacagttcgctttgtatctgttttttcttcagatttccgcacaggactgcctccagttgagctcgtactggtgtaatccaccagagttgagctggatccttcagttccagtcacttttcgtctgacctttcctttgactttttcttgtttaactttgctagatgttgactccaatttttcagagggttcttttgtgtttgatatattttctgtacttccaattttcttcccagtttctctgttgagtttgattttttggctggcgcacttaaagaaattttgtccttttcaggggtcctatccattttttcagtatcaggttccattttgcgctttggtgatggtttcactatttcagtcacttctagtttcgagattttcattgaagaagactcaaaatctttatctacgccnnnnnnnnnnnnnnnnnnnnnnnnnnnnnnncccttattatcaagtggtttgtttttctcattaggcttcttggccttttcttccttagttgttagcttttctgatttgacatctttggaatagtccttcctcgtgccgaattcgccacccaggcctcgctc

SEQ ID NO: 313117 - DNA, 2002 bp, Homo Sapiens
aagttaagagcagctagtttttaatgaatcttagcccagaatacaaagcagggtgtagcagttgccttaatggtgatataattgtaaacaatagctttttcttcccctataaactcgagttataggaagcgtttcagagagaggataacacatttgaatctattttttaaaaatcatcctgaaagctagcagtattgttgtcgtttaaaaggttcctcatatactcttaccctcagccaacccaccatgtttatcaattcaaattctagaactttcttgacccaagagattttgtaggaaaaatttctcttttcagatattcagcacgcaaggatcatttttcttggttttgttgctgatcttgctgaactttccatcaatggctgagggaggaagcttgcatgattcttatgagttcttctgaggcactttgactgtgacagttttcacttcagtgtatgcctgcagcccgtactcgcccaactcccggccactccccgacatcttgtagccaccaaagggtgactgggctccaaacacatcatagcagttgacccacacagtgcccgcctggagggcctgggacaggtaattggccttgtccaaatcctttgtgaagacagctgcggccagcccgtacgtggaattgttggctctcccaacaacctcctctatggtcttgaacttcaggatctgcatcactggcccgaagatctcctccttggcgatggtcatgccatcctgcacatctccaaacacagtgggctggatgaagtaaccacggtcagcagcaatgcccccaccacacagcagcttcgccccctcttgcttccccgtgttgatgtagccgaggatcttcttaaactgagtttcatccacctgcggcccctgctcggtcttgctatcaaaggggttcccgaccacccgagacttggcccgggcaacgctccgctccacaaactcatcatagatgtcctcctgcacgaaggtccgggagccggcacagcagcactggccctggttgaagaacagggcgaagtgggcctgttccacggcccaatccatatcggcatctgacatgatgatgttggggctcttcccccccagctccaaggtcactctcttgaggttgctgctcccagcagcaacctggattacgcggccaatctcagtggagcctgtgaatgccactttgtccacatcctcatgggaggcaatggcggccccagccgtggggccaaatccaggcacaatgttgaccacaccagggggaaagccagcctccttgatcaggttggccacatagagggcggtgaggggtgtctgctcagctaccttcatcacaaccacgtttccagttgccaaggctgggcccagcttccatgcttgcatcaggagcgggaaattccacggaatgatctgcccgcacacccccacaggttcatggcgtgtgtagctgaagaagtctccgtcaatggggatggttttcccgtggtacttatcagcccagccggcataataccggagacatttgaggaccatgtccaaatccaccaggtaggagatgacatagggcttgccattgtccagggtctccaaggccgccaggtaggtccggtcccgctcgatcagatcggccaggcggttcagcagccggcccctgtgtgatgcgtccatgcggcgccaaggtgagcccagctggaaggcggcccgggcggccttcactgccttgtccacatcttccttgtccccttcagctacctgacagatgacctctccagtggacggattgacggtggggaatgttttcctgctgacggcatcgtgccattcattgtttatgaaaatctggttgcagaagacctcgggctgctggttgggggcaggcacggcctgggtggcggcggctgacaagaggcggcggcccaggcggggcccgaagcgggcggcagcgcgcaacatcgcagcgggctagcggacagcgagcggaccgagagcagag

SEQ ID NO: 313118 - DNA, 2211 bp, Homo Sapiens
  misc_feature (466)..(466): n is a, c, g, or t
  misc_feature (469)..(469): n is a, c, g, or t
  misc_feature (472)..(472): n is a, c, g, or t
  misc_feature (524)..(524): n is a, c, g, or t
  misc_feature (540)..(540): n is a, c, g, or t
tttggctgtttgcggatttaatggcagggcattgaggttgggaggggtcccagctgctgcgtctgcttttcttatagcagagaggctgcctacgggtggcacggggtggccatggagtgcagagttggtgggacaggggacatccagggggctcgagatgttgctggtgacaaggaatgtcaagtggcactgaggctggcgggcaaggccacaggcagattctctcacgtgggtgctcgcccctttcctcccccttgtccctccctcccaccctggccccactcaggagtgagacccagtggccaataagctctgggacagacgaatgggcgccctcctccttccttctgttgggctggggtgagtggggggggtgactcagctcctgggctcaggcagggtctggaggggccaggatggtctcgagtgcttggcagctgaggaatgtagctgggctcgggtagtngcngcngcgaggggcgggccagggtggccagagcccggggccaggaatgtgcagctgnggtcaatggtcccggngtcctcccgactcggggtcgggcggcgggaaggagggtggccgtggcgggggtggagttgggtgcccagggctcagagcttgtgggggttcacccacttgtaggtgccctcatactggaaacccactctcttcatcagctcgtctgcctccgtggggcctcggctgccataaatataggggatgggcttgggcttctccagctcaatctggtgcagcagtggggtgaaaatacgccaggcctcacggagctcgtcgctgcgcacgaagtgcatctggctcccgcagaagacgtccaggatgaggcgctcgtaggcgtcagggagcttcacgttcttgtatctgttgccgtaggtcaggtccagctccgactcctcggggttgaagaacatgcccggcttcttggtcatcatcttggtgtacacggcctcgttgggctgcacgcggatcaccagctcgttgcgcttgcactgctggtggaagatgtcgccggccacatcatggaactgcagcctcacctcggccttgcgctcgttcagggccttgccgcagcgcaggatgaagggcaccccatcccacctctcattctccacatagaggacgacggctgcaaaagtggcggtggtggacccgcggggcaccgtggggtcgtccaggtaccctttggtggcctcgccctctccatcggggttccccacgtactggcccaggaccacattgttggcctgcacctctgagatgcatttcaacaccttgaccttctcatcacggacgtcatctgagttggtggaggcgggcttctccatggccaccagacacagcatctgcagtaggtggttctgcatcacgtcccggatgatcccaaattcatcgaaatagcccccgcgaccctcagtgccaaagggctccttgaaggtgaggataacgcaggcgatgttgtcccggttccagatggggccgaagatcctgttggcaaatctcagcaccatgaggttctgcaccatctccttgcccaggtagtggtcgatgcggtagatctggtcctcacggaacagggaggagatgtggttggacagccggtcagagctctgcaggtccctcccgaagggcttctccacgatgatgcgtttccagcctatctggctcatgcaggactcgtgaatgttcttggtgacggcctcgtagacggtcgggggcaaggccaggtagaagaggcggttggcctgtgaccccaggtggagggcattcatgtggcttttgaggcgctggtaggaggtctgcatcatcgtactggtccagccacataggagttgtcgggcatagaagtcctccagcttgagcttctcctctggggtggccttgaatgatagggctcactctgtttgcggatgtcagccactgtgaggcgggaacgggcatagcccacgatgaaggtgttttcgggcagaaggccatcccggaacagccaccagatggtggggtagatcttcttcttggccaggtcacccgatgcacccatgatgatgaatatgtgtgtatccgactgatggaaggcatcgccctggaaaagctcttcccgcaggatcccgcacacctgggtccggctcagggccacctgctctgccatgacgctgtctgcgcttcgtcgtcgtcgccctccgcgctcgcagccc

SEQ ID NO: 313119 - DNA, 1125 bp, Homo Sapiens
  misc_feature (48)..(48): n is a, c, g, or t
  misc_feature (68)..(71): n is a, c, g, or t
  misc_feature (125)..(127): n is a, c, g, or t
  misc_feature (142)..(201): n is a, c, g, or t
  misc_feature (220)..(220): n is a, c, g, or t
  misc_feature (237)..(237): n is a, c, g, or t
  misc_feature (246)..(246): n is a, c, g, or t
  misc_feature (270)..(271): n is a, c, g, or t
  misc_feature (337)..(337): n is a, c, g, or t
  misc_feature (341)..(341): n is a, c, g, or t
  misc_feature (347)..(350): n is a, c, g, or t
  misc_feature (364)..(364): n is a, c, g, or t
  misc_feature (369)..(372): n is a, c, g, or t
  misc_feature (377)..(377): n is a, c, g, or t
  misc_feature (385)..(388): n is a, c, g, or t
  misc_feature (391)..(392): n is a, c, g, or t
  misc_feature (394)..(394): n is a, c, g, or t
  misc_feature (397)..(398): n is a, c, g, or t
  misc_feature (400)..(401): n is a, c, g, or t
cgggggtttgcgccccgcccctgcgcttgccccgctgggttgtttttngctggggggcgtttttttgnnnngtgggttttctgtcccgcggcggggggggcccggctccggttctgtccgttcgnnngggggttttccgggnnnnnnnnnnnnnnnnnnnnnnnnnnnnnnnnnnnnnnnnnnnnnnnnnnnnnnnnnnnntgggtgtccttcctccccngctcgggtcccgggggncggcccccngccggccccgggcccctggttggnnggccccggggcggcggtgggccctgtttcccggggcccctttcccttttccgccttctgccccttnttgntgtttnnnnttttttcccccccngctcnnnngttcntttttttnnnnttnntnttnncnncaggcaaccttgggattttcgcggccaatctcagtggagcctgtgaattgccactttgtccacatcctcatgggaggcaatggcggccccagccgtggggccaaatccagggcacaatgttgaccacaccagggggaaagccagcctccttgatcaggttggccacatagagggcggtgaggggtgtctgctcagctaccttcatcacaaccacgtttccagttgccaaggctgggcccagcttccatgcttgcatcaggagcgggaaattccacggaatgatctgcccgcacacccccacaggttcatggcgtgtgtagctgaagaagtctccgtcaatggggatggttttcccgtggtacttatcagcccagccggcataataccggagacatttgaggaccatgtccaaatccaccaggtaggagatgacatagggcttgccattgtccagggtctccaaggccgccaggtaggtccggtcccgctcgatcagatcggccaggcggttcagcagccggcccctgtgtgatgcgtccatgcggcgccaaggtgagcccagctggaaggcggcccgggcggccttcactgccttgtccacatcttccttgtccccttcagctacctgacagatgacctctccagtggacggattgacggtggggaatgttttcctgctgacggcatcgtgccattccctcgtgccgaattcgccacccagtgc

SEQ ID NO: 313120 - DNA, 554 bp, Homo Sapiens
  misc_feature (21)..(21): n is a, c, g, or t
  misc_feature (32)..(32): n is a, c, g, or t
  misc_feature (68)..(68): n is a, c, g, or t
  misc_feature (74)..(74): n is a, c, g, or t
  misc_feature (95)..(95): n is a, c, g, or t
cctaaaaaactccgagttaanggaaacgtttncaagagaggggataaacacattgaaaccaatttttnaaaaancaaccctgaaaagctaagcantaatgttgtcgtttaaaaaaggttccctccataaactcttaacccctcaagccaaaccccacccagtttaatcaaattcaaaatcctagaatttcttggaccccaagagattttgtaggaaaaatttctcttttccagatattccagcacgcaaggatcatttttcttggttttgttgctgatcttgctgaactttcccatcaatggctgagggaggaagcttgcatgattcttatgagttcttctgaggcactttgactgtgacagttttcacttcagtgtatgcctgcagcccgtactcgcccaactcccggccactccccgacatcttgtagccaccaaagggtgactgggctccaaacacatcatagcagttgacccacacagtgcccgcctggagggcctgggacaggtaattggccttgtccaaatcctttgtgaagagagctgcggccagcc

SEQ ID NO: 313121 - DNA, 681 bp, Homo Sapiens
tttttttacacagcaaatcccaagccttcccagtctcacacctttccacccattcataaaaaaacacacgaatttctcgcaagttccaatatcactgtctctttatcatctaaatagggccagttggacacctcattgaaacaaaaaggctgatctagatgaagtactctttcttttcttcggagttgttctgtcctccttctgcattgattatagctgtgtctgcgtctgctgcgtcatcggctcctttggcttcatgagtgaagtatgtacctttatgtctggcaaaatagcgccccagaatgatgagcaagcacagcatggcgaacaccaccaccgccacgacgccaccgatcacggcatgatccactgccctgatcgagccttcttcacctgctcgggaatctaagcagcatacatctgatcacttggccatattatggaaactcttacttccaccaccagccatgagttcagacgcccccgggagttttaatctaaaaactcagtcatcctgttcttcctgctttgtcagcttttgtggagagttttcccttcttcccattagcagaaatttggttcacgccgttagacagtagcacattgtttccaaactgcatatcaaggctgaaacacaatcttcaggtcctgcagccattcgtaaacctcttgagctttccc

SEQ ID NO: 313122 - DNA, 1750 bp, Homo Sapiens
aatcccttgtggccatgtctggccccaaaagaactgtgaaatggatttccctagttaatctttcccaagttgttttcaggaaaactctcccaaaatgccaaaggccttccaggggaggctggggcctctgtccctggatctgagttcccccatccatgaagagggtatgtgtaaacaagggtccttcacagtgcatgggggggagggatccccagctcctcacccccctggctctggcccttcaagtatgtctctgggctggggagaggagcttctccctggccgtcagcaccttcaagaagtacccagacccctccttttcagtagaatgagggtggggggactggttcttcaggaatgggagtctgaaattgggaggactcaggcatcagaggtggctggaggcttgagctgagctttttccagcggtgccatatgggagggagcgtttgaagaatccaagcttgtagaggatgtagatgagtagacctaggagcaggaggccaaacaggatggctaggatgatgatccacagtgggacgccatagctgccttctgccttggtccattgcacagctgtggccacctgacgctcgttttggggcaagctgccgaggccaggattcggtagggcatccttcagggctttgtacacagcctcacactgcaggctaaatggctggttctcccgctgcaagaaagtcttggcccagactcggaaatgcaactgcagactttggctctcttgttggtgcaggggcccgagctcacagcgcagcttgaaacactcagcctccgggcatttcaggatctgaggtcccgaggaagcagagctgcggcttggagcttcccgtttttgctggtggtgcagggaaccctcgggatccaactccaggcccctttgggttaatggggtgattggtggtgcagttgagtccagtaactctggtcacatataggagctgctgaccttccagagcctggggacagctgagttccagcacaccctggctaatggagctggggccttggttgatgagctcatagacatggtggacagcaggtcccaggtcctcctccttctgaggctggtctcggggatgccagtcgcttactgggaatagcactgcctcaggcttggagacaccgttcagggtgacctgggcttgagcctccacggagagccgaaaggaaaccacgtcgctttgcgagttgttgagattcttgctgaggatctggaagtcaaactggatggttttcttagtgtcccggagatgagggactgtaaaccgaaggccaccccacagactggctcctgccttcatggggttgcccaggtcacacaccagcaggcggctctggttcacggcaaagtagtcacagctcaggctggagaagttccctgggtgtctgacgagtcctgagtactcagcctctggaggggcggtgacccgaagctcagcctcataggcgccaccctcacccacattctgggcatggaaagtgaggttcagggcattcttgtcacccaggtacacatggttctgctccccaaacacttccagctgcaggtcaggcacacagatgttgtcttctccacagtccagcaagatctgagccttgtcctctatccggctcttgctctgataatgtagggctggcctgaggccgtggctgtccactggggcttgggggtccaaggagaagttgagagcgatgtaatcggcgagagtttgtctcgaaattctga

SEQ ID NO: 313123 - DNA, 1388 bp, Homo Sapiens
agttctggtcagtgggggcactgggtcagatttattgcacttgcaacagagtttaaataagtcctgggtgtctggtgccaaggtgagggaagggttgggcagagagatgaggggcagcatcagtgcagctggcaggcagaacccaaattctgcaggcccaggacagtgggctcccctttctctggggaacagggagggcctgtgtctggccaggctgaggttccagatctgttgccatcatggccccttcagggtcctgggaaattcctggcttctcctaaatcagggtgaactgggcctccaggatcaggtctggagcaggcccaaatatagtcctggatctgcctggattaggtgccaatgtctgagtctgggttccagatcaactccagaccccaggctggatctggccccatttgagttctgattccccttggagctgggctctgggccctgggccagccatctatccttgtgtggcatctgtcctgagctggtcctggggcaccatgcatagttagtgttctttgttggcccaccagggtggggctgtccagagctgccaggtcttaactccccaagttccaggttcttagctgggggcttcttttggatctctggcaaggctgaggacagatctttgcaggttggagctggacaggaagtccttgtggcatgtctggcccaaagaactgtgaatggatttcctagttatctttccaagttgtttcaggaaactctccaaaatgcaaaggcttcagggaggctggggcctctgtccctggatctgagttcccccatccatgaagagggtatgtgtaaacaagggtccttcacagtgcatgggggggagggatccccagctcctcacccccctggctctggcccttcaagtatgtctctgggctggggagaggagcttctccctggccgtcagcaccttcaagaagtacccagacccctccttttcagtagaatgagggtggggggactggttcttcaggaatgggagtctgaaattgggaggactcaggcatcagaggtggctggaggcttgagctgagctttttccatggcggtgccatatgggagggagcgtttgaagaatccaagcttgtagaggatgtagatgagtagacctaggagcaggaggccaaacaggatggctaggatgatgatccacagtgggacgccatagctgccttctgccttggtccattgcacagctgtggccacctgacgctctttttggggcagctgccgaggcaggattcggtagggcatcttcagggctttgtacacagcctcacactgcaggctaaatggctggtgctcccgcaggatctgaggtcccgaggaagcagagctgcggcttggagcttcccgtt

SEQ ID NO: 313124 - DNA, 587 bp, Homo Sapiens
ttttctttgcatgctgccacatttacatctgttccccagatcacaagtttttggcctagagactgctcacttgccactatatcttctgctgctgccccgtcagactgcagatccacttgcaggcccttctgtgcagagccccaggtcaggcctctgtcttacaggtgtgcccctaacaccacttcttggggttccctctacccgagagctgggagtgccgtatgtcagtggtgaactaacatcaaagtcaagagggatagctgaagaatgcatttggggagggctggaaaacagcacgtcctgcgcagcagggctctgcaggtccactccaggcgaggttggcatcggctgcaactcccccgtggaggtggaatcctcgcctctacgtctctgagagggagatgacctggcatcctcactccgaggcgtctgggcgggggtggcccttccacgccggctgccgcggcggctcggggtcgacgccggggacgacatagtgctcggagtaccgtggaaaggcggccgcttgccgacgacgctcgcggactccgagtccacctggcgagtagcgctcccaaaccgcgaga

SEQ ID NO: 313125 - DNA, 1478 bp, Homo Sapiens
  misc_feature (640)..(649): n is a, c, g, or t
  misc_feature (1044)..(1044): n is a, c, g, or t
  misc_feature (1224)..(1275): n is a, c, g, or t
ctgttggtctccctggactgaagagagggagaatagaagcccaagactaagattctcaaaatggtttattacccagaactctttgtctgggtcagtcaagaaccatttccaaacaaggacatggagggaaggcttcctaagggaagacttcctgtcccaaaggaagtgaaccgcaagaagaacgatgagacaaacgctgcctccctgactccactgggcagcagtgaactccgctccccaagaatcagttacctccactttttttaatcgtaacacctccatttgtattacatatggtgtatgggtattgatgaggtcatggtatcatatatgggatttttttctgtgtaaatcatcaagtataagaagaaactatgggactctgagccttgctttagagaatttacagtggacaaataggtgtcatcaaaccagtttttaatcattctgactcaagtgaaaacgctcagaatttcacactgtgaatccacgtttacaacccttacaggtgggccttcaggtgtgtttcgctacaacaatgtcttccacaactcaaactcccaccgcgctcacacaaccggtccactcctgccttttcactcacacagctcccgactgcttcttgcagaggctgagagtnnnnnnnnnnaccttttttttcatttagatgtaacaaacctagtagtttatgttcatcaattgtctgtatatctctatattttatccatgtactcttttgatgtatagaagtagtttgaaactcattgtttccttgtggtaagtgaccgagatgctgccacaggacctgagacactgatgaatggtgctattttggactttcaacatgctccttggcgaggtagctctgatggagttattttttatttccatgttctaagaaggtgttggtactctgtttccctgaatgttgttctctagactggattgacttgttttccttgtgtcttcagtgtggctttcttcctcagtgttgtaggttgagcgaatgtaaccagagtgtgagagaccattgtctctttggcntggcgctcacggacatgcagtcacggtagcgggagcaattcacaaaactgtaatttacttaccaaatctcttcctttccgtagcctcgcctgcctgacttagagaaagaaaagcaataattttacaggcattttgaggtgtctctttgggttctttctgtttgaaaggatatttgtcgannnnnnnnnnnnnnnnnnnnnnnnnnnnnnnnnnnnnnnnnnnnnnnnnnnncactggcatctgagtaggaatatgaaaatgacaccttttccaaatattaaattggaaaacaaggtctacaaaatcatgatacttttttaaaaggcagagcattcttttttcggcaattttgataagcaaggtgtagatttacatttttgtccttgctcccaacgaaatggataaacaaaaataaattaccatctactcatgga

SEQ ID NO: 313126 - DNA, 736 bp, Homo Sapiens
  misc_feature (555)..(565): n is a, c, g, or t
  misc_feature (599)..(599): n is a, c, g, or t
  misc_feature (645)..(645): n is a, c, g, or t
gagagagtgaacagggagcggggcttttgtctgtttattacccagaactctttgtctgggtcagtcaagaaccatttccaaacaaggacatggagggaaggcttcctaagggaagacttcctgtcccaaaggaagtgaaccgcaagaagaacgatgagacaaacgctgcctccctgactccactgggcagcagtgaactccgctccccaagaatcagttacctccactttttttaatcgtaacacctccatttgtattacatatggtgtatgggtattgatgaggtcatggtatcatatatgggatttttttctgtgtaaatcatcaagtataagaagaaactatgggactctgagccttgctttagagaatttacagtggacaaataggtgtcatcaaaccagtttttaatcattctgactcaagtgccttcaggcctggttcgctacaacaatgtcttccacaactcaaactcccaccgcgctcacacaaccggtccacttctgccttttcactcacacagcttccgactgcttcttgcagaggctgagagtnnnnnnnnnnnaccttttttttcatttagatgtacaaacctagtnagttatgttcatcaattggctggatatctctatattttatccatgnactcttttgatgatagaaagagtttgtcattgtttcttgtggaagtgaccagatgctgcacaggactgaacctgtgtgggctatttgactt

SEQ ID NO: 313127 - DNA, 1171 bp, Homo Sapiens
ttttttaccttacagcttgcgtatttattgaacaaatactactaaaatagctaaaatacattgggtacttgtcatgagtgcatcagtaaagatcacactgttacaaaagcctgcattttcagcagtacacaactgcaactctacataaatgccacagatgcagaatactgttttcttgctctatttacacagctgatatacctattctaacgaaggagggagaggagtaatgcacaagaaactcaggccaatgggggagcaagaagaaaacgaaggaagtgcagtgcatgcgtcatcgggtgtttaacagtcagaagcgaaacagttcagaacaaggcctgccctgtcaaaagaaggagctaaagacagttatataaaatttaaggtgggctttcagactggctaacacaacaacattccatgagtagatggtaatttatttttgtttatccatttcgttgggagcaaggacaaaaatgtaaatctacaccttgcttatcaaaattgccgaaaaaagaatgctctgccttttaaaaaagtatcatgattttgtagaccttgttttccaatttaatatttggaaaaggtgtcattttcatattcctactcagatgccagtgttttgggtttttttccagggggagtttatttaaaacggttttgctctttttttcgacaaatatcctttcaaacagaaagaacccaaagagacacctcaaaatgcctgtaaaattattgcttttctttctctaagtcaggcaggcgaggctacggaaaggaagagatttggtaagtaaattacagttttgtgaattgctcccgctaccgtgactgcatgtccgtgagcgccagccaacgagacaatggtctctcacactctggtagcattcgctcaacctacaacactgaggaagaaagccacactgaagacacaaggaaaacaagtcaatccagtctagagaacaacattcagggaaacagagtaccaacaccttcttagaacatggaaataaaaaataactccatcagagctacctcgccaaggagcatgttgaaagtccaaaatagcaccattcatcagtgtctcaggtcctgtggcagcatctcggtcacttaccacaaggaaacaatgagtttcaaactacttctatacatcaaaagagtacatgga

SEQ ID NO: 313128 - DNA, 426 bp, Homo Sapiens
  misc_feature (355)..(355): n is a, c, g, or t
  misc_feature (394)..(394): n is a, c, g, or t
  misc_feature (405)..(405): n is a, c, g, or t
cttacagcttgcgtatttattgaacaaatactactaaaatagctaaaatacattgggtacttgtcatgagtgcatcagtaaagatcacactgttacaaaagcctgcattttcagcagtacacaactgcaactctacataaatgccacagatgcagaatactgttttcttgctctatttacacagctgatatacctattctaacgaaggagggagaggagtaatgcacaagaaactcaggccaatgggggagcaagaagaaaacgaggaagtgcagtgcatgcgtcatcggtgtttaacagtcaggaaggcgaaacagttcagaacagggcctgccctgttcaaaaggaggagctnaaggacagttattttaaaaattagggtggggcttccggnttggcttaccncaccaactttcctggggtggt

SEQ ID NO: 313129 - DNA, 402 bp, Homo Sapiens
aagagacccaaaagccttcttctagggagcaccctggcagctctggatatgaaagagagaacccagcaaaaaaggatgtcactgggtcctcgagtctgggatcagggtacccaggctcagtgaatttttctgtctctgagcccctcagatgaattagcgagttcttcagggagggtctttttctccatggctggtactgtgtgactgggtggagacttatgtcccaggaaaaccgaaataactgctttttttgcaaatgctttcacatagctctttatctggtctgtggtttcagggaagggcccttctgcagtcaggaattgtccccagcctttatttagagggctaagctagggaaatggttctgaatgtaacatgtttctaactgtagtaatctatgcc

SEQ ID NO: 313130 - DNA, 1514 bp, Homo Sapiens
atctttgaaagttccttttaataaatgagattataaagcagttttcaaatacacaaagtgcttcaaaatgattcaataagccttaagcaatacattttttagtatatcacttttgttgttgttaaaaataccccattcaatggatggaagtatatttgatatcaccactgtttaaagggaatggagttacaggaatgagaagtatataattagtaaataatccctctcaacaagtgacttaagtagtcactcatagagagcaaaaaaagctggaggcaacacaatcagtgcatatcagaaatgcattttaatttttatttgaaaacaacttaaatttttagacaaatgattttagtatataaatttgcttttgtttttatacagaatataaagatttccctcattaatcttccatgtgaagggtattacaagcctggaggaagatactttctgcacacaagtatgtatcttatgtgtgcagtattggaaaccaatggtgtagtgctcctacacataaatggggtcaagtgacatcacaaattaaaagggggaaagagaaatattctagttaatcagatgcaagaagcaaacaagacgcaaaaactgtgcaaataagaccaagccagtaactttagttacgacactgcagattacactggaataacaggtttgtgaggctatagtgtgcaccacattaaaacagcaagaaagagctatttatatagaaaggctggaatgagggatttttactaaagcaaattaacttcttgtcaactgccaaaacaaaacaaaactgagcatatgagtgttagtatactgaaggcatgttataccagtttctgtgcagcatgctaaaagttagaacttcttcactggtgcttatcaatcattaatagtcacgtttttgccccttcttgccaaatttcaggcatgtcttattttagatggagtatagcttttatctattatttcatcttgtaaaaacatgtgaagacaacgttcgttctgtgccagaggatgaccagcgaccttgtttataaactgctccagcccttgttttctttcctcaataaaattgtcatcaaatattccatcatctcctctaaaaggaagctgacgcaaaaacgctttcccagggagcgggggaactacgaccttgctctctctttctaattcacttcgcagccattcaaagtcactgtatcttcttctaacagtagattctttcagcttgaaaataggaagatttgtcttgaccctgatttcgtaagtggtgaagaggccccggccgacccccaccgtttgcgggttgctcacatcgatctcgaggaagttgctggggggtccgtaggcgtcattcaggttctgcggcttggtgatcagccgccgggtgtcagccacggtctccgccatttcgctgtagctgctgcggccgcggggggctccttcggccccttcggcgttcagcggccgcggccgcggttgctgcccgcggtggggacacggggctggcg

SEQ ID NO: 313131 - DNA, 627 bp, Homo Sapiens
  misc_feature (284)..(293): n is a, c, g, or t
  misc_feature (422)..(458): n is a, c, g, or t
ggataaatgactgaaagtttcttttttatattgctgagtcagattggatccggttcattaagggccaaaatttgtatttggcagtaatcctcatgtgttctcagaatgcttgattggtcattatcagttgcttaatgcttaccaaacacttccagtgttttgagtcactgaattggctcatggtaattgttaatcttgtggttactgagtcaagagccagcagtgtgtgttttggctgcttcacttcctcctcaacacttgatattgtcagattttaaattaannnnnnnnnnctaatctggtgggtttgaaattgtatctatagtgttttttatcagcatttcctgaagctgggcatcttttcatgtattttcgttggtcatttgtgcttctgcgaagtgtatattcaatttcgttgcctnnnnnnnnnnnnnnnnnnnnnnnnnnnnnnnnnnnnnaagagttctttatatattctggatactaattatttgttaatttataggttgcaaatatcctttcccaatttgtgacttgtcttttcatctcttcatagtcttctggtgagaaaagctcctaattgtaatgaactgaatttttcagtctttcatggtttgtgttttgtgt

SEQ ID NO: 313132 - DNA, 1139 bp, Homo Sapiens
  misc_feature (488)..(488): n is a, c, g, or t
caccagaactgactttattaaaaaaatgacaaaacaggtctatacatatttacaggctgggagcaggaggccaggtccgacagcaggggccaggctgctcacttcttggagagcttgacttgcttgtgcttggggggtgcccacttgaggcagacggatccactgtgatgggtggtttcttatactgggcacttttgaggtgctcctccaccagcttgggtgtgacacagatcacgtgctggcccttccagtacttgaccatattgagggattgcagggtactgatgatgtcattttgggtgatactggtcatctggctgaggtccttgatggacagtgtgccccggaagtcccgcagggtctctagcagctacaccaggaccagtagctgcggtagctgagcttgcccaggtcagacagtggcttctccggggagccgactgtgctctccagcttggagagctcataactgaaacgcgatgaggaancttcccgtagccgcggcgttggtaggggggcaaggtcaggatgcaggccacattgtttccatccggggactccttctccttggagaagtagccaacaatgtgggccccctgccggtccacctcagtcaggatgtaaaagacgaacggctccacgtcaaagtacagtgtcttatggtccaggaaaagcttggccagcagacacaggttctgacagtaaatcttatggtctttgccatcaacttcgtacacggagatgttgctcttgcggtagatctctttcccggggggctgccgccactggcactgacccaagtggaagcggtagctcttctcatatttcatgtacttgaggcagtactcgcagagccagagcttgggctgtttcccatagtcttcggggaatggtgagaaataccaggcatcaatttcgtagttcccgatgtggatcttgtccacatacttcaccttggtgatcgcctcatgctccttctccaaggctgctgtggtggggtccatctctgcataagtcttctgcacatggttgatctcatcatgcttgcgcttttggttgcgagtgatcttgcgctcaggctgctctgcgagctcgctcaggtacttctctgagttcttctgtacagcatccttcactgt

SEQ ID NO: 313133 - DNA, 1184 bp, Homo Sapiens
  misc_feature (900)..(910): n is a, c, g, or t
ggggtggggaaggatcgcaggcgagattacgaggcgaggctcgcgcgcccgcccccgccctggcccccagtgcccacccggtcggcccggcacagccatgatcaaggcgatcctaatcttcaacaaccacgggaagccgcggctctccaagttctaccagccctacagtgaagatacacaacagcaaatcatcagggagactttccatttggtatctaagagagatgaaaatgtttgtaatttcctagaaggaggattattaattggaggatctgacaacaaactgatttatagacattatgcaacgttatattttgtcttctgtgtggattcttcagaaagtgaacttggcattttagatctaattcaagtatttgtggaaacattagacaaatgttttgaaaatgtctgtgagctggatttgattttccatgtagacaaggttcacaatattcttgcagaaatggtgatggggggaatggtattggagacaaatatgaatgagattgttacacaaattgatgcacaaaataagctggaaaaatctgaggctggcttagcaggagctccagcccgtgctgtatcagctgtaaagaatatgaatcttcctgagatcccaagaaatattaacattggtgacatcagtataaaagtgccaaacctgcccctctttttaataaaaatgtaaaaaggccactccccaggtaaaatccagggggaaagagtcatcttagtttaccatgcagttgttttaccaaaaaatagaggaggagagtcttaacttttgctcttggatttaagtcaaggtactgtatagaagttgtgtaaaatcagtatgaaagttcaatgttgctgttcttgctcagtgattttaaagaaattgagtagttcctatgtgannnnnnnnnnncttttctaaactgcattcctgtgcccacctacggcatgcctctatgtattggctactacagtgttttaaaaagtgtttcagatatttctctaattatgtacaacctaaaatgttggtgttttgtatggatcacaagtgcagcattccttaattccttctgctatatgtcacacagttgttatttggagaaccaagtatgtattgcatgaaaacattatgacttttttctcttagtttaaataaactccaaggtatgctggccttctaaagctca

SEQ ID NO: 313134 - DNA, 471 bp, Homo Sapiens
  misc_feature (425)..(425): n is a, c, g, or t
agagggaacagggaagaaacctaaaggctgcaggctgccaggtgtgcttggagagcccccttcttccgccgggcctcgcaagcagcgtaggactgtggagaagggcggtgggcaatgagggaactcgagagcagcctccatgggcacacaggagggctggtgcctgctgctctgcctggctctatctggagcagcagaaaccaagccccacccagcagaggggcagtggcgggcagtggacgtggtcctagactgtttccttgtgaaggacggtgcgcaccgtggagctctcgccagcagtgaggacagggcaagggcctcccttgtgctgaagcaggtgccagtgctggacgatggctccctggaggacttcaccgatttccaagggggcacactggcccaagatgacccacctattatctttnaggcctcagtggacctggtccagattccccaggccgaggccttgct

SEQ ID NO: 313135 - DNA, 858 bp, Homo Sapiens
  misc_feature (290)..(395): n is a, c, g, or t
actctatgcatatggaagtttttgtgttataaataaggatataaatgccttagttaaattattattgaaatgagcatgttgaaatccagctttttaattgaaatcattagtatgttaatgtaagtgtttggacctgtctttaggggcactaagaccttgaaatggccctgaaattttattgggtcagggacctcctcagcagccgccacagcagcatagagtactccagcaactacagcagggagattggagattacagcaactccatttacagcatcgtcatcctcacnnnnnnnnnnnnnnnnnnnnnnnnnnnnnnnnnnnnnnnnnnnnnnnnnnnnnnnnnnnnnnnnnnnnnnnnnnnnnnnnnnnnnnnnnnnnnnnnnnnnnnnnnntacttcaagatgcttatatgcagcagtatcaacatgcaacacagcagcaacagatgcttcaacaacaatttttaatgcattcggtatatcaaccacaaccttctgcatcacagtatcctacaatgatgccgcagtatcagcaggctttctttcaacagcagatgctagctcaacatcagccgtctcaacaacaggcatcacctgaatatcttacctccccttcaagagttctcaccaggccttagtttcctacactttcatcacttccagctcaggttggggaaccataatgggactcctcctataggtgccaataggtcagttgctgataaagaggccattgcaaatttcacaaatcagaagaacatcagcaatccacctgatatgtcagggtggaatccttttggagaggataatttctctaagttaacagaagaggaactattggacagagaatttgacc

SEQ ID NO: 313136 - DNA, 965 bp, Homo Sapiens
aaggtagcgaggcctgggtggcgaattcggcacgaggggctggtgcagagttccaagcccacggccccggtcgcggcctcgccgccctcccgcgccccgcgccgggagcgggcctagagcgctcgcctcgcccctccgcgagcagggctctggcgcccgcccctgtccgcaccgctggcagcctgaagagagtcgctggccgtggtcgccgctaggtaggatatatctgcatcttgaaaggaagataaaacaaaagccttctttggaatagatggatttttgtcactttctgtgtgaactaaagtgattcaatgtctcttttggattgcttctgcacttcaagaacacaagttgaatcactcagacctgaaaaacagtctgaaaccagtatccatcaatacttggttgatgagccaaccctttcctggtcacgtccatccactagagccagtgaagtactatgttccaccaacgtttctcactatgagctccaagtagaaataggaagaggatttgacaacttgacttctgtccatcttgcacggcatactcccacgggaacactggtaactataaaaattacaaatctggaaaactgcaatgaagaacgcctgaaagctttacagaaagccgtgattctatcccactttttccggcatcccaatattacaacttattggacagttttcactgttggcagctggctttgggttatttctccatttatggcctatggttcagcaagtcaactcttgaggacctatttttcctgaaggaatgagtgaaactttaataagaaactttctcttttggagccgtggagagggtttgaacctattctgcccccaaatggggtggttttcccccgggagtatttataagcccgcccataatcccttcaatttcctggggggatgggccctaattgagaccctctctccgtgggccctttttcccaattttga

SEQ ID NO: 313137 - DNA, 1101 bp, Homo Sapiens
caagtataattctgggtatttgtacctagaaatacagaagaaaaagcagcaaggagaaagtgtcaagtatataggacataaaatgatttggcagccctagaattcccagtatgagtctttttcatcaggaaaatcacattctggctcaagtccaaggtaacactggaggcaatgatattgatggcttgttataagcaggaggcaacagtgaaagtattgaatcctggctttcttctttcatctgtttgaagaaaacatgggacaataaactgcttgctgatggccttttctcaggatcttgttgcaaacagagctgtaccaagctaaagaaggcaggagagaaagtttttgaggatggtgtgtgtaatcggtcactatttactgtgtgagttccactggagacaagcacactttctccaatcccagagtctacacctgactgggaatttttcattctggattctgattgagggaaaatactgatatccaatgggctataaggaggacctttcagtttctgtaacagcatctgagttctatgcatgtcctggaaagcacctgcccactggctaattcacatgctgtaatcccaacactgtaaatatctgacttcacattatacccatgtaaatcctgtctcagtagttctggactcaccacggccgcactgatgtgctgaactgtgggaaatcatacacagccctatgcctctgtccatgcttaaccaactatgcagatgggacaggcccagagagggtccactaggcccatcacccagaaatgaggatatggctggctttaatactcctgtgaatacagcccattttggtgcagatagttcaaccctctcacggctccaaagagaatgtttcttattaaagtttcactcattccttcaggaaaataggtcctcaagagttgacttgctgaaccataggccataaatggagaaataacccaaagccagctgccaacagtgaaaactgtccaataagttgtaatattgggatgccggaaaaagtgggatagaatcacggctttctgtaaagctttcaggcgttcttcattgcagttttccagatttgtaatttttctcgtgcc

SEQ ID NO: 313138 - DNA, 1734 bp, Homo Sapiens
  misc_feature (1301)..(1318): n is a, c, g, or t
ttggcggcagagagaaggatttattcttgcacccagggtgtgcggaggagcccaagggcatttggacctgtgttgacgtccggaagggcccggaacccaggaagctctgcccgcagagggtattcctctccctctgaagaccacctcaaagctcaactttatcacctccacgcatgagaccgccggcggctgaactaaaatctcaccatcccaattccagtttctgggaattgtcacctccattcgctctcattagaaatccagcttttttcacgaggtgaataacagggcagttgacagttcccaagttttctgtgtccaatcttcagccctggagggactcttctgctccaagtccagcgatcccgggagggggcccactggtccagtacggctcagtacccagccctggatccaccagctgacgctggaaggagtgggtcatgaagaactcagcacgaacgcagctgggtacgaattcccagagatgtcctgtccctccacggtaccaaggacccctcctttaagaaactgcttcactgaaggcgcagatggagggagggatcggcaacagagttcagaggggttccgggggcacatggctcagccggaggaagcaggctgaggaggggcgttcagaatggccagatgacctcgaggggaatgccaagcctcagcccactttgcctgtggctcctgaggatgttcatgctgtcaagctcagaacagctgagaaactacctttctggggcagattaggggaccagggggcttagttgctggtttgctgtgtgacctatgacaaactctgggcagtttgtctgtgaaatggggactctagtgtgatcggagacacaagtgaatgagaactcactttgaaatgtctaaagcccagtgcctaaggccttccttggcaagacagagagtccctggtgggcactgtccgatggcattagggcagttatttgggccaaccaagcctacaggcccgcagcaccccctatggtgttgggcagtgcctgcctagctctactcttagccacagggtcccctgggaaagtgccaggtggtctcatccaccaagagccatattggcaacattgtgccaacatgggcatttcaggcctgtgtcagggaggggacaaggagtggtttctgccagggaggcctcagactgcagttgcctatgacaggctccaggcttcaggcctcatagaaaccctggccttgggggctgaaggccagccaaacgggccctccctctttccaagttcttgcccagccgcggttgcctaaggccnnnnnnnnnnnnnnnnnngagacagagtcttactctcacccaagcttgaaggccatgggtgccaacttgacttaatgtgaccttccaacttctggggttaaagagattcttctggcctagcccaactgggaccccgattccggagaaaactggtaaaggccgagaacattaagccctgccccgggggccctggggcccatgtaattctcacataaatccgtgtcataaggaccggccgcgttttcattttacagaaggttggggaggtttatggaaggagggctttgttatgcctccccaaattgggagtgggggaaaaagaaaagtaaaaaatttcggtttttccgggccatttcccttccaaccttgggtcccggggcccgggggcccaaaaggggctttttttcctttggcccccaaaacccacaccctcc

SEQ ID NO: 313139 - DNA, 534 bp, Homo Sapiens
acgggaccgggaccggtaccgcgaaggagaccggtagtatctcctggtgaacccgtagcgcctctctcggtaacggcggctgcgggatcgcgaccggctccgcgagtatgaccgcgagtagcgcctgtacttccgctggtggcgccttcgggaacgggacctggacttgctcctccgactcctggacgaaaaccggctcgagacgcgggaatgggaccgagagcttctggaaaaagagcggctcctagaccgcgacgacagccggctggacccgcccgaccgcgaggtcgagggcgaatccttctcctgcggcgagcccggccacatgtcgttcacgtagttggacatcttcacctgcggctttagcctgcgctttctccggaaaggatcccgcaagcctcaactcaggacttccgcacgccgtcgacgcctccctcacgactgagagaaaggctcaacagacgccttcctttcggaacgtaagacgaagtggggcttttagtccctgctttcgaacggcgaattccacaacct

SEQ ID NO: 313140 - DNA, 559 bp, Homo Sapiens
acgggagtcttggctctgtcaacccaggctggagtgaaaagtacagtgcaatttgctaatgcacatcctgcacatttctggagaattataataaacttatctgcaagtgaagcaggcctcctcttctgtaatctctcaaaacatttcaggctttgcaccattacttgatacacctattccacggcttgtttctttggctgaaggaacagttctgagactagctggcaagtcaatgttggttgttcctagagctttcgctgcattggtttttgctatttctaacagctccattcgatctttttcacttaagcgaaagggggtttctctccgcgagtatgaccgcgagtagcgcctgtaacttccgctggtggacgcttcgggaacgggacctggacttgctcctcgcactcctggacgaaaaccggctcgagacgcgggaatgggaccgagagcttctggaaaaagagcggctcctagaccgcgacgacagccggctggacccgccgcaccgcgaggtcgagggcgaatccttctcccacgccgagccctatgcagtctc

SEQ ID NO: 313141 - DNA, 616 bp, Homo Sapiens
  misc_feature (47)..(47): n is a, c, g, or t
  misc_feature (62)..(62): n is a, c, g, or t
  misc_feature (71)..(71): n is a, c, g, or t
  misc_feature (73)..(73): n is a, c, g, or t
agaaaaggaattgacaaggatgatgatacgaggcacttcaggaaagnaagatctgcatgtcnaaagacagngnaaactgatgaagtgctcaaatacttttgcaaaaatgactgtatctgtaatattattcccaaaactaactgtgaaataatcagatactatcaaagaatttttctgaaggattatatcccctaaagcaacattttattcatttttcatttattctaaattttagaacaccgttgtatttacaatatgaagattcatttctccagataaggtcctaattcatttgtaaattttgaccatgaaattatactccctgtcttaagtagttccctctgtatgttatcagcctccttagtgcaacttgctcatagttgattatccaaggctgtattgaatgtttcctaacatcttaaagaatgactctctagcaagcccaaggccttctacaatctggaaggcttatctaaatgttctgctttgatcaatcttcccttggctcaattgtccttgagtcttggatcactgtgaagcctctgaccttgatctcttcaacccttatgaggagagatgctaatttcatatgctgtcatgcaggaagacttttctt

SEQ ID NO: 313142 - DNA, 1025 bp, Homo Sapiens
ttctgttaattccacgtttattaatcacacagctctctgcagactagacactaaaacacacaattgtcaaaaactagaaaaatgagttatgtccacgttttaaaagcaaaactttataaatttcttaccacactcattcccaagttttatcccacaaagtatagcatgaaacaatgacaacatacatattattcaagtaaaatgctatttaaaatagctgcacacaggtaattaaaacactaggatccagtttttagaggaaaaagtcatgtggcacaatttcacagttcataattgaagttaccagtaaaccagatttgctcacctttgctttctgatctttatttctgctgtctctctttagtagaataagagaaatggcacttcacataaaatcatatttaaaagctactaaaatggataaacagatgcagatcagctctttaatgagaatccctgcatagctggaggaagttcaaggataattgttttttcaaaggcaaatagactcttgttacgtggctaatttcatgtacattatcatcgctgggaagttcctgctgagaactcacggtagctatgccagaaaagtactttcttcacaggaggtgttgaaataatgccggataaatgcaagtaaggtcaatatctccctcttggtctagatcaggagctggcaaactttttctttaaggagacaagtagtaaatcttttaggctttgcaggctatactgtccctgtcccaactattcaactctgccaagaaagcagtcccagacaataccataaatgaatgggtgtggctatgctctaataacattttgtttatggacactgaaatctgaatttcatagaattttcaggtgtcatgaaatattgttcttcttttgattttctgcccaatcatttgaaaacatataaaccattcttagctcacaggttgtataaaaacaggtggcaggccaggtttgattcgtgggccatagtttgccaacccctgatctaatggtccttttctagtccc

SEQ ID NO: 313143 - DNA, 971 bp, Homo Sapiens
  misc_feature (95)..(95): n is a, c, g, or t
  misc_feature (171)..(172): n is a, c, g, or t
  misc_feature (202)..(268): n is a, c, g, or t
gtgtggggggaggaccacagaccccttggttacttggggccggggattttcttatggaaaacacggttaatgcgccccgtttcccctttccctcngggggcccgcccgccccaaaaaaaaggttttgaaaaagttttttgaggggccgggggggcgcgccaatttttgggnntttaattgtgatgggtggattcgcgcggtnnnnnnnnnnnnnnnnnnnnnnnnnnnnnnnnnnnnnnnnnnnnnnnnnnnnnnnnnnnnnnnnnnntggtttggcatatatatatattttaattgattaaatcttactaatattctgtaagggataaaccagacaagtaggctacagagaagaaatcttattttggagagttaagaaaccactatgatgcttccaggtattatcttcagtgatgcttcttatctttattcagggactccaggtaatattcagctcctacagctaccacaaatgcagcaaatccccatttgaatcctttaaagaatacatcagaaaaggaaacactctttgcaaagccacccatgtatctccaagcttcattgcggccccatggatcccttagcccttttgcagccagcttcttctggatagtttctaatggtgtcccttctatcttccattgtctataatctggaagttccattttatgatgtccatgctcatgtccatgttcatgggccatgtctgacagcaatctgacctctcaggacactcaactctgcaaccggagccaaccggaaacggaggttggtcacctcgagtttctcacggcaggaaagcggagaagccgcttaacgttccgatactgggttagagattcctgaatcaggtagagactacatgagggacgctggaagtcgattattttcccagtatatgtgcatcctcaatctgactgaggtaacagatactgtagaaaagagaagggcggggaagataatatgttgtc

SEQ ID NO: 313144 - DNA, 915 bp, Homo Sapiens
gaattcacctttttggcattttatttgatttctcaaggtaaagaacttattttgtaataaagtttcctattatttagtagataggccaagttgctgtgttaattccatgtagattttgggtttcctttgctcattttttcactcttaatctcacatcattgtaagtttatgaagttatcatacttctgactttttctttgaagagcagaaattagaaattccaataattattttgatagtgtcatttaatgacactcacatgtggtgtagccacaaagatttaatgagttcagttttaaatcatattaagactgttggtttcatttcttctcattaatgtaattctgaagatgaacaataaaatgtatttttagaactttcaaacgaaatattatttcatccttccagatcatataatgcttaagttctggattgttaatcttaaagtctagaaaattaaaagataataaaatgaaagtgacttttaggtattagagttttattataaattctggtgtgtcattggagctatgacatgaatatttcaaaggccaatagcattggatctttacagttataacttaccatttttaagtttaagtagtaatatagattatttaataatcaaaatcaataaatattaattattaaaatgttttgtggtatagtttgagaatcattgcttttaactttttccatataggtttattgactttaatagcattctaaacataacatctctacattctttgtgtttaatactgtggaggtataaaaatacttatatatgatgataaactatattagagtaaattaaatattcttatgagtttcattttagagtgcatttacttaattttgaagtccttatttttagcaaactaaaaggaatgttggtacattatttactaggca

SEQ ID NO: 313145 - DNA, 714 bp, Homo Sapiens
cccggggctatctgtacacccacgttcataacagcatgattcacaatggctaaaacatgaagcaatacaagtgtccatggacagaggaatggaaaagcaaaatgtggcctatccatacaatggaatagtatttggcctgaaacattaggaagttctaacataggctacagcatgcatgagctttggggacattatgctaagtaaaacaaatactgtgtgactcctaaagtatatgagaacccaaagtagtcaaattcagaagacagaaagaagaatcgtggttgccagggacttggcgggaaaggaggaatagagttcaatgggaacagagcttcagtgttacatgatcaaaaggttacagagatgggtggtagcaatgattccatgacattatttaaatgtatttaataccagcgaactgtatacgcaaaaaatggttaagaacataaattttatgttacacatatttaaccacagtttttaaaactgaaaataaaatggagtataaaactcaacatggacttgtagcaaacattattagactatccatgagggttttttgtccactaacttagagatgagaagtgcttaaacctatgccgctatcaaatgggaaatgttgtaaaagttttttgaaaagtcaaaagttctttaataatgcacagtattaatcacatttcattagaccacagatctgtttataataggctcctt

SEQ ID NO: 313146 - DNA, 1735 bp, Homo Sapiens
  misc_feature (920)..(974): n is a, c, g, or t
  misc_feature (1704)..(1704): n is a, c, g, or t
cgcagaaggaaacaaagcaaaattagaaaaactgtttggctttcttttggaatacgttggcgatttggctacagatgacccaccagacctcacagtcattgataagttggttgtgcacttatatcatctttgccagatgtttcctgaatctgcaagtgacgctatcaaatttgtttctccgagatgcgatgcatgagatggaagaaatgattgagaccaaaggccgggcggcattgccagggttggacgtgctcatttatttgaaaatcactgggctgctatttccaacttccgacttctggcacccagtggtgacccctgcccttgtgtgcctcagtcagctgctcaccaagtgccccatcctgtccctccaggacgtggtgaagggcctgttcgtgtgctgcctgttcctggagtatgtggctttgtcccagaggtttatacctgagcttattaattttcttcttgggattctttacatagcaactccaaacaaagcaagccaaggttccactctggtgcaccctttcagagcgcttgggaagaactcggaactgctcgtggtgtctgctagagaggatgtggccacgtggcagcagagcagcctctccctccgctgggcgagtagactgagggccccaacttcgacagaggccaatcacatccgactgtcctgcctggctgtgggcctggccctgctgaagcgctgcgtgctcatgtacgggtccctgccatccttccacgccatcatggggcctctccgagccctcctcacggatcacctggcggactgcagccaaccgcaggagctccaggagctgtgtcagagcacactgaccgaaatggaaagccagaagcagctctgccggccgctgacctgtgagaagagcaagccgtgtcccactgaagcttttcacacnnnnnnnnnnnnnnnnnnnnnnnnnnnnnnnnnnnnnnnnnnnnnnnnnnnnnnnttataggtgtgagccacagcgcccaggcaaaaaagtaattttttttagagtaataatgctataatgttggtgtgattccaacctccagctcccccccaccgctgcctgcggttttgtttctgttaaaacgtcacctgatgaaatagaatgaatcctgaaatgcacctctgggatcgggaatggtctgtgtgttatcagctgcgactggttcactgcgtctggacaagcctcatggggactggggattctggccagtgtaatttctgtcaaccacggacgtttgccttcatgtgtagaatttactgttgttatgcaaattatattttcaattataaatgaaacaagtttgcagatattttagaaatcagagaagggaaacatcacccatagtccctctgctggaacagccacagttggccttgtcctacttacgtccttcagtggatgcttctgggtgctggggttctccattcaggacactgcactctcggaggtgggaggagactgggttgcgtctgtgccgacctgggatgcagtttcaggtcagaatcagaagatgtgcaagttacgcatgacacagctttttaaagtgcttttcccctgcactaatcaagagggaggtcagccctcagggtgtgctggaccccgggaggatcttgtgagctgtaagaagtaacgagccccttggaacttcacaagctggccagggagccattatcccgaatgccantgccatttcctcgtggtgcaaggtttttggg

SEQ ID NO: 313147 - DNA, 1583 bp, Homo Sapiens
  misc_feature (38)..(38): n is a, c, g, or t
  misc_feature (167)..(167): n is a, c, g, or t
  misc_feature (301)..(301): n is a, c, g, or t
  misc_feature (1024)..(1107): n is a, c, g, or t
  misc_feature (1568)..(1568): n is a, c, g, or t
gggtgggggtcggtgtgtgtgggacctagggtgctgtnggctcagtcatgcagggggtcgacgtacagatcgtcattgttttagtgcgttgtggcgcttgtttgtatgagttggtcggctgttgtgaagaacgtgtggacattgcgtttctcccttgtcacgggcgntggaccactcggcggtcacggtggtcttggactctgggaggagttaggtcgtcatgatgtgtgttgtgggctgtagccggccgcagggtgtgtaccgtgcgatacatagtcgggacagaccgggcgggtgaacnctctaaagtgtgggggcgcacacgggggtggtggggaacgcgtgggtgagcgccacgcgtgatgtgcagtgtagaggggtacgggcagagagcgcggtgaggcgggttggcggggatagtagtacccggtggtgggggatctcagactgcgattgcgtgcggtgggggtgtctgcgtgtgggcgtggtcggctatcgtgtgtggcgtggactgtgctggtcacggctgtcacgaggcggacgacaagcggggcctgggccgtgcttgcgtctggtagcatgtggggacgctctagggacgcgggtgcgggcggtgtctgaataggtggttgtctgagggggtggggcagcgcgcgggtgggagctggttgacgggcgggcgtatctctctagggtcgagaagcggcggtcagggaggggtatttctgcctagtcttgccgtagtttcaggtcggggcctaggggggggcaggcttgggaagggacgcctgggtggggggcggcgcggggtgcgtgtgtacggttgcgatttggctttttgtgagatgtgtgttgggtgcagtcctgcggccgcagcgcgcaccgcgggcttgcggttgctgcggtgggcactcggggcggttgtagtcgtttagcgctcccggggagtggtgggacccgggcacgtgacggccgcgtgggagggggcgttgggggccgtggggacacccaaggtttgcggggnnnnnnnnnnnnnnnnnnnnnnnnnnnnnnnnnnnnnnnnnnnnnnnnnnnnnnnnnnnnnnnnnnnnnnnnnnnnnnnnnnnngtaatgtccagttccttgccttatttataaaatgtaatttattttttgaactttttcctcttcagagccttccattcgccttcctgtgtagccaggctgttaaaaagctgctttactttccgctttctttccgcatcccgttccatgatttctgagagttgcatcctcgccaggaactgattgtccttgcggatttctcgaacggcccctttaaattcacgcttgtgtttgtggatcagcctcttcctttcctgttcctccttactactgccttgttttcttccaaactcgaggactttgaccagccggggtgtgaaaagcttcagtgggacaggcttgctcttctcacaggtcagcggccggcagagctgcttctggctttccatttcggtcagtgtgctctgacacagctcctggagctcctgcgggtggctgcagtccgccaggtgatccgtgagagnggctcggagaggccc

SEQ ID NO: 313148 - DNA, 326 bp, Homo Sapiens
  misc_feature (45)..(45): n is a, c, g, or t
aaagaatttgccttcaagccccaggaagttcgaagacccaacccngggcaaacaacagggaaacccccgtcctctgatgaaaatagaaatgaatcctgaaatgcacctctgggatcgggaatggtctgtgtgttatcagctgcgactggttcactgcgtctggacaagcctcatggggactggggattctggccagtgtaatttctgtcaaccacggacgtttgccttcatgtgtagaatttagtccttcagtggatgcttctgggtgctggggttctccattcaggacactgcactctcggaggtgggaggagactgggttgcgt

SEQ ID NO: 313149 - DNA, 722 bp, Homo Sapiens
aagagaagagggagagacaagctcaacgagaagatgccctcgagctcacggagaagctagaccaagactggaaagaaattcagactctcctgtcccacaaaactcccaagtcagagaacagagacaaaaaggaaaaacccaagcccgatgcatatgacatgatggttcgcgagcttggctttgaaatgaaggcgcagccctctaacaggatgaagacggaggcagaattggcaaaaggaagagcaggagcacctcaggaagctggaggttgagagacttcgaagaatgcttggaaaggatgaggatgaaaatgttaagaaaccaaaacatatgtcagcagatgatctgaatgatggcttcgtgctagataaagatgacaggcgtttgctttcctacaaagatggaaagatgaatgtcgaggaagatgtccaggaagagcaaagtaaggaagccagtgaccctgagagcaacgaggaagaaggtgacagttcaggcggggaggacacagaggagagcgacagcccagatagccacttggacctggaatccaacgtggagagtgaggaagaaaacgagaagccagcaaaagagcagaggcagactcctgggaaagggttgataagcggcaaggaaagagctggaaaagctaccagagacgagctgccctacacgttcgcagcccctgaatcctatgaggaactgagatctctgttgttaggaaa

SEQ ID NO: 313150 - DNA, 590 bp, Homo Sapiens
gctagatttctttttaaatggatcctaccccactgctgcacattaccagagttgaacagttagcccagttgagaagctatttcagaatctgtgaagctttgagttgtacatggtgagtgtgagactgcataggccttctaaagacactgaaagcaccttctactagctcaccctggtacagtgttctctctccactttaacaccccacagttgtagtgtccctggcaatcttaccagtttccacgagttctatgggttctgcttccaaggagatctcgggggtggaggttgcttcccgagttcgcttctgagcttgtctagaatttattgctccaccacgacgctttctctgagtagcaagggggaaagaagagtcacatgaacaccagaatgtcagggtttcaggaagaactaaatgggcaatagaaatggttcacttcattaagaagccagcgagtagacttgaagttagggctcctttcaaaacttgagattcaagaatactgaatgcttacggagagagaaaccatccaaaacataaaatgagtagaaattccagaaagtaaaacttctgttttatcaaactatca

SEQ ID NO: 313151 - DNA, 1190 bp, Homo Sapiens
ggtgggcccccgccagaggttctttttgattgtggggaaaaagccttggccagtttcaatgaataagggtgcagggccgaatccccgggggggaccttcggctcttccaaggggaaagaaatccccagggattgggttttttccaaggccccccaaggggccccctctttcaaacctgggattcctcggggctgggtgaaaccgggttcgtgccttgggtcaatgttgtggcaggcaggattggttcgaccggccaagaccacttgggaaaaaagggtggtggtgcccggggaaagcggggggcaaacttttccaaaccagggaaaatttcttgggcaaatgtgcagattctgcaaccagactggaaaccacgattcccaatgcgcctgactccttttctcccactctagaactggaccaccccagaggaacagagatggcctgggagggccctgggtccagcgccatagcatcaaactggagataacaaaaggaaggggttggaaacaaaagagcagtttacatatcagatgttggtttcgaaacagtctttttgatctcaggaaaatggaggcagataccactggagaacctggctgtctgtctgtccatccgtctctcctggggggctctgaatacttcatatataaatggggtggtaccgtttgtggttgatctttttcctacaagttgggcaagtattagcattcttcagggaatcacggaggcactggctacagaagacatggccgcattctgtggaaacgatgagacgtccattctgcacgatctctgagtatccgtccatgcagatgggacaactgacagtacctgagggcctgaggcctgtagcgccctcatccctggcgtttctgggagtatgggtagtcacatatacgtctctgtccctggacaactcctcatcgtcactgctcaccacacagctgtcagcatggctcctggggcagccctcctagcattcctccttggtcttcttctttcgtcaacaatcacaacagagtcattgtgagtcagatcaaccaccacagtctctaaagattcacaagtgaggtccacaatttcatctccagcagtttccacgagttctatgggttctgcttctaaggagatctcgggggtggaggttgcttcccgagttcgcttctgagcttgtctagaatttattgctc

SEQ ID NO: 313152 - DNA, 597 bp, Homo Sapiens
cgagatctgctgcattcagagcattgtgttaggaatattggaagtaaagcattgtaatagctcttgccttcagtaagcttgcagtctggcagttggattaaaaaaatgaccatacgaagccgtgataacagcctctaggagggaactctactatgtggtggagatatgtgtccccctgcaaataccaagaaagacagttaattagtgtccattacagaatgttcttctggtgtcctttttaaagagattcagtcagtctttaaagatgatgctattgctgctactgctaataataatagtgatagctaccacttactgtttactatgtaccttgtgctaaacacttgacataagttaactcgtttaatcttaaaccaaggaagtagataatgattctcattttacagatgaagaaactgaatagacagagatgaagaaatgtgcctaaggttacgcgatttagtgaactgggatcagaacctgggttctctggccttagactataaaccatagataggaattgagcacatttattaatcagcattgcaaggctggtggaattttgataaacacccaaaccagattcttttctgcact

SEQ ID NO: 313153 - DNA, 459 bp, Homo Sapiens
  misc_feature (180)..(196): n is a, c, g, or t
agtccatagcttgtcttttaatgtttgtgtctttacatggttttatattttaaagtagtaaaagttatgatatttatcattatgttttaaaaaacattgattagaaaaggtcttcattatacttgtaaaagtattttagagtaataataataacacttggccgggcctggtggctcacgnnnnnnnnnnnnnnnnngaagaagtcagatatagaatcatgtctatagagcaatcataactgtatttttaacaatagaattttcagttcaaagggtacatgcatttaaaactttgatattgctaaatcactgccaaaaagattgtatcaatttacctttctgtcaacagtatgtaacaaactttctttgtgatgcctttgctaatactggttgttgtcagtatttttaatatttgctaaactgcaatttgaaaaatggtttcttttctcgattatggatg

SEQ ID NO: 313154 - DNA, 550 bp, Homo Sapiens
cccaaagtgttgggattacagggtgaaccactacacccggcctattagaattttcaacagcatgtaagatcaagttttctagaaagagttataaacttagtatttcttatctgtcagatatttgaagtaatctatgtagtagtcagccaaattatttctctgccaacaaaaggttaccccattttccctaagcaataatgtctaccgtctgttactatcattatggtacagctgatttgggatgctatcaatcagccaggttattagcaaccaggtcagtttggttttcttatattttctactttgtctatctagattaggatggctttaaatcagggtttttatttcttggtcagtgaatcaaatattgggttattggctttatgctactttaggaccaaaaatatctataccaccgcgcctggccaaaagaatgttcttgagctttatattttgacccaaattaggcaatagttaccttaaagaaaaatgatacagtcaaaatcattttggctttaataaagctcctcaaaaaccctagaattagggc

SEQ ID NO: 313155 - DNA, 588 bp, Homo Sapiens
tgtagagacagggtctcacttggccaggttgtctcaaactcctgggctgaagcgatccttccaaagtgctgaaattacaggcgtgacaccacacccagcccaactcccctatttataaaataaagatgaaatttgtattataagttttggcaaggaagatggaatgcagactgcttagcacagggcaggcccataatcaatagagtgtaactagtattactgcaaagttaattgtaagagtagaccttgctaataacttgcctataagttccacaatactcccactacggcttcggccaccagactcctccttagcagcggtgagctgccaatgcccccgactgcggtcagggtttgcagaagctcgggtggaggcgttctgaagagctgctgcaacagctccagggctccggtcacaacattgtggtcttggtgctgtgtatgatgtaacgtcagttcataaacctagaaacagagaaacacaggtgttctggtcagagtttataaaatgcatcctaagcttcacttttttgttgtttttaataggacttcattgacaaagtttataccttaacttctccccctaaa

SEQ ID NO: 313156 - DNA, 663 bp, Homo Sapiens
  misc_feature (556)..(599): n is a, c, g, or t
aaaccacagtcagtaagagggcccctagttaccatttatctttggaaagtcagtttagacgtgcggttgccgtaattgcagggttgcacaccaaaaatgaacgccttcctatgaatgagttcttgtaatatggggcatttaggaggtctaagaacaatcgtctgacagcagcatttaaacgcaaataaatcaaaacttcattttccccaaattagtcatatattgtaaatattctcttttcaaaggatctgataactagttaagtccaagcaatagattaactagtctgctgtgctgcctgcatagaaatgccacttaaattacaaaaaaaactataaatgattaattgttttgtatattaccaatttattaataaattaacgttataccattttccctgaaagcaaaagtatttttccacctctgctcggtgaaaattaagaaattatgtgtaagaacagcatttagcaaatagctattaaaaaaagagagaccaattttctaggtgcattgggacatccatttaaaatcaatacaaaaaataactccttgtaannnnnnnnnnnnnnnnnnnnnnnnnnnnnnnnnnnnnnnnnnnnatccagcacctatatactgcatttgtgctctgtaagtgtgtgctgacataaatcttctccaatt

SEQ ID NO: 313157 - DNA, 435 bp, Homo Sapiens
aggtaattaaatttttttattgttgaaccaaaaaaagatccaatgacaaatccatataaatgtgataccatttacaatttttaataaccataaaagcaccattatataagacacttaaaataatttttcacagaacattagaaagaagctgttggccaacaagaaatagagcatacgtcctctgtggtcttgtctatcatgatctcacattaaatctgattccaacctgttggaaattaatttggattcataaattcagcatcagtataagaagacattccagagttgtgaggacttgattgtcttaatgccacataaaacatcaactgctcattttgtaatgagcatggcttttatatatccctgtatgacctatatcctggggtgcctaatttcttgcactcccaaacatttgagctgccgactaattacaca

SEQ ID NO: 313158 - DNA, 923 bp, Homo Sapiens
  misc_feature (173)..(201): n is a, c, g, or t
  misc_feature (204)..(242): n is a, c, g, or t
  misc_feature (356)..(365): n is a, c, g, or t
aatgggtggaggaaatccccaagcccctttgttcaatggcccaggggattttcctatgggaaaacaaggtatgggccaagttttcactttaccctattggggcccgcgggggccaaaacgaaatggttcttgaaaaagttttttgaagggcccgaggcggcccgaacatattnnnnnnnnnnnnnnnnnnnnnnnnnnnnnggnnnnnnnnnnnnnnnnnnnnnnnnnnnnnnnnnnnnnnnttagcacaaacacatttatttattaaccaaagggatgatcctaattaatccaacacactttgaaatagctgcatgtaaaatgtttatgataaagataattgaacacagtaatgnnnnnnnnnngaaagaaacagtatggagatttgctcattgaactgagcttggtcattctcttaattaactcctgtccaaagtgatgatggaatttttattctactttttcatagatccgagtacaggtgacattgttcatgacacactccaccactaatttcccatctttcaattttcttgttattgtgctttccttcccatcccactcctgatgctgaaccaatgcaccatctgtaaagttgcagacagtctgagtttttctgccatcagctgtggtttcttcaaacttctctcccagggtacaagaaaactgtgttgttttcaaagtgctctcagtttttatggtgaggtttttaccatcacaagtgatgatacaatctggcttggccattgcgcccatttttcgcaaagctattcccactcctagctccttcatgtattcatcaaagcctttgctgtccaccaggcgccatcttccttccagctgctgaactgtggccatggtgggtgcgggcgggctggcgtgcagagaggggtctgcgtcggcgtggcagcgtgctgtgtccc

SEQ ID NO: 313159 - DNA, 685 bp, Homo Sapiens
  misc_feature (115)..(133): n is a, c, g, or t
ttccccaaaacacatttattttttaaccaaagggaagatcttaattaatcccaacacactttgaaatagctgcatgtaaaatgtttatgataaagataattgaacacagtaatgnnnnnnnnnnnnnnnnnnncagtatggagatttgctcattgaactgagcttggtcattctcttaattaactcctgtccaaagtgatgatggaatttttattctactttttcatagatccgagtacaggtgacattgttcatgacacactccacccactaattttcccatctttcaattttcttgttattgtgctttccttcccatcccactcctgatgctgaaccaatgcaccatctgtaaagttgcagacagtctgagtttttctgccatcagctgtggtttcttcaaacttctctcccagggtacaagaaaactgtgttgttttcaaagtgctctcagtttttatggtgaggtttttaccatcacaagtgatgatacaatctggcttggccattgcgcccatttttcgcaaagctattcccactcctagctccttcatgtattcatcaaagcctttgctgtccaccaggcgccatcttccttccagctgctgaactgtggccatggtgggtgcgggcgggctggcgtgcagagaggggtctgcgtcggcgtggcagcgtgctgtgtccc

SEQ ID NO: 313160 - DNA, 567 bp, Homo Sapiens
taaactcccaggtaccttgtacctctagttgagcattaattgctgcatatttacgtattgaaaacttattgcgaggtgacaagagcaatgtgattttaactgtcaaatgatccctccttttcacaatttatacaccttcactttccccaaaaaatgacagaatcccaagcagtcttcatattagagctgctcagtcaagtcctctttaatttgtttgcttctttgctttagaaaaccaaatgttgctctctgcacgccagcccgcccgcacccaccatggccacagttcagcagctggaaggaagatggcgcctggtggacagcaaaggctttgatgaatacatgaaggagctaggagtgggaatagctttgcgaaaaatgggcgcaaatggccaagccagattgtatcatcacttgtgatggtaaaaacctcaccataaaaactgagagcactttgaaaacaacacagttttcttgtaccctgggagagaagtttgaagaaaccacagctgatggcagaaaaactcagactgtctgcaactttacagatggtgcattggttcagca

SEQ ID NO: 313161 - DNA, 780 bp, Homo Sapiens
gaattccacccagcttttcagatccatttacaggtggtggtcggtatgttccgggctcttcgggatcttctaacacactacccacagcagatccttttacaggtgctggtcgttatgtaccaggttctgcaagtatgggaactaccatggccggagttgatccatttacagggaatagtgcctaccgatcagctgcatctaaaacaatgaatatttatttccctaaaaaagaggctgtcacatttgaccaagcaaaccctacacaaatattaggtaaactgaaggaacttaatggaactgcacctgaagagaagaagttaactgaggatgacttgatacttcttgagaagatactgtctctaatatgtaatagttcttcagaaaaacccacagtccagcaacttcagattttgtggaaagctattaactgtcctgaagatattgtctttcctgcacttgacattcttcggttgtcaattaaacaccccagtgtgaatgagaacttctgcaatgaaaaggaaggggctcagttcaggagtcatcttatcaatcttctgaaccctaaaggaaagccagcaaaccagctgcttgctctcaggactttttgcaattgttttgttgggccaggcaggacaatcagggagcaattagacattcacattgctctggctacattggccctgactattctggttggtttcataagacataacattgaggggaagccaatgggtcgcactattagacaatcttggaagataacagactagaaccattttt

SEQ ID NO: 313162 - DNA, 834 bp, Homo Sapiens
tttttatgttcaatttttggtttattaaaacaaaactacattttctgtgtttcttgcaatacactaacaagcataaaaatcaatcagcatttccaagtatgttttgctcacaaaatcgcagttatttcacagtaccttatagtaattcttttcacgagtcttaacatttctttgtacaacaggcaaatagtttaataccttccatcaagacatttcagagctctagacgtttagaaataaggtcaagaatctctttcaaatgcaatcattagtttgtattaaactaaaatgccagacggcaagtctcaggtttctaaaatagttttaaaaaacaggtttacagcccatagtaagtcttagaaacctcaacgataggtcctgtcatgtctaaacactacaactatctgtggataaaaatctgcattcaaacgtacaatactttcttctagatctgaattaaaaccttatttaccccaattcatccatgtattctgatacgttcagtgaaaaagccaggatcattggggctgttctctctatcaaaggaaagagctccgatcacctacattataattttctgtgcttattttctgcaggggaggaaatacacatctattcaacgccacactggacgttacaaaatgcatgcatattctgccccagtgctatctgttcattaccgttttgtctccttaaagaactatctaacatagtgtttcccaaaatgttctccacaggacattagtgagaggttcataagtatcccaaaggagaaaaaggtcctggtgtcaaaatagtttgggcaatgctgggttagacagtttttcactaccg

SEQ ID NO: 313163 - DNA, 1596 bp, Homo Sapiens
gccgagggcggccagacaaggggtggttcgggtggtggcggtgtcttttttagcgggagacagagcatttaatgagagcaagagctggacagtgtggtcaggaatcgtcccacccaaggaaccagacacatactcggtccttgatggggtttcctgaggctctcatactttctcctgccctggaaaatgccatccaggagctcatctctttgctactgcctctcttccagagcagcacaagaaggaaataaaatggacttgcgggggaaagaagatgcttgtctctcatgtctgtctcttacaggggggttctgaagattcccacagcctctctggagttgttgccccactttggggtctttgtccgagtaacttcaagtaggattggcccacgggaaggggttgtttgctgagagatcaccaagcgctgctcaatctcaacgatcctctgttgtccaccagccatggctgtgaaggccagtcaacaaagggaagattttacccagaggagctcaaacgctggcatgaaagactctgaagtggcatagccagtggaaattaacagctgtgtccactctgggcctcaggtgagggagggcctagatagcccactgtggcccccagagcgccatcactgcccatacttggagtgtgatcctagctatttggggatggcaggggaagcatctcccagaaaagatgacctgcctgggagaaaagggggaccccagagggtgccagccaaggcgtctcggcaaatgttgacccagacaacaggggaccaaggagttgaaggaggctcactggagaggtgggacagggggccagtcgattaaaacagaaccaagtgatgaagggcgtaggttggcctgtggtgcactgtgggtgcaagccaggtgtcgtcctgaagttggcaactcagattcctcatcctttggtggtggccacaggaggagttcccagaggcttcaggaggctctgattcccactcgcactccagcagtgggaggttgctcaagaccaggcattccgtccctggctggggtgtcccttccagagtgacagagatgatctgaggctgctcaaggtgagctggaagggacatgggcactggtaggtggttgtcttagctctcaaccaggggatctgattcccatttaaactatctaggacgaagcgagtgaaaaccagagccctgtgtgggggatgcttgaggcagagcgggtacagcagcctgcatcctgatccctcggctacctggcctccctcacagagataatggcaaggcttgggaaagatgggtcccagcagcccactgaggggttcccttcatttctgagcctaccctcccagctgcccatgtccatctctgcatctgggcttggaggaagaggtggcccattggctgggttttggtggtgtgtggacatcgttgggtcattttggggtgtgaaccccaaaactctgtacaaggtgtgccagaaggttcggtagtcctgaggagggtaagggctgtgtgtgtggtcttgtggctcttcctaagtctcaatatgtgtcacattagcccagtcagggaaatgatccaaagtcaaagta

SEQ ID NO: 313164 - DNA, 1060 bp, Homo Sapiens
  misc_feature (153)..(168): n is a, c, g, or t
  misc_feature (403)..(403): n is a, c, g, or t
ttgacttttattaaatctttacaaaacagaatacaaaattccggcattgacagttggtgtaaaggaaaacttctgagctccgtcagttcacctggtacattggaattaaagtgcttggatgtttttcccccactttaaaaaaacttttgaggnnnnnnnnnnnnnnnngtcttttaaaaacatcgtaacattaacacatggccgttcaccgtcccccagcgatgggagctggcctggggcccagggtcctccaggatcttcactcattcacagtaacggttctgaccagtcctccaggtcgcacgtggatgcgacaggggtggggagggaggaggaagtgactgtcccaccttcaggaccatgggagtgggcaaggtgttctccggggcgcacccctgaaccncaggggtgctgcaggacttgggcggcactcagcctctgcttggcgtcacggaccagcagcttggagatgaggtctttggcagcgcaggagatgtgggcccagtccttgtcggggaactcgtacttgccctcctggatgctctcaaacagcatgttctggcaggcagggcaggcctcgccgcggtcccagccgcagtcgctgccacagcggcccacgaagggcgggtagccgctgagtaggatatacaagatgacgcccaggctccacaggtcgcagcgcttgtcgtagatgctagcctcctcgctgaaggcctccactacctccggggccatgtactccgccgagccgcacggagtgagcagctccggggtggagataggggagcagtccccgttgagtttgatgccgctgcccaggtcgaagtcacagatcttcacgggggagacctggttggggtgctcacagaggatgttttccggctttaggtccctgtgggcgatgcctttgttatgcagaaagtccaaggcgctggccacgtcctgcaccaccacgctggcctccagctcgttgaagtgccggcgcttgtggatgtggctcaggatggagcctccccgcatcttctcaaacaccaggtagaagcggtcctcctcctcgaag

SEQ ID NO: 313165 - DNA, 1257 bp, Homo Sapiens
  misc_feature (55)..(64): n is a, c, g, or t
  misc_feature (716)..(716): n is a, c, g, or t
tcacattttttttggatttatttaaagaacacacaaaaaagtgcatctaaatgannnnnnnnnnaaaaaaacaatgtctttaattcctcatatgctgacttggcaatccatatgcagcctaaaaggtggttgaaagatgtctgtggacttctacacaaattgtttaagattattgaatttgatacaagaatacgtgaagtgtcttcttgagtggtaatgggcaccctgtagttatttgctcagaaccactcacacacccttcccctccccacacacacttttgccagttccccctggtgaaccataatacacacgtgggagacagctggcatcatctgagtcttggaatagctttcttgtttgttatctgcaaaaagctaggtggcctttttagtatcaaatttcaatcttggcctcactggaaccatgctctacagagctttcccaacagtttagcaagtaagcaaaatcagcttttgctcttcatatttcgtaggtgagactggggcttttaaaagaaatatttcataaaaaagacaaaagcataaatgagaaattagagggattttagttatcattaaaggaaaaaactcacaaattgatcccatttgttccatggggaagaaaagtattataaaaggaaataacttgatttttaggtttgaagggggtcccaatctaataataaaagtcttttgataaaaccatcataaaantaaaaactaatttaaaatataactgccagtgttttttaggatttaaaaaggtgagatgttccaggtttaagcaaatggttccttgggttgccaaatgcattcccatgagtgtttcttaggctgagggaatagagagccatgctcaatctgtttacccgtaaggactgaaattcaactacatgtacacatttaagacttgccctagttcaatggtcagctcaagtactggagatttaggctactggctgtgtaccggcatgggaagctgtcttcaactctttcacaactcacgcccagaacagagaagcttgacagggcaggaaaagcgagcaactgcgtgtcaaacctgcaggtgaaacccctagtgtagaagagcaactatttatttgtcaacactacagattttgtttttaaaaattaagcttagtactaaaagtcaaaatttttttgcatgatagaggagtgtaaataaagttccataaaccagtatacatatgcttatgagccaataatcttaaaaagacaaaaaaagctgcaggat

SEQ ID NO: 313166 - DNA, 458 bp, Homo Sapiens
  misc_feature (129)..(190): n is a, c, g, or t
ttgagaaattagagggattttagttatcattaaaggaaaaaactcacaaattgatcccatttgttccatggggaagaaaagtattataaaaggaaataacttgatttttaggtttgaagggggtcccannnnnnnnnnnnnnnnnnnnnnnnnnnnnnnnnnnnnnnnnnnnnnnnnnnnnnnnnnnnnnctgccagtgttttttaggatttaaaaaggtgagatgttccaggtttaagcaaatggttccttgggttgccaaatgcattcccatgagtgtttcttaggctgagggaatagagagccatgctcaatctgtttacccgtaagactgaaattcaactacatgtacacatttaagacttgccctagttcaatggtcagctcaagtactggagatttaggctactggctgtgtaccggcatgggaagctgtcttcaactccttcacaactcag

SEQ ID NO: 313167 - DNA, 640 bp, Homo Sapiens
  misc_feature (43)..(52): n is a, c, g, or t
acaaggccctgtaatgccctctgtgctcctttttagaattatnnnnnnnnnnctttttatttttgtcactaaatacaattagtttccctgattataacccataatcaatgtcacctaacatacagatggtctgtacagaggtgaacaaccccaccatctttctctacatatatattaggaccactaaactcagataaagcagagctgagcttgttaaattattgtctgttttagaaactcttaccatttaaaggaaattggaagatttaggtagaatacttgtacaataacttaaaaagttaaaagcttgtagtgataaaataatcttgtgcactgttctcagaaattttaggcaattggccttcttgcagatcccaagtctagaaaaagacaaccaatcactgcaacaactgggcttggttcatttgccatatggttggtcgtggtgcatttctggtgtgtaagtcaacagaacaatcatgacccagaggtgaagcaaagccatatatataattacaaaaactcgcgctatggggtatcttcggagaaaaattcccaggcgaatactaaactgatcaattgaactagcagctttgcgaacttttccgtacattcctgccagattagtttctgtgtcatt

SEQ ID NO: 313168 - DNA, 1043 bp, Homo Sapiens
  misc_feature (99)..(159): n is a, c, g, or t
taaccaatccgttttttaattcttaaattcttgacattacagaactaaactgaaatttattaacattccactcttacatttcttatcgacaaacagaannnnnnnnnnnnnnnnnnnnnnnnnnnnnnnnnnnnnnnnnnnnnnnnnnnnnnnnnnnnntaaatatggatcccagcattaacagctgaacagagaatgtgatttttaaattcttagcggatgataaagttgtgtagaaactgaacacttacaaattatttaaaacctggaatcactgaccagaaattacacagttggatcatgggagaacagcagaaaggggttattgagggaacctacactgttctagctgcaccccatgcccttctcagaggaaagcctggcattgattagatactgggccagactaatactggcagcagagatctgggcgccggacatctggcggatctcattaatgttggcgccttggcgcccgattatgcagccaattaagttatttggaatggtgagttcatgggtggtttgagtagatgcatccaaacttgcccaatagcctttcacctctgtagagctggagtcaattccggcgaatccggtcccgccgtgcatcatggcaaagtgagactgttgtcttgccacctggttcagcttggccagatcgagcggagaaatggtgtgttgtccttgaatcgagtaggcatctagaggtggtccctccaggtcatgggtggcatgggggtagcccgcagcgtcgctgcaccgatcttggccgcccgcgcagatgactggggagctggccggcatgggctggtacggaatggtcatgactctcccttgcggagactgggagagcgtctccagcatgaccaggcaaatctgcttgacacactcggtgacagactgcggcacgccagcgatggtgatggcccgctcggtggagttgggcagcatatccaccgccacctggacctgcgcccccgtactctcgcggatctctttgatcttacacccgcctttcccaatcagggagccgcactggg

SEQ ID NO: 313169 - DNA, 1366 bp, Homo Sapiens
ccagggagaagcttataaaactaaatatggatctcagcatcaacagctgaacagagaaaggaattaaaacgctttaattaaaaaatcacgagtggatgataaagtgtgtagaaactgaaaatttacaaactatttaaaacctggaatcgctgactgttcagaaactacacagatggatcatgggtggtggtgaacagcagaaagggattatggatgaatctgcattgttctagctgctccccatgccacccgtctccgaggaaagcctgacattgattagatattgagccaggctaatgctggcagcagatccagtgatggtaacctgcctatcagtagatccttccactgggttcgcaattttgatctgcgccccagacatctgacggatctcattgattttggcgccttgacgcccgattatgcagccaatcaaatcgtttggaatggtgagttcatgagaagtagtctgagcagatgcatccaaacctgcccaatagcctttcacctctggagagctggattcaatgccactgaatccggtgttgccatgcgtcatgggaaaatgagactgttgcattgccaactggtgcagcttggtcaactctagaggtggtccctccaggtcagggttgaggcacatggacggggtggtgtggggaaagctcgcactgtcgctgcctgtgctgtacctgtcctgaccacctgcaaagatgaccggagagctggacggcttgggccggtacgggatggtcacgcccttcgggggggactccaacatgaccacgcagatctgtttgacacactcaatgatggattgtggaatgccagcaatagtgatggcccgctcagttgagttgggtagcatatcccctgccacctggacctgagcccctgtactctctcgtatttccttgatcttgcatccaccttttccaatgagagagccacactgactagcagggaccaccagcctcagggtgaccgggggtctactggcagctgtgctattggtcatagagctgcttatgtcctcttccagtttgtcaatgatcatagcaaaggctttgaagatggcattagtgggtccagccaaagtgataattctctcaggacaattcccttctgagatgttgatacgtgcaccactctcctcgcgcatcttcttaactgattctcctttctttccgatgatactgccaacttcctttccatgcataagtagccggatggtgagagtgacatttaatccaccttcaatcacaccggtgtccatgtcgagcagtgttctggggagctggactttgagtggtcaagtctttggtcaccctcgtgccgaattcgccacccaggcctcgctccttag

SEQ ID NO: 313170 - DNA, 1012 bp, Homo Sapiens
agtcgcctcgcgcctgcagtttttggctttcacccccaaccagtgaccaaagacttgaccactcaaagtccagctccccagaacactgctcgacatggacaccggtgtgattgaaggtggattaaatgtcactctcaccatccggctacttatgcatggaaaggaagttggcagtatcatcggaaagaaaggagaatcagttaagaagatgcgcgaggagagtggtgcacgtatcaacatctcagaagggaattgtcctgagagaattatcactttggctggacccactaatgccatcttcaaagcctttgctatgatcattgacaaactggaagaggacataagcagctctatgaccaatagcacagctgccagtagacccccggtcaccctgaggctggtggtccctgctagtcagtgtggctctctcattggaaaaggtggatgcaagatcaaggaaatacgagagagtacaggggctcaggtccaggtggcaggggatatgctacccaactcaactgagcgggccatcactattgctggcattccacaatccatcattgagtgtgtcaaacagatctgcgtggtcatgttggagtcccccccgaagggcgtgaccatcccgtaccggcccaagccgtccagctctccggtcatctttgcaggtggtcaggacaggtaccgcacaggcagcgacagtgcgagctttccccacaccaccccgtccatgtgcctcaaccctgacctggagggtaccccctctagagttggaccaagctgccaccagttggcaatggcaacagtctcatttttccatgacgcatggcaacaccgggattcagtgggcattgaatccagctctcccagagtgaaaagctattgggggtttgggatgcatctgctcagactacttctcatggacttccccattccaaaggatttggattggctggcctaatccgggcgtcaagggggccaaaatcaatgagaaaccggcccaatgtttgggggg

SEQ ID NO: 313171 - DNA, 580 bp, Homo Sapiens
  misc_feature (16)..(16): n is a, c, g, or t
  misc_feature (26)..(26): n is a, c, g, or t
  misc_feature (75)..(75): n is a, c, g, or t
  misc_feature (90)..(90): n is a, c, g, or t
ccaagtggaatgaacnaaattttgtnagaaactgaaaaatttacaaactatttaaaccctgaaatcgctgactgntcaagaaactacacnagatggatcaatgggtggtggtgagaagtagtctgagcagatgcatccaaaccactgaatccggtgttgccatgcgtcatgggaaaatgagactgttgcattgcccaaactggtgcagcttggtcaaaatctggctgtggaaatggcaatactgtccttgaaatggtataggcctctagaggtggtccctcccaggtcagggttgaggcacatggacggggtggtgtggggaaagctcgcactgtcgctgcctgtgctgtacctgtcctgaccacctgcaaagatgaccggagagctggaaggcttgggccggtacgggatggtccacgcttcgggggggactccaacatgaccacgcagatctgtttgacacactcaatgatggattgtggaatgccagcaatagtgatggcccgctcagttgagttgggtagcatatcccctgccacctggacctgagcccctgtactctctcgtatttccttgatct

SEQ ID NO: 313172 - DNA, 1537 bp, Homo Sapiens
  misc_feature (102)..(151): n is a, c, g, or t
ttttaaccaatccgttttttaattcttaaattcttgacattacagaactaaactgaaatttattaacattccactcttacatttcttatcgacaaacagaannnnnnnnnnnnnnnnnnnnnnnnnnnnnnnnnnnnnnnnnnnnnnnnnngcttataaaactaaatatggatcccagcattaacagctgaacagagaatgtgatttttaaattcttagcggatgataaagttgtgtagaaactgaacacttacaaattatttaaaacctggaatcactgaccagaaattacacagttggatcatgggagaacagcagaaaggggttattgagggaacctacactgttctagctgcaccccaatgcccttctcagaggaaagcctggcattgattagatactgggccagactaatactggcagcagagccagtgatagtaacctgcctaccagaggagccttccactgggttggcaattttgatctgggccccggacatctggcggatctcattaatgttggcgccttggcgcccgattatgcagccaattaagttatttggaatggtgagttcatgggtggtttgagtagatgcatccaaacttgcccaatagcctttcacctctggagagctggagtcaattccggcgaatccggtcccgccgtgcatcatggcaaagtgagactgttgtcttgccacctggttcagcttggccagatcgagcggagaaatggtgtgttgtccttgaatcgagtaggcatctagaggtggtccctccaggtcatgggtggcatgggggtagcccgcagcgtcgctgcaccgatcttggccgcccgcgcagatgactggggagctggccggcatgggctggtacggaatggtcatgactctcccttgcggagactgggagagcgtctccagcatgaccaggcaaatctgcttgacacactcggtgacagactgcggcacgccagcgatggtgatggcccgctcggtggagttgggcagcatatcccccgccacctggacctgcgcccccgtactctcgcggatctctttgatcttacacccgcctttcccaatcagggagccgcactgggtggccggcaccaccagcctcagggtgaccgggggcctgctggccgcggtactgttggtcatggagctgttgatatcttcctccagcttgtcgatgatcatagcgaaagccttaaagatggcattggtggggccggtcagagtgatgattctctccggacaattcccctccgagatgttgatccgcgcgccactctcctcgcggatcctcttaaccgactcccccttcccaatgatgcttcctacttcctttccgtgcataagaagccgaatggtgagagtcacatttagtccactttcagtcacaccggcatccatggcgagcggcgggcggcgttcgggggagttgggctcgttacgtggtcaagtctttggcggctggcggggggaggggaggtgtaggcccaaaactgccggcgcgaggcgagcgagggccgc

SEQ ID NO: 313173 - DNA, 1496 bp, Homo Sapiens
  misc_feature (6)..(6): n is a, c, g, or t
  misc_feature (10)..(10): n is a, c, g, or t
  misc_feature (44)..(45): n is a, c, g, or t
  misc_feature (47)..(50): n is a, c, g, or t
  misc_feature (54)..(54): n is a, c, g, or t
  misc_feature (63)..(63): n is a, c, g, or t
  misc_feature (66)..(66): n is a, c, g, or t
  misc_feature (69)..(69): n is a, c, g, or t
  misc_feature (77)..(77): n is a, c, g, or t
  misc_feature (79)..(82): n is a, c, g, or t
  misc_feature (84)..(84): n is a, c, g, or t
  misc_feature (87)..(89): n is a, c, g, or t
  misc_feature (96)..(192): n is a, c, g, or t
cccccncccncccgcccgccctccgccgccctccacccgccccnngnnnncttncccccttcntcntgntcctcctngnnnncngcnnnctcctcnnnnnnnnnnnnnnnnnnnnnnnnnnnnnnnnnnnnnnnnnnnnnnnnnnnnnnnnnnnnnnnnnnnnnnnnnnnnnnnnnnnnnnnnnnnnnnnnntcagtcgcctcgcgcctgcagtttttggctttcacccccaaccagtgaccaaagacttgaccactcaaagtccagctccccagaacactgctcgacatggacaccggtgtgattgaaggtggattaaatgtcactctcaccatccggctacttatgcatggaaaggaagttggcagtatcatcggaaagaaaggagaatcagttaagaagatgcgcgaggagagtggtgcacgtatcaacatctcagaagggaattgtcctgagagaattatcactttggctggacccactaatgccatcttcaaagcctttgctatgatcattgacaaactggaagaggacataagcagctctatgaccaatagcacagctgccagtagacccccggtcaccctgaggctggtggtccctgctagtcagtgtggctctctcattggaaaaggtggatgcaagatcaaggaaatacgagagagtacaggggctcaggtccaggtggcaggggatatgctacccaactcaactgagcgggccatcactattgctggcattccacaatccatcattgagtgtgtcaaacagatctgcgtggtcatgttggagagtcccccccgaagggcgtgaccatcccgtaccggcccaagccgtccagctctccggtcatctttgcaggtggtcaggacaggtacagcacaggcagcgacagtgcgagctttccccacaccaccccgtccatgtgcctcaaccctgacctggagggaccacctctagaggcctataccattcaaggacagtatgccattccacagccagatttgaccaagctgcaccagttggcaatgcaacagtctcattttcccatgacgcatggcaacaccggattcagtggcattgaatccagctctccagaggtgaaaggctattgggcaggtttggatgcatctgctcagactacttctcatgaactcaccattccaaacgatttgattggctgcataatcgggcgtcaaggcgccaaaatcaatgagatccgtcagatgtctggggcgcagatcaaaattgcgaacccagtggaaggatctactgataggcaggttaccatcactggatctgctgccagcattagcctggctcaatatctaatcaatgtcaggctttcctcggagacgggtggcatggggagcagctagaacaatgcagattcatccataatccctttctgctgttcaccaacacccatgatccatctgtgtagtttctggacagtcagcgattccaggtttttaaatagtttgtaaatttttcca

SEQ ID NO: 313174 - DNA, 1391 bp, Homo Sapiens
  misc_feature (69)..(81): n is a, c, g, or t
  misc_feature (145)..(157): n is a, c, g, or t
  misc_feature (263)..(272): n is a, c, g, or t
  misc_feature (361)..(398): n is a, c, g, or t
  misc_feature (403)..(562): n is a, c, g, or t
  misc_feature (674)..(702): n is a, c, g, or t
  misc_feature (786)..(786): n is a, c, g, or t
  misc_feature (1238)..(1238): n is a, c, g, or t
  misc_feature (1251)..(1252): n is a, c, g, or t
  misc_feature (1266)..(1266): n is a, c, g, or t
  misc_feature (1271)..(1271): n is a, c, g, or t
  misc_feature (1290)..(1290): n is a, c, g, or t
  misc_feature (1307)..(1307): n is a, c, g, or t
  misc_feature (1311)..(1311): n is a, c, g, or t
  misc_feature (1315)..(1315): n is a, c, g, or t
  misc_feature (1324)..(1324): n is a, c, g, or t
  misc_feature (1327)..(1327): n is a, c, g, or t
  misc_feature (1336)..(1336): n is a, c, g, or t
  misc_feature (1340)..(1340): n is a, c, g, or t
  misc_feature (1343)..(1343): n is a, c, g, or t
  misc_feature (1350)..(1351): n is a, c, g, or t
  misc_feature (1375)..(1375): n is a, c, g, or t
cccccgcggggggcatcacggggttttatataccccccgcggggtaattaggtttttcctgcacccgcnnnnnnnnnnnnntttcccacaccccgccaaaaaaggttaaaaagaaatcccgcccgggggcggtaaatatttttcnnnnnnnnnnnnnaatttttttattgaagtccccgggagaccccccagagaaaccccccgggaaattttctaaaaatcccctttggggttggtgaaattttttggggggcccccggcgnnnnnnnnnngggggagattccccccggggaaaaggccgggctttttttggaaaacatttgggccccggcccccaacaaaggggggccacgcccccaannnnnnnnnnnnnnnnnnnnnnnnnnnnnnnnnnnnnncgcannnnnnnnnnnnnnnnnnnnnnnnnnnnnnnnnnnnnnnnnnnnnnnnnnnnnnnnnnnnnnnnnnnnnnnnnnnnnnnnnnnnnnnnnnnnnnnnnnnnnnnnnnnnnnnnnnnnnnnnnnnnnnnnnnnnnnnnnnnnnnnnnnnnnnnnnnnnnnnnccagtccatcttttaatttttttgaaaaattcctgacattacagaactaaactgaaatgtattaatattccactcttacatttccatgacaaacagaaaaattcatgagccnnnnnnnnnnnnnnnnnnnnnnnnnnnnnccagggggaagcttataaaactaaatatggatctcagcattaacagctgaacagagaatggaattaaaacgctttaattaaaanattcttagtggatgataaagttgtgtagaaactgaaaatttacaaactatttaaaacctggaatcgctgactgttcagaaactacacagatggatcatgggtggtggtgaacagcagaaagggattatggatgaatctgcattgttctagctgctccccatgccacccgtctccgaggaaagcctgacattgattagatattgagccaggctaatgctggcagcagatccagtgatggtaacctgcctatcagtagatccttccactgggttcgcaattttgatctgcgccccagacatctgacggatctcattgattttgggcgccttgacgcccgattatggcagccaatcaaatcgttttgggattggtgagtttcatgaggaagtagtctgaggcaggttgcatcccaaacccactggaatcccgtgttgccatgcgtcatgggaaantgagactgtagcnntgccaactggtgcngcttnggtcaaatctggctgtggnatggcatactgtccttnaaangganaggcctgancanctgcaaagngacnggnatactgnncggcttgggcggtacggatggtcnagccttcgggggggac

SEQ ID NO: 313175 - DNA, 1113 bp, Homo Sapiens
  misc_feature (391)..(391): n is a, c, g, or t
  misc_feature (410)..(410): n is a, c, g, or t
gtttcattctcaccaatgttaacaaaggaaaacaaaatgaacaaaataatactggaggaggtgcctcaaggtatgcaatcagtagggagagaatctctgtttctcgcctttcagtttgttagttacacatggcacggcagaggtggtggtggtggtagctgaagccccggtacccttagcagcagacacaacatttagagccaggagagggatgggtttcatgccaagcagactggagacacaaggggcggtcggaagagggttgggggaggctggagggtgcgtcggaggtccccgctgtggcgagcgagggggtggtggtggaggaggaagaagaagaaggggtggagggttgagagaggttgatgctgaggtgatcagggatcgtganggaggctgcctgggagganggtttagcgttttctaaactgacattgattagatattgagccagtctaatgctggcagcagatccagtgatggtaacctgcctatcagtagatccttccactgggttcgcaattttgatctgcgccccagacatcttacggatctcattgattttggcgccttgacgcccgattatgcagccaatcaaatcgtttggaatggtgagttcatgagaagtagtctgagcagatgcatccaaacctgcccaatagcctttcacctctggagagctggattcaatgccactgaatccggtgttgccatgcgtcatgggaaaatgagactgttgcattgccaactggtgcagcttggtcaaatctggctgtggaatggcatactgtccttgaatggtataggcctgaccacctgcaaagatgaccggagagctggacggcttgggccggtacgggatggtcacgcccttcgggggggactccaacatgaccacgcagatctgtttgacacactcaatgatggattgtggaatgccagccatagtgatggcccgctcagttgagttgggtagcatatcccctgccacctggacctgagcccctgtactctctcgtatttccttgatcttgcatccaccttttccaatgagagagccacactgactagcagggaccaccagcctcagggtgaccgggggtctactggcag

SEQ ID NO: 313176 - DNA, 1306 bp, Homo Sapiens
caagggaaagacaaatttttatgacaaccatttaggtagtttctcgtagttgcctccattccgttgtttttggtgccccgcgaggtctcttttatcccggtaatagtgtaactaattcacttgtaccgtgtcgggcttcgaacacaagtgatcaggtgggaaccacaaaggaataggtgaattccattttagcgctcccatgccacctctcgaggaagcctgctgattaaatgaccaggctaatgttgcacagatccagtgatgggtaccctgcctatcagtagaccttcactgggtttcgcaatttgatctgcgccccagacatctgacggatctcattgattttggcgccttgacgcccgattatgcaccatcaaaatcgtttggaatggtgagttcatgagaagtagtctgagcagatgcatccaaacctgcactgaatccggtgttgccatgcgtcatgggaaaatgagactgttgcattgccaactggtgcagcttggtcaaatctggctgtggaatggcatactgtgcttgaatggtataagtcttgaccacggtgcaaagatgaccggagagctggacggcttgggtcgttacgggatggtcacgcccttcggggggactgggagagagtcttccgacatgaccagcgcagatcgtgtttgacacactcaatgatggattgtggaatgccagcggatagtgatggcccgctgcagttgagttgggtagcatatcgccctgcgcacctggacctgagcgcgctgtactctgctcgtatgttccttgatgcttgcatcgcacctgtttgccaatgagagagccacactggactagctagggaccaccgagcctcagggtgaccgggggtctactggcagctgtgctattggtcatagagctgcttatgtcctcttgccagtttgtgcaatgatcatagcaaaggctttgaagatggcattagtgggtccagccaaagtgataattctctcaggacaattcccttctgagatgttgatacgtgcaccactctcctcgcgcatcttcttaactgattctcctatctttccgatgatactgccaacttcctttccatgcataagtagccggatggtgagagtgacatttaatccaccttcaatcacaccggtgtccatgtcgagcagtgttctggggagctggactttgagtggtcaagtctttggtcactggttgggggtgaaagccaaaaactgcaggcgcgaggcgactgaggggaaaagcggacgcgtgggtcgacgatatcccgaaattccggccgtac

SEQ ID NO: 313177 - DNA, 477 bp, Homo Sapiens
  misc_feature (40)..(40): n is a, c, g, or t
  misc_feature (64)..(64): n is a, c, g, or t
  misc_feature (93)..(93): n is a, c, g, or t
  misc_feature (114)..(114): n is a, c, g, or t
  misc_feature (467)..(467): n is a, c, g, or t
tccccgaaggaaaaccctgaacattgaattaaaatattgnacccaggctaaatgctggcaaccnaacccagtgatggtaaacctgccctaacnagtagatccttcccactgggntcgcaattttgaatctgcgccccagacatctgacggatctcattgattttggcgccttgacgcccgattatgcagcccaatcaaatcgtttggaatggtgagttcatgagaagtagtctgagcagatgcatccaaacctgcactgaatccggtgttgccatgcgtcatgggaaaatgagactgttgcattgccaactggtgcagcttggtcaaatctggctgtggaatggcatactgtccttgaatggtataggcctctagaggtggtccctccaggtcagggttgaggcacatggacggggtggtgtggggaaagcttcgcactgtcgctgcctgtgctgtacctgtcctgnccatcctgca

SEQ ID NO: 313178 - DNA, 569 bp, Homo Sapiens
actcccttttaaaagtgcctagtgatagaggcgttgtttgtcatctattataattggaatgtcattgtagttcagtgaattttgatgtaaataaaatatcttttaaaaatgttaaagtaccaggataaacaaacaaaaagaaacaacccttaagatgacagattttcctcaacatgcaggtttcccttcttatatacctcaagtatccaacatctagccatgcaaattgattacctgaagcatagtactggaaagtagaatagcatgaaaaacttaattttgtggacattacctttttttgtaatcagctactgtatgttttattttagatcttttgttttgggtgggttttctgctctggaggtatatgcactaacaaaacattttcctcctttcatatacgcatgttaattagcaatgtgagcaatatttcctaccatacttcactcccaatattttttgagatgtttgtataaaatggaatttaaagttcacttatgattgtatatgaaccacagaggagcccatttattaataaaaaacttttttaatagttaaatgtagaggaa

SEQ ID NO: 313179 - DNA, 1679 bp, Homo Sapiens
  misc_feature (361)..(361): n is a, c, g, or t
  misc_feature (380)..(380): n is a, c, g, or t
  misc_feature (382)..(382): n is a, c, g, or t
  misc_feature (413)..(413): n is a, c, g, or t
  misc_feature (421)..(421): n is a, c, g, or t
  misc_feature (1396)..(1396): n is a, c, g, or t
  misc_feature (1544)..(1544): n is a, c, g, or t
  misc_feature (1548)..(1548): n is a, c, g, or t
  misc_feature (1663)..(1663): n is a, c, g, or t
tttttagtttgtttctgaatgcatttatttcacaaatttgtttaagggctataaacaaaatttgtatcaacttgtttgtatatatttacaaaacagaaaattaagtcagcattaagtcaacatgagcagtcacagaatttttcccctttataaatggtacatattcaaggagacttcaaaaagtttgtggaaaaatggttaaaagataaaaaatataaactatatttttgaacattagctctatagcattcaagacacttttgtaagtgatgataccagctatttagtccatccctaaagaactgagagttctgggaatttatctacatcaatgcagtttctttatacattaacttgaganaaatgtactgccctgacananttttttaagattaggaaacaaaaagtcaganggtgccanaccaggactgtagggtggatgcctagtgatttcccatcaaaactcttgcaaaatggccttgtttgatgagagggatgagcaggaccattgttgtgttgaagaactctctggtctttctcggggatttttctgctgaagctttggctaaagtttctcaaaacacctcccatgataagcacgttaccattctttggccctacagaaagtcaacaagcaaaatgccttgagcattcaaaagctgttgccatgacctttgctctcaaccagtcctcttgtgctttaactgaactacttatcttggtaaccactgctttgtgttttgtcttcaggattgcgctggtaaagccatgtttcatctcctgttacaatttttcaatgaaaggcttcaagatcctgatcccatttatttaaaatttccattgaaagctctattcttgtctgtagctgatctgggtgcaatggttttggtacctatcaggtataaagtttgctgaacttttccagtcaaaattgtgtaaggtgaaccaactgagatgtctatggtgttggctgttgtttctgctgttaattgttggttttcttcaattacgccatgaactaacttttttctcacaaactgatgtggatgatctgccactgtgggcttcttcttcaacattaccttatgccttcttaaaacgagttatccatttgtaaactgatttctttggagcactgtccctatcaacttttcataaagcatcaattagttcaccattcttccacccaagtgtcaacatatatttgatgtttgttcttgcttcaattttagcagaattcgtgttgttctgatagagcctcttttcaaactgatgtcttattcttcttagtgcttcaaactagatccttatttccttcattgtggcaaagtgtttcagaaaagggttccttgaattaaaagtcggcgtatcctatttgactcctgctcctccggtntcacatacctacagccaaccatgccaagagcttccccattatctccgcatcggagagcctttcctcccgatatcctccagtttcagagaccgcacccggagacccattggcaggttcctggattcgcctcaattttggtcctgcctcntctnttcgcattttcaggcttggcctcacaagaaggacgatggcgccagattgtgccagaatgggtgaaaacagaaggaaaataaaccggttgcagcaaaacccactattccgcctccnacgcggagggaggagc

SEQ ID NO: 313180 - DNA, 340 bp, Homo Sapiens
  misc_feature (317)..(317): n is a, c, g, or t
aagataattactcaaaatatgcagggaaggaataaaattgaagggtgtttttcttaaagaacatcatttgtcatatttatttgatcaagaagttgaagatttatataataaggatctagtttgaagcactaagaagaataagacatcagtttgaaaagaggctctatcagaacaacacgaattctgctaaaattgaaggcaagaacaaacatcaaatatatgttgacacttgggtgggaaggatgggtgaactaattgatgctttatggaaaagttggataggggaccgtgctcccaaaggaattcagttttaccantgggttaactccgttttttaagg

SEQ ID NO: 313181 - DNA, 780 bp, Homo Sapiens
tttttcctttttaagagacttttatttgagtggttcttacaaagattgttgcaatatgaaagtcatttgtttgatagaaatatcaagctgtcttgtcaaacacactgaagtaacccaaaaatatatttcagagctcacagagcttaaaaagagcaaagattatatgcaaccagacaaaacctatttctgcatttcctatttctttctcagactgctttgcctaccagactctcacgtttaaacatcttcaggaaatgcagggatcattttgtttggaattttaagacacaccagaacacatagtatttacaaagaaacttttacagatacattaattgaaaagataccatcaagaaatataattttgaaatctccctttcttgccaattgatcagaatgcaagatgagatgctaaccaaacagccctttagctgtcttgtatttccatacactaaatgtgtatttcagaaactgctcaaccatcagccaaatatcaacattagtgaaatgtgaaatgtaaccactgtgtaaaaagttaggcttctgaaacattaaaaacattacatccctggtctgcctttttacagaaagcacatttgttctcctagagctattcctatagttcattaattttctacatgaacattttaaaaggcagaacaagagaacagttttgtatacagtgggatttactatttagggagaatgagcacactgcattcctgttaacatttttattttttcaaggtaacaggaaattgcatacaaatgacagtagat

SEQ ID NO: 313182 - DNA, 454 bp, Homo Sapiens
  misc_feature (251)..(263): n is a, c, g, or t
gtagaacatgatgttttaaaatactaatgtagaccaatttatcaactgttttactcaagttctgtaattttatatttcatttaaaaaaccattctgttttctgagtttataaaaaagttacatattttattttttagaaattaatgtttgctttatataattaggtgttaacctacatgtaagtgatttgtgtgcaccccggccataatgggcgaatttccgggaccaaaacaatggcgcgcttcccgagnnnnnnnnnnnnngctcgtccaaaacttggagcttggcggaaacaagggcataggtgtgttctgggggaaaatgggggcccgctacaattggtagaggactttttaattttttgggcgcccggtattaatcccaaataccgccttgaatatttcaacgaggaaacaccggtataatttttccacggggggatctgtgtcaattt

SEQ ID NO: 313183 - DNA, 255 bp, Homo Sapiens
aatacattattattttaatatattgcttgttaatagctttaaaaatactacattctatggtagattattggttatataaaaggtagaaatgtcataagtattataatttccagtctgtaaaacctgtcagttgagtgctttgaaggtactcaatatactcaatagctagttaccctaatttagtttctccacacggtggaggctttaacactctgtgcttctcaggttactgggtagtttgatgttttatcttat

SEQ ID NO: 313184 - DNA, 1096 bp, Homo Sapiens
  misc_feature (98)..(98): n is a, c, g, or t
  misc_feature (127)..(141): n is a, c, g, or t
  misc_feature (164)..(173): n is a, c, g, or t
  misc_feature (183)..(201): n is a, c, g, or t
  misc_feature (233)..(242): n is a, c, g, or t
  misc_feature (302)..(365): n is a, c, g, or t
  misc_feature (376)..(386): n is a, c, g, or t
  misc_feature (465)..(507): n is a, c, g, or t
  misc_feature (536)..(551): n is a, c, g, or t
  misc_feature (562)..(672): n is a, c, g, or t
  misc_feature (676)..(678): n is a, c, g, or t
  misc_feature (974)..(974): n is a, c, g, or t
  misc_feature (1041)..(1041): n is a, c, g, or t
  misc_feature (1056)..(1056): n is a, c, g, or t
  misc_feature (1086)..(1086): n is a, c, g, or t
gtgtggagaggagaggtgtgtgtctctcccaacatctagtgtcggccgcggcgcgagaaaataatatgcgttttatttataaaggaagagttaattcnctccccacacccccgttgttttttttttnnnnnnnnnnnnnnngtgggcccaccgcggggcgcgcnnnnnnnnnnctttaataannnnnnnnnnnnnnnnnnngtggggagccctccgccctcttgtggggagannnnnnnnnnttgtggtggtggagagagaccccccccgcttataaagagcgcccccctcgccagaagaannnnnnnnnnnnnnnnnnnnnnnnnnnnnnnnnnnnnnnnnnnnnnnnnnnnnnnnnnnnnnnncggcggggcgnnnnnnnnnnnattggtggggggggaatccacacacccctttgtttcttttccccccggggttttttcttggggaaaaccactttatggnnnnnnnnnnnnnnnnnnnnnnnnnnnnnnnnnnnnnnnnnnnaacagaaaggtttttgaaaagcttttttnnnnnnnnnnnnnnnnccgccccaggnnnnnnnnnnnnnnnnnnnnnnnnnnnnnnnnnnnnnnnnnnnnnnnnnnnnnnnnnnnnnnnnnnnnnnnnnnnnnnnnnnnnnnnnnnnnnnnnnnnnnnnnnnnnnnntttnnntttcttgacatgattttaataaaaaatacagctgacataacagattacatgaaactatacacaatgacattctctgcatagtaaccaacactgatgtgtgtacttgaatttttaaatggattatttataatcctttaaagtgcaatttattgaaaggtttaagcaaatcaggataaaggatctttctaataaatgactaacattaaagagatgctatattgatatatttaggataaatctttcaaaaatcataattgatttctataggatgccaaatttacttctgttgggtaacnaatggaccttgcccccctcaacccccaaacttaattgctgggggggattagggaggggttccctctnaattgggggccaggnggcctttttttctggatgggttaatatttnttggtctgga

SEQ ID NO: 313185 - DNA, 1124 bp, Homo Sapiens
  misc_feature (20)..(20): n is a, c, g, or t
  misc_feature (26)..(26): n is a, c, g, or t
  misc_feature (66)..(66): n is a, c, g, or t
  misc_feature (389)..(397): n is a, c, g, or t
  misc_feature (659)..(659): n is a, c, g, or t
  misc_feature (711)..(711): n is a, c, g, or t
  misc_feature (911)..(911): n is a, c, g, or t
ggcatggcccacccaagggncatttncctcaaccattttacctaaaggggaggagtaagggtggtncctatacgcttacctggatggggggactgtaccatggaaccacattttaaattggaattacaaccaaccattttagattagggaaatattagaatcttattaagaacataatcttaaattataacccaattttaaatagcaaagtttaacaataaagctacttaagtgtttgaattagaaataaacagtaaaacatctgtattaattataacagagttgacatttgtttatattttatcttcagtattaaccaaaggagtggaatttagccagggttgcactttttaaaagttgtatatacttttatttattttacaaaaggnnnnnnnnngacatacttttcccataaaattccaggtcttactatgtaaaataaccatgcactacttcatgttataatcataattttagactatttccagtaggtaagtgtcataaagaaggaagagatatggcttccacagcttcaatgaggtgtaaggctagaccatattgcccatgtttttctggtaaaagctcaattactttatttactagtttagctgttgttgcaattggcacttcagtgttttgaaggtcctgggggtccattntttcagccaagtacacagtgtgggtggaagtctggcaagcagctccattccnttcttttgtctgggtgtggagaagcgcatgagccagcctttgccccgtgagcaccagcagctgagaggcaaggacctctttgtcatgaacctgtagaatggcctcttctcctaagtggtcaactccatagttgtatagttcccccacataatgccttctaacaacatcttcactaacttgaaggtgatgggctaaatccnacagctagagctggccaatcttggtctttcccaaaaggagtgggtgtggcctcttctgtgggatctttgacctttgtggctgaatgttgggcctggacagctgcactgacaactttcaataagaactgttgtcgtacagaaataaaatttggatccatttccccactaggtaataactgaattgaagttaggtctttgaaaaatgcatttttt

SEQ ID NO: 313186 - DNA, 491 bp, Homo Sapiens
ttacaacaagttttacaagataatacatttttacagtgacctgatgtggatacaactttgcaacttggcaaaaagcaaatcttaacttacattataattaatttgctgcattttacacatctctgattctcaattttggcaagtacaacaggttaagggttctatttagtgtccccttctgatgaatatgatgatcttgaacccattcttcctcctcaagcacggtcatcctcctctgatggcaacagcagaacctctgggaaaggaacctttcggtatccagaactcccaggtggcagcccagtgtgggattttggagcatgacaacaaaggcattttctcaacatttactaaaggagagtggggtgttctatacgctactgatggggactgtacatgaacacatttaaattgaattacaacaacattttagataggaaatatagaatcttataagaacataatctaaattataaccaattttaaatagc

SEQ ID NO: 313187 - DNA, 1290 bp, Homo Sapiens
  misc_feature (532)..(532): n is a, c, g, or t
  misc_feature (682)..(682): n is a, c, g, or t
gaatcgttgcgattaactttattaatattttaaaatatgaaaactgtaaaacatagtatttatgtaaacacctgaggactgttcaagtgggtacagcatcttcatacaaacaacttgaaagaagaccaagtttaagtaagaatcttatgacatgtaaggaataacataaatgaagctattctttaaatagttgcattcatgtctaaagtacatttggttttctaaaaagaaaatgtacattcttgcctcttgtgaacattttcttgacattacagcaaatagctaatggtgatagcaccaattctcatagctcgtaaaccttatatttgttacacaatgtaataacaaagttataaatttataacaaaataatagtgttgaacatgtttcccttgaaagttctaacttacaaaataaagcccccaaagattagtctgaattaatgtatcattcaaagtgtagcaggattaatggctcagaattaagccaattaattagaaacattgtctataggacggagaacttccctgtntggaaaccaatctacagattgtttcttgtcctctaaaaagtaagttgagaggtactaatgatggcaaataatccatttatattttacaaaataaaacatttcactaatatatggctcatcctacctctgtggcaatacaaaatgccattncaaattttttaaaaagattgtgtgaatacttcgggtgagaataaaatataaaatactatctatataaagaataaacacataaaatacagttatgccttttaaaagtttggacagacgtatcttcatagagagatgcaaacaatgaaagtgtagttataggtccaaacttagccaaaatatgacagttttaatataatagtttgtttgaaaaaaagtagtcagacttcatccaaaccacccttgcggtacaatatttcttgcataaaataaccattctatctatcctatagtttatcttaaaactgttaagagcacataataaaagtttatatgcttattttttactctaaatctgaataaataaaacatatagagaaataatagcagaaaggaaaataatttatatggctattctctttctggaaacttgtagaatactgcaacatcagacagataaaatactccagaaagagatatatatgggtacacctttaaattctcttctgaggaataattcccatagattcaatcataggagttgtcaaccctgataatacctctcttagctgttttggttctctgtatcgagatgaaccagaatcaaaggg

SEQ ID NO: 313188 - DNA, 273 bp, Homo Sapiens
gtagctctcagatctgaaaatgtctttattttttagaaaatggattccaggaaggttaaaaagcaacaccagagggtataggtgcagaactggatgtagtcattcaaagcattcaagtaagaatatggcaatataaatatccaaaaagtatctcttaggtattcaaaacaaaacgtataagtcattcctaactaatttgagctttatagcattttcctagacaggaaggggaaaaacagtaagcatttaaaagtccggaaagctttttcgttg

SEQ ID NO: 313189 - DNA, 630 bp, Homo Sapiens
taattttgaggtaccaaatagtgcaattgggtaaaacagggtttattcagttgcatctgtctccagtgttgtattgacagctctgggtctttttttgggccagcccttttttgacattgcttccagcagtggaaaatgggcatttgatggcaataggccaaaattattgtgtccagagagtacactttttcaaaatgctcacctactggaagtgtgaattacttgacaatgtatggcttagttgtgttcatgttttgtctacagtagaggtctaatccacaggttacacctatgtttgatatgatataagttctctttgcgtaggccactgggtttctcatgcagtaagctttataaaaactcatttgcactggactgtcatctcattcttgtacaacgtagaattacttgtttacatccaacaaatggttagctagggaaaacagtgcaaactgagtgttagtagtcattttggtccaactgcatgtcaacccttccatttcaatcccagttagaaatgaaaataattactttgaaacttggctttaagagcacatttatcgtacgtcacagtgtatggtgaatatattattaaataatgtggtacttcgctcatcaggcataatgtct

SEQ ID NO: 313190 - DNA, 2355 bp, Homo Sapiens
  misc_feature (2353)..(2353): n is a, c, g, or t
ttaggagaatttagctgttctttattgacatggaatttggggtggcgagggtagccacaccctccaggaggatgaggtaggttcagtgcttccagctcacacctttcctgggtcttccttcagtgtgacagttcggttaaagacaagctttccctgatggctgtctggatccacggagaaatatccaagacgctcaaactggaacttgtcgaagggttttgccagggccacagagcagtccactaatgctgcatccaccacgtgtagtgatgccaggttcaggtcacttaaaaatccaccaggcacctcagtaggatcttcagggttcttgtgctggaatagtcgctcatagaggcgaacctcacacatcaaaggctgtgacacccagtgaataaaggcctttggcttctctccagcatctgcccgtctgcaggtcacctccagactctctacacaaccactggggcccttgacaacatgctgcagctcaatgacgtagcctgtatgcctcaggcccacaggctggccccaagccaggcgcttaaatcctggctctggctcctccttgaagtcagtcctctcaatgaagacaatgggtgcaaagggaacctgatggaagcctttggtctcatcagctgggaagttgggcacctggatgtccaaggacttggcagcaggaaagttggtgatgatgacccgtagtgactccagcacagccatggctcgtggggctgtgtcattcagcacatcacgcacacaggcttctagaagatgtggctccattgtggtttgtgccacagtcactcccacccgggcacagaagttgttgatggcctcaggtgggaagccccgccgtcgcagggccgtgagtgtaaagagccgtgggtcatcccagtcccgcacagcaccagttgctacaagctggaggatcttcctcttagagacaacagcatagtgcaggttgaggcggccatactcccactgcacagggcaatagacgtccagtgcattgcaaagccagaagtaggaagagcgtcgggcctggaattccttggtgcagagtgagtgagtgatgtgctcgatggagtcacagaggcagtgtgtgtagtcgtaggtgggatagatgcaccatttgtcccctgtgcggtggtgtggtgtatacttgactcgataggctacagggtccatcttgccatcctccatcaccagcttcatccgtagtgtggcctcgccctctgaaaacttgcccttgcgcattgcctcaaagagcagcagtgactcctccatgggacggtctctccagggtgaaggcagagtattatggcctttgagctcctctcctcgctggtggcacacataagccagacccctgcggatgagctccacagcccacgcatatagctggtcaaaatagtcagacgcatatgtgactttgtaaggtgtgtagcctagccaggctaccatgtcacagatggccgtgaagaactttgcttcctccttctcagggttggtgtcatcaaaacgcagaaaacagatgccattgttggccttggcatagccaaagttgaaattgatggctttggcatgtccaatatgcaggattccattgggttctggcgggaaccgggtacgtacctgcccaccagtaatctccaggtgctgctttagtagattcatggtgtgtggagtgaccacatagcctggggtcttgtagttctcaccaggcttgtggaacttaagggcctccccccggagctgctccatcagagacagggtctggtcagcagtctcgccattctccaccacatcctttgccgtcctccggtctgtttcttctagccgagcttttgccaccttgaacttcttctccagatcagcctccaacttggggcccagaaggtggaggacctgcatgtccacttcattcttgatcattttgccatctgcccacttcagcacagcccgagcctctcctagaagcataggcacaaggagccatcagcagccccatgttgaaatggtaacgttccaccaggagctggggccggtgcctgttaatagcagcctccacagcctcctcaatctgctctggggtcacaatgacacccacgccacattcccgctcgaagtccacagtgtcgatggggtccaaggggtgactccgcacatactcaagggcagcgcttagctggggctcagtgtggatcttcttactggctatgtagcttacaaggaaggagagacgccgggtatccctgagtcgggaggccaagccatataacaggatcccggtagctttgtcaatggtggaacccagggtctgctgagcctgaggtcagaggggtcaagaganaa

SEQ ID NO: 313191 - DNA, 1038 bp, Homo Sapiens
  misc_feature (652)..(652): n is a, c, g, or t
  misc_feature (664)..(664): n is a, c, g, or t
  misc_feature (920)..(920): n is a, c, g, or t
  misc_feature (952)..(952): n is a, c, g, or t
  misc_feature (973)..(973): n is a, c, g, or t
  misc_feature (1018)..(1019): n is a, c, g, or t
  misc_feature (1022)..(1022): n is a, c, g, or t
  misc_feature (1026)..(1026): n is a, c, g, or t
tctttcttttagtttccggtgtctctgcaatggcggctctagactccctgtcgctcttcactagcctcggcctgagcgagcagaaggcccgcgagacgctcaagaactcggctctgagcgcgcagctgcgcgaggccgctactcaggctcagcagaccctgggttccaccattgacaaagctaccgggatcctgttatatggcttggcctcccgactcagggatacccggcgtctctccttccttgtaagctacatagccagtaagaagatccacactgagccccagctaagcgctgcccttgagtatgtgcggagtcaccccttggaccccatcgacactgtggacttcgagcgggaatgtggcgtgggtgtcattgtgaccccagagcagattgaggaggctgtggaggctgctattaacaggcaccggccccagctcctggtggaacgttaccatttcaacatggggctgctgatgggtgagcagggcctggaacggggctatattgttctctctggtcatgccttttcttctgggcacgagtgagaaggaggtgggggaaggaacaggagtgacttaaagtggtctggctgggctcaggctctggttctggtggtcagccaggacctttccttgggaaagaaggtggnggggagtactcnttttttgcctttctgcagctccttgtgcctatgcttctaggagaggctcgggctgtgctgaagtgggcagatggcaaaatgatcaagaatgaagtggacatgcaggtcctcccccttctgggccccaagttgggggctgattctgggagaaagaagttcaaggtggcaaaaagctcggctagaagaaacagaccggaggacggcaaaggatgtggtggagaatggcgagactgctgaccagaccctgtctctgatngagcagctccggggggaggcccttaagttcanaagcctggtgagaactacaanaccccaggctatgtggtcactccacacaccatgaatctactaaannagnaccnggagaatactgg

SEQ ID NO: 313192 - DNA, 908 bp, Homo Sapiens
  misc_feature (714)..(714): n is a, c, g, or t
cttttttttagtttccggtgtctctgcaatggcggctctagactccctgtcgctcttcactagcctcggcctgagcgagcagaaggcccgcgagacgctcaagaactcggctctgagcgcgcagctgcgcgaggccgctactcaggctcagcagaccctgggttccaccattgacaaagctaccgggatcctgttatatggcttggcctcccgactcagggatacccggcgtctctccttccttgtaagctacatagccagtaagaagatccacactgagccccagctaagcgctgcccttgagtatgtgcggagtcaccccttggaccccatcgacactgtggacttcgagcgggaatgtggcgtgggtgtcattgtgaccccagagcagattgaggaggctgtggaggctgctattaacaggcaccggccccagctcctggtggaacgttaccatttcaacatggggctgctgatgggagaggctcgggctgtgctgaagtgggcagatggcaaaatgatcaagaatgaagtggacatgcaggtcctccaccttctgggccccaagttggaggctgatctggagaagaagttcaaggtggcaaaagctcggctagaagaaacagaccggaggacggcaaaggatgtggtggagaatggcgagactgctgaccagaccctgtctctgatggagcagctccgggtgggaggccncttaagttccacaagcctgggtgagaactacaagacccccaggctatgtggtcactccacacaccatgaatctactaaagcagcacctggagattactggtggggcaggtacgtacccgggttcccgccaagaacccaatggaaatcctgcatattggacatgccaaagccatcaatttcaactttggctatgc

SEQ ID NO: 313193 - DNA, 858 bp, Homo Sapiens
gcagacatgtgatttgagtttattgcagagaatggtaataggaaatgggattgtacaaagaaaagagatggagagaaaactggatgagggtttcgcactgggtgtcccacccacaggcctcagcagccctgccacggatctgcccgattctttcgcatcaagaagttgatcttgcgagccatttccatgttgtagatccgccggcacctttcatagctttccctctgtcgctggcggcatggcttctcataataccgccgatgcttaatgtcctcaatgagcccatccatagtgaggattctgtttagggtcctgtatgcgctttccacgttcccttcctgtaccatcacagtcctggcgatgaacttcagatgttttgtccatgaccttggatttataccttcactctgtagagcctaaatggatgatggagaaagggcgaggaaagcagaaagagaaacgcaacataatacaaactacaccgcgcggcttatttaggatttggaaattcaacatgctcagggacgcgcgagatggagcacatggaagtcatcctagaaagtagacgtgaatcgttgtctcttattctcactgccagtccaaatcctcgcatagagaagaaaagagatggcagcagggcgttaccacaaagacgcgtcgccgggcatgagaaggacacgagcgacaaggatgcgccacagggtcccaaccaccacacatagttccaaaaggggttgagttgggagttggggaaggactctttgttggtctttggaaaagggggcgaaagcccgcaaacctgccctctcgccaagccagccttcctttccccataccttgcacaactcctcacctcgc

SEQ ID NO: 313194 - DNA, 507 bp, Homo Sapiens
tttaatgggattgtttctatatttggaggccttcttgcagacatgtgatttgagtttattgcagagaatggtaataggaaatgggattgtacaaagaaaagagatggagagaaaactggatgagggtttcgcactgggtgtcccacccacaggcctcagcagccctgccacggatctgcccgattctttcgcatcaagaagttgatcttgcgagccatttccatgttgtagatccgccggcacctttcatagctttccctctgtcgccggcggcatggcttctcataataccgccgatgcttaatgtcctcaatgagcccatccatagtgaggattctgtttagggtcctgtatgcgctttccacgttcccttcctgtaccatcacagtcctggcgatgaacttcagatgttttgccatgaccttggatttaaaccttcactctgtagagcctcgcgcgctcagtacctagcccaccggaagggttctcactaccggaagcggaccc

SEQ ID NO: 313195 - DNA, 633 bp, Homo Sapiens
  misc_feature (593)..(593): n is a, c, g, or t
  misc_feature (600)..(600): n is a, c, g, or t
  misc_feature (606)..(606): n is a, c, g, or t
  misc_feature (619)..(619): n is a, c, g, or t
actttttcatctgcccaaactgaaactctgtacccattaaacaataactcctcactgccccctcctccagtccctggcaaataccattctactcctagagtactttcagactcagtttcttctttcacttaataaaagacagggtccactgctgactaatgggattgtttctatatttggaggccttcttgcagacatgtgatttgagtttattgcagagaatggtaataggaaatgggattgtacaaagaaaagagatggagagaaaactggatgagggtttcgcactgggtgtcccacccacaggcctcagcagccctgccacggatctgcccgattctttcgcatcaagaagttgatcttgcgagccatttccatgttgtagatccgccggcacctttcatagctttccctctgtcgccggcggcatgggcttctcataataccgccgatgcttaatgtcctcaatgaggcccatccataggtgagggattctgtttaggggtcctgtatggcggtttccacgttcccttcctgtaccatcacagtccgggggcgatggaacttcagaagtttttgccaagacctggggntttaaantcgtgnccgaattttgggnctcgaggggcaatt

SEQ ID NO: 313196 - DNA, 2143 bp, Homo Sapiens
  misc_feature (556)..(556): n is a, c, g, or t
  misc_feature (583)..(583): n is a, c, g, or t
cccctttcaagttgttgcccaaagactgcttctaagaacaacacagcaattctagactcaacatacaggagacatggaggtattattcctttcaatctagggatctttcatgccaggtccacagaagcatttaaaggaagtattgtacttgattgtattagatttgaaaaacttgctaccaccatgtgaaggccctagctccaggcctgccctgctatactttggcatcctttgggtagaaagcctctagctacttctgagctggtaatggtaaggaaactgaatattatttcacatgtttcatctcacagcctttttggctttagtcatcccccagagaaacatattaggctcttggttagcctctaggtaaaatctcaaggggtatggttttctgggtcaaaattagaagcacagctctcttctaaagctctgggtggtcagtgtgagataatggctgggggaatttagccctgccattcaaatggagatggtactggtggtgggagccagctacggctttaagacagacttaagtgggtgggtggggaaggcnaatctagctcacctcagcagggaaaantggagctcccccaatggataactttttatgctcataaaccctgaaatagtactaaaaatgagaaaaatccccaagacttctctgattcccaggttgggattagctgagggaataggaacaaagaaccagaatcctacttccatgagccatgcctggagtcagtattgtctccagtgtctattcccgtgaaatcggttcctccagctaccaggacaaaccccctggcagcgcctgggcctttgagggatgccttatggagacatggatgtagtttcagctgccacctacaccagatcagcaatttttaataagtcatttgttcatatcctgttcaaaaccattcttcctactttccacacaatatgcacaatgctttctttcatttaaatatttacaaacagaaaaggcctatcttttaaagaaaagacattttctgagtctctataaagtgcagctaatttaaggcaaatttaagtgaaatataaaagtggcttattctctctctatatacatttcccagctttaaaagataaggtctcctcccctcaaaaaaaggagagagaaacagagagggctttaattttttttctggcaattttaaaatgtaagatcttactggttgtaggaaatcatagatttctgaacatcataagtaaaatggtcttcttctttaaaaaaataacttttatatagcttcttcaaacaagttaaaaggtggcaaagtatctgctacagtagtttggaggactagaggactgatgggtaagtaagggttgttttgttgttaggtaaatagatattaggcagtccatttctaaaatatgcctgatgaagctagatacctaaagctacccttagctccaggaatgagtatcttccatctccatcggaatcaaatgctctcaagctctctggttctggcatagcagaacctagggaggtccagatttcctggtaggtcagcttcccatccacgtcctggccagtcttgcggaataaatcctgaagatcttcagtgctagaaactcctggtagggagataggtcttagttgggcagctttctcaactgggtctccaagaaactgtgaaaattttggcaatgctgatggctttgatgtgaaactctctacttgctcttcatcggcggtctctggaggcctgttgctctcaggtttgtttgtaagagcactgatcagctggagtttctctcttagcttggatacctgagaatttgaactatcttctttctttatgctttggatttttactgtatctgttctgttggtgacttgatccaaagactgtcttttcagagtggcagatctatcacccatcatgctgaaggacaggtttgctttcttttctaccttgctcatagcaaccacatcgctttctatcaggttgactctctgggtaagattactgactgtctcgttcattccctcgagtttaagatcattctgtctctggtaccccactagggcactgtttacctcctctaaagagttgtgaaggtacaggatatcctgtttcaaattctcactgtgggttttattgtc

SEQ ID NO: 313197 - DNA, 995 bp, Homo Sapiens
  misc_feature (56)..(65): n is a, c, g, or t
  misc_feature (107)..(119): n is a, c, g, or t
tttttactttaacagccttttcatttactcgtattgtcttgatactttacaatgannnnnnnnnncctataagataatcgtattgttgctgtaaaagccgtaattcnnnnnnnnnnnnnaattcccttaaagaaatcgtgtgatccatttcccattagatttcataaacacacgtgaaacttcagacacaataggagggtggtggttttctttcggtttctgaggtcttctctctgaaacatcagagctgataatagttcggcctatacatgcatgctgccatagataattgggtggtacgtgcacctcctgtttcaaaaacgcaagcagaacataggtctggacaagggcaagctgcaactcaatttctgctgcaaccctagctcaggtaagttatgtttattccttcactttgctgatatagtcagtgagtctgttgatgccttcttcctgctgttctagggcatccaggacaatgcccatcggtgtcctcttcaaacctattccttccattttattctccagtttgttcttgaggttccgaagtctcaacgatgcatggataaacatcaacagcaaaggaaaagtaatgccaaacacaaagaccatgactcctccaaacatggagataaggaaatagctcgccaacatgaccaccataacgaacgtcgtggggtagcgcttcttcatccggcgaaggacgtctttattgtgggctgcccacacaaaccctgtgaacaccagcaccaccacgattcctcccaggatcatgttgaagggactcagaaaccccacaatggaaatcatcatggcagccaccaccaggtagttggtctggtaatagagcaggttgctcactacgcggttgttccatttggaaatgtccctgaagtccggccgggcaaagcgatcggaacccgggaagaaatcgtcccaggcgcggagtggggcgatattaacgtccatgttctcagctttgcgttcttcgcctcccc

SEQ ID NO: 313198 - DNA, 531 bp, Homo Sapiens
  misc_feature (390)..(390): n is a, c, g, or t
  misc_feature (395)..(395): n is a, c, g, or t
  misc_feature (433)..(433): n is a, c, g, or t
  misc_feature (472)..(472): n is a, c, g, or t
  misc_feature (479)..(479): n is a, c, g, or t
  misc_feature (492)..(492): n is a, c, g, or t
  misc_feature (510)..(510): n is a, c, g, or t
gaggtgcggaggcgtgtggcagttgacttttgctgatggagcctctctgaagggcaaattcaaagtacagctgggtgctgcagcactgggagtcgagacttgtggctgtggttatgaaggagcctcgtcagctatgcctttagcccctggtgaagcagtgccagtcacactttgccagtcaaacggagaggcagcagtagtaagaccagaccaaatcaaaccaaaccaagcaaaccacggggaatggagacacagagtttcattctgtcacccaggctggagtgcagatgcagtggcatgattgatagtgcactacaacttgggaactcctggggctcaagccatcttccctccattgccttccaagttagttgggggattacaggttcntgttnaggcacacagcattaaagggcagctggcccacaagccnggaaggaggaaggcttcattcaggaaaccgaccttattnggtttcntgtttttcagatntttcagccttccagattnagattgggggtttttaaaggt

SEQ ID NO: 313199 - DNA, 1020 bp, Homo Sapiens
  misc_feature (147)..(217): n is a, c, g, or t
ggggggaattccaagcccttagtcatggccagggttttcctagggaacacgctatggaccatgttccctttccttattggggcccggcgccccaaaagaatgggttttgaaagctttttcagggggccgagggcggccgaacaaggnnnnnnnnnnnnnnnnnnnnnnnnnnnnnnnnnnnnnnnnnnnnnnnnnnnnnnnnnnnnnnnnnnnnnnnttctgctgggtggtaactctttatttcattgtccggaagaaagatgggagtgggaacagggtggacactgtgcaggcttcagcttccactccgggcaggattcaggctatctgggaccgcagggactgccaggtgcacagccctggctcccgaggcaggcaggcaaggtgacgggactggaagcccttttcagagccttggaggagctggtccgtccacaagcaatgagtgccactctgcagtttgcaggggatggataaacagggaaacactgtgcattcctcacagccaacagtgtaggtcttggtgaagccccggcgctgagctaagctcaggctgttccagggagccacaaaactgcaggtagtgatgtgcaagagtccatcctgcagttttccagcaatgagaaactcctcgctgcggttgtgggacctgtggaagtatccgcagacactctccatggcgggggtgtagacgaaccggatgtcagcggcatcccctaaggcttggaaccctttatacatcttggtcatcttgatctcataacgctggtataaggtggtctggttgacttctggtgtccccacgaacttggccctgatgacgaggtcggaattgcagaaggccgtctgtgggtggggtgggacacaggtgcaggccctgctgggggctatcagccacagcaacaacaggatgccagaagccaggggctcaaagggggccatggtgggttctctggtgtctctctgggcgctggatctgcggcgatggcggcagggcctgagcgctagaggataaatgtc

SEQ ID NO: 313200 - DNA, 593 bp, Homo Sapiens
gccttcaatttttgtttatttttagaaaataaatggcaaaatatatacactgtggagtctgaatctcctcatcatagagtgtgaacgatggtccggctgcgaagctgctggaatatactctttggcatgggcaactgccgtctttggtggctcaggtggaggtgggggcccttccaccaacttcacaaaataatggcaataaaccttctccatgatcccaaagcgacctctgccatggtagcggatgcgtttcaggcactggcctcgtcctgaggtggactcagctatatataaattggacctgaattccacgttatggtctctcactgccatatcttgtgcttctaagagaacctctttaattattttggccccttttttgtcattgaattccaactgagccaaagcctggtcaatagacattcctcgtatcaattttgccaaataccacatcttgtctttgctatattttatttgtcttcgacagtggtagatttccccaaggccagcttcccccggctcctcaggttatgtatccataacgcacccaactgtcccagtactgccgccgccatctttcgccctcccgctac

SEQ ID NO: 313201 - DNA, 848 bp, Homo Sapiens
  misc_feature (97)..(100): n is a, c, g, or t
  misc_feature (103)..(111): n is a, c, g, or t
  misc_feature (113)..(117): n is a, c, g, or t
gtcactttaccctaggtggggcccggcgccgccaaaccgaaatggtctaggaaaagcttcctcgaagggccgaggggcggcccgaccatgttttttnnnnttnnnnnnnnntnnnnnttttttggccttcaatttttgtttaattttaggaaaataaatggcaaaatatatacactgtggagtctgaatctcctcatcatagagtgtgaacgatggtccggctgcgaagctgctgaatatactctttggcatgggcaactgccgtctttggtggctcaggtggaggtgggggcccttccaccaacttcacaaaataatggcaataaaccttctccatgatcccaaagcgacctctgccatggtagcggatgcgtttcaggcactggcctcgtcctgaggtggactcagctatatataaattggacctgaattccacgttatggtctctcactgccatatcttgtgcttctaagagaacctctttaattattttggccccttttttgtcattgaattccaactgagccaaagcctggtcaatagacattcctcgtatcaattttgccaaataccacatcttgtctttgctatattttatttgtcttcgacagtggtagatttctgctggtctccgaggttctccaggcagttgtggaggataaacaattttattcttcttctcccattttcgagaaatgtcaagagaagcacttgtgtggatatatgattgaggtaaaacacccaaggccagcttcccccggctcctcaggttatgtatccataacgcacccaactgtcccagtactgccgccgccatctttcgccctcccgctacggaagccgccccc

SEQ ID NO: 313202 - DNA, 801 bp, Homo Sapiens; identical to SEQ ID NO: 126877

SEQ ID NO: 313203 - DNA, 876 bp, Homo Sapiens
  misc_feature (263)..(338): n is a, c, g, or t
ctctagcttatccctgcacaattattagagtgaatgaaaaaccactttcctgctttccattgttataaattctaagcttaagataaaagtggttctttacatgactgaatcaattacaatttatgggctagagccaaataggttgaagacaatcatccaaacagatcaatggaatagaatttcattggaaatgtaaaacactttcccaacaatggtcatgactttcttctgtttttgagaagagtttcatatgctggaccacnnnnnnnnnnnnnnnnnnnnnnnnnnnnnnnnnnnnnnnnnnnnnnnnnnnnnnnnnnnnnnnnnnnnnnnnnnnnccttgtggcccccttggcccaagcgatttttaaattgggcaaggtttatcctggggcccgaatttggggctaattggccaatttccccttaaggggggccgtttaaaattcaatggcccgggttttaaaacggtgggactgggaaaaccctgggggtacccaatttaaaccccttggaagaaaatccccttttcccaagtgggggaaaaaccaaaaggccccgaccggacggcctttccaaaaagtggccaaccctaatgggcaatggaaattggaaggggtaaaaatttggtaaaaatccgggtaaaattttggtaaaacagcccattttttaacccaaaggcccaaattgggaaaaaccctttataattcaaaggattaccccggattgggttggggggttgtcccatttggaaccaggggcccctttttaaggaccggggcttccaccttaaaggggggaaaaccggtttttaagggcatggcccctttaggggaccctatcccttaaaaaagtttttgggggccaaggggcccg

SEQ ID NO: 313204 - DNA, 780 bp, Homo Sapiens
  misc_feature (171)..(179): n is a, c, g, or t
  misc_feature (245)..(278): n is a, c, g, or t
  misc_feature (592)..(592): n is a, c, g, or t
  misc_feature (598)..(689): n is a, c, g, or t
  misc_feature (709)..(709): n is a, c, g, or t
caggaccaggtggcacttccacctccagcctctggtcctaccaatggattcatggagtagcctggactgtttcatagttttctaaatgtacaaattcttataggctagacttagattcattaactcaaattcaatgcttctatcagactcagttttttgtaactaatagannnnnnnnnccacttttgttctactccttccctaatagctttttaaaaaaatctccccagtagagaaacatttgnnnnnnnnnnnnnnnnnnnnnnnnnnnnnnnnnntccctattagatacacttcttaaatacaatcacattaacattttgagctatttccttccagcctttttagggcagattttggttggtttttacatagttgagattgtactgttcatacagttttataccctttttcatttaactttataacttaaatattgctctatgttagtataagcttttcacaaacattagtatagtctcccttttataattaatgtttgtgggtatttcttggcatgcatctttaattccttatcctagcctttgggcacaattcctgtgctcaaaaatgagagtgacggctggcatgngtgtcnnnnnnnnnnnnnnnnnnnnnnnnnnnnnnnnnnnnnnnnnnnnnnnnnnnnnnnnnnnnnnnnnnnnnnnnnnnnnnnnnnnnnnnnnnnnatctatacaaaaaatttttnaaaattagcatggcggcacacatctgtaatcctagctacttgcaggctgaggtgagaaggtcattggagtt

SEQ ID NO: 313205 - DNA, 1000 bp, Homo Sapiens
  misc_feature (679)..(721): n is a, c, g, or t
  misc_feature (840)..(840): n is a, c, g, or t
actcccttacattatgcagcttcgaaaaacaggcatgagatcgctgtcatgttactggaaggcggggctaatccagatgctaaggaccattatgaggctacagcaatgcaccgggcagcagcaaggacacttagcctgtgatgaggagagagtggaagaagcaaaactgctggtgtcccaaggagcaagtatttacattgagaataaagaagaaaagacacccctgcaagtggccaaaggtggctggggttttaatactcaagagaatggtgggaaggtttaaacagcttgggtttattctttactttgtatgttgtgttgctgtccccagtgtcctacaaactaatgtatttgcgcacaagacatcatctatgaatgatgaagtcctctcaccttcagagccttagaaaaatgcccactcttgctcctgctcgcgccactcgctcaaacctcccgctccagttcctccccccggtcccttacgcggccaccattcctccccggcattgtgtcctcatacacataccacaggttcttaccgcctcgttttccccgtccccttcccgcttgccttgtcgccccccgtttttccctcttcctacacccccctttcccgcccctgttctacgtcgcacctgaccttctgtcccccagacatgggccccgtcggttccgcacnnnnnnnnnnnnnnnnnnnnnnnnnnnnnnnnnnnnnnnnnnntgttgccacgtaccaccactttttagcagagaacaacgcccctgcttgaaccccactccacaacgtcccacccttcgaacctatcgcctgaacacttccatcagcccctctttatcccnccgtgtctccggcgcgctgttccccccagtagtttcatgtatcacctcacccttcccggtcgcacccccgcgatcatttaatttagagccactacgccactcaccgttcgctccagactcgctttctccctgcgactgtggtcaagcagtcccttgttcg

SEQ ID NO: 313206 - DNA, 1153 bp, Homo Sapiens
tgtttggggccttccagtgcccctggaacttttgcagaccactgcctgttcgctgtgagcggtcctttttcagagtggatataggttacaggggagggtggctagagctccccccgtgccccgggaactggttacgccacagttaaccagaaattcgatatagaagaatattccgacaccgttagcaactatctcaacggttattcgatgccgtgggaacacaagcttgtaagcttcgtaccagtaactcagcaggaacaagagtcaaccatgtttataagactttgaaaggtgagaaaacttcatcatttcatagatgatgtcttgtgcacaaatacattagtttgtaggacactggggacaacaacacaacatacaaagtaagaataaatccaagctgtttaaccttccaccattctcttgagtattaaacccaggccacctttggccacttgcaggggtgtcttttcttctttattctcaatgtaaatacttgctccttgggacaccagcagttttgcttcttccactctctcctcatcacaggctaagtgtagaggagtgttaccctcagtgtcttggatgtttgtggatgctttgtagtacagaaggatatgaatcatcttcaagttacccttggctgctgcccggtgcattgctgtagcctcataatggtccttagcatctggattagccccgccttccagtaacatgacagcgatctcatgcctgtttttcgaagctgcataatgtaagggagtacagccattttgattgacagcattcacttgagcaccttttcccagaagggcttttacaatctcatcccggccagcagaagccgcaatatgaagaggagaccaacctgcatcgtctttatcattcactggcactccaagttgcaacaaaaattcaacaatttctgtatgtccagctgagcatgcccagtgcaatgcagttctgctgtcctggtcagttctagtagccagggatttatcggccagaatactctccttcaactcttccagcttcccgctgtaggccaggttgcagaccattaggttagacacacacccctccatttcgctgtcccagcaactacttgtcgcgcgagcaacgcccgcctcacgtcgccggctccggctacgccccc

SEQ ID NO: 313207 - DNA, 400 bp, Homo Sapiens
ttgaggtaaccacccaagagaagagaaaaagggggaagaaagaagtgaagaaagttgcgcgtaaagacagtatctgagatggactaaactctaaactctaagcagaaaacaaaggaaggaaaacagtgtgtgcacttatacacacacataattaaaatttaaaggaaaaaagaagggaggctgctgggaaacacgtgggttaggcaggtcctgagcaagctaccacagggaattctggccaagcctgatggctttctagagcaaaagacagcaaagtgtagactcagacaatgatacaataataaaagcaaacattgtagactatttggaaattacagaaaagtatgtttttagtctcctttaactgaacagctatggataacatcaatagtttggcatt

SEQ ID NO: 313208 - DNA, 1246 bp, Homo Sapiens
  misc_feature (106)..(144): n is a, c, g, or t
tgcttgaaaaaaaatggaaaatttattaattagacagtatgtgggcatcctgttccacatgggaatgagaagatgctataggttctctaagtattgcacagtctgnnnnnnnnnnnnnnnnnnnnnnnnnnnnnnnnnnnnnnntcacatgatattgggaaccatctcacattatgaataatctaccaagaaacatttaaaaaagaaaaccctttgtttctacagtagctttaagtttatagttcttggaatgactgtattccattgaagacatctcagtaacaggaagctgttttagcaatcccatgtgcaaatattaataaaaaatatataaaataatgcaattcatctcttgccttcaccccggcaatcatgacatttctgagaactgttttgcttgaaaatgggttaagctgtaagttttgcctgaagctccatctctgcagcccgtttgagtgcaacatccactagaagctgaaatccactgaagtcctggttgaggtccggtggagtagggggaggagtgttgaaaagaccactctgtgtattggtacttggtccagatttacaagtgtcctctgggtacatgagagaggtgtctgtgaagtttttggccgctatctgctgtatatctgtgttttgtcccacaccgaccgactggcagagagagaaagggacatctttcaatgcagtcacagtggtatggcagatcactgatggacgagccaaaactgatcccggggatgacggcttaggagacagtggcctccctagggttgggtttggcccagctgtacaggaatgaaatggggtctcctctagagctggcatgaagtttttgatgcccatcacggactccacagagctcgtttcagaaatcttggccccacggcgggaaattgtgaactgatttggatctttgccatcctttctcagcatgtcagggaggagcctgcggcgggcgttgatgaaccagttacagacctgtagcgtagacaggtgtgtttgctgggacagcaacgctttttcttgctctgaaggataggcattgtaacggtgctcatacagccaatcccgaagaatctgcacagactccttgggtaggttgccccttctccttctcttgcctgagccagcggatgaagaaaggtccaagggaatgtccatgctgtcctcatcctcagtctcactgccagatgctgcaacaatacctaggcaaggactagggccagttgtcagttgctct

SEQ ID NO: 313209 - DNA, 694 bp, Homo Sapiens
  misc_feature (188)..(261): n is a, c, g, or t
  misc_feature (513)..(513): n is a, c, g, or t
aataattttacaagtgatggcatctcattttagaagaagaggcatcaatgacagcagttactgtatctcgatgctgaatatgtttttaaatacaagatgctgtgttcagcattgtacatacattatcaaattttattctgataatatgctgcatgatgtattaggctgggttctctcagacagaaccnnnnnnnnnnnnnnnnnnnnnnnnnnnnnnnnnnnnnnnnnnnnnnnnnnnnnnnnnnnnnnnnnnnnnnnnnntctctacatttattagaggaattggatcatgcgattatgggggctgagaagttccaggataggttgtctgcaagctggagaaccagggaagagagtagagtagctttctccaagtcctgaagcttcagaactagggaaactgatggtataactctcagtcagaggccaacggcctgagaactcagacagccactttgcaactcctggaatcccaaggccagagagcctggagtttggatgtcccatttttgntgtatccatacccctgaccaattggatggtgcccacccgcattgagggtgagtgtccctctattaaatattttaactatagatctaactgcgatataggcacttgattcttggtggtaataatttggaaagatccatctgaactttaaggggagtaccctgaggaactcctacattttagg

SEQ ID NO: 313210 - DNA, 837 bp, Homo Sapiens
ggttctggaaattttatgtttacttaaaacccttgtatataatagaaacataatccattgagcctttggataaacacaaattttcggagtttactcataatatattcttcaaattatcccacacaaaactgcttagaaagaatgtgttaaactatactgatgatttaaaaacaagcacaacaacgtaaagaatcttcctctatttcaggagaaatgatttactgtgaagttatccttttaacatctttggtgtcaattctgggtgaaccaggatggtcgctttctgtctcgttcaatgatcctcttgccctgatcttgttcagacggtgtctctcctgtgtacagcaccacagtctctatggtgggagccttaaaagggcccccttcttgcttccctatctgtcgtctgatttctgcagtctccttgcacaccttttcatagcagtaggcacaaaggacatgtttctgtttcaggtgaccacattcaggacaaacgtctatgttgttcttaactttaataagcttctgcggatttcttctcctacaccggttaacttcaatggtgcgtctatttttgggagctgccatccaaaagatactgtccaaaaggctggaattctctttacttccactggtatcatttgctggctctgtaaacatggctgggccctgtactgctaatgctggtccccacggaggactgggaaagcccggccggctctgcggaagcttccgtagcagtcgctcccagtagtttcgaagcactccccgggccgcagaccacggcgaaaccaccaagaccagcatggccagcgccattttccctgctggaagccc

SEQ ID NO: 313211 - DNA, 819 bp, Homo Sapiens; identical to SEQ ID NO: 128045

SEQ ID NO: 313212 - DNA, 1444 bp, Homo Sapiens
gctcatcctccccctcaagttcaaggtctaggtccaggtcccgttcaagaagttcttccagttcgcagtcaagatctcgttccagttccagagaacgttcgagatctcgtgggtcgaaatcaagatccagctccaggtcccacaggggctcttcttccccacgaaaaagatcttattcaagttcatcatcttctcctgagaggaacagaaagagaagtcgttctagatcttcttcatctggtgatcgcaaaaaaagacgaacaagatcacggtcacccgaaagacgccacaggtcatcatctggatcatcccattctggttcccgttcaagttcaaaaaagaaataatgtattaaaatttacatcttaaaaaaatccagtacagtgcatgaagcatatttttaaagaagttggtgtcttacttggtcagaagtgctaaatctgctagtagaggtgcatgcctttcattgcttttcaaaacaatacagctgtgtttatttgtgaagttaaaagtaaatagcattttaagccataatgtcccaaaatagatgttctgtcattcattatttacaaccatttgcttcatttaaaaccatttcagctataacaaagtactttgcttcctaatttaaacccatttttgtcatttccaaatacatcctgtccattggctaagacaggattacctaggcttgcctgaactttgggcatggaagaaagactggaaactagttggaaacaacatacttatggaaaagaaagtcagcctttttatgctgttaacagatgtcagagtgattctcaccaaaaaaagttaaactatgttgtaagcagccaactgtaaatgtctattttgaaattccctatgctaagggtgccttagaatcattgtgtctcttttatccagctttacttttttgctccacatttaatgcaaaagaatcttgtgatgtctacaaggagagaagtgggatatattttcctttctgacacataatttggggcaaaaaagaaagtcttaagagtttatcttttctctgctgatacggttgcttgataaagacatctcaaaatgtttaccaatgttttaagaagctttgtgtgatattcttccaaatgtagttaccaaatataatatggtagaaaaggctaaatcatacttaatgagcaaattgaagtaagcttttaaagtatatttctcttttggtgaaaggccaatggagacattgtgaatttaagtgaacatttgcctcaagatgttaactataaacacactgcatacaattttcttctgaataacaaatgaatgcttattgctgcatgatgtaagcaaaagtcattatttttcctattcatttgaaataagttatggcttaaaatgcttttggagtttatttctcaaaattaaaatctggtcacatgagctttagtttgttttctggttt

SEQ ID NO: 313213 - DNA, 529 bp, Homo Sapiens
  misc_feature (22)..(22): n is a, c, g, or t
  misc_feature (32)..(32): n is a, c, g, or t
  misc_feature (110)..(110): n is a, c, g, or t
  misc_feature (123)..(133): n is a, c, g, or t
aaatactagttttgaaagtaanataccttgtnatagttatctttttatatgaaaatgaactctaaatacatatctttctttcaatgttcatatcaacaaagctccaattnaatggtccctggnnnnnnnnnnntcgttccatgttgttcccaggtcccgttcaagaaagttcttcccagttcgcagtcaagatctcgttccagttccagagaacgttcgagatctcgtgggtcgaaatcaagatccagctccaggtcccacaggggctcttcttccccacgaaaaagatcttattcaagttcatcatcttctcctgagaggaacagaaagagaagtcgttctagatcttcttcatctggtgatcgcaaaaaaagacgaacaagatcacggtcacccgaaagccaggtgattggtgaaaacactaaacaaccctgagccagggccaaccctacggaacaccactactttacccagacgccacaggtcatcatctggatcaatccgattctggttcctcgctgtgccgaat

SEQ ID NO: 313214 - DNA, 748 bp, Homo Sapiens
tgggaatctgtcctcatttaaatatgtgtaaatgcatttccacagcaaattgcttcatgccctttgtctataaggaaattattccttgtagctaatacatttttcattttgcagtccaaatcttttttgagaaaggcctatattaggttactttatctgtactgacacttttaatattggaagaatgcaactgtcatctgtcagccttttctgcaacaggctaattactcagtttcattaattttctctttgttcccaattatatagtcattttaatggctttatttgtagtctttgcaaatttttcatattttattagcttgtgaaaataaagattatgtaaagtctattaattgctgggttcagtggtaggattatctcatgattcctacttgtacagaatgattagttttgcttcttcacattttggagtttagatgttaagatttcacacagtcttgtttctctgcatttgtttctttgtaaaaaaaattactctgtttttgagtggaattcattctgttgctttcttaccacttctgcaaatttttatcttagccacatataatccccctagtttgttgtcatctaaacttaatgaacatgttctctattccataagccaggtgattggtgaaaacactaaacaaccctgacccagggccaaccctacggaacaccactactttacccagacgccacaggtcatcatctggatcatcccattctggttcccgttcaagttcaa

SEQ ID NO: 313215 - DNA, 544 bp, Homo Sapiens
cgttaggtgattttctttttgaggtattgatgactttattattctgcaggtacatgtccaggggcccagcctctgggcccagtaactcagctactctttgtggctttcttcatggctttttttgtgggctgccacgcccatctttatcaccagaatgaggaactcctggaagttaactgcaccatcagtgttgatatccaactctttgaaccagacgtctgcaccctttttcctgatatactgaggacactcggtctctagcaatttcttcaggtcatccctgtagacggcatggaaattcccctttatcagggagtacttgtggtagacgtcgatgatagagttcaaggctttctccagctcggtcaacatgatgcccacggacttgccccaccaggtcttctgaaagacagctgacaagagacatgcagggctgagaggcagctcctttttatagcggttaggcttggccagctgcccacagcttcaggccatcagagacagcttctccctgccagagttgctacagtctctggtttctccc

SEQ ID NO: 313216 - DNA, 674 bp, Homo Sapiens
  misc_feature (81)..(81): n is a, c, g, or t
agaaaccaaagtgtttcacttgatgaaccatggaagaccccacaacacttcagcagggtagaaggaagaccaatgacattntgccgtgaacttagtacattcactaggatgtatgacagatagagttaaaacatcaacaacttaaatataattaaatactttttaagaaatattatgctttaaattatttaaaaataatctctttgtggatgttataataaaataatgtcacactgcacctggggaaggttggggaaaataaataagcttttcttcaagctctgactctcagtccatgtatgaaggctcatggcttcagattttgaaatatttggtccagatgcttcatggaatccctgacccatctctccttggggtcagcacagacctccttgccccgtttggtcttgaagatcacagcttccttgggacattggatgttggtgattcttgtgtagctctccagcctctggataggaattttcctattgatcacgttaaagcagcaggtgattggaatggaaactgaatctggctgagcaagtccctgagggctgaaagtggctgccatgagcagcaggcacagaagcgctgcagaaaccttcatcttggagggcaagggtgtgagcttcagcatgagaggtgaaggtttctgggttgttctcaacctctct

SEQ ID NO: 313217 - DNA, 289 bp, Homo Sapiens
ctgtgaatgtttgggaattggtagaaaggcaaaaagtaggatattttgacctgactggaaagatggttgtgtttttattgccaggtaataagtgtgatcattgttgaacttcagctccagtgtctctccagaataagacattggcattcaaatgtctatatcttgttacttacaaaataaaaaacagataattagtggcttttaaattgtagttatatcagtgtatatacacgaggggaactgtataaagacatactaaagggaacagattaaaataagtattattaat

SEQ ID NO: 313218 - DNA, 599 bp, Homo Sapiens
  misc_feature (26)..(26): n is a, c, g, or t
  misc_feature (34)..(34): n is a, c, g, or t
  misc_feature (53)..(53): n is a, c, g, or t
  misc_feature (68)..(68): n is a, c, g, or t
  misc_feature (108)..(140): n is a, c, g, or t
ccaacgcccaagaagcccaacggaanaagggcangaacccaacgcccctgaancgaacccttccttcnaccctgcctcgggaaaacctgtgaatgaaggtaaaggaannnnnnnnnnnnnnnnnnnnnnnnnnnnnnnnntgttgtgggaggagggatagttgtggggggatcgtatacatacagcatataacccgagtgagctttcccccactatgtttgaagcttcacagcggtatgtacccttatctgttttgtttaggttattgatgaacaggttgggcccagacagtacggcgtgttgaggcatttcatcatcgactctcacccaagttaccatcacaggctggggcttcccgatggcttcacatgttaactcaagcgcgtccccttcccgggttaagccttgtagaggataagtcatctgaatgtgcacttgaggcttatctgtgtgacaaaaacacaaagtataatgtttagcaaatgatatcatcaggcaaaatcagactcacacactgcctcaaaaccacagtaccagcacttactctctcccatccgatgccttcagtaacacccttctaattagttggtaatcctggc

SEQ ID NO: 313219 - DNA, 815 bp, Homo Sapiens
ctacaaggttttattaaaattaattttaacattaataacacactaatataaaggtaaaatttagcttatctggtataaaagtcatacaggaagcattagtaaatataaaatagcgtttagctttcttttgtctaaaaactaataaaaattggtgctaaaggaagcattcattttactagaggatcataaaagttaaagacttaaaacaaactttggcaattaagacagcataccaagatgcaaatgcctggttgaaatggatcaaatattccatctgcaggttaaaccttccactaaggtggtcctccagtcggccaggcatgggctgcatggtagctcttttccaggattctatagcctggagtaataagtcatgccaagctctctctgctatatcccaaagtccctgccaggtacaagcccccgagggccatccagcttccatctcccaacactaagtttactacgtgtctctcatggcagggaggagacttagcattccttggagacctgaagggatgcagtgagcttaagaattttcaagagcttatcactcagtcagcccttgttcatcccaaagcggatgtgtggtggtattgtggtagacctttattggggactctgccgagtaactagagtggcacttgtgctttagtccatttggctatccctttcaccctgacatttcatcaacaagaggaaaaaataataataagaagaagacatcataaagcgagaaaagccccttataggtctttcaactctcacatctatttagatgcaactgaagccccgcaaggagtcccctgtgccga

SEQ ID NO: 313220 - DNA, 683 bp, Homo Sapiens
  misc_feature (74)..(74): n is a, c, g, or t
  misc_feature (122)..(122): n is a, c, g, or t
  misc_feature (182)..(182): n is a, c, g, or t
  misc_feature (185)..(185): n is a, c, g, or t
agcaagttttgaaatgttaattgtgaaggtaattctgtgtgtaaacatattggctaaagttaaaggtgtatcanccagttttcctgtgaactggacattaaaataaaagcacaacaggtttnccttaaagcactaacctgctctttaacaaaaattataaaaggttaaaaggagtctataanacncttactttatggtcagacattaaaattggataaataggtctacaaggttttattaaaattaagtttaacattaataacacactaatataaaggtaaaatttagcttatctggtataaaagtcatacaggaagcattagtaaatataaaatagcgtttagctttcttttgtctaaaaactaataaaaattggtgctaaaggaagcattcattttactagaggatcataaaagttaaagacttaaaacaaactttgggcaattaagacagcataccaaggatgcaaatgcctgggttgaaatgggatcaaatattccatctgcaggttaaacaaaagcaattaggcatgcttgtgcacatgggcagggccagagaccctgattgtcccccttccactagggtggtcctccagtcgggccaggcatgggctgcatggtagctcttttccaggattctatagcctggagtaataagtcatgccaagctctctcctgctatat

SEQ ID NO: 313221 - DNA, 1617 bp, Homo Sapiens
  misc_feature (738)..(809): n is a, c, g, or t
ggccccccagaggtagtacagttgaggctattccatcgcgcgtatgatataagtagagcgggggggtggcatgtatctagtgggagaagatagtgatagatgatggcatgccgggcgcttttttgtgcgctacatcgcgcgggagagtctttaattttgtgcatccggcgcgccgaggaaagacacagtagtgggggtgagtgacctagagggcggagtgcagcgcaggtttataacattagagatcggcacctggcgggatgatgggaggtcgtgccaataggcgagggggtcggagggagcgcggtttatataattgtgtgtggcagcgcgcaggcaacatagggtcgtgagtgagtagaggaagaaaggggcggcggcgggagctggccactgcatatattgattatagagggtgcggacctgggagtgttcgtcccggcgtctcgcgttataatatttcgacggtaaaatagggcgcttcgtggtggtgtagacgggtagaggggtgtggtagtatgagacgacgtgttccgtatgtggcacacaggcggaccgtgtttcgtttgtattggttgggggtaacaaagaccgtggggatttagtaaaagggggtgttcttaccgaaaacaacgcgttctcctcattgctcggtcagcgcactgggggggcgcgcgcggccgagccgagtggtgttgttaaggctgattaaatgggagggagcgggcggacagacannnnnnnnnnnnnnnnnnnnnnnnnnnnnnnnnnnnnnnnnnnnnnnnnnnnnnnnnnnnnnnnnnnnnnnncagttcaatacagcacacctttattgagcacctaaggatctatgctgccagaggagggcagagtcgacaaaacagtgggcaggcctcccctgcagctctctgtgtctgtgatgatggagctgggttggggaaatcctgctgtgacatttgccctgacgcagttccgcacagcatggtggcttccaagctatgctcttgatgggcacccgtaaggagcttctacatgcattagagatggagcctctcctatctttgcaagcctttgtggttcttccctttaaatctgccatccacggacctcaacaggagaataatttggtcttcagtttgctctgttttagacaaatacttcacatggactggatgtaaactgttgcatagtttcgcaaaggctttctcattcattcctgaaattctccatcagtcacaaacacaaattgttcagtatctggggaattcaaagccctttcctcaaaacagacatttctccttatcattcttccttcaggggaagttttgaaagtcattgaaagtcatccccacccactagaggagagaaacgcaagcccagaaaaggcaagaggtacacaggcatccacgggacagtggtgatggggctgagcactgccttccagagctgctgctgggcattgagcgggcagcaccctctcaatgccatgtggaccctcctcaatgtgattgaatgaccgtgtttcttgcagcaagctccttgtaagaatcgctttaggtctctctgatgaagtaaagattgatttctgcagagaaagtgagatacttgtggccttat

SEQ ID NO: 313222 - DNA, 2082 bp, Homo Sapiens
  misc_feature (7)..(7): n is a, c, g, or t
  misc_feature (9)..(9): n is a, c, g, or t
  misc_feature (43)..(43): n is a, c, g, or t
  misc_feature (185)..(185): n is a, c, g, or t
  misc_feature (199)..(199): n is a, c, g, or t
ggaggcncngcccggcccgagccccaaaaaacggcggcccgantcccggccgcccctttctttctcctcgccggcccgagagcaggaacacgataacgaaggaggcccaacttcattcaataaggagcctgacggatttatcccagacggtagaacaaaaggaagaatattgatggattttaaancagagtttttaaanagcttgagaatacggggaaattaatttgttctcctacacacatagatagggtaaggttgtttctgatgcagctgagaaaaatgcagaccgtcaaaaaggagcaggcgtctcttgatgccagtagcaatgtggacaagatgatggtccttaattctgctttaacggaagtgtcagaagactccgcaacaggtgaggaggtgcttctcagtgaaggaagtgtggggaagaaacaaatcttttgcatgtcggaggaaacgggatttcattcctgatgaaaagaaagatgctatgtattgggaaaaaaggcggaaaaataatgaagctgccaaaagatctcgtgagaagcgtcgactgaatgacctggttttagagaacaaactaattgcactgggagaagaaaacgccactttaaaagctgagctgctttcactaaaattaaagtttggtttaattagctccacagcatatgctcaagagattcagaaactcagtaattctacagctgtgtactttcaagattaccagacttccaaatccaatgtgagttcatttgtggacgagcacgaaccctcgatggtgtcaagtagttgtatttctgtcattaaacactctccacaaagctcgctgtccgatgtttcagaagtgtcctcagtagaacacacgcaggagagctctgtgcagggaagctgcagaagtcctgaaaacaagttccagattatcaagcaagagccgatggaattagagagctacacaagggagccaagagatgaccgaggctcttacacagcgtccatctatcaaaactatatggggaattctttctctgggtactcacactctcccccactactgcaagtcaaccgatcctccagcaactccccgagaacgtcggaaactgatgatggtgtggtaggaaagtcatctgatggagaagacgagcaacaggtccccaagggccccatccattctccagttgaactcaagcatgtgcatgcaactgtggttaaagttccagaagtgaattcctctgccttgccacacaagctccggatcaaagccaaagccatgcagatcaaagtagaagcctttgataatgaatttgaggccacgcaaaaactttcctcacctattgacatgacatctaaaagacatttcgaactcgaaaagcatagtgccccaagtatggtacattcttctcttactcctttctcagtgcaagtgactaacattcaagattggtctctcaaatcggagcactggcatcaaaaagaactgagtggcaaaactcagaatagtttcaaatctggagttgtggatagcaaagaactgagtggctacaaagactcagagccagacaacttgtatttgaagcaggggatagcaaacttatctgcagaggttgtctcactcaagagacttatagccacacaaccaatctctgcttcagactctgggtaaattactactgagtaagagctgggcatttagaaagatgtcatttgcaatagagcagtccattttgtattatgctgaattttcactggacctgtgatgtcatttcactgtgatgtgcacatgttgtctgtttggtgtctttttgtgcacagattatgatgaagattagattgtgttatcactctgcctgtgtatagtcagatagtccatgcgaaggctgtatatattgaacatttatttttgttgtctattataaagtgtgtaagttaccagtttcaatataggatggtgacaaacccagaacataaataaattccctcttcccatttctttgtaatgtatactccattctgactttgtccttctcgatctcctttacctttaataacatggggcccgccttgcccacggctcttttatctcggacc

SEQ ID NO: 313223 - DNA, 598 bp, Homo Sapiens
  misc_feature (490)..(524): n is a, c, g, or t
gtaagagaaagcaaatctgtacaaaaaatactctggttgcaagaaaagctagggcacactgttcaactaagagtagtttagctgttggaaaaataagagcatttaattttatctaaaaatatgtataaatcccctcaaaatggtaatgaatcatacacagtacatactaaaaatatttaaaatagagaatattcctcacagaggacttttttctttaattactgctaaaaaaataattacaaagtccaaacaggcagagagatttagcacactgatcacacgattctccatcatcctccacgcttgctctgaagagggtttaaaaagtccagtttctcgttgatttcgctgctccatttagccaaggttggcctggccactgattggccacaagtgggtaatgcgcttggataggtcatgtttgtgtcttggaaatttgggtacgagttgcctttagcttaaatgtctttaaggaagaagaagaagaagnnnnnnnnnnnnnnnnnnnnnnnnnnnnnnnnnnntgtccaagggattctggttgtcctctccgacgcgtgggtcgacgatatcccgtcattccggaccgtaccagcct

SEQ ID NO: 313224 - DNA, 613 bp, Homo Sapiens
atttcagaattgatattttgagaaaaatacatgtgagtcattttttctgtttctcttttctcttaacgattatcactgtaattctgaatctgaaaggtaaaacaattagtcaaaatattattgccatcattctacctgtgttatgaaactacttattcatagttaattctcattaacacttacatttccataaagaaaactcaagtattaataaaagagactttactggcttaagagggctgtgaaagatttttgatagtgaatcatgaccctaagggagagatttgtgtgataaaagtattgtatataatagatcagcgatttttgtaaggcaaacagaatttgtaagttggcagatcttcctaagttgcaaaatgtaatgatgagcttggtggagaagaatgagtcgttcttggaatacctatgtgcagccactacccatctcaatgtcaccttgtttgcattcttggatagcttgtatatgtagtagtttgatgaataatttaaagaaaaacacctaaaatttgaaaaatgattgtaggatcaatttgttggttggctggtttgaccgatagaaatatgcagcatgcaatatatgcttatatttcattct

SEQ ID NO: 313225 - DNA, 1258 bp, Homo Sapiens
  misc_feature (57)..(60): n is a, c, g, or t
  misc_feature (65)..(65): n is a, c, g, or t
  misc_feature (68)..(71): n is a, c, g, or t
  misc_feature (79)..(92): n is a, c, g, or t
  misc_feature (100)..(100): n is a, c, g, or t
  misc_feature (102)..(103): n is a, c, g, or t
  misc_feature (105)..(108): n is a, c, g, or t
  misc_feature (110)..(139): n is a, c, g, or t
  misc_feature (141)..(145): n is a, c, g, or t
  misc_feature (147)..(179): n is a, c, g, or t
  misc_feature (181)..(201): n is a, c, g, or t
  misc_feature (203)..(211): n is a, c, g, or t
  misc_feature (213)..(213): n is a, c, g, or t
  misc_feature (215)..(222): n is a, c, g, or t
ctctttggggggcgggcccccccgacaaaaaaggttttttaaaattttttggtgggnnnnggggnggnnnnaaattttnnnnnnnnnnnnnntttttttntnnannnntnnnnnnnnnnnnnnnnnnnnnnnnnnnnnntnnnnntnnnnnnnnnnnnnnnnnnnnnnnnnnnnnnnnntnnnnnnnnnnnnnnnnnnnnntnnnnnnnnntntnnnnnnnnttggtacccatatgcttatgtttattgtacagtcacaagttacatgttgtaaatcaagcagaacactgtaccagttttcactaactcaaatcaagttagcaaattacaaattttagaacagattcattttctgtctcacccaatgtgggtgaccacaaagatatttactttctatgttattaggtagcaaattaatttgatatactacacagcttccaagttaccttaggatatttcaaagtgtttcaaaactggtaaagaataattcatttccagcctgaaatacaatgcagaatggaccatttaggggtaaataacctcacttaatcactctttcctgctaacaaaaataatacaaatatttgtttatattaggcttactaaattaatgacaactttgaaattatctagatttggttacattgttatattgcacttgagaacaatgacaaaaaaacatcaaagattcagtacctctcccaagaagttcattatatatcagaaattaaaatgaaatataagcatatattgcatgctgcatatttctatcgttcaaaccagccaaccaacaaactaaaaggaatactctccaaaacactgagtattaagtaatttcatctgccttttttgatcctacaatcatttttcaaattttaggtgtttttctttaaattattcatcaaactactacatatacaagctatccaagaatgcaaacaaggtgacattgagatgggtagtggctgcacataggtattccaagaacgactcattcttctccaccaagctcatcattacattttgcaacttaggaagatctgccaacttacaaattctgtttgccttacaaaaatcgctgatctattatatacaatacttttatcacacaaatctctcccttagggtcatgattcactatcaaaaatctttcacagccctcttaagccagtaaagtctcttttattaatacttgagttttctttatggaaatgtaagtgttaatgagaattaactatgaataagtagtttcataaca

SEQ ID NO: 313226 - DNA, 493 bp, Homo Sapiens
taagatttttaaaatgcacttaacatacttcattacagatttcttgggtagggaggatgggataggccagggatgggatggaatcagttctgcctgggaaactaatccgaatcatttacctttctgtattaaccttggcctgtcctaaaaagagaacgactgtttcatcatgagttgctctgagttttgttaatgtttgtgttggtggattgacggttaaatgaagcatttagctggaatatgaactttgggagttttcatgttgtcctggatttctctttgtaaacctttaaaccttagcccctggttgattgtgttaaacccattatgagaatgttatttaaagttgtattataattgcaacctccactaattattcagtactgtagcagcaaagtattatttgtaagaatttggttatttttatacttatatccactctaagtctggcgttctagtcagtaaaatgatgcaataaaattaatatcatttc

SEQ ID NO: 313227 - DNA, 906 bp, Homo Sapiens
  misc_feature (260)..(260): n is a, c, g, or t
  misc_feature (283)..(283): n is a, c, g, or t
ggggcacccgccgtttatagcagccccggtaatggcccccgcgcaactcccgtttggaaatttggttccgaacccgctcggtttgccccccgggggggtttttttatgtggtggggagattccaggcccttggtccagaacccgggatctcccttgggaaaccagctttgggccatggtcccctttccctactggggcccgcgccccccaacgcaatggtctggaaagcttttcgaggggggaggcggccgacaagggcnttcttccccgcgccttttttgtnccaactgcatcttggtggtcatatttattggagagcttgagaaaaatgaaaataccatttagcttaagaagttgtgagttatctgcaaatcaactcatttcaggagtggaagaatccccggaattatttcttaatatcaaaatgtatgcaggtttctcttatgaatgttttgtacttttagagaggccactgtacaaagtctcccgttttccatacaggacaaattctttgtttcagccaactctcagtggaggggcaaccaggacaacgccatctccccggacaaagagcattggaatattccgtttcgttgatttatatatctcttcatatgtttcttcatcaatttctatagtagtcacagtttcttccacatctcccaagatcatatttaaatgttgatcataagcatgtaatctgcctcgaagctctcggtcatttctcattttcacataaattcgctcatctaggctgagcctgataagatccaggggctcctctacagtgttggtagtttgttgctggtctacgtcgtccgccatgtttcaaaccctgcgccctttcccgcctctcgcgagaacacaagagcaacgtcaatctccggaaacgtgaggatacaatac

SEQ ID NO: 313228 - DNA, 2113 bp, Homo Sapiens
tttcatgcaaggttgtttttattaagctttatattcagtttacagctaaatattacagggattatttcttttgacaagcagacatgacatcctaggaaacttttcaaaacagtccaaggactttataactactgggaacagagcaatttactctgcagttaacgtgtatgttaagtacttcaagagtcactaagggaaagaagctaaatgcaactgttccttttctataaaattattatcctgcaaaagtagctacaaaggaaaatcacataactatgacaaagctagagagatcatacatccgaatttgtctttttttatttaggataggacttgggggtcacatttcagaaggcaaataattctttcagaagaagctacatgtcaagttttctatgggtagtattaatactaatatgatttagcttatgtttaaaaaaatcaagaaaagaaaaattttgtctttaaaatctactatattagtgactgtaaggagatgcttagctattgaagagcttctctccactcttgtattttctttatgagttcttctgagagattttcactgtgactgttttgacctctgtatattcatggaaaccgtactctcccagttctcttccatttccagacatcttgaatccaccaaaggggcactgggcacttaccacgccatagcaattcacccacactgttcctgcctgcagagcagaggagattgttatggctttatcaatgtctttggtaaacactcctgctgataagccatagaaagtattgtttgctcttttgatcacgtcatctaaagatttaaacttcatgatttgctgcactggtccaaaaatctcctctttggcaatgcgcatctcatctgtaacattagagaacactgtgggctggacaaagtagcctttattcccccacgggcctcctccacattccagtttggccccttctttcttcccactctcaatgaggtcaagtattttatcatattgttccttgtcaatctgagggccttgagtgactcctggggtcagaggatttccaaggatatacttcttagcccgctcaacactccttcgaacaaactcatcataaattgattcttccacaaaaatcctggatgcggctatacaacactggccctggtggtagaataccccatggtgtgcaaattcaacagcattgtccaagtcggcatcagctaacacaatgcaagggctctttcctccaagctccagggtcaccctcttcagattgcttttcccggcagcttctttgatcaacttgccaacctctgttgatcctgtgaaggctactttgtctatatccatgtgagaagaaatggctgcccctgctgtaggcccacaaccaggaacaatattcactactccaggaggaaaccctgcctcttttattaaagatgccacgtggagagcagtgagaggagtttgctctgctggtttgacaaccactgtgtttccacagctcagtgcaggccctatcttccaaatgagcataaccaacgggaaattccaaggaatgatttggccacatacaccaataggttcatgtcttgtatatgtaaaaaaatttccatcaattggtattgtacggccctggatcttgtcagcccaacctgcacagtagcgcaatgttttgatgcagcctgctaaatcattcagatatgcattggaatagagttttccaccattcattgactccattgtcgccagcagcagacgatctctttcgattaaatcagccaacttgtataatagtcgccccctctcggaagcatccatagtacgccacggggatccaatctgaaaagcctgtcttgcggccttcactgccttgtcaacatcctccttatctccttcttctacctggcagagctcctcctcagttgcaggattaaagacaggaaatttcttgccactcactgaatcatgccattcattgtttatgaagatcttagtatattgaatcttcaaatcggtgagtaggacaggtaagtctggcgtgcctgaggatgacatttctgattcggctcctggaacacaggtgactggctcagcaattcctcgtgccgaattcgccacccagc

SEQ ID NO: 313229 - DNA, 517 bp, Homo Sapiens
  misc_feature (416)..(438): n is a, c, g, or t
tattaagctttatattcagtttacagctaaatattacagggattatttcttttgacaagcagacatgacatcttaggaaacttttcaaaacagtccaaggactttataactactgggaacagagcaatttactctgcagttaacgtgtatgttaagtacttcaagagtcactaagggaaagaagctaaatgcaactgttccttttctataaaattattatcctgcaaaagtagctacaaaggaaaatcacataactatgacaaaggtagagagatcatacatccgaatttgtctttttttatttaggataggacttgggggtcacatttcagaaggcaaataattctttcagaagaagctacatgtcaagttttctatgggtagtattaatactaatatgatttagcttatgtttnnnnnnnnnnnnnnnnnnnnnnntttgtctttaaaatctactatattagtgactgtaaggagatgcttagctattgaagagcttctctccactcttgtattt

SEQ ID NO: 313230 - DNA, 452 bp, Homo Sapiens
  misc_feature (137)..(158): n is a, c, g, or t
ttaacgaatttgtctttttttatttaggataggacttgggggtcacatttcagaaggcaaataattctttcagaagaagctacatgtcaagttttctatgggtagtattaatactaatatgatttagcttatgtttnnnnnnnnnnnnnnnnnnnnnnttttgtctttaaaatctactatattagtgactgtaaggagatgcttagctattgaagagcttctctccactcttgtattttctttatgagttcttctgagagattttcactgtgactgttttgaccctctgtatattcatgggaacccgtactctccccagttctctttcccatttcccaggacatccttggaatccaccccaaggggggcactgggggcaccttaccccgggccataggccatttcaccccaccacttgtttccccgccctgcggagggaaggggaggatttg

SEQ ID NO: 313231 - DNA, 2876 bp, Homo Sapiens
  misc_feature (1126)..(1126): n is a, c, g, or t
  misc_feature (1619)..(1629): n is a, c, g, or t
  misc_feature (1733)..(1749): n is a, c, g, or t
cttaatatgcctgttattcctatgaatactattgcagaagcagttattgaaatgattaaccgaggacagattcaaataacaattaatggattcagtattagcaatggactggcaactactcagatcaacaataaggctgcaactggagaggaggttccccgtaccattattgtaaccacccgttctcagtactgtttaccagaagatgccatcgtatactgtaactttaatgaggggtataaaactgacccttctactttgcagatgtgggcaaacattctgaagcgtgttcccaatagtgactcaagaagagcgttttccagcagtaggagaacctaatattcaacagtatgcacaaaacatgggcctgccccagaaccgtatcattttttcacctgttgctcctaaagaggaacacgtcaggagaggccagctggctgatgtctgcttggacactccactctgtaatgggcacaccacagggatggatgtcctctgggcagggacccccatggtgactatgccaggagagactcttgcttctcgagttgcagcatcccagctcacttgcttaggttgtcttgagcttattgctaacctgaagaaagttcgtggcaaagtctggaagcaaagaatatctagccctctgttcaacaccaaacaatacacaatggaactagagcggttctatctacagatgtgggagcattatgcagctggcaacaaacctgaccacatgattaagcctgttgaagtcactgagtcagcataaataaagactgcacaggagaattacccctatacctgagcctcaaccttctgggggaaagggaactagataacatacttcttacttgtctgtacagtaccttgttgcagatgggtgatatataatggtaatagaatagcacagccagacttgcttcctgcatggtagggagagacacaaaagatgggaaactgcttttccacaaggaatctccgtagaattttgcggcgaccagatggtgcataggtctggaaggtctgatctcccttggtcttccatgggatggttagtgtggaggggagatatagattgtccgggccgctttgtgattccatggattgattcagtcttctgganttttttttctttatattttgggtactggagcttttaaaaatgtttggtttcaggtatttttattcatgtgaagtgtatatgattctcttgagataaggttttaagctaaaatgttactccctgttttagtttctgaactctgacagattgacagggactttgctggtgtagtctttttataggttttataaaccacttgagcctatatcagtcgttttagtgtctgacctaatatttggagctatcagtgctttgttgatttagatgatgactcaagattttttctggtccatttcccatttccttttcttccctgacccccataccctcacccttaaaattctcctgtaactcaactaacaaaatcaagcctgattcaaaacatcctagggtgttttaaacacaccatctggtgccaaatgaagatttttaggagtgattactaattatcaagggcacagttgtggtactgtcattgataataatatagttnnnnnnnnnnncctaattttgacctgtttcaccagtgttttacccttgactgccccttctatgctgcttccaaaagtgatagtgtgtgtaagatttttaccttcctttctaaagnnnnnnnnnnnnnnnnnaagtgagtcctgttcttcctatttctttcagcagaaatgaaatcccaggtaagtataagtattcaagtatttgatcagtaagtcacagttatctccagtgcattaaataaccttcatcaagaaataggttataggtaaaatctctgaaggatcatctatgtattcaagtaattattttttagataataactgtcttctggacttggtcttgaagtctgtacagattcagcctcagtagtagcgaactgcactgctgtttggtttggagtacaaattagacttatagtcctcctggaacttgagttattaaaatcataggaataaaattatgggatctcaacaaagggtcgagggtttgaggcttaaacaagccaacatatgaatatatgttttgtctcgctatactgcacttacgctatccagttgcaggtaattttttgtctgctagtagtgttctagattatgtctttccaaagcgctgaggctgtgcacctattctgtagttgcagctgatgcctgaatgtatcctagctgacaaattattgattaataagaacttgaatttctggaagattcttactgttaaccaaattttgagcaaggagtctcaaaggtaattctgaaccagaattacatgttaatgaacagtgtaccttttaacagtgtaaatcacggaatatccgtgaagggatttcttaatttattttttaccggttgattgaaatatcagttaaaggttgccagcatggttgcagataaactgatgtttgaaattcgctgaaatacttaatgtggaataggataatatacttccaatgccctcaaggctgtgaccttacagccattttacatagcacatcattcctcctatagggatgaactttttcctggcacgaaaagtagccgctctggttgaagctttgcttattgtaacaggcttttatttccaggtaatatgtcttggaagacttaattctgattagagatatagatattactggaaactaattgttttttttctattgtactctgctttatcaaagaagtaaaacatttaaatcgtactacagaaattaagatgttgtcttgcgatccttaataaatgaatgatttccctttaaaaaaaa

SEQ ID NO: 313232 - DNA, 1445 bp, Homo Sapiens
  misc_feature (131)..(162): n is a, c, g, or t
ttggaacagggaacagaaaccagagccatacagctaataaacttgaaaatatttacaagttgatgctttacaaaatccatctgctgacccctgctctgtaccattgttctcttctgatggtctgtttactnnnnnnnnnnnnnnnnnnnnnnnnnnnnnnnntagatttgccatttaaaatgtgcttttcaagtttgactttttaggatgcaattaattcactaaatacagaacttaactaaggacaaaaatttaaagatcagcattctttcccttcccatcacgctcaacttaacatgaagaactgtaaacatcctaagcttacaacaaacctatctagttagacttcagttaaccacttacacatccccctcccccatgaactatttggaaaaagctgcaggcgtaatattggatccctaaatactttattctccttataccattatcagacccaagtatcatctaatagtccataatcaaactgcctaagcagtttctacactgtctttttaactatttcaaactatcaaggttcgcattttcttccttagaacttttagtctttttcttccccaaaatatttgagtccatgccagttgcctttagttgtacccaaataatggtttgtctatttcctaaaagtagtactcttaaatttaaatttagtgttatttttgttgtcattgttccttcttcctcatgtggttgtgcaggcagagcttgagcatccagatttcaaaattaaaaaataaaagataatctagtttaatatatagtagttgaatcaccttaagtctagactgctgtatgagcacccattatctttcactatattccatcatcccccaacatatccacagtagatgaagggcagtttgctcaaacattgttttgatcctgtcatgtctgttcagaaatgcctgtctattcagaaacccacgtctaataacaaaatcttggactggttactatcaaaacccaacaacatacagactcctcagctaggccctagggatatttttctaccttgatttccaaatgttcattgaaagaatgcttaattctaatttggaaaaaagtttttggcttcccacttctgctttacacgttcatctttcttgaaatcaaatccaatccaatctatattctaagaacctgctcaaatcttggttcttcaaagctttccctggtattttgcatttttgctttgaatagttccacgaaggataacttcttactccttccttcatctttctgtatcttgcatatagtaaatattaatgacttgtttgcattttgttatcctaacttggctataaagaaaatcagatgtcttcaccagtcgttcaaacttcaggtctgcctacagattcatagatggctgtggatttttataattttgtcacaaagttagtggtaactacaggttatctcagaatatc

SEQ ID NO: 313233 - DNA, 1459 bp, Homo Sapiens
tttaaatagaaggtgagtttatttctccagtcttgaaattaacaattttcaagaaaacaaattattagaataactggtggagtcacagacatatttctagctccattaggtcaaaggaaaggaaagaggacaagggtagaaaggagacaagccctctaagaaactgtccattcagtctgtctgcagtcaatatgaagagatagcctttggagctacagaaaatattacattgaagtggattatgcttgctgttaaagaagctggtccagccgagcagcagcagaagacgaagactcaaatgtccatgtagagcatcatggtccctgaccaaagagacttcttctggttcctcttgctctcctcaccaagagcacagatgtgcccagcagcaatatgacagcaaatgtctctatggcttcgggatgaaaatgtccacacactttaagacccgagaagaaatggggagtgctccacacccaaggaactgaagctagggaaagacagttttcttgtgtttctgtcatagaggtggactgatgctgaagtcaactggtctataccaatctagagcatccactaggtgtaacaaggtgtctggttgtgcacgggttggtgaggcaggaggggccagaccagcacaaagtcagggccctattcttctagtgttgggtccacttgatgctcttgaggtcaatgccatcctgaaccatctcccagagagggctcatttctcgaagacgcttcacatgctgaatgcatttctccactgtgtagtccacttcctcctctgtagtgaagcggccaattccaaacctgatagaagagtgcgctaaatcctcatcagtgccaattgctctaagcacataagagggctccagggatgcagaggtgcaggcactccctgaggataaggcaacgtccttcagtgccatcagcagactttccccttccacatatgcaaaggagaggttgatacagccgggataatggtgcttagggtccccattcatcaccacatctggaaggctcttcattatattctgtatcagccgctctgacaactttgagattcgcttgtggtcatactccatctcttgctgtgccacctcacacgcagcccccagccccacctctaagggtgtgggcactgtcccagcgcgcataccgcgctcctgcccccctccactgtgcagggcctccacacgcacgtgaccactaatgctcatgagatcaattttcatgtcattgacatcaagtgggatttttccaacagcctggtctgcatcagtatggaaatatacctttctggaactgcaaatccgccctatttctgcaataggctgcttcactccaatctcattgttcacagtcatgactgaccccaggctagtatctgtctggatagcagcctctagttcctttaggtcaatgatcccactcttgtgctctgagaggtagg

SEQ ID NO: 313234 - DNA, 437 bp, Homo Sapiens
ttttattgaacagttttattctgttttagaataaaaactttgctttaatattgtaaggggtactgcaggtatgccatgctgccagttattgctggggcacaaaacgccccagtcagtgattcggagggctgggaaaacgcataaactcataatttcagagcaagtagaactagtatttacagttttctttcttgaaattggcccgggacatctccaacagtctacacatgtattgccatggtacttgctctgatgctctgaatgcctcggaactgtgttcaatatcatgatttgtgggtcctctaaaaggttttgttgttaacatgcaagcaaacagcactgaacaatattgtctaaactatggctgccaagtactggatcttcataatggaaaccaaattacaaaacactgccttgtagggctatacaaaagatat

SEQ ID NO: 313235 - DNA, 2153 bp, Homo Sapiens
  misc_feature (269)..(277): n is a, c, g, or t
aaacatcaagcaatgtttattgggcaattccaaatcattatttgcagaatcttggtttagagtcagtctttatagccatttcaactgcttggtttaaacaaaaagcaacaatctggttatctacctataaatttcacggtatttctttaaacactgaagtactaaaagcactgatgatttgtattataatttttaaaatatttaaaacctacacagatttcatagatcattccttttataaaataatcaaaataatttgattatctggnnnnnnnnnttcttgaaacagagccctttccaggtatcttcaatctctgtaaaaccccaaaccccaaacagagtagatgatgaaataaggatttctcagttgcccaagactgtctgaaatttaaggttgagaaatggactggcgtttttcatgtttcctgtgaattcagagcttacaggtggcatcagaactcaaatctctgggatggctttacatggctttcactttgatttgtttcattttcatttgcttcttttccaacttcttttgctcacgcctcaatgcagcctcctccagcctgcgctgtttctcaggatcttcctcattcatgattcgctccttctctgctctttttttctcctcccgccgagactgtgctgcttcctgtctttgcacatgtgtcagtttcaagaagttctcttctactcgggcacggttcttatctgctttttgtttgccttctctgttgagtcggaactttttggctttatcaatagaataaatcaccatgttcatcaggggtagcagtgcctccatatcctttgggtaagtgttacctgagccaggcacattaaatgtaaacaacagtgtcctcttagtgtcaggtagctttaaaggctgaccttcctcttgcataatttttggaccagagaactggtctgaaaaatgaacagattcaatcttgtcagcatagtgtgtaagaaagtgaaccatctttgtatccatcattccgtctgtgacttctcccatctctgacaggatggccaaagagtccggcagtccatactttgctccagacttaggtttatcactacaaaactcactcaaatcctgcatctctttctgtagtcgcaccaaggctttccgtgtgccaacagcaaatacgtaggtatccatgtcttcatcattcatggttacttttatttgcacttgatcactcactggcctcatcatccgggccaggacattcagtaagtcttgtctcttgaggaacctcagctggataagcatgccctcacagcacactcgaccagaacaccacaggttatagatgtgctcattctcctggttcaactttcctgtgcttgtggcttctttgttagttccatcatcccccactaaagtaaagttgctctccaaaagctccctatgagtgttaaaccaggcctgtgcaaggcgactgtttttattcttcccaatgatgtaattcatgatataagcaagcagaccagtcaccatcaaaatttctagataataactctcccagctgttctggaggtgtgcaggaacatcaacaatcgttattgggtctttatttttgctagaagaagtatctggtttgtcttcataaccttcaaattcttcatcatcatatggttcactctcagtatctccctcctgggtatctgcatcttcaaaatctccttcttggttttcatcctgcccttccaactccacagtggtctcatcttcatcatcttcagtgattatgacccgttgaggagattcagtaacagagtcttccatgacatcctcaaattcagcgaagtcattatcatcatactctactatgtcctcctcatcctcaaaatcatcaaacttggcttcagagacactcccaaacaccagaaggacaacacagaaagtgtggaaggctttcattgcaccttgagaaaaaaagctgtggccgaagccgaaacccggcccagcgccctgcgtccgacacccctgcccggcctgcctctcggcctggccgccgcctccgcgatcgcagcggttttactgccccggatgcctctaggacgcagccagaaccgtagctcagtcacgccgcgcctctcttcacgtagcctccgccgtccgatcccgggaattccggaccggt

SEQ ID NO: 313236 - DNA, 694 bp, Homo Sapiens
  misc_feature (113)..(113): n is a, c, g, or t
  misc_feature (578)..(578): n is a, c, g, or t
  misc_feature (639)..(639): n is a, c, g, or t
  misc_feature (668)..(668): n is a, c, g, or t
  misc_feature (683)..(683): n is a, c, g, or t
aagctcattttccaaaaagtatactttacacatattccatggcccatttcctttgaaaagaacataccccagccctcaactgtggaaaagataaaagcagagggagaagcaangggcacacagccataataatagagaacagagcttctcccatgaacatcccacccaggctgcagcaaccaagaaggaaaaaacatttgtgatttcacacagaccaatgatcttacctaggtgaagcattaatttttcatgcatttgttactcaagaaaataaacatacaaccacttaaaatacagcattcacgttgtcactggttcgtggtatcaggtaaggaaaaaatgatgctcctgtccctagaattttccatgtacatgtcagtatcctaatgcctacagacttcctattaattttgttatcagcatctcccacctaaaaacatatactacattatgttctgggtccctgaaatttcattactacatacagtgttctaatttttactttttctcaagtttaatgtagacatacaagaaaacatcaagcaatgtttattgtgcaattcccaatcatttatttngcagaatcttgggtttagagtcagtcttttatagccatttcaaactgcctgggtttaaacnaaaaaagcaacaatctgggttatctaccnataaatttcacgggnatttcctttaa

SEQ ID NO: 313237 - DNA, 329 bp, Homo Sapiens
tgatctagggaagtcaacacattttgtaaaataattacatgcctaatgaaaagaagatgtcatttcctaattttgatatctcattttcggcattttttaaaatgtaaaaggaaaacctcttgtgttcacacagattgctgaattgatttctccatatttggtaataatttactattatttacaaagattcaaatgcttttatgactaatgtaaaatgaaaagaggcttacattttaaatgttattaaaattatgtacttaaatctataattatttaattattgtaaaaagtccaagcagatcaataaactatataattaatgggtttgg

SEQ ID NO: 313238 - DNA, 828 bp, Homo Sapiens
ggaaaacagcaaaaaaatttttatataatctacggtttcttttaaaatagtctaaaatctaacatacagtaggcatgatctgatacaaatacaaaagaaaattaaatttatttagaaaatagtttctcagtaagatcttcaccttctaaagacttccataaaaatatgtaatacttaaataattactaatagacctttcccaaatcattgcattgtaccaattataaagttggacttaactaaaatggtagttatgagtgttagaatgatcccagatccaactaaatatatgcatattatgataaataatagcttagcattaagagaagaatgccaaagaagggatagtatcttcaagttttctctacacatcattctagaagagcagaaaatgatgacaacttaagccatgtcaatttaaataaaattactttagctaagaagcagaaaatgtgatcaaagaaaagctcaatcaatcttaagccacttcaatcgtttcaaattatactaaaaattataaatttgaaggctaatctattccaaggccgaatggctaataataccagagggaatttggcaactattgcccttatagaattatgacgtcgctgtggcagttttttgttcattagatgcttggattaacgaagatataaataggttaaacgtaccctggccattttagcgaacttcctaaagaggctgagtcttttaattttctataatttcgttcacattgcaatacattccgatcacatttaacccagaagagattaggtaccattctaatgctttgtaaatggaatttaaacccactattttaactta

SEQ ID NO: 313239 - DNA, 577 bp, Homo Sapiens
ggcctggttcttttatgttttgtgggtgttataaaggttttaaaataggatttttaattggttaccaagggggggacccccacccaggcagggttcagtgacccccccaaggaaggtccaccatggagacatcaagaggtcatgattgcagaagaggtgactggaattgaatgacatgatccaggggaggccggccacaaatgcagtaacatgaccaggatgggccggtggggctggtcaggtcacagtgtgagggacagaacggaccccttcactctggcctcctgtaggtctccaggtgtgacaggatccagcccgctggcaggaggaaggtcacgaagcaggaggtaagcccaacggccaattccatgatcccaagcttcccctccggcggcaacgaatggatcttggcgcgcggcactgggagccgccgggccgagcctgtcaagccccgcagcagcagcggcgtcaggacggacatgatggcacggagtacaccacaaaaaacggtcagccgtagcccaaggtcaggaagccaaaatggctgcgctggccggaagttctggagctggggccc

SEQ ID NO: 313240 - DNA, 642 bp, Homo Sapiens
gggagaacttccggccagcgcagccattttggcttcctgaccttgggctacggctgaccgttttttgtggtgtactccgtgccatcatgtccgtcctgacgccgctgctgctgcggggcttgacaggctcggcccggcggctcccagtgccgcgcgccaagatccattcgttgccgccggaggggaagcttgggatcatggaattggccgttgggcttacctcctgcttcgtgaccttcctcctgccagcgggctggatcctgtcacacctggagacctacaggaggccagagtgaaggggtccgttctgtccctcacactgtgacctgaccagccccaccggcccatcctggtcatgttactgcatttgtggccggcctcccctggatcatgtcattcaattccagtcacctcttctgcaatcatgacctcttgatgtctccatggtgacctccttgggggtcactgaccctgcttggtggggtcccccttgtaacaataaaatctatttaaactttaaaaaataaggcctaataccaccccccaaaaacagtccttggcggcccgcctcgggccttcaaaaaattttctcaaaacatttcttttggggggcggggccccagaagggtaaggtgaaccgtg

SEQ ID NO: 313241 - DNA, 400 bp, Homo Sapiens
  misc_feature (377)..(377): n is a, c, g, or t
tttaaagtttaaatggattttattgttacaagggggaccccaccaagcagggtcagtgacccccaaggaggtcaccatggagacatcaagaggtcatgattgcagaagaggtgactggaattgaatgacatgatccaggggaggccggccacaaatgcagtaacatgaccaggatgggccggtggggctggtcaggtcacagtgtgagggacagaacggaccccttcactctggcctcctgtaggtctccagggtgtgacaggatccagcccgctggcaggaggaaggtcacgaaggcaggaggtaagcccaacggccaattcctacacagagcacaagaaagaagggcaccttgggagtcagtattcccctagggntctttaagtccttgcagtttccc

SEQ ID NO: 313242 - DNA, 1148 bp, Homo Sapiens
acccaaggtaaatttttactttaataaccataaaactgatttttcaccttcatgaagtcattgtcttacagaagactcggattcaaatcatgactctttccctcagtagccagaccacttactctgtacctgtaaaaggaggtatgcggtgcttctaaagcatgcactgcatccattcattcacgtggtccactgggtgacgacggtctgtcctccccttaagcaaaaactggctctaagggacaggtcttttcttcacgcaaaaggtgagcaatgcccccagcctttcattctagaaagtgatgaggcgatggttttgtatccacaaaatgcattatcaaagctcaccactttagtgttcatttactaaagttagcagagatctagaatttgaaaaaaaccagtttagcaatgagaaataactccacttagcaaattcaattaatgaaactagttcatagttttaaataatttcttaatttatatgaaataaagacaacccatatagtagacttacaaatattctatttcgcattatattcaagactaaacatcttccaaaccatattcatgaaatggtttgatgatatgtgctttggcggttttcaagaaatatcaatcaaaccgtaattaaatttcaacgtatcggctaaacatccactgagcacctcctcttgcagttagcattagactaagtgcttaaggacaagtagtttgatgcaataaattaggaaatacatatttaagacttatattattcacagaattcttggcatagttatttaagttccctcctgttgagaaacttgaggtttgtgttttctttctttcagtcccaaaagctccgttttgagttctccacgctttggtggaatttcaggtattgtcaggtccggtcggtagtacctgtgcaccacttctgcccctgcgcacatggccaggagactggctgcgaacattttcaggtaggtggacatgggcacgcccgcgggcatggtcggcaggctcttggaggagaggaactgtggacttcactcctctctgcctctatacacgcgctctactagagactgtaccgcgaactgcagggatgctgggcaacaggtctaagggcggacggagcggacggcgagcaggccggacccccc

SEQ ID NO: 313243 - DNA, 799 bp, Homo Sapiens
  misc_feature (408)..(442): n is a, c, g, or t
  misc_feature (517)..(566): n is a, c, g, or t
aaaggatgaaaagacaactgcgaattttaatcttagaggtatatgcagaatgtttacatgcagtgtataaatattcactatttagttccattttttaactactaagaaaaatagcaaatcacccactaactgcagaagagcaaatgtaggaaaatcagtatttaatgaaaagtctagccattctctaagcttgaaaatcaacgtttttttagcattgcacttaagggcaataatattacaaagtctgaatcttcatttactcaaagagaagaaattaaattgatgaagcccacttgattgcagataataaacagttattggcagtagattcttctactcatgttatgctttatgaaactgtccacctaagtccaccttctggtgggggcccggatgtagcaatttggnnnnnnnnnnnnnnnnnnnnnnnnnnnnnnnnnnncacagattgaacatctaaaattccccgagatgcagcctctttttgtcttctctctgcacccggccataatggccnnnnnnnnnnnnnnnnnnnnnnnnnnnnnnnnnnnnnnnnnnnnnnnnnngcctggccagaatctcgagcttggcgaatcatgggcataggtgttcctgggggaaattgtttgccgctcacaattgctagaggacttttcaatttttgcgccctggtttcatccaaatccgccctgaattttccaccaggaaaccccggtaaaatcctcaccgggggatcctgttaaattaaccttcccgtttctttggttatgtccgccccccttggaatggaagcttggct

SEQ ID NO: 313244 - DNA, 1035 bp, Homo Sapiens
  misc_feature (454)..(597): n is a, c, g, or t
ttcccctttaggttggagccccgtttttaaaaagggggcctttttcaaaatgggagaaacttaaccgcttttggggaatattttttagattaaaagagtttttccaaatttggcctttggttaaaaaataagttgttttacaaaaattttaccgggttttttacaaaattttatggcttaaattttccctttcccattaagggtggcaaatttttggaaaagcgtatagggtggggcctttttggattaaacccacttgtgaaaaaggggtttttttccaagggctttaaattggggaaccccagggtttttcaaaatccacgttttttaaacccgggccatttatttttaaaacgccccccttaaggggaatttggccaaataggccccaatttgggcccaataaaaaaacttttccaaatttaaaaagccttgggccaaaggggccaaaaannnnnnnnnnnnnnnnnnnnnnnnnnnnnnnnnnnnnnnnnnnnnnnnnnnnnnnnnnnnnnnnnnnnnnnnnnnnnnnnnnnnnnnnnnnnnnnnnnnnnnnnnnnnnnnnnnnnnnnnnnnnnnnnnnnnnnnnnnnnnnnnacaattttatttataacaatatctgtgttatttagttgtaaaggaattcagcaaaaattattaaaacgttcacgtccccaaaacggggctgcccgctttcccttcctgggtgtggcccacctccttggcgtccccaggggaggggaggctggaggaatgtttaccagaggaagtctccagccctgggaacctcggtgggggccctggagacagggagggcctgtctgggaggggggttgagcatggccatctcataggtgcccctggagttggggctggggtttggggtggcctcccccaagaactaaaacactccatcctttcccgcctacctcacccagagccacgtcttccagacaggggcagcaaagaactctcccttcccagaattagccctcaggaagctgtgggagcgggcaagcagggatagggcgaatg

SEQ ID NO: 313245 - DNA, 749 bp, Homo Sapiens
  misc_feature (29)..(29): n is a, c, g, or t
  misc_feature (34)..(34): n is a, c, g, or t
  misc_feature (52)..(52): n is a, c, g, or t
  misc_feature (57)..(57): n is a, c, g, or t
  misc_feature (71)..(71): n is a, c, g, or t
  misc_feature (90)..(90): n is a, c, g, or t
  misc_feature (95)..(95): n is a, c, g, or t
  misc_feature (97)..(97): n is a, c, g, or t
  misc_feature (101)..(101): n is a, c, g, or t
  misc_feature (109)..(109): n is a, c, g, or t
  misc_feature (123)..(123): n is a, c, g, or t
  misc_feature (193)..(193): n is a, c, g, or t
tgatatgtagctccagttgctatgctcantgctntgcggcacagtcgtgccntcagnctggtatcccgaanccacatttcttgctccctntgcantnagtntcatttcngcatgactgggcanttcgtccatttccttgacgatagacggcttcgtcagctcaggtctgtcaccatgtcagatcttcatttcntcttttaacctggtcactccactacgtcactgccacatgaggcttgtagtcgcagctaactttgggatcagcccagcttcgccaggtctcgaaggcctcaatgagggagccacctttctgaggaatggcgaaatcaataatcatggtggtgcctcctgagagagcagccttggtgccctggtggaagtcgtcgatggaccgcgagcccatgaaggggaactgcatgtgcgtgtgtgtgtcgatgcctccgggcaggacgagcttgccggcggcgtcgaggacccgcagccccgcaggagcgcccccgggaggcagcaggtcgtgcccgagtgcccgcaccacgccgtcctccaccagcacgtcggccacctccgagaagtcatcgttgaccacgcgacccccgcggatcaggagccgcgagggcgccgccatggcgaggggcgcgcggggtcctactcggcccgggctgcgcgcaggggctgggttgggcgggccgggcgggcttggggtgccctcctgcaaggtccccaccgacagcccccgagctctgcctcag

SEQ ID NO: 313246 - DNA, 1146 bp, Homo Sapiens
  misc_feature (90)..(90): n is a, c, g, or t
attcccatatttcgggacatccgatcctcaacaccaattcaacacaattggggatcttgggtaaattcatccttcccaagagcttcttgncaggtgttgaaagtgcagttatcagtccctgtgtgggttagatcatcattagccaacagatctcatgaggaagtcgggtgttgaggggtctggtcgcaaaagttggacccatgacatggtggtctgcatggtgccattctttattccagtagtgagtgccatctgtgccaagactggctgctatgggttcaccatagaccaccttcccatctctccttgcatccgctatcaccttagctgcagacttgctcatcacatgcacaatgtagagaggacagttcacagcgctggctatggtgatggctctcagcgtggcctctgcctccactgcctctgggcggcacagctcgtggccctcagggcctgccgcatggacctgggcaattgctccaatttccttgcaccgagagaaggcttcgtacagctccaggtctgtcaccatgtacagatctttataggccataaacatcttgaaagagttaacacctttatcttgcacaaggattttcatttcttctttaacctggtcactccaccacgtcactgccacatgaaggctgtagtcgcagcaaactttgggatcagcccagcttcgccaggtctcgaaggcctcaatgagggagccacctttctgaggaatggcgaaatcaataatcatggtggtgcctcctgagagagcagccttggtgccctggtggaagtcgtcgatggaccgcgagcccatgaaggggaactgcatgtgcgtgtgtgtgtcgatgcctccgggcaggacgagcttgccggcggcgtcgaggacccgcagccccgcaggagcgcccccgggaggcagcaggtcgtgcccgagtgcccgcaccacgccgtcctccaccagcacgtcggccacctccgagaagtcatcgttgaccacgcgacccccgcggatcaggagccgtgagggcgccgccatggcgaggggcgcgcggggtcctactcggcccgggctgcgcgcaggggctgggttgggcgggccgggcgcgcttggggtgccctcctgcaaggtccccaccgacagccccc

SEQ ID NO: 313247 - DNA, 1349 bp, Homo Sapiens
  misc_feature (738)..(738): n is a, c, g, or t
  misc_feature (1091)..(1110): n is a, c, g, or t
aaggtataaaatgaagatctcaatgtttattaattacaataaaaagtaaaatcacagagctattttaaaactaatgtaaccatttttttaaaaaaagaaactatttaaacaagaaaatgatttttaaaaattctaagtaagaaatctagtacaagcaaagatgacattttaaagtatcatcaatgaatttccacacagcctttccatcacaataatataaatttataccttcaatcttatgcagcaacaaaaacacagtgagaaagacagcaattgcttctgaaagaaaatcaaagaagcctatagtggtgaattttttctaaaggatcctagggagttgaataaggcctgcttctccatgggttgacaatgtttggctgtgaagggaatggcagcctcctttcctctgatttttttaccgatggcacacacttcaggggtgggcctgtttcctggtccctgctgtggcatcttcttttgtcactctggatttcagtgtggcgacttctcccttatagggtgcacgctccacaggggtaggtgtgcaagtctgaaagagaacatttcatttctctcttgtggtttattttcttgagttcaaagttaagtgtagctccctttatgaattgcgagagctttaaaaaaagaatcttataaatttatcacgtgcctccccatccccttaggcctttcacagaaattcctggcaaccttgagaatctggattgtcccactttntgtgggtattattctgcttcagacagaggcccagggacactcactggggcctctgccttatcctcaggcccttctgagtcccacaagtgtctcctgctgtcctttccaacatccgacccttttcttctagtttcagtcctactcacctgagtttgcagtgcttctttgtacctctcctaacactctcagagcagttgcttcagattctagcaattgggtacgctttccactttcctgtctctgtgcattatggatcttccacagaatctcacctcgttggtgaccgactatgcagcagaaccctctgctggattcagcgagagctgtcagtgcttgagcagagttttgaaatnnnnnnnnnnnnnnnnnnnngacaaataacaaattattgtgggtctcattttgaccacccaaactaatacattgtagtgatcaacagtgtgacctttgaagtgagacagatctaagttagaattctccatttgccatttactacacataggaaactgacaagttaattaatgcctccaggcctacttcctcatccatgaaatgggggaaataaacctatctctcagatagtggagaatttccagagccaaagcattttc

SEQ ID NO: 313248 - DNA, 889 bp, Homo Sapiens
  misc_feature (205)..(244): n is a, c, g, or t
gagtttgcagtgcttctttgtacctctcctaacactctcagagcagttgcttcagattctagcaattgggtacgctttccactttcctgtctctgtgcattatggatcttccacagaatctcacctcgttggtgaccgactatgcagcagaaccctctgctggattcagcgagagctgtcagtgcttgagcagagttttgaaatnnnnnnnnnnnnnnnnnnnnnnnnnnnnnnnnnnnnnnnngacaaataacaaattattgtgggtctcattttgaccacccaaactaatacattgtagtgatcaacagtgtgacctttgaagtgagacagatctaagttagaattctccatttgccatttactacacataggaaactgacaagttaattatgcctccaggcctacttcctcatccatgaaatgggggaaataaacctatctctcagatagtggagaatttccagagccaaagcattttcttcattcattcagcagatatttactgagctcacacagccccagagagtacaccaaacaccgagtatccaacacagaacaaggcccacagctcctgcagccacagaatttgaagcactgcatcgggtgtgcactgagtgctcaggaaatggggggactcctgcccttccctcaccaggccaagcctctgctcactttctgtatctgtctaaatgctttgctggacttccattttggctcactgtctactcagtctttgagccctgttctcatcttgaggaacacagacaccaggaaatgaagggccagcctcccatttctaccaccttggaccaccacatctgaaaccttaaactcactaataccccactctctggccacatcctccctttcaggtccttggtccctg

SEQ ID NO: 313249 - DNA, 1778 bp, Homo Sapiens
  misc_feature (38)..(38): n is a, c, g, or t
  misc_feature (144)..(145): n is a, c, g, or t
  misc_feature (1653)..(1702): n is a, c, g, or t
agttccccttcatgggctcgcggtccatcgacgacttncaccagggcaccaaggctgctctctcaggaggcaccaccatgattattgatttcgccattcctcagaaaggtggctccctcattgaggccttcgagacctggcganngggctgatcccaaagtttgctgcgactacagccttcatgtggcagtgacgtggtggagtgaccaggttaaagaagaaatgaaaatccttgtgcaagataaaggtgttaactctttcaagatgtttatggcctataaagatctgtacatggtgacagacctggagctgtacgaagccttctctcggtgcaaggaaattggagcaattgcccaggtccatgcggaaaatggagacttaattgcagagggagcaaagaagatgttggctctggggataacaggccctgagggccacgagcttgtgccgcccagaggcagtggaggcagaggccacgctgagagccatcaccatagccagcgctgtgaactgtcctctctacattgtgcatgtgatgagcaagtctgcagctaaggtgatagcggatgcaaggagagatgggaaggtggtctatggtgaacccatagcagccagtcttggcacagatggcactcactactggaataaagaatggcaccatgcagcccaccatgtcatgggtccacctttgcgaccagacccctcaacacccgacttcctcatgaatctgttggctaatgatgatctaaccacaacagggactgataactgcactttcaacacctgccagaaagctcttgggaaggatgattttaccaagatccccaatggggtgaatggtgttgaagatcggatgtccgtaatatgggaaaaaggcgtgcatagtggtaaaatggatgaaaacagatttgtggcagttaccagcacaaatgcagccaaaatttttaatctctatccaagaaaaggaagaatagctgtaggatcagatgctgacattgttatttgggacccaaaaggcacaaggactatctcagcaaaaactcatcatcaggctgttaacttcaacattttcgagggcatggtttgccacggggtgccccttgtgactatttcaagaggcaaagtggtatatgaagccggagtgttcagtgtcacggcaggagatgggaagtttattcctcgaaaaccatttgctgaatatatttacaaacgaataaagcagcgagaccggacttgcacacctacccctgtggagcgtgcaccctataagggagaagtcgccacactgaaatccagagtgacaaaagaagatgccacagcagggaccaggaaacaggcccacccctgaagtgtgtgccatcggtaaaaaaatcagaggaaaggaggctgccattcccttcacagccaaacattgtcaacccatggagaagcaggccttattcaactccctaggatcctttagaaaaaattcaccactataggcttctttgattttctttcagaagcaattgctgtctttctcactgtgtttttgttgctgcataagattgaaggtataaatttatattattgtgatggaaaggctgtgtggaaattcattgatgatactttaaaaatgtcatctttgcttgtactagatttcttacttagaannnnnnnnnnnnnnnnnnnnnnnnnnnnnnnnnnnnnnnnnnnnnnnnnnggttacattagttttaaaatagctctgtgattttactttttattgtaattaataaacattgagatcttcattttaa

SEQ ID NO: 313250 - DNA, 961 bp, Homo Sapiens
  misc_feature (68)..(115): n is a, c, g, or t
gatctcaatgtttattaattacaataaaaagtaaaatcacagagctattttaaaactaatgtaaccannnnnnnnnnnnnnnnnnnnnnnnnnnnnnnnnnnnnnnnnnnnnnnnttctaagtaagaaatctagtacaagcaaagatgacattttaaagtatcatcaatgaatttccacacagcctttccatcacaataatataaatttataccttcaatcttatgcagcaacaaaaacacagtgagaaagacagcaattgcttctgaaagaaaatcaaagaagcctatagtggtgaattttttctaaaggatcctagggagttgaataaggcctgcttctccatgggttgacaatgtttggctgtgaagggaatggcagcctcctttcctctgatttttttacctttgaagagaatgaaaggaactcactgtaacattctccctcacaaagagatgcagaattcaaacctaacccccaagaaatgctataatcaaagtaaacactaatcctgctcctataaatgtcattaatagcatgttatagcattgaatcgcattcctttctcttgctaatctttccctgaatttttaacaaaatcatcctagattagaagaataattctggtcgtctgaaaatgacaaaaatgttgagactttgggctagatagtcctgttaaagacacaacattcaataatgaaagaacatggcatgtagcacagagggctttgccattcaagccctcattatccaaatccctgcaggaacaggatttatgcagggaataagaggttgtcaaaatgtgaaaaggtgcagtgcctgaatatgtagaaaaccagaccgttgtcaaactgtgcctctcattaacacaaatgtctaaccaggtccattaggtcaacctctggggttaagtcttgtgcagatggccacgtgttgaactgtctgaaaagatatcacacgtt

SEQ ID NO: 313251 - DNA, 478 bp, Homo Sapiens
  misc_feature (15)..(15): n is a, c, g, or t
  misc_feature (33)..(33): n is a, c, g, or t
  misc_feature (38)..(38): n is a, c, g, or t
  misc_feature (43)..(43): n is a, c, g, or t
  misc_feature (48)..(48): n is a, c, g, or t
  misc_feature (77)..(77): n is a, c, g, or t
  misc_feature (328)..(365): n is a, c, g, or t
aagggcctctggccnatatcctcacgccccttnctgantcccnacaantgtctcctgctgtcctttcccaacatccngaccttttccttcctagtttcagtccctactcacctgaggtttgcagtgcctcctttgtaccctctccctaacactcctcagagcagttgccttcagattcctagcaattgggtacgctttcccactttcctgtctctgtgcattatggatcttcccacagaatcctcacctcgttggtgaccgactatgcagcagaaccctctgctggattcagcgagagctgtcagtgcttgagcagagttttgaaatnnnnnnnnnnnnnnnnnnnnnnnnnnnnnnnnnnnnnngacaaataacaaattattgtgggtctcattttgaccacccaaactaatacattgtagtgatcaacagtgtgacctttgaagtgagacagatctaagttagaattctccatttg

SEQ ID NO: 313252 - DNA, 962 bp, Homo Sapiens
  misc_feature (952)..(952): n is a, c, g, or t
cggggaattgggccaaaggaacgcccaattgcgtgcaaatacctaaacagcgagttaaaagggagggcgattaagaggtaatccatcacgtagcaaggataattggtcaagggaaatcgaaatctgaacttgtccaattaactagtacgagaacttgaattttgggagaagatatagagtttcatgagaaacactggtttttctcaagcaatagaaaaagtgttatatgtgagcgtttatttgcatttatagataaaaccccaaaaaacaaaaccactgtcttagaagaagaaaacaagtctcttcagcaagcatgtggccaattcagatgggaggaaccagtgaagttagaagttacacacaggaagtgagttcagatttatccacaaatgtcttctggtctagttctgtaaggctccaaatgggccatctcagcttaaaactggcaacaccctctcaaagctctcaggatcccatctggtttgaacctggggcctcattctccaggaggctgcatctgtttacagaactcatcaaactgctgctgctccagttctgtcatgactctgttgagggcatagatctctgctctttgtctctgcttcagctcctgctgggctgatttctgtttggccttctcaactctgctgacagattctttaactttggttttttctttacgtgcaggtggatccatggcttgacttctggatatttcttaggaggctctgatctttcccgaccgggccactggaagttggagcctccgccgagtcgcagacaacgctccgggagggtaatcctcgccttcccccgaccactggaccatcatagtcattaactttaattgactgatgggtactccttacatattctggatacccacgccttgatctcacatattctaaatgttttctctcaatctgttatttgccttctaactttgcttctngtgccgaaat

SEQ ID NO: 313253 - DNA, 356 bp, Homo Sapiens
  misc_feature (106)..(123): n is a, c, g, or t
tttaacattttattagtattttatttgtatttttggagaagatatagagtttcatgagaaacactgatttttctcaaacaatagaaaaagtgttttgtgtgtgtgnnnnnnnnnnnnnnnnnnaaaaaaacccaaaaaacaaaaccactgtcttagaagaagaaaacaagtctcttcagcaagcatgtggccaattcagatgggaggaaccagtgaagttagaagttacacacagggaagtgaggttcaggatttatccacaaatgtcttctgggtctaggttctgtaagggctcccaaatggggccatctcaggctttaaactgggccaacaccctcttcaaagctctcagggga

SEQ ID NO: 313254 - DNA, 623 bp, Homo Sapiens
gacttcatttttttaaataattactctttatttaaaataaataagccctcttacttacagggaaaatatgaaagcaaactctgtcctcctggtctaagacagaaaccacattcagaatatgttcattgaaaaaggaaagatttgttgattatcaaacaaatctaggtacttcaatacacattgtttctttgaaaaataaagactgaaaggaataattcatttcaaaaagtcacaggttagaaaaccaattttccttctgaggctcattttagcaaatcctccaagtgttcccaaatcttttaaaaaagctacatcccctgaggaaagggccctttccctgtaggccctcttgctttgacaccagcagccttgcacccttctggccaagtggctccgtgcaggacggtgctgttgccgggcaggaatggccctccatggcaacctccagcaggcaggagctcaccacctgctttctgcaaactcactcacttggctcagctattctgcaatggagaggaagtttcttagcagccaaagtattctaagtatcacattttccagtattttccagatccgtagtgtgctcagaaagccagagctgtatcaccaggcttttagagaag

SEQ ID NO: 313255 - DNA, 1040 bp, Homo Sapiens
cgagccgtcaaggatttttgggcagcagaatcaggtttattggagggattgggggtaggatgagcacggcatggggcttgaggtgtgtggagggagctcagcaggcccagaagcccccttccaccggcaaagtggaacccgtggtcatgccacttcggtcactcagcagaaagaggatggcgttcaccacgtgctctacctcagcaaacttgccaagtgggattcggttcagcatagtcttggccttgtgggggtcactccaggtggcctggcccatggacgtcatcaccactgtggggtttactgcattcactcggatcttgtggggcccgagctctagggccatcaccttggtcagcatgtccagggcacccttggtggagcagtagacgctatggttagttactgcccgctgggagcactggctggagacattcacgatggcccctgggactccccgggctattaagcccctggccacaatctggacacctggatgaccgcacgcaggttcacctcaaaggatctgtcaaaggcctccttggtgacctccaggaagggctgcagcagggcgacagcggcgttgttcaccagcaggtccacggggcccacgctgcccagcgcccgctcggtggcctcacaatggccccgggcacgcaccgggctattaagcccctggccacaatctgcgacacctggatgaccgcacgcaggttcacctcaaaggatctgtcaaaggcctccttggtgacctccaggaagggctgcagcagggcgacagcggcgttgttcaccagcaggtccacggggcccacgctgcccagcgcccgctcggtggcctcccagtcacccaggtccacgcacacgggttctatccccgggcactcgcggacaaggctgtcaagatccgcctgagtccggctcacagccaccacccgcgcgcccgtcgcgtgcagcgcctggaccgtgccgcgccctatacctttgcctgccccggtgaccagcacccggcggcccgcgaggaacagctcctcgtgccc

SEQ ID NO: 313256 - DNA, 960 bp, Homo Sapiens
  misc_feature (19)..(19): n is a, c, g, or t
  misc_feature (28)..(28): n is a, c, g, or t
  misc_feature (36)..(36): n is a, c, g, or t
  misc_feature (43)..(43): n is a, c, g, or t
  misc_feature (81)..(81): n is a, c, g, or t
  misc_feature (117)..(117): n is a, c, g, or t
  misc_feature (195)..(195): n is a, c, g, or t
  misc_feature (513)..(513): n is a, c, g, or t
  misc_feature (515)..(515): n is a, c, g, or t
  misc_feature (519)..(519): n is a, c, g, or t
  misc_feature (524)..(524): n is a, c, g, or t
aaaacagacctgaggaacntgaaccagnacctatangaatggnaaaggcgcccaaatacaaccttgcccatcgaagaaacnactgtaacatttggggaacccccatcgttttaaggnccatgtcaactagaagcacagttttaagaaaaggcaggtgaccccatgaccagaggggatcctatggttcatgtggtnccggctggctggcaggaactggggtggctatcaatattggatggcgaggacagcgtggcactggctgcgagtgttcctgagagttgaaagtgggatgacttatgacacttgcacagcatggttctgcctcacaatgatgcagtcagccacctggtgaagaagtgacctgcgacacaggaaacgatgggacctcagtcttcttcagcagaggacttgatattttgtatttggcaactgtgggcaataatatggcatttaagaggtgaaggagttcagacttatcaccattcttatgtcactttagaatcagagggtgcntntgcnttatntgtgtaactgtatgactggattgccagatccagtcctgcagactatgccatgtccaaggcggaacctgaagttgacaggtcccgcttaacatatgccaactttgctgatgtgaatgctgcaaatgcttttgagggttttgatttaggcgttgatcctatcgcctagtttttcacatccattatgccttgcagttcagtccttggcacagtggcttcgataattttgagggcatcttgctttaccagttagtacctgcattgtccttgtctacgtcttacgatgcccttcttacagttattttattatgatttatattgttcttcccctcaccctatttcatctttcttgtttcattacgacactttcacttcttgaattctctatcctctactctttgctcggtcacttctccctacatctctctctatccttccc

SEQ ID NO: 313257 - DNA, 474 bp, Homo Sapiens
ccactgtgaagggcagtaacacaatcttccccatgggtgcaactgaatgatttatttagtacattgatgtacttaattattagtgtttctgggaagctggatttgacataaacttattttgaaaaacacggtttatgaaattttgtactaaaattattaatagacattaagtttctataatcaaatgtgaatatctgttgtcacagttttaaacgtcacagaaaaacctttgaaaattaatatagtgataatagatatgttctgtgtttgctgttaaatttaagaccaagaacaccacctagattgatcccttaagtaatcaaattttgaactgtgcaatgcagtttagtgtgtctttggaaaacaatgtcagagctggagaaaatacctaagaatcaaaacttaaaccataaatagtacaggtatatctcagcacagctaactgggacatctaggaaaagcacacacacataa

SEQ ID NO: 313258 - DNA, 2665 bp, Homo Sapiens
gcttataaacatcctttattgtacatagacagtggatactgagaatgatcaagtaaatggaattttgaacaggtaaagaggaaacaaagaattaaggtatccctgtggaatagtgcaagaaaggagtgccccacccatagtgttatctacaataggtactccggggaaaggaccccaaggagtcagaccacaaatgtatgaccagcacaattctatgatcaaactctacctctagcaaggcgtctcaacaatcaagttctatttaaatcattcgctcgtgtcttctttcagtcatgatgaaataatgagaatatcataaggaacagaaggtaatgcattggtcaccacccttggagaggctggtgggatgtatctggattagtcctcacggggggtgctattttcctgcatagtcttcattatccagtcaacatagttctttacccgtgtgtagagcccataggtcccacactggggcccccaggacaccaggccagctgcgtagaatttggtcttgtcattgggatcctgtacagcaaaggccccaccactgtcccctttacagctatccatgcccttctctcctccagcacagatcatgttaggagtgaaaacataggcctctgcatctgctgtgggtttctccactttcacttctttgcattttcttaaaggagctacaggtaaccttgccgccttgaggcgaacagcacgatctctcttctctgttcggccccagcctgagatcagtcccaggtccccatccatgaggttgtagtcggaagaggtgcctggtaggcagatgggagagacggtgggtcccattttcactgggtctttcagccgcaccagtgcaatgtcattatcaaaattggttcgtccttctgggacttccagcagcttccatcccggatgaataaacacatgctcaggagtgagcatcttggattttgccagccgtgaggtctgcactgaggtggacccaacatacattgttggctccctgtttccctccacaacatgagcagccgtcagcacccagtactcattaatgagcgctccaccagcccatgggttgtcaaagaagacttgccaggggaagtttttaatatctgcatcggatcctccaattatcctctgtttttcttcaaagggttctctggggactccacagactggaacacatttcggcagctccgggcccagcacctcattcacccagctcccgttaccagcacagtgatactccccacctcctccattttccatgtagtaatatggctcctcacaagtgtagcggatgacagaaccaaacaaagtgctctctgggtcttcaactttaccattctcaatggattcaggaatgccacagtccacaggttgacatttcagtttggaattactccactttccattgctttgacaagtcgaatagaaagatgttgcaccaacacgtccctccacaacttcaaacccatccagacaggttatctgcaccacatctctaaagacatattttgccttcgcaggctcccaaacagaattgggagtgtcttccttagggcagggcattggatctccatgatagcgaagtttccagccctttttttgccctgttagatcagtttggaagatgatatcaagagcattactcttggtttcaatatttagaggcccagggaatccatgaccacagtaaggaccaaattgccgatctcctgcaacaaaaactaaactgtcaaggcagtttcccgctgagtcagctgcttccacatcaaaatcttctctccgcaaggtcaccaccacttggaaccctttctccaaccggatctggtattcacaccttgagttctctggatatggtttgggataattgggacttgcaatctccccaatcagtgcagtgaatacatccccactgcaattaactccgcaattcttcatgtcatcatggaggaaatattccggggggcaggagcagaagtaaccaccaatgaaattgttgcagaagtggctacaagggacatctacaaaatctgtgcattcatttatgtctgtggcaacatagtatgcagcaaaccccgtaaaacgctcttcattggaaaagtctgacttaaagatcacctggagtttgttgtatgggacttggaactcttccacaattggagagtggggattgttactgctcctctgtccacagagcctcccttcttcagtgtctcctgagattatctgcactgagtcatacgcacagttctctgacagctcaatgtccagatgggtgaagtagaggtgaatcccatacccttcaggaacttctatgtcccaagatttctctacctcactgggatatgcctgaggatagttaggggacaggatctccccatacatggtaggctcagcataaacccatgccaaaagtgaaaacaggacaatgcaccacatctctggcgatttgtccaccctggtgagctgcctgtctcttggtcctggctttctgcacctccggactttggagccttcagaagctggtaggagcaagtgggtcagttccctctctcctgccagtgggcatgctgggcaacccctctggcccccagggacagcagcacagggccttgacgctccctctgcaggaacctccggccagcctccctgatcccgg

SEQ ID NO: 313259 - DNA, 338 bp, Homo Sapiens
ttaagtatcaaagttaagtttaataaagtaagttccttccattttgtaatgtataaaataataccatttaaacaggcagaaactagctaatctgcatttatagagcatagttttttgggtgggaaaaaagcattctttcatcatttcacctttactagaagaaacagacttatgatggttcttactattatttttcaactttagaattattcattcagtagaagctgtatttcaagtacccaaccattctgtttttcactttcaatgtaatcttcaaaaattacatgagatattcaacatactttattataaaataggctttgtattaaacgattttg

SEQ ID NO: 313260 - DNA, 449 bp, Homo Sapiens
atatctccaagtgagttcttatggaggaaaactgccccagagccatggtgtctccctgttcaagatggcagatggttcagggcagactgagaggtgcccctcaagtgtcctgcctctatggctttatctttgcatatgtggcactgtcagctcaatggcacgacagggctgctctgctgctcttcgatgtagaggcttgccaggggaaataggcacacagatgcagcctccttcctaaccctcaactgcaatctattttgtatcccttgagctctcagcttctgctgtttttgtcagatagcagacttccttactgggagatacactcattccatgggcccaggcctgacccacacgaactgggtgcaacagtgggctgaaaacatgaggactggactcaagagtgtccagcttgaacttgttttccaactgccttatccagatactta

SEQ ID NO: 313261 - DNA, 1149 bp, Homo Sapiens
  misc_feature (421)..(430): n is a, c, g, or t
gcatgtggcaaccttttttgcttttggctttgtgtactcttttgttgaaaatgataattgagtcatttaattataaatactcagatcacaatttgaagctgtctttgaattaaaggacaaactcctggaacctttccatataccagagtaaactagaatatcattttaagtatttattgaataaaatgattctatcaacactgctactgtattcaagccagtgcaataaaaaagtgggtggacagaggtcattcactttgactttgcctgccccctccaaatccccagtgtaaacaggaaaatgagaagtcacaggtagaggacatgctgtccaggcccatgtaaccaggcatgtaacatacaaaggaagcccctctggttaactagtcctgaagaaggtaagcctcaagtatgcagcttnnnnnnnnnngtagaggcctcagctcatttgtgaaaggaagcaagagccataattaatgtaagtcctttgggaacctcattctggctgtgtgtaggtttcctggggcccctacataaatgggtaagacgaagtgcttcaaacaaactgtacggctccctttttaatgtctgaaggtctatggggactgtctcctaggatctttgcatgtctgttgaaacaaggcagctggggaacagtacttgtgctactgagtccataggctcatctgttatttgcctggggagccaggggggtaaattcccgaatccagcattgctctcctgcgggctgtttccttggcaacactgtggtttagccgtctcagtcgttcctgagcattctgtagaatgttgttaaccaagacaacgcgtcgccgggcattaagtagcttcttaacataggggtcaagatccagggccaccttctgatcctcatttatgcggcacagttctgtggctaggttgtcaatttgttcccggagctctacctggctctctctgacggcgtgtacgtgagagtcgagctgctgcacagcgggtcgcaggaactccagcagcccttcggcgaaaaggtcgcggcctgtgggccccgccaccggggtccctgcccccgatacagcggcggaaccagcccccgccatcacgaattgtcctgaagcccgaaacctgccgcgagggccgccgggaacc

SEQ ID NO: 313262 - DNA, 674 bp, Homo Sapiens
tcagtgaatttgtttttattttttaacaagatttgtgaactgaatatcatgaaccatgttttgatacccctttttcacgttgtgccaacggaatagggtgtttgatatttcttcatatgttaaggagatgcttcaaaatgtcaattgctttaaacttaaattacctctcaagagaccaaggtacatttacctcattgtgtatataatgtttaatatttgtcagagcattctccaggtttgcagttttatttctataaagtatgggtattatgttgctcagttactcaaatggtactgtattgtttatatttgtaccccaaataacatcgtctgtactttctgttttctgtattgtatttgtgcaggattctttaggctttatcagtgtaatctctgccttttaagatatgtacagaaaatgtccatataaatttccattgaagtcgaatgatactgaaaagcctgtaaagaggagaaaaaaacataagctgtgtttccccataagtttttttaaatcgcatattgtatttgtagtaatattccaaaagaatgtaaatcgggaaatagaaagaggggtgctttatgttaagtccctaacacttaccgtctaagaattggctgccatggcaaatcaaattacttttttccttctctcttcccgtcttctctcctct

SEQ ID NO: 313263 - DNA, 605 bp, Homo Sapiens
  misc_feature (199)..(253): n is a, c, g, or t
  misc_feature (389)..(443): n is a, c, g, or t
gggggggagattccaaaacccctatttcttgtgcccggggttttctttgggggaacaaggtttgggcccaggtttcccctttcccctaagggggcccgggccgccccaagaaaaggttttggaaaggtttttttgaagggcgagggcggggggacaaaggtggaggggtttttgaggtgtgtaggagaatgcgcggtcnnnnnnnnnnnnnnnnnnnnnnnnnnnnnnnnnnnnnnnnnnnnnnnnnnnnnnncatactaaactttttattaaaacagtccttacaacatatttaaaatggcatgttccacagtcaaatatttaagaaaaaaaatctatatgcaattattggcgcacaaatttaagaacataattaaaaccaagccagnnnnnnnnnnnnnnnnnnnnnnnnnnnnnnnnnnnnnnnnnnnnnnnnnnnnnnngatatatcttcaaattcatgtcagtgacctggaatacctgagatttcaagttgttggttttccagatgggtacaaaacatttttcatccactttataaggacacggcagatccagaaagaataactttggttaataaatgctgtctcccaaagatcaaaccc

SEQ ID NO: 313264 - DNA, 617 bp, Homo Sapiens
  misc_feature (24)..(24): n is a, c, g, or t
tggctttcctaacccagcttttgncgaggcctacctcaaacccgtggtggatgactcgaagggatccctttctgtgggggaaacctgatctcgacaaaattagagaattttgtcagcggtatttcggctggaacagaacgaagacagatgaatctctgtttcctgtattaaagcaactcgatgcccagcagacacagctccgaattgattccttctttagattagcacaacaggagaaagaagatgctaaacgtattaagagccagagactaaacagagctgtgacatgtatgctaaggaaagagaaagaagcagcagccagcgaaatagaagcagtttctgttgccatggagaaagaatttgagctacttgataaggcaaaacgaaaaacccagaagagaggcataacaaataccttagaagagtcatcaagcctgaaaagaaagaggctttcagattctaaacgaaagaatacatgcggtggatttttgggggagacctgcctctcagaatcatctgatggatcttcaagtgaagatgctgaaagttcatctttaatgaatgtacaaaggagaacagctgcgaaagagccaggaggtgcgaccaccagcagctct

SEQ ID NO: 313265 - DNA, 438 bp, Homo Sapiens
ttatccgtgccaccagttaattttattacgtctttgcgacaaattcattacaaatggctgtcataactaattatagaggatacatattttttaattaggttttcctttttcttcccctcgcacgtcttagtttccttcttttcttcccaaacacagatctggcggtcacgaggaccatcttctctttccctccatcgtcatcactatcactagagctgctggtggtcgcacctccattcttcacgggagcttccttcactgagttctgcgaatctgaagcactggtttttggctctttcgcagctgttctcctttgtacattcattaaagatgaactttcagcatcttcacttgaagatccatcagatggattctgagaggcaggtctcccccaaaaatccaccgctcgtgccgaatttcttgggctcgagggcaaaa

SEQ ID NO: 313266 - DNA, 541 bp, Homo Sapiens
  misc_feature (14)..(14): n is a, c, g, or t
  misc_feature (35)..(35): n is a, c, g, or t
  misc_feature (41)..(42): n is a, c, g, or t
  misc_feature (70)..(70): n is a, c, g, or t
  misc_feature (94)..(94): n is a, c, g, or t
  misc_feature (99)..(99): n is a, c, g, or t
cgacggccagtganttgtaatcggactcactatanggcgannttggccaagtgagctcgaattgcgggcngcatgcatttgttttatagttttntcttntgtttgttaatactttattagtattttctaatggacagaacacaaaccaaataaattttttaatccttttagttgaataaaaataactgacattctgattgttgtttcttctttgttaaagaaagaaagtattgatagaacagttaggcacacagttgacagcttactgtacaatgatatgcgcacattatcttttgacaattataatcctaaaatgtgctcttcatattttttcccttgtaatacaggagccatgctcctaaaagcaaaatttactactaataaaagaattttccaaggagtgacaaaaagacttttaaaacaagtccttaaataaaaggatgcagcaacaacggaatgtaagttgttggattaagaagacagtttaagctacatctcaaaaaattaaaaattcatttatcttacaattactcccgggcca

SEQ ID NO: 313267 - DNA, 835 bp, Homo Sapiens
aaaaaaaataagtagctgatgtgcagttgagaaaactagaggactgaaaaaacaaattttaactagcaaatgctgtgaattactcttcctccccttctctgaaatgggtaaaggacaaattgtgtaaaaaaacctatgcactatagaagggaatagtaaccatttcttttgtctctctgtttctgttctgactgagaacctgcagccatttcttgttacatgaaaacaaaatgctacttgttacctctattttttgttactatacaattatgaaatgtaatgtaagacaccaacagaaatgatatacctgtaactgtacctatcaggactatacctcatttacagtcagaaagcttactgggatgtcaggaaatgatacagggttggttctcatttcgtgccgaaatgagacagaaattcagtgacgaaggtgcgttgtaggggtattgatgtgccccaggtagtgccagcagagtagggaaaactgcatttgcataaaaactactcttgacatgattgttcattttacaaaaaaattccattaattaccaagccctcacccagcccatgtgtgataggatttatgtaggaagaaacttgattttcaaataattttttaaatgtatctcttgcctaaaggactatatacatctaataaagtaacactgtgtcatcttctggagttatcaaaaattgtatacaatcaagacaacacaagaattattttatttttgagtgcaaatacaggtactgttggagttgatgggcaccatgctttctcatgaagtagcatttccctaccatcaagccattgttttgtgccattcaggagagg

SEQ ID NO: 313268 - DNA, 669 bp, Homo Sapiens
  misc_feature (91)..(109): n is a, c, g, or t
  misc_feature (602)..(602): n is a, c, g, or t
  misc_feature (615)..(615): n is a, c, g, or t
gggaatactgttgaacctatagcgttgtcttgattcttttgtgttctctgccttgtaattttctgttactgctatatctacgtgtaaatcnnnnnnnnnnnnnnnnnnnggttaattctgccacatttaatgttggtgagagagtgatctatcctaatgacattttactgtttaaaaaagtttcctagccatgaagccctgctactgatttagacaaggtattatggtcattactttgtacccctatccttccaagcacttctggtacttcagtcgtttttactgatccaccaacacctaaagaggctatgctacagtctctagctaaatggaagacacattcatccttctccctctgactgctttgatcatcatttattgcatctcataactaattttctaaagtttggattgggacttttcaggtcctttttggagggcaaaggaagtgccagcttctctggggaacttgtttttaaatccaaagacttgaaccacattccctgcacatgaacatgtttgcttttatcccttctctcattgtctccttcccatcttagtaccattgtagttataaacatctgcattttttagaagcattntacccatttattnttttaaacattcaagaactgctgacgtactgtggatgtagagtataaaacttgg

SEQ ID NO: 313269 - DNA, 1113 bp, Homo Sapiens
  misc_feature (730)..(763): n is a, c, g, or t
tttttttcagaacaaaacaggtatatttctattagactacctgatacagaagatagtgtggtatggatggatagtatgaaggacaaataatacaaatatattttattgaaataaacaaaaatgcatacacagctcaatgggtcacttggaacaaacttgcttgactatattactgagcagaaacaaaacggaagcacaaacacctttctttttttgacatgtatctggagataggtaggaagacactacttggttttttaaaaaactgaccttcccttaaggcctggtcatagaagtgtaaacaatgtaaatgaatccaccattaccagttgtcatatcatatctatgtcacctgtgtattctgagattacacacatacctgccaatatacctgggaaaggttattttatcacagttacacttgagttcttggcaggcaggactgaggaagagtaatttgaaagaagttttacatcctatttagaagaaatcactagtatttccttaaataacaggttacaatagaaagatactgcctggaagttatcctttcactttggttcatttttagtttttctttatgatttacatagctgtttaattcatttgcttatagtacaatcctgccataaagtattaaagcacaagatacctattattccttcaacatctgcatttttcaagttttatactctacatccacagtacgtcagcagttcttgaatgtttnnnnnnnnnnnnnnnnnnnnnnnnnnnnnnnnnngcagatgtttataactacaatggtactaagatgggaaggagacaatgagagaagggataaaagcaaacatgttcatgtgcagggaatgtggttcaagtctttggatttaaaaacaagttccccagagaagctggcacttcctttgccctccaaaaaggacctgaaaagtcccaatccaaactttagaaaattagttatgagatgcaataaatgatgatcaaagcagtcagagggagaaggatgaatgtgtcttccatttagctagagactgtagcatagcctctttaggtgttggtggatcagtaaaaacgactgaagtaccagaagtgcttggaaggataggggtaccc

SEQ ID NO: 313270 - DNA, 2239 bp, Homo Sapiens
  misc_feature (142)..(142): n is a, c, g, or t
  misc_feature (158)..(158): n is a, c, g, or t
  misc_feature (225)..(225): n is a, c, g, or t
  misc_feature (252)..(252): n is a, c, g, or t
  misc_feature (320)..(320): n is a, c, g, or t
  misc_feature (349)..(349): n is a, c, g, or t
  misc_feature (654)..(662): n is a, c, g, or t
  misc_feature (824)..(832): n is a, c, g, or t
agcggcccggcgcgggcgcccccagaacggggaaatattgtgttttctgagataaaatcctcttgtgtctcgggggcgcgtcgcgcgagggcggcggtgctccagacacaaacgattatcgaagagagggtcggatgctggngtggctcgtgcgtcgntgcgggcgcggactaaataaatctctccggcggggttaggggaaattggtctaaacacaaatgtttntatgtttgttcttccgcgttgtagcgngggagtgcccagcgaaaaaagtctttctcccccaatgtaaaaatggtgttgttattttccccctttgngtatatctccgggaagggagttccctttngttctttaaaaaaccgtggattgcccattccagggagaaattaagtttggtatttaaacgccaatatttatcccttaaagccacccaggagtggtttgcccaacccaggaaattttaaaaaaggtgggtctaaaaaaaatggaccttcccggggggaacctggaaagaaaggaggaaaaggtggaagggggaaagaaaaatgggtttgcttttcccacttcttaaaattctttcagcaccaattcttatttctttaaaatccagaccaaggggctggtggtagaattttttgtccaatttagttnnnnnnnnntttattttctttctacatagggaatagggcctgttgaggaacccctatttaattggtaatgaggtttcaattcaggttagtcaactcaagttattataaaatgcagcgtggatttaccagaaaataatttcctaccgtacacgtgccagtatatttaaactnnnnnnnnngcatacaatgtacaaacaaatttatttacaaaaattacaattacaaactgtacaaattgagacaatttcccatgcctccaacagaagccaagagcctttactgtcaaatggcagtttttgttacttttaaatgacacacaaaaagaaatatgatgcctattcagtcatccactgccagtttaaaaatgcttttctaaataattccaagaagcctattagtgatatgtatatggataatttccctcaactctatttctagaatggctatgtacaaatccagcaaaactggaacagaacagggtaagaaagcacatagcaactgctttttcaacagtaaattttgactattcccctaaatatctacctagtggcttaaaactaaaactatggtctttggctttaaaaagaaagtcaaaaaattttgacttttaatgactgcacaattctaccaaagccagtgtttacctgggtattttttgtcacctgtagtttacatttccctgctactgttaaagaaacagaattctacagtattcaattctgtatattgtcttttaaggtttttcaatcagactcactactactgcttgaggagtccgttgacataatctctacatcatcttcattttctttattatgccccaggaggttccaacaaaaagtcactactatgatttggtggtaacatattcatcgacatgtcatttgactgccatggatactgtggagcaaggacatctggcaatcttcctgctgcaagtgcatctcctggtaaatggccattcacgccattagtggaaggattgttcatctgacccagtaacccacttctcatctctaaatcagttgggtagggtctccgggggtcccctggaacccaggtcagtggagcacatacagcattacttgcactgatcctatgtgcatacttaattatttcttcagaggagatagcaccttttcttgctttttctattgacttgagtttctccttcgcttggtaaacagctgttgccagtatttgttctgcttcctttagctgtttttgtagctgctgaatatcactgtctctcttctctacttctttttctaaaacttgcatttcatgatgaatttttccctgattaagtgccaatttcattagttcttgaaattccccatctcggtgaattaacaactccaggacctggttttcctctccagcctgtaacaacttttggtttcttgaaattgccagcatttctataagttccctagacaggacctccaagtcctcaagcgcagacagcagccgctctcgtgtgctgttaccacccgccactcccaaaccgcctcccagccgctccttctccttctcaccactcgaagacgcagccattttccccagagtcccgccaccggcgcccc

SEQ ID NO: 313271 - DNA, 381 bp, Homo Sapiens
  misc_feature (370)..(370): n is a, c, g, or t
gtgtacaaacaaatttatttacaaaaattacaattacaaactgtacaaattgagacaatttcccatgcctccaacagaagccaagagcctttactgtcaaatggcagtttttgttacttttaaatgacacacaaaaagaaatatgatgcctattcagtcatccactgccagtttaaaaatgcttttctaaataattccaagaagcctattaggtgatatgtatatgggataatttccctcaactctatttctaggaatgggctatggtaccaaatccaggcaaaactggggaaccggaacagggggtagggaaaggcaccatagggccaacctgctttttttccaaccgggtaaatttttggccctattncccccttaaat

SEQ ID NO: 313272 - DNA, 1127 bp, Homo Sapiens
  misc_feature (145)..(450): n is a, c, g, or t
atgataaggggtatgagggatactcacacacctgaggtcacacctgcacatacaggtggcatcaacacatgcaggactgtcgcggttgcttctggaccgaacgaaggacgacgaatgcagaaatgagacagacaaaaggatctgnnnnnnnnnnnnnnnnnnnnnnnnnnnnnnnnnnnnnnnnnnnnnnnnnnnnnnnnnnnnnnnnnnnnnnnnnnnnnnnnnnnnnnnnnnnnnnnnnnnnnnnnnnnnnnnnnnnnnnnnnnnnnnnnnnnnnnnnnnnnnnnnnnnnnnnnnnnnnnnnnnnnnnnnnnnnnnnnnnnnnnnnnnnnnnnnnnnnnnnnnnnnnnnnnnnnnnnnnnnnnnnnnnnnnnnnnnnnnnnnnnnnnnnnnnnnnnnnnnnnnnnnnnnnnnnnnnnnnnnnnnnnnnnnnnnnnnnnnnnnnnnnnnatctccccttttgtttttgcattaattgaataaaggtaatttcaggctgtgcagctttcaattgccggttggtggttcacccgatcctatagacgcacaggacactacagctagcatggccaagaacatggagtcaggggtttttgcctgaccctggcgctccagtagtttctcagcttcttgtgtcgttttcttgatctgtccccatgttatggggttggatgtcattgtgactccggtcggcccttgttctgtctttgcattcagattccgctggctcatggctcgtactggaggtaacaggcccacggttgaataccatggatccctccggtctcccgttccatggtcacacacacctggagggcacccacacggtttgtccatctccttatattctccgccggcagactctcccgtccaggggttcgtagttcgtctgatcagtttcactttctctgctctggcagaccttcctcgttcaggtccctggtcgggcaccacttgtcacggttgcttcactgtggcagcctcctcagagagcctagccgcccgatagtccgcgcgcccgtgagcgacgcgtggtcgacgatatcccggaattccggaccggtaccagcactgccctgtgttttaaaaccacagcggtgttctatattcacttatgttgtgtcctc

SEQ ID NO: 313273 - DNA, 641 bp, Homo Sapiens
ttcacgcacaggcttttcataaaaaactttatttctcaaaaaagggggaagaatccaaagtattaaaataatcctctaatttttgttttggaggaaaagggtaggacgacaaaataattcatacaaaaatttcaagcatcactgctgtagatattcctccagctcagtggggaacatcctgaaacttgcatctcctgctgcagcttgggttccagctgcatcacggggaacacagcatctcctggatgcaggaagctgcaagcatctggaatgcttattaatttaccccacaaataaatacaaaaggtcaatcttcccagtggaaatgattccatcgatttttgtgactttctgatgagaatgctaaaaagaagagttgccccttttctaaaattccaaatctttcctttttgaagatgactacatgtgaaagaaataaaatgtgaaaagatttgttaaggatgactggctctagtaccaactaaatgccaagggggactgtaagtcactgaggtgacacaaagcagccatgggttttcctcgccttttttatggggaaaatgcacctttcaatcctagaagataattggacttggcaaagtccctatcggtagcaactattttcttactctcccgggccc

SEQ ID NO: 313274 - DNA, 918 bp, Homo Sapiens
  misc_feature (334)..(374): n is a, c, g, or t
  misc_feature (554)..(554): n is a, c, g, or t
  misc_feature (827)..(827): n is a, c, g, or t
  misc_feature (846)..(846): n is a, c, g, or t
  misc_feature (901)..(901): n is a, c, g, or t
gggaaggaaaaggggttagggcggacaaaaataatttcatccgaaaaatttcaaagcatcacttgctgtagatattcttccagctcagtggggaacatcctgaaacttgcatctcctgctgcagctggggttccagctgcatcacggggaacacagcatctcctggatgcaggaagctgcaagcatctggaatgcttattaatttaccccacaaataaatacaaaaggtcaatcttcccagtggaaatgattccatcgatttttgtgactttctgatgagaatgctaaaaagaagagttgccccttttctaaaattccaaatctttcctttttnnnnnnnnnnnnnnnnnnnnnnnnnnnnnnnnnnnnnnnnntgttaaggatgactggctctagtaccaactaaatgccaagggggactgtaagtcactgaggtgacacaaagcagccatgggttttcctcgccttttttatggggaaaatgcacctttcaatcctagaagataattggacttggcaaagtccctatcggtagcaactattttcttactttnaaaaaaaagggtgagctgggagccagactgtgcacatcagccaagactgctattgccaaacggagcccagaagcatccaggtacactttccaacaggcagaccctaccaggaactgggagacaagagcgggctctctcctgagataagacaagtttaacgtgaagaccttttggaaaattcccgggttttcctggctcttttcagttggtgtttctctgaggaatagggaggttctcatgaagatattttaaacttccatgctctgagaaatntgagaccacgtggtccttncctcgcagcagccacttagtagtaagcagtccctcaagtcctactggtccccggncgtgattctcgatgtac

SEQ ID NO: 313275 - DNA, 830 bp, Homo Sapiens
tcacttttgaattctgttttatatcaagctataaaaacctggatcctgttcaacatacatacaaaagcagtactctaaaaaataattattattatattaacaatatcaaacacgctaactcctacacacgtacaaagaccttgggcatcctttataccggccacttcctggccacagctttgtaaggcagtacctgggaaaaggggacggacccaagagagccggccccaaatcctgactcagcactgcagaggcatcagccgggctgagtcatgcctgagtccgaagggccccctctcaggctgagaaggaactttcaggcccagggaggagcagagccttagggggagcacatgccgagcaggaaaacgagctcacattttcctggggtagagcgaggtgcccggcagggcaggggatgaacggagggtgcggtgggcagaataacggcctcccaaagatgtccacgtgacagtccccagagcctgtgactatgttaggttacacagccagtgggaactaaagttgcagatggaactaaggtggctaatcagctgacctgaaaatagaaagacgacctgggttctctgggtaggcgcaatgtgatcataagcgtccttaaaagcggtagagcaggccgggtacagtgactcatgcctataatcccagcactttaggaggcttaaggctacaagatccccttgagcccaggagttccagacaagcctaggcaacagaatgagaccctgtatccacaaaaaatatgtagctgggcgtgggggattgtctcaggggactgagacaagaggatcacttgaaccaggaggtcc

SEQ ID NO: 313276 - DNA, 1495 bp, Homo Sapiens
tcaggttattaaatgcaaagcagccatcgcctgggaagcaggcaagcccctttgcattgaagaggttgaagtagctccccccaaggctcatgaagttcgcattcagatcattgctacctccctgtgccatactgatgccactgttatcgattctaaatttgagggcctagctttcccagtgatcgttggccatgaggctgcaggtattgtggaaagtattgggccaggagtgaccaacgtcaaaccaggtgacaaagtaattccactttatgcacctctatgtagaaaatgcaagttttgtctgagtccactcacaaatttgtgtgggaaaatcagtaatctcaaaagtcctgctagtgatcaacaactaatggaagacaaaaccagcaggtttacctgcaaaggaaaaccagtttaccatttctttggaaccagtacattctctcagtacactgtggtgtcagatatcaatcttgcctcaactggctatggggctgcaatcaacaatgccaaggtcacccctggttcgacttgtgctgtctttggcctaagaggtgtgggtctttctgctgtaatgggttgtaaagcagcaggagcttccagaatcataggtattgacatcaacagtgagaagtttgtgaaggctaaagccctgggagccactgactgcctcaatcctagagacttacataaacctatccaggaagttatcattgaattgaccaagggaggtgtggattttgcccttgactgtgcaggtggatctgaaaccatgaaagcagccctggactgtacaaccgcaggctggggatcatgtactttcattggagtagctgctggtagcaaaggattgactgtttttccagaggagctaataatcggccgtactataaatggaacattctttggtggttggaaaagtgtagattctatcccaaagctggtcactgactataagaataagaaattcaatctggatgcactggtgacccataccctgccttttgacaaaatcagtgaggcatttgacctaatgaaccaaggaaaaagcatccgaacaatcctcatcttttgaagatgccaggagcaattcggaatactatctgattgaatgtgaacctgcctggttaatttattacctgatttgatgaaccaaggaaagccatgcgtttaaacaaatatttacatttaatatgggaacataaaagagctttaaatattatagactttgtacctgttatatatatgaatattccctatgttaaataataataataactagtgtttatgaatagaatcatatcatctttagaaattgtttaaaattagttctgggaagttgaaagtggggaatgaagagataataaataaaactagattggccatatgtttataatttttttagattgggtaatgaatacatggagtttcattatacttttctctccacttttgtctatgttgcacacactatggccttgtgagggcaggggtc

SEQ ID NO: 313277 - DNA, 1323 bp, Homo Sapiens
atatttaaagctcttgtatgttcccatattaaatgtaaatatttgtttaaacgcatggctttccttggttcatcaaatcaggtaataaattaaccaggcaggttcacattcaatcagatagtccttggttcattaggtcaaatgcctcactgattttgtcaaaaggcagggtatgggtcaccagtgcatccagattgaatttcttattcttatagtcagtgaccagctttgggatagaatctacacttttccaaccaccaaagaatgttccatttatagtacggccgattattagctcctctggaaaaacagtcaatcctttgctaccagcagctactccaatgaaagtacatgatccccagcctgcggttgtacagtccagggctgctttcatggtttcagatccacctgcacagtcaagggcaaaatccacacctcccttggtcaattcaatgataacttcctggataggtttatgtaagtctctaggattgaggcagtcagtggctcccagggctttagccttcacaaacttctcactgttgatgtcaatacctatgattctggaagctcctgctgctttacaacccattacagcagaaagacccacacctcctaggccaaagacagcacaagtcgaaccaggggtgaccttggcattgttgattgcagccccatagccagttgaaaacccacatccaagcagacaaactctctctaaatttgcatcatcatctattttggcaagattgatatctgacaccacagtgtactgagagaatgtactggttccaaagaaatggtaaactggttttcctttgcaggtaaacctgctggttttgtcttccattagttgttgatcactagcaggacttttgagattactgattttcccacacaaatttgtgagtggactcagacaaaacttgcattttctacatagaggtgcataaagtggaattactttgtcacctggtttgacgttggtcactcctggcccaatactttccacaatacctgcagcctcatggccaacgatcactgggaaagctaggccctcaaatttagaatcgataacagtggcatcagtatggcacagggaggtagcaatgatctgaatgcgaacttcatgagccttggggggagctacttcaacctcttcaatgcaaaggggcttgcctgcttcccaggcgatggctgctttgcatttaataactttgcccttggtgcccatttttctttgggaaactgtgttggaagtttctttctgagttaagaaagcttcaaactcctacccaggctcgtgccgaatcctgcagcccg

SEQ ID NO: 313278 - DNA, 687 bp, Homo Sapiens
ggagtttgaagctttcttaactcagaaagaaacttccaacacagtttcccaaagaaaaatgggcaccaagggcaaagttattaaatgcaaagcagccatcgcctgggaagcaggcaagcccctttgcattgaagaggttgaagtagctccccccaaggctcatgaagttcgcattcagatcattgctacctccctgtgccatactgatgccactgttatcgattctaaatttgagggcctagctttcccagtgatcgttggccatgaggctgcaggtattgtggaaagtattgggccaggagtgaccaacgtcaaaccaggtgacaaagtaattccactttatgcacctctatgtagaaaatgcaagttttgtctgagtccactcacaaatttgtgtgggaaaatcagtaatctcaaaagtcctgctagtgatcaacaactaatggaagacaaaaccagcaggtttacctgcaaaggaaaaccagtttaccatttctttggaaccagtacattctctcagtacactgtggtgtcagatatcaatcttgcctcaactggctatggtgctgcaatcaacaatgccaaggtcacccctggttcgacttgtgctggctttggcctaagaggtgtgggtctttctgctgtaatgggttggtaagcacaggagctttcagaattataggtttg

SEQ ID NO: 313279 - DNA, 686 bp, Homo Sapiens
gccttttcatttcaggatctggtcttcctttatagacattcactttattaagcctaatttcttttatcccgtcatcctcttccattcatggtgttaataatattttatgcatgtgctagtaaacttggggggaattgaggacccttacttaccttaggcagcgtccttgttactcagtggtgctgttgaggagaattagaatgtaccaaggagggagtcaggttttagtcttggaatagtcactgttctcggatctcctatagctgagggcaaagttgagcatcgaaggagggagtgggcatcaaagttggtgtgttgggatgctactttttaagaacccagatgttcttatttctgggtaactccacatgtagacacaaagagggggataagcctcaacgacagagcagtccttatctcaaacattactgctggaactgtggaacccctgctatgagcagggtgctatgcataaatgttttcttcacccaggactggaagacacccctacctgtggaaggagaatctctgtgtcctttcctcactttggggcaggatcactacacctcaacaggctagtcagtcattggatcccatccccttccccccacttccttgcttctttgcagttgggtggtaggagggccctcgtgccgaattcggcacgagagagaactagtctcgag

SEQ ID NO: 313280 - DNA, 1564 bp, Homo Sapiens
ctttaaaaaaattataaacatatggccaatctagttttatttattatctcttcattccccactttcaacttcccagaactaattttaaacaatttctaaagatgatatgattctattcataaacactagttattattattatttaacatagggaatattcatatatataacaggtacaaagtctataatatttaaagctcttttatgttcccatattaaatgtaaatatttgtttaaacgcatggctttccttggttcatcaaatcaggtaataaattaaccaggcaggttcacattcaatcagatagtattccgaattgctcctggcatcttcaaaagatgaggattgttcggatgctgttaataacaataaaacattaataagtgtaattttcatgataaatttaaccaaagctcacaaataagttttgccttttcatttcaggatctggtcttcctttatagacattcactttattaagcctaatttcttttatcccgtcatcctcttccattcatggtgttaataatattttatgcatgtgctagtaaacttggggggaattgaggacccttacttaccttaggcagcgtccttgttactcagtggtgctgttgaggagaattagaatgtaccaaggagggagtcaggttttagtcttggaatagtcactgttctcggatctcctatagctgagggcaaagttgagcatcgaaggagggagtgggcatcaaagttggtgtgttgggatgctactttttaagaacccagatgttcttatttctgggtaactccacatgtagacacaaagagggggataagcctcaacgacagagcagtccttatctcaaacattacttcacccaggactggaagacacccctacctgtggaaggagaatctctgtgtcctttcctcactctggggcaggatcactacacctcaacaggctagtcagtcattgtatcccatccccttcccccccacttccttgctttctttgcagttgggtggtagaagggcctgccctctcttgtgcttcctgtgcccatatggtggacacacctgatgaggcccaacttctgccttcctcattgccacctttccatctgtgtgggcagtcaggtggtattctcagtgggccagagaaggagcaggaggcctcactctggtgtctacccataggctgattaccagccacctggctgccacttagcattccttatgaatgtattccataattgagaattctaggagaaaaggtttgtgttcgaggatatgaatagaagggtgtgaggctcaaaccccacttcaacctctatctcctaacttgaggagtattccttatggggatattgaagttgtataatacattgcagggcttatatactaagtttacatggtgtagcttaaaaaataatgcttgtattttctttttattgaacttccttctgatatgttgtgactgacacgtttgcaaattggggagttcatgtcagtggggatatttcctcaggtttcttccccaagaagtagtctgggtcctcacaccatgaaactatc

SEQ ID NO: 313281 - DNA, 330 bp, Homo Sapiens
cccgggaaacggcgccattgtttgggtcccgggaattgggccatatgggccgggctccaccttttaatccaacgtgcgaaatagacctccttgacctcgttttaacccttcccgaggttcctctggcaaaacctttctcatctgattcatgctgattctcttgaagataaaattttaatgttgtaaaatgctaattaagtgtcacttaaattttgaaaagacttcaatgctttatttatacatacatctttgctattctaattattaattaagtagattaggtagtgaaagccacaaaatagtcttgggatctcataaaattagagttga

SEQ ID NO: 313282 - DNA, 1001 bp, Homo Sapiens
  misc_feature (211)..(211): n is a, c, g, or t
  misc_feature (935)..(952): n is a, c, g, or t
gttggggatttttgccgcgccccgggaatgccgggggtatatttttgcaatcctggacggagggtgaaggggttcgggacccttttttgaggtgcctgtttttccaaccttttgacttggacggggaacatgcccctgggtggctgggacccaggactgtttgactgggggggttccctggggggcctttttccccccccgggaccccttnccaggaggctgagagccacagacggcctgggttttttcgggccttcccctcccccggcaccagttctggccacagctcccgcttcctgtgctggcacttctgtgctcgcagagcaggggaacaggactcagccccccatcaccggtggagccaaagtgtttgcttctccctttctgcggccttcgccagcccaggctcggctgccacccagtggcacagaaccgaggagctgccattaccccccatagggggcagtgtcttgttcctgccagcctcagtgtcttgcttctgccagctccttcccctaggagggaagggtggggtggaactgggcacatgccagcaccacttctagcttccttcgctatcccccaccccctgaccctccagctcctcctggccctctcacgtgcccacttctgctgggcctttagccctagaacctgcaggtggtgggggcggctaccaagaaggaacagaggtctctggggaggagtctgggtggtccagccctgatgattggccccacctcctgctgccccataaccctctcttcatttcggctttttcatttaccctcatttagagccatttgcagagatttagaaagatttacagtaacgaatggattcctatataaagattatttttatactttttgcagcaaaaggaaattgtaatatttgtacagtgttcaagtgaataaaaaccatgcctaaggctnnnnnnnnnnnnnnnnnnctcgagactagttctccctcgtgccgaattcgccacccaggcctcgctc

SEQ ID NO: 313283 - DNA, 1130 bp, Homo Sapiens
  misc_feature (91)..(117): n is a, c, g, or t
gggggcggaaaaacacagacccgtttgttctgtggcccacaacgctcctgttgccgagggcccgattccggggccccgggtccacgttagnnnnnnnnnnnnnnnnnnnnnnnnnnnacacaaatctctctagaaaagctttctcaaagggccgcggggccccccgcacaagggggccgcgctagctaaaatcggggggggagccgcattcggcgggggcgggagtcggcgcccaccccggcgggccgccaaggcccgtaccacccttaggcatggtttttattcacttgaacactgtacaaatattacaatttccttttgctgcaaaaagtataaaaataatctttatataggaatccattcgttactgtaaatctttctaaatctctgcaaatggctctaaatgagggtaaatgaaaaagccgaaatgaagagagggttatggggcagcaggaggtggggccaatcatcagggctggaccacccagactcctccccagagacctctgttccttcttggtagccgcccccaccacctgcaggttctagggctaaaggcccagcagaagtgggcacgtgagagggccaggaggagctggagggtcagggggtgggggatagcgaaggaagctagaagtggtgctggcatgtgcccagttccaccccacccttccctcctaggggaaggagctggcagaagcaagacactgaggctggcaggaacaagacactgccccctatggggggtaatggcagctcctcggttctgtgccactgggtggcagccgagcctgggctggcgaaggccgcagaaagggagaagcaaacactttggctccacggtgatgggggctgagtcctgttcccctgctctgcgagcacagaagtgccagcacaggagcgggagctgtggccagaactgtgcggtgaggggaggccggagaagccaggcgtctgtggctctcaagctctgtaggggtcgggtgggagaggtccccaggcaacccccaggtcagacagtctgggtcccagccacacagggcatgtccctgtcagtcagaggttgagaacaggcacatcaaagaggtcacagacactttcactctcttccaggttgtaaaaaataatcc

SEQ ID NO: 313284 - DNA, 845 bp, Homo Sapiens
  misc_feature (27)..(27): n is a, c, g, or t
  misc_feature (68)..(68): n is a, c, g, or t
  misc_feature (319)..(319): n is a, c, g, or t
  misc_feature (549)..(605): n is a, c, g, or t
caaacacaaaattgccagcaacaggancgggaagctgtggccagaactgtgcggtaaggggaggccgnagaagccaggcgtctgtggctctcaagctctgtaggggtcgggtgggagaggtccccaggcaacccccaggtcagacagtctgggtcccagccacacagggcatgtccctgtcagtcagaggttgagaacaggcacatcaaagaggtcacagacaccttcactctcgtccaggttgtagatataatcgtggtctcccgggggtggagaaagacgaagcagaggggcaaacactgcagagagcactagtctncaggccctgggccagggctcccctagcagcagcccaacccctgcccacacccactcccaccttccagggccacccaccttctgaggacatcaactcctccagcagctccgagctcatgcactctcgtgtgggatcaaagatttctgacagctctttggggagttccaaaacacctgtggggtctgccttgatgggctcaaaggaggtagaagggttgggtccggacgaannnnnnnnnnnnnnnnnnnnnnnnnnnnnnnnnnnnnnnnnnnnnnnnnnnnnnnnntccagcagggcagaagactgcagtggccgggtgtccagtgttgttgggcccagtgggagtgaactgagctcaccactgtccttgctatcagtcccagggccgccactcactacaatgatagcccccaaacccagtcatacaaggtcaggaagaggtcgttgaaactggctgtgctggaacccagacacaggaggaccacaagcctggttcccagacccaaggagaattaggcattgccag

SEQ ID NO: 313285 - DNA, 374 bp, Homo Sapiens
cacagaaattgcccagcacaggaagcgggagctgtggcccagaactgtgcggtgaggggaggccggagaacccaggcgtctgtggctctcaagctctgtaggggtcgggtgggagaggtccccaggcaacccccaggtcagacagtctgggtcccagccacacagggcatgtccctgtcagtcagaggttgagaacaggcacatcaaagaggtcacagacaccttcactctcgtccaggttgtagatataatcgtggtctcccgggggtggagaaagacgaagcagaggggcaaacacttctgaggacatcaactcctccagcagctccgagctcatgcactctcgtgtgggatcaaagatttctgacagctct

SEQ ID NO: 313286 - DNA, 435 bp, Homo Sapiens
  misc_feature (395)..(395): n is a, c, g, or t
  misc_feature (411)..(411): n is a, c, g, or t
tagccttaggattggtttttattcacttgaacactgtacaaatattacaatttccttttgctgcaaaaagtataaaaataatctttatataggaatccattcgttactgtaaatctttctaaatctctgcaaatggctctaaatgagggtaaatgaaaaagccgaaatgaagagagggttatggggcagcaggaggtggggccaatcatcagggctggaccacccagactcctccccagagacctctgttccttcttgggtagccgcccccaccacctgcaggttctaggggctaaagggccaggcaggaagtggggcacgtgagaggggccagggggggagctgggaggggtcaaggggggttggggggatagcccaagggaaggctagaagtnggtgcttggcattttnccccagtttccacccccacccttt

SEQ ID NO: 313287 - DNA, 493 bp, Homo Sapiens
  misc_feature (27)..(27): n is a, c, g, or t
  misc_feature (46)..(46): n is a, c, g, or t
  misc_feature (59)..(59): n is a, c, g, or t
  misc_feature (82)..(82): n is a, c, g, or t
  misc_feature (158)..(158): n is a, c, g, or t
gtgatgggggctgagtccttttccccntttttgcgagcacagaatnccagcacaggaancggaactttggcccagaactgtncgttgaaggggagcccggagaagccaggcgtctgtggctctcaagctctgtaggggtcgggtgggagaggtccccnaggcaacccccaggtcagacagtctgggtcccagccacacagggcatgtccctgtcagtccagaggttgagaacaggcacatcaaagaggtcacagacaccttcactctcgtccaggttgtagatataatcgtggtctcccgggggtggagaaagacgaagcagaggggcaaacacttctgaggacatcaactcctccagcagctccgagctcattgcactctcgtgtgggatcaaagatttctgacagctctttggggagttccaaaacacctgtggggtctgccttgatgggctcaaaggaggtagaagggttgggtccggacgaactgctgc

SEQ ID NO: 313288 - DNA, 581 bp, Homo Sapiens
caacaaaattaggcttgtaaaactgactttttcattacgtgggttttgaaatctagccccagacatactgtgttgagagatacttagagggagggagtaggttttgaatatgttgatggtggtggggagggaaggcctcctgaattgagtttgatgcagagctttttagccatgaagaatctttcagtcatagtactaataattaaattttcagtatttaaaaagacaaagtattttgtccatttgagattctgcactccatgaaaagttcacttggacgctggggccaaaagctgttgattttcttaagctgacggttgtcaatatatcgaactgttcccaagttagtcaagtatgtctcaacactagcatgatataaaaagggacactgcagctgaatgaaaaaggaatcaaaatccactttgtacataagttaaagtcctaattggatttgtaccgtcctcccattttgttctcggaagattaaatgctacatgtgtaagtctgcctaaataggtagcttaaacttatgtcaaaatgtctgcagcagtttgtcaataaagtttagtccttttttaacc

SEQ ID NO: 313289 - DNA, 443 bp, Homo Sapiens
ttttagttctcagaagtttttctttttgctatacatctgcatttattatgagcagcaggtgggacacttccagcaacagtaaaaaaaagtaatttacaaaagcaggtttcagtgaagccatctggttgttacccttgggtgctcacacgtagatgccaacccagagcagcaggaagaggactccaaagcccatgaagagtgaggccactaaggagatgaggagctctttatagatatcacgagtgtacttggtagaggtgacctcgtaaacgaagaaccaggcggtgaagaacatgccaatggccaaaagcaccacggtcagatgggggaagacagctgggttcactgggctggtatatctgctcatggcctcgagctccattttgccccgcgaaggctaatccgccgctccgccaccggaagaacacgtcggcaggagcccc

SEQ ID NO: 313290 - DNA, 810 bp, Homo Sapiens
atgtcatcaaatatatttaaaaaaaaattcaaggtaggcaacttagatcaccttggcaaagaacacattaactaagatgaaccaggacaagtcccctaaacatcaggatgaaatttcttttctatgcctactagctgactggccttccttttctgtgttgagttgtgtactctggagtcaccagcctctggtagattatcaagcatctcttcctcatcagccttttgtttctgtcttgcatgcttctctgtccactgtctggcattcttgaggaaggctggcttattatatttaaattctgaggatatgtcagccatgagcgggtcatcagggttgggttctgacatgagcagctgaatagaggtcaacacagttgcgatgttgagggatggtctccaagcaccttttggtggcaatttgagaacatccagacaaatccttccagcagaatcaatgtttggatgataaattggagtgagaaatcggatctgaggaggttcaaatgggtacctctcaggaatgataacttctagcttaaaaacacctttctcataaggtgtgttggctccacctaatatttgagctcgcaggtcatccatttggtctttatcttgccaacatgtgatgcctgggggtggctctgtggctaacatgtgcagctctctcttcagacgtgaagctctctgcatgatccccaagtagaaggaaccacacacagttcactgctccacactaagagctgcctgggatgcactgagctgacacccctcacaacgcagcaacgcgcggacaaacggggtaccagcgcct

SEQ ID NO: 313291 - DNA, 906 bp, Homo Sapiens
  misc_feature (121)..(121): n is a, c, g, or t
ctaaaacatcaggatgaaattcttttctatgcctactagctgactggccttcctttttcggtgttgagttgtgtactctggagtcaccagcctctggtagattatcaagcatctcttctcnatcagccttttgtttctgtcttgcatgcttctctgtccactgtctggcattcttgaggaaggctggcttattatatttaaattctgaggactgagatgaaatcaaagaaaagagttaatggagaaaaacatgatttgcagtggttagagctgctgcagctatcctcacacagggagagttagcggtatagacaaggtaggatatgtgttgcagaggaaaatggggatatttactatgtcagccatgagcgggtcatcagggttgggttctgacatgagcagctgaatagaggtcaacacagttgcgatgttgagggatggtctccaagcaccttttggtggcaatttgagaacatccagacaaatccttccagcagaatcaatgtttggatgataaattggagtgagaaatcggatctgaggaggttcaaatgggtacctctcaggaatgataacttctagcttaaaaacacctttctcataaggtgtgttggctccacctaatatttgagctcgcaggtcatccatttggtctttatcttgccaacatgtgatgcctgggggtggctctgtggctaacatgtgcagctctctcttcagacgcgaagctctctgcatgatccccaagtagaaggaaccacacacagttcactgctccacactaagagctgcctgggatgcactgagctgacacccctcacaacgcagcaacgcgcggaccaacggggtaccagcgcctgcgcgacctctgactgttggcgtggcatcccgaggaattccggaccg

SEQ ID NO: 313292 - DNA, 795 bp, Homo Sapiens; identical to SEQ ID NO: 135310

SEQ ID NO: 313293 - DNA, 556 bp, Homo Sapiens
  misc_feature (43)..(43): n is a, c, g, or t
  misc_feature (51)..(51): n is a, c, g, or t
  misc_feature (56)..(56): n is a, c, g, or t
gtcttggccaggccttcctctgtcccaactgtcctgggcaatnctttgagnaaaancctggccttaattaatatttaaaatcctgaggaatatgtcaacccatgaacgggtccatccagggttgggttctgaacatgaagcagctgaaatagaggtcaacacagttgcgatgttgagggatggtctcccaagcaccttttggtggcaatttgagaacatccagacaaatccttccagcagaatcaatgtttggatgataaattggagtgagaaatcggatctgaggaggttcaaatgggtacctctcaggaatgataacttctagcttaaaaacacctttctcataaggtgtgttggctccacctaatatttgagctcgcaggtcatccatttggtctttatcttgccaacatgtgatgcctgggggtggctctgtggctaacatgtgcagctctctcttcagacgtgaagctctctgcatgatccccaagtagaaggaaccacacacagttcactgctccacactaagagctgcctgggatgcactgagctgacc

SEQ ID NO: 313294 - DNA, 969 bp, Homo Sapiens
actaagaatgaaaacaagaaatttattaaatatacaaaacaggaatacagttcaattactgtgtctaaaaaatttcatttttacataaccaagacaatatttacaactatatacaaaagactcccacctgtgcataacctttggtccatctgtgctatctctcatatctgcaagagaaacctaaaatgttaatatttgagtgttaagtatttacatctttttgtgttggtttttaaatgcacaagtacccctgaatggctcaaagggatgggataatgctagaaacactaacttgcaataaagtgcagttttcatgcaaacttagccatcagttttcttcttttagataggtatccacagtccatatggactttttttctgatctatttttggtgatcttgaagatgcctcttctgtggcagctttagctgatttttgtattggctttgctacagaattattagagctaaaagctatgcttctttgctgggtaggtttttcattgggatttcgagttccatcttctgttaccttttccgacagctagacaggttaagaaaaagtgtaattttaaaacacatacccttggtttctaaatcctatattaaaaaatagcctaattgtaaacaaaatttagctgtagacacaaaaatcaacttggatctaacagcctaagtaacagaactattgagttttccccttaacaaaactgatttaatattaggcttaagacactcttcccataattattttacttccctgctggcaaatttaaactaattttttaatcagttttctcaggttgaatcaagttcacttttgaaatgtaaagccacatcagaaaatacgttttaagaaactaaggcatttgccagttaggcacctaatcgtctgaacaaagaccttgtctactaatactgagcaaacccacatctgggcccaattacacagattcatttagatacagca

SEQ ID NO: 313295 - DNA, 386 bp, Homo Sapiens
  misc_feature (38)..(38): n is a, c, g, or t
  misc_feature (224)..(224): n is a, c, g, or t
  misc_feature (284)..(284): n is a, c, g, or t
  misc_feature (360)..(360): n is a, c, g, or t
  misc_feature (365)..(365): n is a, c, g, or t
ttgaaaacaagaaatttattaaatatacaaaacaggantacagttcaattactgtgtctaaaaaatttcatttttacataaccaagacaatatttacaactatatacaaaagactcccacctgtgcataacctttggtccatctgtgctatctctcatatctgcaagagaaacctaaaatgttaatatttgagtgttaagtatttacatctttttgtgttgggnttttaaatgcacaaggtacccctggaatgggctcaaaggggatgggggataatgctaggnaaccacttaacttgccaataaaggtgcaggttttcatggcaaacttaggcccatcaggttttcttcttttgggatnggggnctccacaggtccatatggggg

SEQ ID NO: 313296 - DNA, 771 bp, Homo Sapiens
  misc_feature (53)..(78): n is a, c, g, or t
caggtgtttttacattttattagctacagtatagatcctagagctgcctcatnnnnnnnnnnnnnnnnnnnnnnnnnnaccatggggtcaggccttgcaggagcccctgcctttgctgcctgggcccgctggaactcctgctgcagctgagcaagggtctccctctgttgctctgactgccgctcaagatccggaagctgggattcgtatcgcttactaaggagagccaagggagccaggcagaaagggagaaattagtaggacttactatggagagtgctaaacgcaagaaagagataggtggaaaacttgagatccagtttgggcgggagaagaaggggggttaaaaagggaaggaaagggttggaggaactggaggactaggggccactatggagagctgttctgcaatggttcaacacctctactccaatggttcacttgcatcacagggtgcagcacacggtggtggaataaaaactcacacagctgtgatatagtccagcctcttccctactgtggcccgagcctcccccagctcctgtttgactagcaccggacccagaagtttaactgttagttgtgcttcaagtttctgcctccccgacatggatttacttaagtccttctgtagctgttgatatttctccacttctccctgtagcttcttctggatcagctccgccatggcggggatgaaagcctactgggtgcgagacaagggcgctgggtctcactctctggaaggtacctgagctcccctgatctggc

SEQ ID NO: 313297 - DNA, 771 bp, Homo Sapiens
ccaaggggttcctccccctcctgtttgggctctggacctgcccggctccaaagatcccccgaaaggctgggaatttcgtatccggcttaatttttcagcgtgtgatataagtcccagccttcttcccctacctgtggccccgagccctccccccagcctcctgtttgactagcacccggacccagaagtttaaagaccacgttggacccatccagcagggccagttcctctttcacgatattattttctgttagttgtgcttcaagtttctgcctccccgacatggatttacttaagtccttctgtagctgttgatatttctccacttctccctgtagcttcttctggatcagctccgccatggcggggatgaaagcctactgggtgcgagacaagggcgctgggtctcactctctggaaggtacctgagctcccttttctgatctggcgttcttccttcagtagtaataaacccggaagtaaacaaggaatgctgggaaaagactgtgccggaagtttctttctgacccttgatgggaagtgtagttctgacatgtttagggagtggagttctgctaaaaagactagactaggacatttttaggcaagatggggaaactaatccagaaaaagaaaccgcaccgctacttagcccctggccccggacctgcctttcttttttaagtcactcttgcataagctgccgctcgcgataaggtgccaaaaactgttccgcccctctaaggagagcgtgccctcactcaagatccc

SEQ ID NO: 313298 - DNA, 615 bp, Homo Sapiens
cggagccgagcaccggtaggagcggggaggtgggtactacacaaccgtctccagccttggtctgagtggactgtcctgcagcgaccatgccccgtaaaggcacccagccctccactgcccggcgcagagaggaagggccgccgccgccgtcccctgacggcgccagcagcgacgcggaggcttgagccgccgtccggccgcacggagagcccagccaccgccgcagagactgcaagtgaggaacttgataatagaagtttagaagagattttgaacagcattcctcctcccccgcctccagcaatgaccaatgaagctggagctcctcggcttatgataactcatattgtaaaccagaacttcaaatcctatgctggggagaaaattctgggacctttccataagcgcttttcctgtattatcgggccaaatggcagtggcaaatccaatgttattgattctatgctttttgtgtttggctatcgagcacaaataagatctaactctcagtattaatacataattctgatgaacacaaggacattcagagttgtacagtagaagttcattttctctatgtatccagaacggcctgcagagattacttctgtcttt

SEQ ID NO: 313299 - DNA, 1238 bp, Homo Sapiens
cttctttctctttttccttctcgagggcattgtttctggttgttgtttcattaatgatattgttactcttggcaggtatacttttaaattcttcaaccttttctttatctttttgaagttgtttctccagttttttggctttactcgtggcatgttttaacttttctctaacttgaacatcttccaaatctagctgtgtaaatttttctttattctcctcaataaattttgtaattttattcagtttcttttctgtatcttttacatctttattcttagctttcatttcatttgatagtatattgctcttctcattaatttctttggtatcttcatgaattttttccttttgagtttccatttcagcaattcgtttctgcaactcataaatataatattgacaaacatgattcttttttctaaatatttcattttccaaggtaagaaattcgatagctatgtttttctctccttctaaggcatccttttccttttccaccatctttaccctgtttaacttctctcctgtgtgttcatttaatatttcgactctccgacacaaggctttagataggttcatttaggcgtccacaagcaattatatgttctaaatattcaagcatgccctcatcgtgttcagtctggccttttggtctcatcacagcaagttgttcaacttcaccctgtagaattaaatatctagtatggtccaagtcaatcccatggcttcgaacaagatttacaacatccttaaatgtctttctccttcctcttatgtgatagacaggagtatttctctgcaggtcgctctggatacatagatctcagtgttaggaatgacttcataatcatccttttcattatcaattatctgtagaagatgaccttctcgtgtacaactatgaatgtccgtgtgttcatcagaagtatgtattaacactgagagttttttagatcttattagttgtgctcgatagccagacacagaaagcatagtatcaatcacattggattcgcctctcccatgtggccctgataatacaggaaaagcgcttatgtaacggtcccagttatttctccccagcataggatatcaagttctggtctacgatatgagttatcataagccgaggagctccagcttcagtggtcaatgctgtaggcgggggaggaggaatgctgttcataatctctgctacacttttattatcaagttcctcgcttgcagtctctctgtc

SEQ ID NO: 313300 - DNA, 789 bp, Homo Sapiens
aggtttttctgtacttttaatgagctagaaaatgcatactataaatagaatatacaaatgattttacacaaatgaagcattaaaaatcacaaatcttatatttggttatccacagtctataaaataatgttcccaaattatatagtttaaaatacacaatgtttcaagttgcaagacaaaaccagggtagttttggccctaaatcatagctaacataagtaggaattataattaattttataattgtgtttaaattttaaatactctaggaatctgaaaatattaaatattaaatagatggagggatcaaattatcaagttttttaacaaaattgaggtaaaaatctgcattaaattacaccaagaaaaacatttctaaaacattgtttccataactcattataaatatttcatcttccgaaagtactctttgattacctctggccttctgggtctggtaattaagttgacttaatatttgcacatagctactgattactcaatacaggcctatcagataaaactaaaatgctgcaacttaatcagaatgatgcaatcttgtcttatataaatatacaaatcacagtatgctgacactagataacttcagctttatttgccaaaggggatttagaatatactacaaaattgtatataaaataaccctttacaaggatttactaggatgactgcaaagaaaggcaaattaaatatacctggtcccatataagaattgttgcctaacctcatatactaatttgaatatgaagactcactttttatttctta

SEQ ID NO: 313301 - DNA, 523 bp, Homo Sapiens
agtaattgtcttttcattttgatggtaggggccagactgaatgaataatgcattcttttttattcaatttatttcattcagtttattcttggcaatcaaacatcccataaactttgcttttattatcaattatgaatatgaattgtctggtttactaatgtagtcatttgttcatctttacttttagcagattagcaccataactaacttaaaactaagtttgttacctgctttttatactgtcacaaaggtttttgaaaaagctggggacactattttgtcttttagttttaaacttttttaaggcaaagcaagctccccaatccctgttctccaatatgtgtatgatgtgacttccatgtagatataaaaatgattgtgccctaaccaaacttcctcagattgtgcactgtttgtttaaaataatcacgtattttagtctgatgctgttgtattttttcattttatttaaaacactacttacttcttattctcttaacaaattttaaaaggtagtgatctt

SEQ ID NO: 313302 - DNA, 1574 bp, Homo Sapiens
  misc_feature (1416)..(1461): n is a, c, g, or t
tgtctttattgactttattttagtttttgtacataaagaaaaatcatgttcatatccatcatgaacaaaaacttaaaaaggcagaactagaagacacgtgtccttcaccaaagcaaatctgtgctaaaggttccaaacatttcaatttttaaaataaatattttcattttccgatgtctactttcatgtcttcagagtgtcacaggaaatcgaagcctatcatgaattacaattttttgttagagtcccggctcactgtgtttggtaacttgccataccatatccggcttggttaggaggaggtattacagggggaggagcttgtccttggggaggctgagcaccaaatccacccatccaagcagcagaaggtgattgatctactccaaatccttgttgattccatggttgcccgtatactccataaggcggtacttgccacccatttgccatatactgtccatactgttgtgggtttccatacacttggctccattggccccattgactatagtcaacctgttggaagtttttagtcatatcaggagattctttaccccaatagcatttaaccacatgtccttcaatcgtagtaccgttcaccgaaacaatggcatgggctgcactttcatgggttgaaaatctgacaaatgaatagcccttttctgggaaaactcttatttccataatttgtccaaatggtgagaatgtctgtctcataagctgatctgttaacccagacgcaattcctccacagtacacagtacaattttttggacttgactggtttactacatcttcaaatctcaactgcttagtgttgttttcttgtgtacttttaggtgcaggtggtttacgagtggcccaattggttcggatttgacgaccacccaaccactgaccgcccatatgcacaatcgcattttctgcatccagtttgttataaaaagatacaaaaccatagcctttggattttccagttgccatgtctttaactacccgggcatccgatattttaccaaagggggcaaatgctgatttgatatcttctgttgtaatttctggactcaaatccccaacaaacacatggaagtgattggaagtatcttttttctggctacttggtgtggttgcccagtttactttgacctcctttcccaaaatttttctcccattcatagcagctaatgcagcagctgcatctctgtgttcataaaattccacaaagcaatatgggtcattgcttgtatgctctgttatcattttacagcttttacagggtccaatctgactgaacaactgaagtataaggacttctgtcacatctctggaaaggttacctacgtatagagtccgggtctgcccgtcgtcttccatcatggtgggtgcgacggagcgatcccgggacaaggggannnnnnnnnnnnnnnnnnnnnnnnnnnnnnnnnnnnnnnnnnnnnncctctgggcaccggctggggacagaggaaaaggcaccgaaccctgctctcgggctctctccccccagcccgctccggactctgcgctccaaccaggaggagcaggaggaggag

SEQ ID NO: 313303 - DNA, 545 bp, Homo Sapiens
  misc_feature (49)..(49): n is a, c, g, or t
  misc_feature (184)..(184): n is a, c, g, or t
acacatttatttgatagcaacagctaacagatataatcaaatgcactanaaagcatcaaaatcacctgattattttctatataaccaattcttaacctatctgaaataatgccatggttaaaatccccctgaacccccataaatgatctttatacaggttattatagtaccaaatcatatgctntaccattgttaaaataatattttcttcaatcatatgacctacaaaaattatccccttattttccactgattctcatatttaaaaccagaatttttagatttttctaaataaattttcatcagttttgacttcgcttgcaacttagagttgaatctataaagtactggataaaaattgcctactatgtaacaaatatttccctgatgccacaagattaagatttaataggaatataaactatttctataagtaatattgtacttcagatgcctttatttttccaaatgatgggatgaaacttctgtatactctgaaactagaatgataatataaatacccagccaggcatggtggctcatcc

SEQ ID NO: 313304 - DNA, 2686 bp, Homo Sapiens
  misc_feature (844)..(1088): n is a, c, g, or t
  misc_feature (2640)..(2640): n is a, c, g, or t
tttacaaccagatatatattttattgcattttgcctgtttataacctatattgcaaaacaatagattcatttttgccttcccaaatataaaactattttaatattgaatatgctttttcaaactctacagcccccttctctccctcattccttatgagattttgatacacttcttaatgggcaagagatctttttcttgagaatcactgaaccaaaacccaatttctgaattattattcaggataaagtgcaataaccatgactgaagaaacagtattcaattaaaatacagaaattgtcaactgaaaaatagtgcatgacagaatatccaacactgtattgaatattttctgattattaaaccaaattacttaaaccttatacttggaaaactaatgcacattggtttttaaaatgacctactgaaaccaccataaaatgtatcttttatacaggttaattatagtaacaaatcatattgctttacattgttaaaataatattttcttcaatcatatgacctacaaaattatacccttattttccactgattctcatatttaaaaccagaatttttagatttttctaaataaattttcatcagttttgacttcgcttgcaacttagagttgaatctataaagtactggataaaaattgcctactatgtaacaaatatttccctgatgccacaagattaagatttaataggaatataaactatttctataagtaatattgtacttcagatgcctttatttttccaaatgatgggatgaaacttctgtatactctgaaactagaatgataatataaatacccagccaggcacggtggctcatccnnnnnnnnnnnnnnnnnnnnnnnnnnnnnnnnnnnnnnnnnnnnnnnnnnnnnnnnnnnnnnnnnnnnnnnnnnnnnnnnnnnnnnnnnnnnnnnnnnnnnnnnnnnnnnnnnnnnnnnnnnnnnnnnnnnnnnnnnnnnnnnnnnnnnnnnnnnnnnnnnnnnnnnnnnnnnnnnnnnnnnnnnnnnnnnnnnnnnnnnnnnnnnnnnnnnnnnnnnnnnnnnnnnnnnnnnnnnnnnnnnnnnagagtaaaattatatatatgtatgcgtattcagctttaaaaacagttttggaaaaaaatacaggtgcttatttcccaagttaaaaagtggatctcctgtgcctaagttaaacagcctgaaaagagaaaaccaaaaaaggccaacaccaggaccctgactaagggcttcattaaaatattcgaatgctgtggaagtttattcccacgcaaggcacttactcccaacaagacacaaccgtttaaaattttacagcagtgacaccagggaggggtcccactcctatagacgtcagtattctgcatcgatatgctttgcaatggtgttcaactggatgttggaagctccttcatatatcgtaccaatctttgcatctcggaagtatttctccacagggtaatctttggtgtagcctactccccccatccactcgatacatttactcgttgtttgtcctgcaatctctgatgcatagtatttggccattgacgcttcttttatgaatggctttccagcttctaaaagcctagcagcattgtatgttagtaatcttgcagcttccagctgggtggccacgtgagccacttggtgttggaggccctgaaaatcaaatagtcttttgccaaattgtatcctttctttaatatatggaatagtgtagtcaaaacatccttgcgccagtcccagcatctgtgcagcaattcctattctaccttcattgagactccctatggcatacttatagccatgtccaatttgtcccaagatattggcttctggaaccttgacattttcgaatgttaacgggcaggtggaagaagctctgagccccaatttgttttcaggtttccctatatgaaggcccggagtatcacgatctactaagaaggaggtaattcccttatatccaatggtagggtctacatttgccatcaccagaaagagccctgcgtgctcagcactgctgatccacatctttgatccattgaggacataataatctccctctttatcagctctggtcttcaaagcaaatgagtcactacctgctccagcctctgaaaggcagaaacttcctactttttctgtagtgagctgaggcaaataggtggccttttgttcttctgttccatgttttctaatcagtgtgttaattaatgtgttctggatctcacaaaagacagccacagatgcatcaactttggctaattcctctatcacgagcacagtggataaaaatgaagctcctgtgcctccatattctgggtcaacttcaatacccatcaacccttgttgaaataatccttgtattactgatttctccattttcgaattttcatccatggttgaaaccaaaggtgcaatttgttcctgagcaaattttttaactgaactctttatcatcatttcctcatctgtaaatgtttgcaggggagcaaagtgtattccattatttgttatattgagtagagcttctgactgggaagattttgagacatgaggaggaatcttccaagaagacaaacaagtcaggaaatttcttcttagcagcctntgccgcgcagcaaccgcactgccaggccctccatcctcgccgcagg

SEQ ID NO: 313305 - DNA, 413 bp, Homo Sapiens
cccctaatcctacccttccattgaagactccccctatggccataccttaatagcccatgtcccaatttgtccccaagatattggccttctggaaccttgacattttcgaatgttaacgggcaggtggaagaagctctgagccccaatttgttttcaggtttccctatatgaaggcccggagtatcacgatctactaagaaggaggtaattcccttatatccaatggtagggtctacatttgccatcaccagaaagagccctgcgtgctcagcactgctgatccacatctttgatccattgaggacataataatctccctctttatcagctctggtcttcaaagcaaatgagtcactacctgctccagcctctgaaaggcagaaacttcctactttttctgtagtgagctgagg

SEQ ID NO: 313306 - DNA, 992 bp, Homo Sapiens
ggctcatattcacatatgtaaaccagaacattctatgtactacaaaccgggtttttaaaaaggaactatgtggctatgaattaaactggtgtcgtgctgataggacagacgggatttttcatatttcttattaaaattctctgccatttagaagaagagaactacattcatggtttggaagagataaacctgaaaagaagagtggccttatcttcactttatcgataagtcagtttatttggtttcattgtggtacatttttatattctccttttgacattataactggttggcttttctaatcttgttaaatatatctatttttaccaaagggtatttaatattcttttttatgacaacttagatcaactatttttagcttggtaaatttttctaaacacaattgttatagccagaggaacaaagatgatataaaatattgttgctctgacaaaaatacatgtatttcattctcgtatggtgctagagttagattaatctggcattttaaaaaactggaattggaatagaattggtaagttgcaaagactttttgaaaataattaaattatcatatcttccattcctgttattggagatgaaaataaaaagcaacttatgaaagtagacattcagatccagccattactaacctattccttttttggggaaatctgagcctagctcagaaaaacataaagcaccttgaaaaagacttggcagcttcctgataaagcgtgctgtgctgtgcagtaggaacacatcctatttattgtgatgttgtggttttattatcttaaactctgttccatacacttgtataaaatacatggatatttttatgtacagaagtatgtctcttaaccagttcacttattgtactctggcaatttaaaagaaaatcagtaaaatattttgcttgtaaaatgcttaatatcgtgcctaggttatgtggtgactatttgaatcaaaaatgtattgaatcatcaaat

SEQ ID NO: 313307 - DNA, 809 bp, Homo Sapiens
  misc_feature (83)..(83): n is a, c, g, or t
  misc_feature (205)..(232): n is a, c, g, or t
taaagggccatttattttattttttcccaagcctttatcctgagggccagggctaaaattgcattttccaacccccccacccncttctggaagaagggttagtatgtgaatgctataaagtagatatgaacagttgaaggacgggaaccaacattaagtgacgaagaacaacttccatctaaatcatcataaaaatgtttaagtnnnnnnnnnnnnnnnnnnnnnnnnnnnngaggaggtaacgggggtttccgattgaacaagatcctcacatttcatctaatacagtcaatcttggctagagtataacaaagtggaaacaggattactatgatacaaaacttccactacagcacgctgtacacacctgtgttccaagcccaccccaacccccccagtgcttccaacacaattatttcccagcctgttgggcctgccgacgaaggagcacgtagatcttctctttaatccagtctttgttataaggctggtatgtctgggtatcagctcggtaaaccaggcagctgaggtctgccagatcatcgatgaaatcaaacaactgactgatgtcatatgtgatagagggactgttgggattcattcttttcagatgttcttcatacattttacaaacaccttccatgcattcattcacagattcgtagtcagcataagttctgccttctggcctcttggtaggctgtaccagcaaaatggtgtgagacatcgcgccaaactctcttcgctacagcagctgccgacaccgccgccgttacacgagcttaactacaacgccgctaacagccaaa

SEQ ID NO: 313308 - DNA, 1203 bp, Homo Sapiens
  misc_feature (97)..(97): n is a, c, g, or t
  misc_feature (100)..(100): n is a, c, g, or t
  misc_feature (190)..(190): n is a, c, g, or t
  misc_feature (192)..(192): n is a, c, g, or t
gaaggccctgttgacgggctgtcttggctctggaattcatgcatcccggccttgccaaggttctggcagggctgctggtgtgttggagcctgcaggnagntcaggctggttcagaggcccatgctgaggggtgggtgctctgaagtggagtgaagcctcaagcccatgaatgccaccccagtcatctctngngtcagctgctgctgtggccccagcaggttctcaaagctcccaagtcctccctacggacacagcccaaatgtgtaaatggcactgttgccctgacagtgcatggaaaggacgttggcatccaattggcactccttgtcccttattcaatattaggtttgatttgcctttcgtccattgtttccaaagatcaaggaatgtcaataacattttaaaggaccaataaacagcctcctataaagtaaacctcttcccgtggaagcacactctactactaaagggaaggcccctgggctctgatttgtcctttgcattgagaacggtgtggggatcagtgtgtgtgtatgtgattgtttattgagttggctttgcttttttagtttttcttttaaaaataaaatccttccttcccatgttactaaattaatttatgtttttgagaggttgagtctcaaagtgtaaacaataaacctccattcataaggtggatgttgtaagcttgatggtggttgtgaaagtgatttagctttgaccacttttcatcctacagcttcaatatcaaactggttaggaaagcccagggggaagggagggggcaggggaggaggcaattctgaatgaatgaatggattttttgttgtttttgcatgtttaatatagaagttcccctcgttccttgggagatgatggcctttgaatatgcagacaacctttgaattgtgcctactaaattatagcaggggactttggcacccaaggagttctgactttctgggattataatagtaattcccagccatactctggactttattttgctaaccataactgagcaaatgtaaattactgctatattaatgttttaaagcactgggatagtctaattctaacttgtaattaattatgtttgccaattatctgtttgaaataaatttgtgtctgaacagctattgaaactgttaaattgtacagatattattcatgacagctttgtactgtggaatgtgcttaata

SEQ ID NO: 313309 - DNA, 1455 bp, Homo Sapiens
  misc_feature (245)..(245): n is a, c, g, or t
  misc_feature (513)..(640): n is a, c, g, or t
  misc_feature (872)..(900): n is a, c, g, or t
cagtagtagggatatgggctagcaaggcgaagaagagtaaaagtcatgggcgataagacaagagggaagagaaaagaggcagttgtattgaagtataggaagcgaaataaatagtggtgagtgagtagaaggagactctatataatggagggaagaaacagtacatgagagcagtaggaggtaggatcgaaagaataagagagcaagaagaagataaagtaaactgcaagtacaagcagaagacnggcaaattaaagaaggaaggacagaatcaaacaaataggggcaaagaggatagggaacaaaaaggacagagaaatagtatgggggaaacgtgagagggtaaaagaagagacgaaacagctccagagcatatagatgtaaaagaatgagcgacaacaagagaaatggaagaatggaattagaagaaggtatggaagagaaggaaaaacggtggaggggatctataaaaataagataggagaaggaaaagggccggagtaaagaaggggnnnnnnnnnnnnnnnnnnnnnnnnnnnnnnnnnnnnnnnnnnnnnnnnnnnnnnnnnnnnnnnnnnnnnnnnnnnnnnnnnnnnnnnnnnnnnnnnnnnnnnnnnnnnnnnnnnnnnnnnnnnnnnnntaattaaagaagcgaaggagaggaaatggggtaaaataaaggacatttatttatttttaccaagactttatcttgaggacatggctaaactgcatttccaccccccaccccatcttgaagaagggttagtatgtgaatgttataaagtagatatgaacagttgaaggactggaaccaacattaagtgacgaagaacaacttccatctaaatcatcataaaaatgtttaagtnnnnnnnnnnnnnnnnnnnnnnnnnnnnngaggaggtaacgggggtttccgattgaacaagatcctcacatttcatctaatacagtcaatcttggctagagtataacaaagtggaaacaggattactatgatacaaaacttccactacagcacgctgtacacacctgtgttccaagcccaccccaacccccccagtgcttccaacacaattatttcccagcctgttgggcctgccgacgaaggagcacgtagatcttctctttaatgcagtctttgttataaggctggtatgtctgggtatcagctcggtaaaccaggcagctgaggtctgccagatcatcgatgaaatcaaacaactgactgatgtcatatgtgatagagggactgttgggattcattcttttcagatgttcttcatacattttacaaacaccttccatgcattcattcacagattcgtagtcagcataagttctgccttctggcctcttggtaggctgtaccagcaaaatggtgtgagacatcgcgccaaactctcttcgctacagcagctgccgacaccgccgccgttacacgagcttccc

SEQ ID NO: 313310 - DNA, 760 bp, Homo Sapiens
  misc_feature (123)..(153): n is a, c, g, or t
  misc_feature (179)..(179): n is a, c, g, or t
atctggaagaagggttagtatgtgaaatgttataaagtaggataggcccagtggaaggcctggaaccaccattaagtgaggaagaccaacttccatctaaatcatcataaaaatgtttaagtnnnnnnnnnnnnnnnnnnnnnnnnnnnnnnnggaggtaacggggttttccgattganacaagatcctcacatttcatctaatacagtcaatcttggctagagtataacaaagtggaaccaggattactatgatacaaaacttccactacagcacgctgtacacacctgtgttccaagcccaccccaacccccccagtgcttccaacacaattatttcccagcctgttgggcctgccgacgaaggagcacgtagatcttctctttaatccagtctttgttataaggctggtatgtctgggtatcagctcggtaaaccaggcagctgaggtctgccagatcatcgatgaaatcaaacaactgactgatgtcatatgtgatagagggactgttgggattcattcttttcagatgttcttcatacattttacaaacaccttccatgcattcattcacagattcgtagtcagcataagttctgccttctggcctcttggtaggctgtaccagcaaaatggtgtgagacatcgcgccaaactctcttcgctacagcagctgccgacaccgccgccgttacacgagcttaactacaacgccgctaacagccaatcctcgcgagaggagccgccggaagtcgtccc

SEQ ID NO: 313311 - DNA, 1292 bp, Homo Sapiens
  misc_feature (51)..(73): n is a, c, g, or t
tgacatatacatgaaaatcattattctattgggaaataatcttccttcccnnnnnnnnnnnnnnnnnnnnnnngtctttggagccaaatggaccagatgatatttaactccatctttgagaaacatttaataatgtaatgtgtttgtggtacagggtgagtacagatgcacgggaggccatacggtttaggcaaaggggagcacaaaagttgaagatgaggcgctgccatcaatgctgggacttcaggccaagggcaggagctgaggaagccacaagggaggacattttctgcagttgctgaaccagtagcaaccaggtcctgagaaagccctctcttgtggaagaataactgccaagcaggaaagcttttcatcctgcaaagctggggcagaaagttcttccttgaatgtggtcatctgcatttcagctcaggaatcctgttggctgaagtccagagtgtcctttctgattcctgaagtagatgaacagcccggccccaaggaagagcaggcccagcacaaagcccccgactccactcagcatcttgctctgtgcagattcagaccgtgctctccattccactgtgagagggcttgtcacgcttgggtgctccacttggcaggtgtaaacctctccacttccgaggaactgtttccagcatcaccagggtctggaaggtccagtctccattctggatcaggcctgtggacaccaccccagtcttctcttcctggccgttccggaaccacctgacttcaatgctgcctggatagaaaccactcacagagcagaccaggaggttgtggtgctgcaggggctgggtctttgaaggatacacagtcaccttaggatgaactcgccgctgcactgtgaagctctcaccaaccccgtagttgtgtctgcagtaggtgtccaccgcggcccgcctctgctccaggaggtccttctggctgttccagtactcggcatcaggccgccccagctccgtcaccgcccggtactcccccacgtcgctgtcgaagcgcacgtactcctcttggttatagaagtatctgtccaggaaccgcacccgctccgtcccattgaagaaatgacactcacacttagcctgctccaagaaacgtggtctggtgtccccagccaaagccagtggggagctcagcaccatcagtgtcactgtcagaactgccatgcaggagcctccagggagcctcagacacaccatgctggagaacaggacaggaccaggggccagagcagcaggcaagtctcactcagggagaactatccc

SEQ ID NO: 313312 - DNA, 1082 bp, Homo Sapiens
gggcccctttagcgagtccttcttttcctgactgcagctcttttcattttgccatccttttccagctccatgatggttctgcaggtttctgcggccccccggacagtggctctgacggcgttactgatggtgctgctcacatctgtggtccagggcagggccactccagagaattacgttttccagggacggcaggaatgctacgcgtttaatgggacacagcgcttcctggagagatacatctacaaccgggaggagttcgcgcgcttcgacagcgacgtgggggagttccgggcggtgacggagctggggcggcctgctgcggagtactggaacagccagaaggacatcctggaggagaagcgggcagtgccggacaggatgtgcagacacaactacgagctggacgaggccgtgaccctgcagcgccgagtccagcctaaggtgaacgtttccccctccaagaaggggcccctgcagcaccacaacctgcttgtctgccacgtgacagatttctacccaggcagcattcaagtccgatggttcctgaatggacaggaggaaacagctggggtcgtgtccaccaacctgatccgtaatggagactggaccttccagatcctggtgatgctggaaatgaccccccagcagggagacgtctacatctgccaagtggagcacaccagcctggacagtcctgtcaccgtggagtggaaggcacagtctgattctgcccggagtaagacattgacgggagctgggggcttcgtgctggggctcatcatctgtggagtgggcatcttcatgcacaggaggagcaagaaagttcaacgaggatctgcataaacagggttcctgagctcactgaaaagactattgtgccttaggaaaagcatttgctgtgtttcgttagcatctggctccaggacagaccttcaacttccaaattggatactgctgccaagaagttgctctgaagtcagtttctatcattctgctctttgattcaaagcactgtttctctcactgggcctccaaccatgttcccttcttcttagcaccacaaataatcaaaacccaac

SEQ ID NO: 313313 - DNA, 815 bp, Homo Sapiens
ctttctgccaggtacatcacatccatcaggtccgagctgtgttgactaccactgcttttcccttcgtctcagttatgtcttggaagaaggctttgcggatccccggagaccttcgggtagcaactgtcaccttgatgctggcgatgctgagctccctactggctgagggcagagactctcccgaggatttcgtgttccagtttaagggcatgtgctacttcaccaacgggacggagcgcgtgcgtgttgtgaccagatacatctataaccgagaggagtacgcgcgcttcgacagcgacgtgggggtgtaccgggcggtgacggcgctggggcggcctgatgccgagtactggaacagctataaggacttcttggagcgggacgcgggcggcgttggacaaggtgtgcagacacaactacgaggtggcgttccgcgggatcttgcagaggagagtggagcccacagtgaccatctccccatccaggacagaggccctcaaccaccacaacctgctggtctgctcggtgacagatttctatccaggccagatcaaagtccggtggtttcggaatgatcaggaggagacagccggtgttgtgtccacctccctcattaggaatggtgactggaccttccagattctggtgatgctggaaataactccccagcgtggagacatctacacctgccaagtggagcaccccagcctccagagccccatcaccgtggagtggcgactcctgcactgactcctgaggacttttgtctgggattggtcatcactcttctgtaatgcccacctgcccctgcccag

SEQ ID NO: 313314 - DNA, 511 bp, Homo Sapiens
gtctttggagccaggtggacagatgatttttaactctgggcttcagaaaaatttaataacgtagtgcatttgtggcacacagggggagtacagatgcatgggaggccgtaggttaggtaaaggggagcactaaagttgaagatgaggcactgccatcaatgctgggacttcaggccaagggcaggagctgaggaagccacaaggatggacattttctgcagagttgctgaaccggtagcaaccagggcctgagaaagtcctctcttgtggaagaataagagccaagcaggaaagcttttcatcatgcaaagctggggcagaaggttcccccttgaatgtggtcatctgcacttcagctcacgagtcctgttgggtgaagtccagagtgccctttctgattcttgaagtagatgaatagcccggccccaaggaagagcaggcccagcacaaagcccccgactccactcagcatcttgctctgtgcagattcagactgtgctctccattccac

SEQ ID NO: 313315 - DNA, 771 bp, Homo Sapiens
  misc_feature (145)..(145): n is a, c, g, or t
  misc_feature (160)..(160): n is a, c, g, or t
  misc_feature (164)..(165): n is a, c, g, or t
  misc_feature (222)..(222): n is a, c, g, or t
  misc_feature (227)..(227): n is a, c, g, or t
  misc_feature (301)..(301): n is a, c, g, or t
  misc_feature (322)..(381): n is a, c, g, or t
  misc_feature (407)..(407): n is a, c, g, or t
tagcaatacgagtgctctcacagcattgtccttcagcagagaatattagctcgtcagcactgcatctcactagttgatccacataggtaacagcctaggcgcatcatggaccctccggtctctttcatccagtagaatctcgagnaagtcttctgagtcnactnntgttaccaccttgaagtggccacaccgagaaggagaatgctgatctcatcgggaatntcctntgtggacctggcgagcttccctttcatctgcgcctgcacccagttgttgatctcttgcaccagaggtgccacanagctggattttatgcgcagcnnnnnnnnnnnnnnnnnnnnnnnnnnnnnnnnnnnnnnnnnnnnnnnnnnnnnnnnnnnnactatcctggcaaacacggtgaaacnccgtcttcttctcaaagacgatccgggaggcactcttgaggttcttctggggggcggtgaccgtgtcaaggagctccttataggtaccatggatgtctgggctgctgatcaagtcatagtagagagcccggtgaatgatggattctgttcgctgctccgctcctgccagagacaaggatgtggacgttgataactgcacaccagggccccaaatcaagccccctcccagaacacagacactatactcatctttgtctgctgagagcccaagtaggctgatcttcaagacaatctaggtggccaaggaattttcatccttagagattttcctgaagtaggttaaaggcatcaggcccagcgagag

SEQ ID NO: 313316 - DNA, 583 bp, Homo Sapiens
  misc_feature (31)..(31): n is a, c, g, or t
gacctgccgagcttccctttcatttgcggcntgcaccagtttgttgatctctgcaaggtccaaccgagggttgcccgtcaggatgcgcagcttcttctcaaagacgatccgggaggcactcttgaggttcttctgggggccggtgaccgtgtcaaggagctccttataggtaccatggatgtctgggctgctgatcaagtcatagtagagagcccggtgaatgatggattctgttcgctgctccgctcccagcgagagggccgagagggccgtggccacactgagaggagacaggagcacgttggtcgtggggctcgtgctggatcgcacccggtacaggtcatagccgaagttggagacagccgctgccagcttgttcacggggactttgaagaaaggatcctcctcctccaccagcgcccctgtgctgtcggggtctggggagccctcctccggggggctggcagggttctggcagctgctgtgcccgaggagggctccaatgcagaggagtagcaccagggcctgcatcctggggcctgtggatacgctgcagctccacacccagcctagtccctctaag

SEQ ID NO: 313317 - DNA, 825 bp, Homo Sapiens
  misc_feature (15)..(15): n is a, c, g, or t
agatctgaatccaangccatagcgtaaaacagccttagggtccgacatcatggggaccctcacggtcctctcttcatccaagtagaaatcctcgagggaagtctttctggagtcaaactttgttacccactgccccttgaagtgcgccacaccgagaaggagaatgctgatctcatcgggaatttcctttgtggacctggcgagcttccctttcatctgcgcctgcacccagttgttgatctcttgcaccagaggtgccacaaagctggattttatgcgcagcttcttctcaaagacgatccgggaggcactcttgaggttcttctggggggcagtgaccgtgtcaaggagctccttataggtaccatggatgtctgggctgctgatcaagtcatagtagagagcccggtgaatgatggattctgttcgctgctccgctcccagcgagagggccgagagggccgtggccacactgagaggagacaggagcacgttggtcgtggggctcatgctggatcgcacccggtacaggtcatagccgaagttggagacagccgctgccagcttgttcacggggactttgaagaaaggatcctcctcctccaccagcgcccctgtgctgtcggggtctggggagccctcctccggggggctggcagggttctggcagctgctgtgcccgaggagggctccaatgcagaggagtagcaccagggcctgcatcctggggcctgtggattacgctgcagctccacacccagcctagtccctctaagcctgcacactgaggggctccagccagcacagagctttttttgctgcctt

SEQ ID NO: 313318 - DNA, 1822 bp, Homo Sapiens
  misc_feature (70)..(136): n is a, c, g, or t
  misc_feature (141)..(195): n is a, c, g, or t
atggcgtgcggaggggcggcaatggggggtatattttcaaaggtagaagtgccgcgcgcggaggattccnnnnnnnnnnnnnnnnnnnnnnnnnnnnnnnnnnnnnnnnnnnnnnnnnnnnnnnnnnnnnnnnnnncgaannnnnnnnnnnnnnnnnnnnnnnnnnnnnnnnnnnnnnnnnnnnnnnnnnnnnnngcgactccactattaggggaaccgggcaggggttttcccattttgttccaagaaagggtgggtccggaaaccagctaagacccatgggccatttcattccctttttctcccgcacccgacatagatgcctcgagtttttgttggggggggttttttttttagggataaagctcttttattgtatgcattgaaaccttacaggggcagccttcgtgtcctgtggaatctgctgtccctcgggttttcttctagggtattggaatattaaactgggatattaggggcccctggggtccagaatcttgccaatgaagagaagggcccctgtgtctgtgtccctcagtacgaagatgaaaggctggttaaggtgatagtccagcgggaaggtgaggtgggcaggctgcagccctgggctgggggtggttcccgccccatcctcgttccactcaaagccagcccggtgttccacctgagtcagcttgatgggtttgcctgtgatcttgctaaagtctggtgaatcaaacaaggattgcagcttcatctcctgcagggacttggtgacttcgccttcgtaactcagcttcagcttggggacagtgaggaccgcctgcacggtcttcagttctcggtctatgtcatgaatgaactcggaggtgaggctctcctctatcaaggtcaaattctgggtcactttcaggggcaggaagaagatgatactcatgcttccggtcaagggcagctgggcaatcttgcagctgagatctgaatccaagccatagcgtaaaacagccttagggtccgacatcatggggaccctcacggtcctctcttcatccaagtagaaatcctcgagggaagtctttctggagtcaaactttgttacccactgccccttgaagtgcgccacaccgagaaggagaatgctgatctcatcgggaatttcctttgtggacctggcgagcttccctttcatctgcgcctgcacccagttgttgatctcttgcaggtccaagcgagggttgcccgtcaggactctgggcctggtcccatatgacttttccagaggtgccacaaagctggattttatgcgcagcttcttctcaaagacgatccgggaggcactcttgaggttcttctggggggcagtgaccgtgtcaaggagctccttataggtaccatggatgtctgggctgctgatcaagtcatagtagagagcccggtgaatgatggattctgttcgctgctccgctcccagcgagagggccgagagggccgtggccacactgagaggagacaggagcacgttggtcgtggggctcatgctggatcgcacccggtacaggtcatagccgaagttggagacagccgctgccagcttgttcacggggactttgaagaaaggatcctcctcctccaccagcgcccctgtgctgtcggggtctggggagccctcctccggggggctggcagggttctggcagctgctgtgcccgaggagggctccaatgcagaggagtagcaccagggcctgcatcctggggcctgtggatacgctgcagctccacacccagcctagtccctctaagcctgcacactgagggggctccagccagcacagagctttttt

SEQ ID NO: 313319 - DNA, 368 bp, Homo Sapiens
cccctcctgctaccaaagcatctcccatcagccacttgtcgggcgatgtcgcaagcagcttcattgacttcctgcccagatatcttctataagacatagttgcccctgttctccagcttgtcttcactcgcatagaaggtgaaggtctgcatgacggagccagctctgaggaactctcgatgaagctggcgaactgcttctgggtgctccacagcagcttcaggagtccagggtcctgcctttacgtagcccctcttctccagtgcaaagacaaaccctccatctctgcccccaacgggtggcatcttcgtggtgtccagacaggtggtcgacacggatgcggaccgactaggcgagcctcccctcga

SEQ ID NO: 313320 - DNA, 387 bp, Homo Sapiens
tggccccagaaaggggctttttgccaccagcttcagaaaaacacggcagctggggaagtggtttggacatgcacaccaaaccctggattagagcaagggctcgaagggagtattgggagaatctgctgccagcttcaggcagacctttctgtccttcgctgtcaaagccagacttctaaggagtagtgaaagaaaaccctgaaataatcgaacaggagccctgctatctccagctgctgagcagctgaggtgctgcagccccttcccttccagcccacaagtgtgtgcatattgagctcctgctgtggttaagcactgcaacagactctaccagagatgcaaagagaagcgagagaggcaccttgttctccaagaacttctgtcctc

SEQ ID NO: 313321 - DNA, 534 bp, Homo Sapiens
  misc_feature (176)..(197): n is a, c, g, or t
  misc_feature (210)..(223): n is a, c, g, or t
ggacattcaaacactttaaaagggaaatcatttttattgccacaaattgataaattgttgtgacaaaaagagaaactggcccacatgaaataacccaaaccttagaagatttaagaccaaaattgatttgaattatgtctcccaggctggattgcagggggtgacaaactttgccnnnnnnnnnnnnnnnnnnnnnncccaaaggaacannnnnnnnnnnnnnaaaaaaccctgccagatgataggtagaataaataatctagaatttataattaaggaagaaaaaattggccgctgcctttttcaaaaagggaaattaaatacttaagtttctcactccagaacatctgaattgcgtttcctctgattattaaatgaaactggcctaacaaaaccgaccttgctcctccctcaaacctgatccagttaacaaacttacatttaatctgtaacaatgcattaaaacaccacaaacgtgggcaaatacagtctcaaagactaaaatttgtgtttatggccgggtgtggtggctca

SEQ ID NO: 313322 - DNA, 587 bp, Homo Sapiens
  misc_feature (107)..(372): n is a, c, g, or t
atttttattgccacaaattgataaattgttgtgaaaaaaagagaaactggcacacatgaaatagcacaaacataagaagatataagaccaaaatagatttgaattannnnnnnnnnnnnnnnnnnnnnnnnnnnnnnnnnnnnnnnnnnnnnnnnnnnnnnnnnnnnnnnnnnnnnnnnnnnnnnnnnnnnnnnnnnnnnnnnnnnnnnnnnnnnnnnnnnnnnnnnnnnnnnnnnnnnnnnnnnnnnnnnnnnnnnnnnnnnnnnnnnnnnnnnnnnnnnnnnnnnnnnnnnnnnnnnnnnnnnnnnnnnnnnnnnnnnnnnnnnnnnnnnnnnnnnnnnnnnnnnnnnnnnnnnnnnnnnnnnnnnnnnntaaactctgacttttgaaaaggttttctaaaactttatttttaaacaatcaacaataagtatttcactgtgcacctattagtatgtctaacacaatgctaagtaaggggaattatgagaagattataagcttatcacgtgatcttgtctttaaatagtttataacctagctacctatgattatgaagacacattttaaaaattctaggacctaat

SEQ ID NO: 313323 - DNA, 910 bp, Homo Sapiens
taaaaggtaaatcatttttattgccacaaattgataaattgttgtgacaaaaagagaaactggcacacatgaaataacacaaacataagaagatataagaccaaaatagatttgaattatgtctcccaggctggattgcaggtgtgagtcacttcgcctggccagacctaatatctttaagtaaaaatcatctttgaaagtaatcactttggatagttaaacatttatttcaataatgctaccattgctcaaaacattctttacatcttttctttgggattgcctttggagtcattgtataaatcattaaaaaaagcagactcattgctttagtttagtgttgctctatcatcctcaagtatctagcttagtcacttgaattattcactagctttgggtctcagtgacttctgattattttaaagtgtcaaattcaccctcaaagacaagtttggctattcttcatgatcttcaaaggaatgcaccacagcatgattggacagtaagttcttggagaacaaggtgcctctctcgcttctctttgcatctctggtagagtctgttgcagtgcttaaccacagcaggagctcaatatgcacacacttgtgggctggaagggaaggggctgcagcacctcagctgctcagcagctggagatagcagggcatggtgaggatgaaggtgaggaacggttccaggtcaggcttgagggcaactttttcctgttcgattatttcagggttttctttcactactccttagaagtctggctttgacagcgaaggacagaaaggtctgcctgaagctggcagcagattctcccaatactcccttcgagcccttgctctaatccagggtttggtgtgcatgtccaaaccacttccccagctgccgtgtttttctgaagctg

SEQ ID NO: 313324 - DNA, 457 bp, Homo Sapiens
atgtgcaaaatccaaaatcaggtcatttccgttctatattcttaaaacaatctccagaaatcacctaataaggatgctttgtaaacatctctgggagagaatttggggatgactgattcttcatcatcacacaacaaatttgctgcagtcttttaaatggcctcacttgaccatattcataatctaaattagttggggttagtaaaaagatgcttaccttgctctaacccagggtttggtgtgcatgtccaaaccacttccccagttgccatgtttttctgaagctggtggcaaaaagcccttttctggggccagctcctttgcaattgccctgatgtggtagggctcaaatccacagcacccgccaatgtacctgacccccaggttgtaggcctctttggcgtatttttgaatatcccatctgggggcaactctgggttccagtccaaatgggaat

SEQ ID NO: 313325 - DNA, 2505 bp, Homo Sapiens
aaaaaagtctcattgctcttctttttaatagctgaaaagaattacaatttcaaaacagctcaaacaattcaataatgtttagaaagctgcatgacctcttttctaatacactgagggtagtcatgtttcttctaatagtcttgtatcttcaggcttgagcttttgtaggagagtagatattaaattatcagagaaaaatatcatagttctcaatctaggaaaccaggctagagtttggagaatctctacttttttcttattatattttttaaaagctaccaactaatacaagctcactctgctcagccttatggcccagaggcactaggtgggatccagtgttgactaggatggagagggctgaaatatccatctctcctcccctcctccccattggtctatgtcttttactggtagaaaagtgggtcacgaaacagaagaactctgagagcaggactctgggtattggatatttattgatcaggtctcatatgactgacctacttataagaataaacttaaacaggatggtctccttaagtgtcttgtagcaatatttttcaaactgtggatccaaacccagtagtgggtcataaaaatccatttgaaaagtctcaactagcatgttttataaatgaaatagaatgaaaaggaatggaacagaaaatactaggatggatcacacatttaatttcgacagtaagatgtgatgtgttttgctgggtcattatataaattgtgtttgttactaagggtcatgttcaaaagaacttggaagcccctttccatagcgctttatctgtccctggctggttgctgagtcctttatgacagttcatgtctcatcctctttgctagcctaccaacttcttcaagtggcattaacatctgaattacttttcctgtgctgcagtgatttccataatacttttcacagggtgggtgcttagtgaacctgttcaagatttactttgtacttattttgctcctaagaaaatttctaaaacatactttaaaattatcaagtgctatttgtaattctattttgttcaggtaatagcaataatatgtgtaggatggcattcatgaaagcactgctttttaacccccttttccgtatttgtaggaactgtgacccaaacacctagaaattcatcaaaaatagcttctatcgaggctactgtgatttgaatttttgtttttcaaagagctctttcagctgctgctcagttgtggcttctttctgctgcatcagctcggctgttcctttggtcactccccagccatctggctttgacattgaagggttgtatggccggcctgaggctatccgaagattctcccagtattccttcctggcccttgctctaacccagggtttggtgtgcatgtccaaaccacttccccagctgccatgtttttctgaagctggtggcaaaaagcccctttctggggccagctcctctgcaattgccctgatgtggtagggctcaaatccacagcacccgccaatgtacctgacccccaggttgtaggcctctctggcgtatttttgaatatcccatctggtggcaactctgggttccagtccaaatgggaattctgggagatcgatgaatccctgcttgttgcagtcaggagtgtggtaagccaagggctggctcatcaggtgagctttcagtcgggcagcctccaagccctccttcatgagcttcactgtttttaaactaatggtggggtcaaagtggcagttcacaccaatgatggatgctcctgctttcaccaggcgcactgcacactcgccggggggcacgccatgcaaatctccttctgggccaatgcacatggttgctgccacaggtttaccggatgctatcaaggtttcaactgcccacacagcttcttcaacgtgttcaaaatactctgcaatcaagaagtccacgttcttcttcataaagacctctaactgttgcagaaatacttttttgacttcagtttcactcttgcagctaaggtatgaaggtgtctgactcactcctcctgctaccaaagcatctccttcatcagccacttgtcgggcgatgtcgcaagcagcttcattgacttcctgcccagatatcttctctaagacatagttgcccctgttctccagcttgtcttcactcgcatagaaggtgaaggtctgcatgacgtttgagccagctctgaggaactctcgatgaagctggcgaactgcttctgggtgctccacagcagcttcaggagtccagggtcctgcctttacgtagcccctcttctccagtgcaaagacaaaccctccatctccaatcacaatctctccagcatttaaacgttctaggatgcccttcttggcctttttgcccccaacgggtggcatcttcgtggtgtccagacaggtggtcgacacggatgcggaccgactaggcgagccttcccgctgcgatcccgggaattccggaccggtaccagcctgcttttttgtac

SEQ ID NO: 313326 - DNA, 878 bp, Homo Sapiens
  misc_feature (21)..(21): n is a, c, g, or t
  misc_feature (46)..(46): n is a, c, g, or t
  misc_feature (63)..(63): n is a, c, g, or t
  misc_feature (68)..(68): n is a, c, g, or t
gtgttttggctggggtcaatnataaaaaatgtgtttggttaacctnaagggtccatgttccanaaagnaacttgggaaagccccctttccccatagcgcctttatcctgtcccctggctggttggctgagtcctttcatgacagttcatgtctcatccctctttgcctagcctaccaacttcttcaagtggcattaacatctgaattacttttcctgtgctgcagtgatttccataatacttttcacagggtgggtgcttagtgaacctgttcaagatttactttgtacttattttgctcctaagaaaatttctaaaacatactttaaaattatcaagtgctatttgtaattctattttgttcaggtaatagcaataatatgtgtaggatggcattcatgaaagcactgctttttaacccccttttccgtatttgtaggaactgtgacccaaacacctagaaattcatcaaaaatagcttctatcgaggctactgtgatttgaatttttgtttttcaaagagctctttcagctgctgctcagttgtggcttctttctgctgcatcagctcggctgttcctttggtcactccacagccatctggctttgacattgaagggttgtatggccggcctgaggctatccgaagattctcccagtattccttcctggccctgtgtgaacaaaacacatgacaccagacaacagactcctcccctagctttggtctttatatcatggaaccatttaaaaattatataatattttaaataatttcatgcagcacacaaagttgcctatcagacattaaaaagcaaaggtgtcaatctcagccacctgtgtggacagtctgtggttgtttggcttcaccatgattcc

SEQ ID NO: 313327 - DNA, 513 bp, Homo Sapiens
tatggcaaactgttcaacttggtaaagctttgaactattccataacagtcattttctggaataagatactattgtaaatatacaactaagatgtgaatgtttgaataataattttatttcaatttcacatgaaaatttagatgtctcatatactcacccattttaggggcaggaagtcaatgaagctgcttgcgacatcgcccgacaagtggctgatgaaggagatgctttggtagcaggaggagtgagtcagacaccttcataccttagctgcaagagtgaaactgaagtcaaaaaagtatttctgcaacagttagaggtctttatgaagaagaacgtggacttcttgattgcagaggtaaagaaagatgtggtgaaagataagacaaatacacctagtacattttctctaccttttgctttcaagagtactgtgtggggttaggtgacaatcataactagcaatagtaatatttagtttttgaaatcgttttccgaattcagggctactac

SEQ ID NO: 313328 - DNA, 471 bp, Homo Sapiens
  misc_feature (456)..(456): n is a, c, g, or t
cgggctttttgcaccagcttcagaaaaacatggcagctggggaagtggtttggacatgcacaccaaaccctgggttagagcaagggccaggaaggaatactgggagaatcttcggatagcctcaggcgggccatacaacccttcaatgtcaaagccagatggtggcggagtgaccaaaggaacagccgagctgatgcagcagaaagaagccacaactgagcagcagctgaaagagctctttgaaaaacaaaaattcaaatcacagtagcctcgatagaagctatttttgatgaatttctagggtgtttgggtcacagttcctacaaatacggaaaagggggttaaaaagcagtgcttttcatggaatgccctcctacacatattatttgctatttacctggaacaaattaggatttacaattaggcattggttattttaaaagtatgtttttgganttttctttgggggct

SEQ ID NO: 313329 - DNA, 1354 bp, Homo Sapiens
ttttgaaattctaatcccaagcatttattgctttttaaaaagggaactgtacatgatcagatcatggaaggatagctccactcctccccgaccttggtcacaggccgccatgaggagggactgctccagtcctccggtggccactgccatcttcctcatcactgtccttagctttggagtacacaactccaagtggcccgagtctagactctatcaaattccacactgatagcaacaatgactgcatctgatgtgtgctgctggcaatcttaagcccaaaatgcttcaaagattaaacagccatatacatttaaaatacatagaaaaataatataattagaatgtatacaaagtagattacaaaacaacttcactacaagaaatacatcttatatccaagcacaaaaatgtggaaatatacatgaaaggatatacgtttaagaaaccacatttttatttctaaatgctgagtgagaaggcatggactactaaattctggattactgataaaatttcaaaaagaacttgattttgctagcagaaatttttaccccattctcaagcttctataaacagttcttgaagggattagacagctgttcctctttccaaattctgtttaatttcagctgtgtatttcccatagaatctttcagctttcttgttgaatttggcattcctttcattaatgtagtcgatatctgcatcatcattataaggacgtctccggctatatttgtctcgtttttcaatctgtttttccagatctatgaccatcctgtcaatttcctctgtggaaggcacatgtgttccatgaagaagactattggatgttgggaaaaactcttctccatgtttttctctcagtctctcatatgtttccatgtcaggtttgatctgcttggtcaaccgatgatactggcgtaactgggcagcagcataatctgaaaatcccagatcagggtttttcctcttctttttcctctcccatctttctgcatcttctgcactgatctccagcaacttcactttctcatagtcttctcctcttgccgcacattcctttttcttttcctcttcctttagttcccactccaaacgagcttttttggcttcccaatttgcaggtaattttagtcttttatcttcttccacaacttcctggtgatttaatttacgagcttcattccgcatcaggtgcagctcccggaatttgcgcagtctctgttcgcgcttctgagcggccagctccgccgccgcagcgagggacccctcctccgcgctgtccaccagcacctcggatgcagctatagccgccatcacaacctttccctcgtgccgaagacgccaccca

SEQ ID NO: 313330 - DNA, 875 bp, Homo Sapiens
gcggggcgggcgattacttgttggtagatatttcattatggattcctcggcgtaacttggacccccattaaatgattcccattaactcgcctttcgtggtatagtttatgggaacagctcctattgtcccgcgcgggacgttttcttatattggggaggggcttccagccctcgttagtacatgggcgccggtatcttcttctgtgatagcccgttgatggccccgtgtgcactgcttgccttaccgggggcgcgacttgcccaactcaaaatggtgtaggaaagctttctcgaggggcggagggcgggcagacaggtgtgtcctttttagcaatttggtgtgtttagaggcatacggtttttatatgccttagtttaaaaagtaaaactagaagtgatacctgagctctacgtatttgtcataaattaggtcacattctccctggaggaaatccaaggaggcaaagtagtcgggtggccgtgagggtgcagtgtcacaggtaaggctggtccgaggacagctcccacctctttatgggaggagctggagtcaccgccttcttctcagtggcagctacagcagagctctctgctggcttgcctgacaccagcgccttctgcgacgacatgatgatggaagggggcacagattcccggcggccatcgcgagtgcaatagtaattgttggagagcttgtggctaggacccacagggagcttgggaggaggctgagttcgcttggagatctcctggtagcgtagctgcagcttcccctgcaggtcatgcccggacgcccagttccgcagccgctggatgagacgggtggcggacgccatcttccgtccgcgatactgaagggcgcagccggtgacccc

SEQ ID NO: 313331 - DNA, 870 bp, Homo Sapiens
taaaggcttatattacatttaatagtgttaattttgaagacaatagtgttaatttcaaacttccataaagggtaaccctacagttgaggtgtttgatgcagaaaccagtacaaatttcgattgttagggaaaccaaatgttctgaacattattttcattagaaaagggaaggtaattttatagttgtttgaggtgttgtaatacatctactgataggcccagctgtttaactaaactggctgtctgttccaaaatccatgtggggcttgggttttctgaatgtgcatgctcctgtgttctacaacattctacatatgaacaatctatcccactatggctcttgctacagtttttgttaaactcagcattattttcacagagtctttcatctttagcttcatcaatctttttctcagctggaactacatgacaaaggtccatatcctcaatggagtccaataaatctacaacatgggacggtggagtgattgatttcagatgtttgagcacatactcttcacactggccaactgcatccagaagattgtttattttattgatcaaagttgaattattattatgaaggtgacaccaggagagcaaagcactcaatgttcctcggagtcgtccatagtttaaaatgacttctgcacctttcttataaccttgattgaagccctgttgaagagtaactgctttgccagcatctattccatctctataaccttctttgactcgtctttgcatgttactctgccattcccgctgcgccaggagcgactcgtctgcttcttcgtcaaacacgtcccctttgtctccagggccctggatcaaggaggctgcttgaacccacgacatcaccgaggcccc

SEQ ID NO: 313332 - DNA, 997 bp, Homo Sapiens
  misc_feature (21)..(21): n is a, c, g, or t
  misc_feature (49)..(49): n is a, c, g, or t
  misc_feature (59)..(59): n is a, c, g, or t
  misc_feature (66)..(66): n is a, c, g, or t
  misc_feature (86)..(86): n is a, c, g, or t
  misc_feature (939)..(939): n is a, c, g, or t
  misc_feature (993)..(993): n is a, c, g, or t
  misc_feature (995)..(995): n is a, c, g, or t
cttgagccctgcccagaaatnctaacagtttattcctaaagaaaagagnaaccaatccngcatctncatctcaggttacatgatantctataatgtagatctcaagcctctttcatcactcgaactgtgctgtcatctccgcaccccagcatcagataaacaattatccttcaggtggagctgagtacactagacagggcttcattggtgagatgttctagaagttcatgctcatctccaagcttgcaacaggaaagatccaggcaggtcagctcccggaaagacttaatctcctcaagcttttctgaaatcacgagatacctgtttcgcaaacacagggagcaaagcaccaaacttccataggcctcagtgaatttctgtaaagccctcagccctgcacctggctcagtgaatttctgtctggcttcagcagcagagaacagcttttcagcaatctgctcaggaaagccaataagggaatcaatgtgatccacattgtcggagatgaaacccaggacaaggctgaagagggatttggcggagtaccgaagattccctctcgggtgtatgtgaagatgaaatgatcagtcttctctttccgtgcagtgtcgtcttccctgttcatgcaaagctccacagaaaagcctttggggaacagtctgaaaggccttggcttctgcaggctactcctgacaccatccagagccagattgaccatgtgcagctgcccattttctcgcatgtagatgggccctgggtccaggtggttttctgagctgaggtagtaagacattgccttggttgcaactgtgcccctgcccggggcagcgagcggcagctcctcggtgacggctccctcctcccgcggcccggctgacggggaagggctcagcaccccgggcacaaagctaggaagggtgggacacagtgaaggtgggnggagggagggggttgggggcaaccaggcgccgtgggaccgcgggaccggcgggngngg

SEQ ID NO: 313333 - DNA, 1256 bp, Homo Sapiens
  misc_feature (85)..(98): n is a, c, g, or t
  misc_feature (108)..(136): n is a, c, g, or t
  misc_feature (140)..(187): n is a, c, g, or t
cccgggtttccttgggaaccagttaggcccaggttcccttccttctggggcccgcggcccaaaggaagggtttggaaagtttttnnnnnnnnnnnnnncccgccaggnnnnnnnnnnnnnnnnnnnnnnnnnnnnncccnnnnnnnnnnnnnnnnnnnnnnnnnnnnnnnnnnnnnnnnnnnnnnnnaaggacagcaaaaatgtttatttgaaaaaattactatgtattgaaaatatacattagaaattattacatacttccatagcattcccctcccacaccacaaaagtagaaatatctgcttactatgctaatgccataggtaaattcaaacaaaaagtaaatcatcctcagtctcctttactcaaacactagagctgggggccagagaaaggtcaacttgtatctactaatcaataggaatttaacaagtcccagtcttccacagcaagacatacatatttctgctttgaaggttgtgaagagttattctgttctgtctctgactcctcaaaaggtctcttcttgctcttctttgactcctggcttgagatagcttcgtgtttcaacactggcccatggcaatctggggctttctctttatagaactggagtttctcggaagagttcatgtgggtgtctgccaggggacacttcagtggggcttctgctcgagaccgcttcccatagaagcgctgagctgctgctctaggctccgaggtctcccgtggcttcacagcttccgcagtcacacgctcccactgcagaacgatctggtcagcccagccctctgtcttgcagttactatgatcaaattccttcaaaggcactttggagtgaacaaggcctatgtgggtctggagcttgtgcttgacggttttgatgtccttgagccctgtcccagagatatctaagcagtttagtttcctaaaagaaaagaggtatccaatgcctgcatctgtgatctcagggttacatgataagtctaataatgttagattctcaaggcctcttttcatcactcgaactggtgctgtcatcttccgcaccccagcatcagataaacaattatccttcaggtggagctgagttacactagacagggcttcattggtgagatgttctagaagttcatgctcatctccaagcttgcaacaggaaagatccaggcaggtcagctcccggaaagacttaatctcctcaagcttttctgaaatcacgagatacctgtttcgcaaacacagggagcaaagca

SEQ ID NO: 313334 - DNA, 970 bp, Homo Sapiens
  misc_feature (245)..(245): n is a, c, g, or t
  misc_feature (287)..(287): n is a, c, g, or t
acaaaaatgggatccaatatataccatttgaaaattgcttttttcgtttcacaatatataatgtacatctttcatgcaaatgtgtagggctcatgactgaaagagggaaacttgtagattttagggggaaacctcaactttaagcgagttacatgctaaacatctaaaataaagcctcacaaaaagttaaaattcagaatatgggaaaaggccattaggaaaatgcaaaccagaaagtcccaggntggcaatggcaatactattagcaggcaaaacagaattaaagngccgaacacattaaataggataaggacggctccgttttgccttccagtgcattatcatcagtttgtttcttactcttttcatctcttctagctcatctgctgcctgtatcatctcctcattgcttaaatttctgccatgtatgtcccctctaaattgcgggcgagaacgagccaacctttctttaaagcttccttcttcaagcttatgttttcctactccacaaggaggctgctccatgggagggcgcccctcaaacaggtccttcctggaaagaccctcctgcggagggcgctcctccgagaggagcatctcaggcaggagctcaggcaagagctcctcaggaaagaactcctcctccgaggactgctcctccgaagactgctcctcgggggactgcttttcgggagagtgctccaccggaggcctctcctcatcggtcttgggcgcgctctgcggctcttcttcattttctttgcgtggtttgtccatgttgggaattttcttcttcaagcacagttattctggacctttccgggccgtgtgctcctagtcgtcctctcctcgaggtgccccgctgtgaccagcagacctctctttgtatttgccttttcctggttgccagagacggtccgcatctagtctcgggtagtattgcctcttcctctgtgctacttcccctccc

SEQ ID NO: 313335 - DNA, 1165 bp, Homo Sapiens
caaatattgtcaattattttattcaaatgtttggaacttaaacacaaaatcatcattaagttttcacaaaatgaggcatctgtcgcttgaaaggcaaaaaatatttcagaaatatgtttacagaaatgtaaaaatattaggcatcaagacagatgtgaacgtattcagtagcttgtcttgtctgtcagtcttcctctgagccgaagatcttactgtactcactcagcatgagctcagctatctggttctggtagaccatgtggatcgccatgtttcctgtttcattttcagctcgcagaagggtaggtccaaatacaatccccaagctttgcgtggacatgaggttcttggaggctttggccactatcttagttagatgtccaaagaggactttcatggtgtcacgatttggcggagggagtttttgtacaagagattttacagcttcaattcttgtgttgttgtcttgctttttgatcgcttccacaaactgctcaaagaaactgtaagggaagagcggctcaggcagctcccggaaaaacatcttcagtgctccggtgacaacgtggatgtcctcccactggctgtcgtccaaattcagcttctcttcttggttgacaataaatcttaacttctgtattgttgccagattgccactaactcgatatattccatcaacatctagacctcttttctcaacagcttcaatgcattgctttacaaaccacggaactgtggaattttcacgttcacacactttgtgcagatgagagccaaaaatttgatctttaataagtcctttttcttgcagagttttcagggaaggtcttcgggtaataaacttctttaatctgcttttaactcgatttttgtcgcttgtatcggaagcactgtgatgcagtctgaacattaaagattttctgtgctctggtttctgttcttttatatcactgtcgtagtgacttagcaattcagtgctagaggatctttggattttgaataattccaggtttcttgatggacaacttgaatcctttggcaatctgtcaattgcatttttgatagcgtggaaccaatccaatatgatgaagtcaatatctgactgtagaaggaactcatttcctgatactgttgtgatctgaaagacattctttctgctcgattt

SEQ ID NO: 313336 - DNA, 420 bp, Homo Sapiens
ttttttttgtcaattattttattcaaatgtttggaacttaaacacaaaatcatcattaagttttcacaaaatgaggcatctgtcgcttgaaaggcaaaaaatatttcagaaatatgtttacagaaatgtaaaaatattaggcatcaagacagatgtgaacgtattcagtagcttgtcttgtctgtcagtcttcctctgagccgaagatcttactgtactcactcagcatgagctcagctatctgggttctgggtaggaccatgtgggatcgccatgttttcctgtttcattttcagctcgcagaaggggtagggtcccaaatacaatccccaagctttgcgtggggacatgagggttcttgggagggctttgggcccacttatcttaggttagggatgtcccaaggggggctttcatggg

SEQ ID NO: 313337 - DNA, 546 bp, Homo Sapiens
ttttttctggttgatgtattatttattatgtaacagttctgagaaaaaatccaattcaaaacatattactgaggattctgtattagtatattttagaaatcgtataatccaaagctgattttctaatatattttcttatataacacttaaggaatttttcactcccattatttggctctagaaaatcttatgggaaacatttgttacactagaaaacaaaatttaagtacagttgttaggcacggttaaaagggatgatacacacaaactataataattacaaatcagtacttcttttgaatacacatttgaatgtaaacttttaaaatcagtgttttagataaatataaaacatacttcaagaacttattttaacatctcctttactttctaatgctcttcagaaaaaattcctttctgattcattcagtagcaagagcccaaaaatggtgttccaagccaagattcaccttgtcctcttcagaaatgacctgaagagcttttgggttggttaaaaatattgcccgaagtatcttagggtaaact

SEQ ID NO: 313338 - DNA, 622 bp, Homo Sapiens
aagatgtgtgaaggcctcctaactcttggggatctctttgtccctacttgggaatcccaccttatcattagtgaggttttgcctgggcacgaaacctggattttttgcgattggtacaaaacctggatcaaccgtttcccggtttcctagttgttgccttaagcttctcacacacaaggtagtttcataccgttctcataacctaaattgtcatcgcataaactgtttcagctcctacagctctggacaggctgcttttcattttggtgagtccatccagtacctccacgtgccctgtttttctccagggcacatccttggcctcttccacagtccttgggtaaatgcttgggagaataatttaaatatttttattctaccatggtgggccctaatttttcagggggcagtaagatggctttttaggattggtctaatcagatcctcattcttgatcccttcctaggttttctactctaacatttgatcacagtttagaggcacagtggaccaagtggaaggcgatgcacaacagagtatacggcatgaatgaagaaggatggaggagagcattgtgtgagaagaacatgaagatgacttgactgcacaatcaggaataccg

SEQ ID NO: 313339 - DNA, 1239 bp, Homo Sapiens
  misc_feature (915)..(915): n is a, c, g, or t
  misc_feature (917)..(917): n is a, c, g, or t
  misc_feature (1033)..(1033): n is a, c, g, or t
  misc_feature (1042)..(1042): n is a, c, g, or t
  misc_feature (1044)..(1044): n is a, c, g, or t
  misc_feature (1048)..(1048): n is a, c, g, or t
  misc_feature (1054)..(1054): n is a, c, g, or t
  misc_feature (1059)..(1059): n is a, c, g, or t
  misc_feature (1065)..(1065): n is a, c, g, or t
  misc_feature (1067)..(1067): n is a, c, g, or t
  misc_feature (1069)..(1069): n is a, c, g, or t
  misc_feature (1078)..(1079): n is a, c, g, or t
  misc_feature (1087)..(1087): n is a, c, g, or t
  misc_feature (1089)..(1089): n is a, c, g, or t
  misc_feature (1092)..(1093): n is a, c, g, or t
  misc_feature (1097)..(1099): n is a, c, g, or t
  misc_feature (1103)..(1104): n is a, c, g, or t
  misc_feature (1107)..(1108): n is a, c, g, or t
  misc_feature (1110)..(1110): n is a, c, g, or t
  misc_feature (1130)..(1130): n is a, c, g, or t
  misc_feature (1149)..(1149): n is a, c, g, or t
  misc_feature (1152)..(1152): n is a, c, g, or t
ccgccgggccaaaaatttagtggttttagaatttcggggctttcaaaatgcgttaggccaaccccccagcaccgccatgatccatgtttttgattgtaccagttggggtcaaaaattaattcctttctttatggaccaggaaggggttcatgccctgcttcaatagcaaccagaaatggggccccccaggtggcaactgctttcatcagggccttttctggctaggggatgtcccccaaatccggtgtcagtagcagcagaatactggggattgtacttgcagggattcttttgttgcctcatatggataggattcctcagagtccaggcctccattatcctgaacatactggaaagcataatccattaggccaccattgcagccttcattgccttgaggcccagagcagtctaccagattctgctcactcagtgagataagcctccccagttttccggaacatctgtccttcaagagcaccagtagcactaaaagcccaacaagaaccacactgaccctgattcttcacaggagtcacgtagcctttctctctccaatccacagatctgggggcctcataaaacagaggttcctggaacactttccccttcctgggcttacggttttgaaagccattcatcacctgcctgaattcttcactggtcatgtctccaaaggcgttcatggccattgtgaagctgtgtttcccttccctgtattcctgattgtgcagttcaatcatcttcatgttcttctcccacactgctctcctccatccttcttcattcatgccgtataatctgttgtgcatcgccttccacttggtccactgtgcctctaaactgtgatcaaatgttagagtagctgaggcaattcccaggcaaaaggcagcaaggatgagtgtaggattcatntnttaaaacctgtgtccacccggctcggaggctggcctgcccgctcaaccagtcacgcgcctccgcggggtcctcaactgccctccccggcttccccacctcaaggccagcagagttnggggtagangntctngttgcnagggntggtgnananctactcganngcgtcctntnttnnagtnnntgtnnggnnanagctgggcctggccggcggngctttcctgctgcggtcgntantgcgcaggcgcactccacggatgccgctcaaggttgcggaatcccgggaattccggaccggtaccagcctgcttttttgtacaaact

SEQ ID NO: 313340 - DNA, 1040 bp, Homo Sapiens
  misc_feature (3)..(3): n is a, c, g, or t
  misc_feature (10)..(11): n is a, c, g, or t
  misc_feature (21)..(21): n is a, c, g, or t
  misc_feature (24)..(24): n is a, c, g, or t
  misc_feature (34)..(34): n is a, c, g, or t
  misc_feature (36)..(36): n is a, c, g, or t
  misc_feature (38)..(38): n is a, c, g, or t
  misc_feature (48)..(48): n is a, c, g, or t
  misc_feature (50)..(50): n is a, c, g, or t
  misc_feature (59)..(60): n is a, c, g, or t
  misc_feature (78)..(78): n is a, c, g, or t
  misc_feature (84)..(84): n is a, c, g, or t
  misc_feature (91)..(91): n is a, c, g, or t
  misc_feature (93)..(93): n is a, c, g, or t
  misc_feature (106)..(107): n is a, c, g, or t
  misc_feature (112)..(112): n is a, c, g, or t
ccngtgtttnnccagccaatnttnttttatttgntntntgtttcaaancntagccaccnncagcacccatgatccatntttcangctacantnggctcaaaataannccttntttatagaacagaaggactcatgacctgcatcaatagcaacagaaatgggccccacagttgcaactgccttcatcagggccttctcctgcttagggatgtccacaaagccggtgtcattagcaacagaatacttgggattgtactttacaggattcttctgttgcctcatatgggataggattcctcagagtccaggcctccattatcctgaacatactggaaggcataatccattaggccaccattgcagccttcattgccttgaggcccagagcagtctaccagattctgctcactcagtgagataagcctcccagttttccggaacatctgtccttcaagagcaccagtagcactaaaagcccaacaagaaccacactgaccctgattcttcacaggagtcacgtagcctttctctctccaatccacagatctgggggcctcataaaacagaggttcctggaacactttccccttcctgggcttacggttttgaaagccattcatcacctgcctgaattcttcactggtcatgtctccaaaggcgttcatggccattgtgaagctgtgtttcccttccctgtattcctgattgtgcagttcaatcatcttcatgttcttctcccacactgctctcctccatccttcttcattcatgccgtataatctgttgtgcatcgccttccacttggtccactgtgcctctaaactgtgatcaaatgttagagtagctgaggcaattcccaggcaaaaggcagcaaggatgagtgtaggattcatgttttaaaacctactcgaccgcgtcctctcttccagtccctgtccggccacagctgggcctggccggcggcgctttcctgctgcggtcgtagctgcgcaggcgcactccacggatgccgctcaaggttgcggaggtcgcggttctcc

SEQ ID NO: 313341 - DNA, 1461 bp, Homo Sapiens
tgcacaagtttcttcttcatagtaatacagcccctagtctgaaattaaattttatttaaacaggtaaaaatttatacatccttttaaaaacgaaaatgcaaagtcagtaagtgaatcaataatataaacctatttatagcagtaattaaaatagaggtaacatttaccagtgtgaaaatatcacagaattcaaatcacactcggatcttcaatgattcgagtgtgtatccgacacagcgggggctggtagactgaagatgaattcctcccatgcatgcgccatccccagtcaagtccttcctcatcaccgtccaccagctcacacagtggggtagctggctgctgaggcaattccacaatggtttctccggtctttggccatctttacgtagccacccatgccccattcttcaccccagctgttcttcaccagccaatatttattgttatctgattctgtgctttcaaatccgtagccaaccaccagcacaccatgatccatgtcttcactgctacagtctggctcaaaataaatgccttctttatagaacaggaaggactcatgacctgcatcaatagcaacagaaatgggccccacagttgcaactgccttcatcagggccttctcctgcttagggatgtccacaaagccggtgtcattagcaacagaatacttgggattgtacttacaggattcttctgttgcctcatatggataggattcctcagagtccaggcctccattatcctgaacatactggaaagcataatccattaggccaccattgcagccttcattgccttgaggcccagagcagtctaccagattctgctcactcagtgagataagcctcccagttttccggaacatctgtccttcaagagcaccagtagcactaaaagcccaacaagaaccacactgaccctgattcttcacaggagtcacgtagcctttctctctccaatccacagatctgggggcctcataaaacagaggttcctggaacactttccccttcctgggcttacggttttgaaagccattcatcacctgcctgaattcttcactggtcatgtctccaaaggcgttcatggccattgtgaagctgtgtttcccttccctgtattcctgattgtgcagttcaatcatcttcatgttcttctcccacactgctctcctccatccttcttcattcatgccgtataatctgttgtgcatcgccttccacttggtccactgtgcctctaaactgtgatcaaatgttagagtagctgaggcaattcccaggcaaaaggcagcaaggatgagtgtaggattcatgttttaaaacctcaaggccagcagagttcggggtagacgctctcgttgccagggctggtgcacacctactcgaccgcgtcctctcttccagtccctgtccggccacagctgggcctggccggcggcgctttcctgctgcg

SEQ ID NO: 313342 - DNA, 389 bp, Homo Sapiens
  misc_feature (374)..(374): n is a, c, g, or t
catttgaaattaaattttatttaaacaggtaaaaatttatacatccttttaaaaacgaaaatgcaaagtcagtaagtgaatcaataatataaacctatttatagcagtaattaaaatagaggtaacatttaccagtgtgaaaatatcacagaattcaaatcacactcgggatcttcaatgattcgagtgtgtatccgacacagcgggggctgggtagactgaaggatgaattcctcccatggcatgcgccatccccaggtcaaggtccttcctcatcaccatccaccagcttcacacgtggggggtaggctgggctgctgaggggcaatttccacaatgggtttctccgggtctttggggccatctttacggtnggccacccatggccc

SEQ ID NO: 313343 - DNA, 955 bp, Homo Sapiens
caattgaaattaaattttatttaaacaggtaaaaatttatacatccttttaaaaacgaaaatgcaaagtcagtaagtgaatcaataatataaacctatttatagcagtaattaaaatagaggtaacatttaccagtgtgaaaatatcacagaattcaaatcacactcggatcttcaatgattcgagtgtgtatccgacacagcgggggctggtagactgaagatgaattcctcccatgcatgcgccatccccagtcaagtccttcctcatcaccgtccaccagctcacacagtggggtagctggctgctgaggcaattccacaatggtttctccggtcttgggccatctttacgtagccacccatgccccattcttcaaccccagctgaaaaaagaggcaggttttccatttcagagaaagaataagggcccaaagggttattacccgggaacacccaacttaaaccactgtgccgggggccatagacttaaccagaaggaatccgggaccaggcaatgttcctgtttatccttaaaaaattcttgacataacctggacataatttccatcccagcctccaaactgtgacctttcacagaactacagatcagagacaggaaaacaataggatgtctttgcagccagatatgcctcagaatttaaaaactgttcagatttagatacacctttatacaatggaacaaagactatattcatactcccaagatatttgtgacagtttcttacttttataatcaaacattaatattatatgttcaacttagacttctggggatttcagaagtatgctaagggcatgtggaactgtatccaaacactgtttgcaaataagtattctcttttgaatttcaaatgtaagtatttctggcaatttatacctgttcttcaccagccaatatttattgttatctgattctgtgctttcaaatccgt

SEQ ID NO: 313344 - DNA, 1502 bp, Homo Sapiens
atcgacaccgctgccccaatttttagttataccccgctcctctcctttgtgatattgagccataattcccagccagccggaaaggaggcccggcctgctcttctggctgttccccggagggaagaggccggaggcacaaaggctgttccctctggccttcctcccaactgccggggcgtgcttagctcctccctaggcagaagctttgttccagccccacttccacatcccagctccacagtcaggatgggaggcacatggttggtagcaggggaaagaatactgtagttccagcctgtgctcctttcagtctcagcctggatggtgggtcactcatccctctgcagctagttcctcacttgtcccagcccaggagccaggagggcactcaatcacacccaaaggagcaggcagtgtgacttcagtcatcttcagatgactcctcttctgcctcttttagccactggatgaacctctgcagctgttgattcttgcgcaactgctggcccttgtcagttgtatctctttggctgaaccagctcagaattgtttcctcagccaggatctccagctggtagaaagccatcagtaccttggccatggaaataccaagagcttcatgctctaggaagaagtcctcaatggctgctaacgcttccaaatggtcggctgcgcgctttatgtagttcctaaaaacagggctccaggcctttagcagaggaagcagcagggcacagtagcggcttgagtcaagcggggaatccatctgttgcagggggaactccaggaccacgtggctcagtacctgcatcacctcctttagacttatgttataggcatacttgagagagttgatttccaggacgagattgtcacaagaaatgttctcctctttgccccgctgtagtgttcctaaaacttcattctggaacactttgatgtcatccatctgaggggagcctccccggctgtccggctcctcagaatccatactttgctcactttcactttcactctcttcttccatgttgatcttgagtccccacagattctgctgcagttcctcctcttcctccatgttcatgcctgcagctttccagaggtagcccttgccagcagctcctacttctgctggattgtaacctttcatcttcactttgtccttttcttggtcagccccagaatcatcactgaactcgccatcatcttcatcttcctctgcatctggagggtgcaaagagatcaccgagccctcaggcagcgtgatatttgggcccacgaccacctgggaagtgaggacagagcgtggtttcagtgtcactcgttccttgacctcagcattgtcacaaagcagagactgatggatctgtgctccagccgccactcgaacaccctgccacaggtaggtctggtccagcaccacgttatcaccaatgtggcagccggggccaatgacactgttggtgataaagaaattgctgccaatgacagtgccagagccc

SEQ ID NO: 313345 - DNA, 645 bp, Homo Sapiens
ttcatacagagacaacaacaaagcaacatctaagtctttattaaggtgagtttttacaaacaagcatctatcccagtgtgggggatgaggatgggagaggaaagcggggcaggaagatgaggattctcatctattgataataaagctccaggttcatcccatcgtggatttcatagtcccccagagacacgtggtccttaaaaatcgtgtaccacttcttcaggacaatcttgttccaacgggtaccagtttgggctgcaatcagcttcttaaggtccccgatggtatcatccgtgctgggcgcagagcagttaaggcaaatggaagcggtagaacgaggaagaggacattctagggcagaataccatctgccaggaccccatccgccccctctcccgggtttaactaaaaccatccgacaacacagattgagttgcctgcctcacgccaagcacccctgcgggtaccactgcctctcggctgccagtggatacttgcatttaacgcggaccttcttccccagacggtcgttgcaaacaacctcgatcatcctagctggagctcgaatcgcctcgaacctgccgacgccaccagctcctcacccgagcgctgaaccccggtcgcagttaacgctaggaaccggaa

SEQ ID NO: 313346 - DNA, 914 bp, Homo Sapiens
aaaggggcattacagggacattagccgccgtccgtgactccgcaagtgaaggtgccacaggcccgggggtggggaaattggaaaggttcgaaagtatagacgggggggcctaccggtggaaagtggagccccaggtaatgtgccctggagaaaaagcgccttagggggtgtggttgcagaacaactccggttgtaccccccgggggggttgtgtattggcgggaggggttccccaatcccttggtcaaggtgcgcggtctttcccatgggaagcaaccttggcccacttttcactaacgggggaggggggccgcgcgggcccaagataagggttttcaggaaacgtttttgaggggccaaaggggacaaaacaggtggtgttaggttacaaaacctcgggggggacttcgtggatttggcagccggcagggcgcggtgcaagggtacagggttgggggttttaacatagaagtctttattaaggtgagtttttacaaacaagcatctatcccagtgtgggggatgaggatgggagaggaaagcggggcaggaagatgaggattctcatctattgataataaagctccaggttcatcccatcgtggatttcatagtcccccagagacacgtggtccttaaaaatcgtgtaccacttcttcaggacaatcttgttccaacgggtaccagtttgggctgcaatcagcttcttaaggtccccgatggtatcatccgtgctgggcgcagagcagttaaggcaattggaagatttaacgcggaccttcttccccagacggtcgttgcaaacaacctcgatcatcctagctggagctcgaatcgcctcgaacctgccgacgccaccagctcctcacccgagcgctgaaccccggtcgcagttaacgctaggaaccggaccc

SEQ ID NO: 313347 - DNA, 671 bp, Homo Sapiens
ggggggggagttcacaacccctaggtgcctgaacccaggattctcctggggagaacaaggttagggcccaggttccccttgcctgatcgggcgccgcgcgccccaaacgaagggttgaaaaaaaacttcttggggggccgaggcggcccgccaaggaaaacgtaatggatttgcggaccggggtgggacaggagaggtgtcttggggtggggagttttttttgcaacatctaagtctttattaaggtgagtttttacaaacaagcatctatcccagtgtgggggatgaggatgggagaggaaagcggggcaggaagatgaggattctcatctattgataataaagctccaggttcatcccatcgtggatttcatagtcccccagagacacgtggtccttaaaaatcgtgtaccacttcttcaggacaatcttgttccaacgggtaccagtttgggctgcaatcagcttcttaaggtccccgatggtatcatccgtgttgcatttaacgcggaccttcttccccagacggtcgttgcaaacaacctcgatcatcctagctggagctcgaatcgcctcgaacctgccgacgccaccagctcctcacccgagcgctgaaccccggtcgcagttaacgctaggaaccggaagcggaagttaaagttcgaggcccc

SEQ ID NO: 313348 - DNA, 842 bp, Homo Sapiens
  misc_feature (101)..(101): n is a, c, g, or t
  misc_feature (108)..(170): n is a, c, g, or t
  misc_feature (172)..(172): n is a, c, g, or t
  misc_feature (176)..(176): n is a, c, g, or t
  misc_feature (178)..(189): n is a, c, g, or t
  misc_feature (191)..(194): n is a, c, g, or t
  misc_feature (196)..(199): n is a, c, g, or t
  misc_feature (201)..(207): n is a, c, g, or t
  misc_feature (209)..(249): n is a, c, g, or t
  misc_feature (251)..(297): n is a, c, g, or t
  misc_feature (299)..(339): n is a, c, g, or t
  misc_feature (341)..(345): n is a, c, g, or t
acaagatgggtacgagggggttgcgcggtggaacgccttccggtaggaccccgggggttccttactggggggcagagttgccgaaaaattaggtaaagggnggatgannnnnnnnnnnnnnnnnnnnnnnnnnnnnnnnnnnnnnnnnnnnnnnnnnnnnnnnnnnnnnnangggngnnnnnnnnnnnncnnnngnnnntnnnnnnngnnnnnnnnnnnnnnnnnnnnnnnnnnnnnnnnnnnnnnnnnannnnnnnnnnnnnnnnnnnnnnnnnnnnnnnnnnnnnnnnnnnnnnngnnnnnnnnnnnnnnnnnnnnnnnnnnnnnnnnnnnnnnnnntnnnnngcaacatctaagtctttattaaggtgagtttttacaaacaagcatctatcccagtgtgggggatgaggatgggagaggaaagcggggcaggaagatgaggattctcatctattgataataaagctccaggttcatcccatcgtggatttcatagtcccccagagacacgtggtccttaaaaatcgtgtaccacttcttcaggacaatcttgttccaacgggtaccagtttgggctgcaatcagcttcttaaggtccccgatggtatcatccgtgttgcatttaacgcggaccttcttccccagacggtcgttgcaaacaacctcgatcatcctagctggagctcccaccgaccccagaccctgggtggctgggtcgcgacagctttctccgactccgagcctctccgcttgaccccctcacctcgaatcgcctcgaacctgccgacgccaccagctcctcacccgagcgctgaaccccggtcgcagttaacgctccc

SEQ ID NO: 313349 - DNA, 634 bp, Homo Sapiens
  misc_feature (168)..(180): n is a, c, g, or t
aatatttttttgcttttatttctggggatagcatgatctgaaatcattactagctcatccaggtagagaagttctccactgaatattcacggtgaaatatgatttgataacaccccggccaaaatggccgaattcccggcaaccaacacaatggggcccttcccgagnnnnnnnnnnnnngcccctccagatctcggagcttggcgaaatcatggacaaaggcgcatcctgcgggaaattgttgcccccccacaacggctagagcacttcccattctttcgccccccggtatccatccaaaaaaccccctcgagaatttcaaccggcgagaccaccggtaaaatcctttaaccggggggatctgcccaaaataaccctccccgaaacttctggcggtacgcccgcacccctttcccatgttacaactcggagccagcctgggagactttacatacggcaaccacaacacgcgcgccgcaaacagcgcgcaaagcccctccccggtgggaaacccgcatccccctccaaatttccccacaacatacagaggcgcggagagaataaaggaccaacacctgggcgggctcaacagagggcgtaacctacaccatactcgcggcgggcgcccaaaccc

SEQ ID NO: 313350 - DNA, 1032 bp, Homo Sapiens
  misc_feature (659)..(685): n is a, c, g, or t
  misc_feature (998)..(998): n is a, c, g, or t
ttaattaacttagggacaccaccaagtgttttgatataactaaatttgtggtaataagactgtctgcacctgtattcattgtggaacttcctctttcattggaaactttcttactcaagaatgacggcagtattgttttcttatatgtgcaatgaagtggaatgataaacagtatgcctttaatttatatgtgttcttgttctgatgttgtttcctgaaatgatttttcttcctaactgtggttttcgggtatgcaagcctaaatctttgtacactttgtctcacagaatagttctgaggctccatgacagggttttgtcattgttgatgttattgttgcttcgttttataaaaaagccaaaattttttttccaatccaaacgttcacctgtttcctttcctcaagctataccagtgtaataccagttaccctgtggatccatttaatatgttatccccactaattaattttcgtatattatttccaatatttggaaagctctttatagccatttggtatttcctattacccacctcctattttaaatatttatcagtctaaacttgtgcagtggtagtaaacatgcaagttgttatgattgagctgtattaccataagtagaattttaagtaaactggtgaatttgggcaataaatgnnnnnnnnnnnnnnnnnnnnnnnnnnnacaagctaactgttagaggtatacatttatttatctgttgtacagatttgattatgattttaatgtttgaaagattgcacttgtttgcttttactatatgtggggtaaaatatattttctgttcacagtatatgaaaatatggagtaatttaaacagtaaataaacattctgtggatgcttatttttgtattggcaaagtatcaattaaactatatgtgttctttttcaaaaaacccatcccccccaacacaatctttctctcccccctcctcctacacccctctcacatctccaccctcttttatcctcttnacccccatttcgctctctcttttccctattctca

SEQ ID NO: 313351 - DNA, 592 bp, Homo Sapiens
atattaaaaggattcaatatttttcaaaagcaaatttcaatgtaatttaactcttacatttgatgctgtgtcttcatttctagaatttatgtgaaagaacatggtcagtggttgcaccagagttgtgagaggttcttctatattagatggacagatttatatacttttccatggaggattaagtaaactgaaacctaagacacacgaagaaattctaagtggaaaggccacttattagttagtttacagcagtatcgtaagtgacaggatgataggagtgtggtaagtgatcaggataataatctgcttagtaagagaaacaatttgaattttagaaggaaattgccttaccatttgcaaattaaggtaattaaaatacagtgaatttcaaaatgcctttttaatgacaatgtgtgaacttaatttgttttaataaaccaaaattgttgttattgtgttaaggctattttacattgaatgtgtatcttgccactgatgttaacttatcccatcttacccaaggttgtaggtaacaatatactattgggtgacagtggactaacatctctagtgatccctttgtcagtggtct

SEQ ID NO: 313352 - DNA, 842 bp, Homo Sapiens
  misc_feature (97)..(109): n is a, c, g, or t
  misc_feature (401)..(401): n is a, c, g, or t
attctgttatattttctcccatgtgttttggagaagtgtatgagctacccacaaagtgcttgagggccatagtattgttcataatgtgaaaacttcnnnnnnnnnnnnnaatttcagttagaaaatgtgtttcattaaccccttattaataaccaataatcaaattaaccagtcaatgaatcttctttagttaggcctgtaattagattgttagctcttcgtggctcttcaatgtcttttgaacatgtgggagatacttaataaaaagcatagctctaggacactattaaaattgctaattacttcccttggaataaagacataagaacatttgcttaagatttaatatgttatatataggcttgggcatacagcagtgaggggtggggagattttgaaangttctggtttgtcatttatgtagctggtagttttgttttgaacctgttatgagcaaccaccggaataatctgttccccatagaaactgaacctaaacttcaaatttttattatctaagctataataataggcggagtcgatctggaacatacagctcgagatcaagaagcaggttccgcagtcacagtgaaagccctcgaagacatcataatcatggttctcctcaccttaaggccaagcattccagagatgatttaaaaagttcaaacagacatggtcattaaaggaaaaaatctcgttctcgatctcagagcaagtctcgggatcactcagatgcagccaagaaacccaggcattaaaggggacatcatagggacaggcgtgaacgatctcgctcctttgagaggtcccataaaaaccagccccatggtggcagtcgct

SEQ ID NO: 313353 - DNA, 355 bp, Homo Sapiens
  misc_feature (23)..(23): n is a, c, g, or t
ccttttgaaaagttgtatccatnttaggcccctacattttggtcctgttatcccattttgagcctaatttgtgtacatgttacaagcttttactatattttatgagctgttttcttagtggctgccctgggattacaatgaacatcttaattcataacagtcttgtttggattaatacgaacttcatttcagtaatatgtaaagactttctttctatatagctctgttccttcccgaacattgtgttattgtcatctaaattacatctttatgcattatatgtctaccaatgtagatttataattatttcttcttgtagttgtcttttaaattaaaaagaaaaagaattacaaac

SEQ ID NO: 313354 - DNA, 2041 bp, Homo Sapiens
  misc_feature (1642)..(1642): n is a, c, g, or t
ttgtatgctaggttgtcactttaggtcttgtaatgtcgggacaatttatgtgatcagctccggtttgccaataaacatataagtccatgtcttttccattctagagtaaaatcatagcatgatcctaactcttgttctggatatgtaattatgtttaacagctttgttaaaatcctgcaatatctgttcatgcacttcagatccacatagtggaatcagcaggttcgaatgtgttgataagaaagaagcagagtctgaagatcggacatattgaaggcgagtgtcagtacccagtagtgtgggacattggtctggtttattcatgtacatttgggttttatggttctaacttttattattaggtcagaacgaatgaagtagcagcaaaagggtctctcctatgatctgtctttcactggtcctcagggcaaggaggaaacttgggcaggagatgattgctcaatcccagcagactctcagaatctcacttggacccgaaagtgcatctgcttggtggcattgttcttcattcctgtcttcagcatccattttgatttcatcctttggacatactgcatgtctcgctctcgcataagagccgctcctgtgctgccagtccatcccagggctctgtactgctgaagtactcggcccacggccttccgatttttggcaactgccacagctcttgacaagccaaatcgctgtttgtagtatctcatcaaggagcgatgacccactctggcaccagaaggcagaatcaattccatggtttcatcatcatattccaagttcttttctgagggcaactcctcagccttattggggtcctccccttccttgtgatctggatagctactcctaaaatcatagaagtctgcaaattccaaagcagcatcgccatctgtgaagagcttacagtggcttttgtcattcatatgtgcctgtacagcttctgtggagtagaaggacttccctttctcgttgcaccacaagcaaatcttgccaacaccaactttctctcccaagtatttaatcagtcccttaatatctgaaagatattctatatcaggaataaagaaactgtggtctttggtcatgtgagccacattcttcatcagcgagctggaatgatgggaacaaaataagcagtccgtgatagggatggcaccaaggggtgggccttcctcagcctcttcctcctctgcatcctgctccaccacatcgtccattgcttcagtatcctcacattccaattcttcatcagaatcaatatcttcccaatcgtctccatccaggtcctcttcctcctcctcgctgtcctcctcctgctgctttgccaacttcttcgcctgctgttcaaaccactggagccggggtggtttctcactcgggtctcggtcgtgggtcccacggccaccagtacccacggccacgacattcctggcctcctttgcaggcgctgggggcgccttcttgggagacatggacggctgggccttgatggcctgctggatggccgcgttcatggcatccttgtccacactgtccacgcccagtcctttctccaagttcttttcattcatcatctccactttccgattcactgcctgcacggccttcttctccagctcaacgtgancgccgggacttgaggtggttctcgtaggcgttgaaagaggcaaacttcttactgcaaacggtgcagtaggtggccgagcccttgctctcctccttcgcgacggcccgctgggcccgcactcgcttctgggagcccctcggcggtcactggggccatgctggccacctttccgccgcaggttgtagcggtgcccagtccgtcttattagtgggcccgctgcatgttcgcgtcgcggaacgccacccggcaagttatgccaggtgtacgtcgcccattgccaggcgaggattaagaaccgaccaagccaaacacctggtgatcagcgccgtggccccacaagaccctcagaccttaacccgcctcagcagccaggaagagccactcgacacgccgacttcc

SEQ ID NO: 313355 - DNA, 612 bp, Homo Sapiens
  misc_feature (98)..(98): n is a, c, g, or t
aaccacgaagcgggggtggctcactcgggtctcggtcgtgggtccacggccacccagtacccacggccacgacacctggcctcctttgcaggcgctgngggcgccttcttgggagacatggacggcttggcctttatggcttgctggatggcggcgtcattcatcatctccactttccgattcactgcttgcacggccttcttctccagctcaacgtgacgccgggacttgaggtggttctcgtaggcgttgaaagaggcaaacttcttactgcaaacggtgcagtaggtggccgagcccttgctctcctcctccgcgacggcccgctgcgcccgcactcgctcctggaagccctcggcggtcactggggccatgctggccaccttccgccgcaggttgtagcggtgccagtccgtcttatagtgggcccgctgcatgtccgcgtcgcggaacgccacccggcaagttatgcaggtgtacgtcgccattgccaggcgagaaataagaaccgaccaagccaaacacctggtgatcagcgccgtggccccacaagaccctcagaccttaacccgcctcagcagccaggaagagccactcgacacgccgacttcc

SEQ ID NO: 313356 - DNA, 1643 bp, Homo Sapiens
  misc_feature (22)..(22): n is a, c, g, or t
  misc_feature (43)..(116): n is a, c, g, or t
  misc_feature (350)..(350): n is a, c, g, or t
aagagacggggtttcaccgtgnttagccaggatggtcttgatnnnnnnnnnnnnnnnnnnnnnnnnnnnnnnnnnnnnnnnnnnnnnnnnnnnnnnnnnnnnnnnnnnnnnnnnnnccctggaaaactaaatttttaagtgcttatttttatagaagtttgaaaatttaatgcaggcaggtgtgtaataaattatttttgaattgaacattaaaattctgcttcttaaagtcagcactcaacttggacatgttgaaattagaatctattcttgtatttgatagacaaaatatgtggggaaagattttttgcatgacttttctctcattttattcttccataatgtatttnctactataaaatagaatcaacttgggttatatttgtcatttactttgttctgttagattttttcagttgtttttggaaaaattctagaaatcaggatgaaaaatgcagcttttccagggttgctggactgggggttttatttgggcctccttattataatttgtcactacttataaaaaacattctgttgcaaacagtggtgttgcattgaattgaactttggcaatgagaacacagcacacagctcccttttcaaaaagggtctcaaccccagtgtgtatttttgtacatcaacatttagaatacttatggcagataagtaaggcatgtcactgtgtccttcagtaacctctctcagtaactggtttctttatccctaacatgaattcatttctcctttgaagtcatttattattttataaattgagaacaaccacaccaccaaatgtcacaccttcttataaagtgtgaacaaggaaggtcatgtttttgtgggtattttgtcagacttagaggtttcatttcagggcatagtcaaaggcatcatcctcccaactacccacttgattatgtatttcagatccctccgtgggggccttcttctgacagagaattctttgaggtccgcagtagtgcttttgtcagcacagactgctaatctacatcttgctgcgttctgtttgctgaggttgggcttattcatttaacacgtaccaaccattatccagaggcaccatggagagttagtcatggaataaagcactgtccttgcagatgaaaaaagtctccagagcagacttctgacaggaaaggtttagatgctggagagttgaagaggtgtaagaagagatcgtgccctcatttttcacttatttttttggttattcatttataataaaaggttggcattgatatggtacaacctgcaaattacttgcagttctgagtttcagataaaacattataaaacattaaattcaatacatactgctcctttgaaatttgggtaaaaaattgtacaaccgtatatatagtcatttttgtattttttctatgttgtgaaaaccaaaattgtaattttataagtctttgattcactaaaattatataatttaaatgtattttttgtatatttagaaataaggagtccagagactacgcttaactttctatgcatgcatttgaaagctgtttttacctgataatgtagtaataagttgtattcataaaatactgatctgtgttgcatttcaaaataaactggtgtgtgctctgcctggatttgaaatacct

SEQ ID NO: 313357 - DNA, 778 bp, Homo Sapiens
  misc_feature (587)..(650): n is a, c, g, or t
gagaagtccaggaaagaaggagattctgagtggcatagagtctcaagtgatgtagtggtgagtgacagaattaactactaataggcagcacccattcacattttgctgcatcttcagtatgaaagtaggttgaaaagaactgtaattttcacaattactggtcattttatttatgtttctaattcaatgtattattcattttcctcttcaaaggaatcacattttattttggaaatgtatgtgtaaaaaacatggaaacttgtggaaacccactcttgaacttccctggacatgattcagagactgattgaggaaagggctgaatgtctggctttagaggatgtttgtggtgcggcaatgggaagctgggaaaattggcctcaggaagtggcagcacctcaccttttcttagaggagggagtcggtacacagatccaatttgtctgcaatggaagggacagggtcctttacctgggcctcgccttcttaagtgcccaggtggtgggccgtggccatggcaacagtgaccttggttatggggtggtgggtcacaaggtccatagtcttggaaatcatggcagtggggnnnnnnnnnnnnnnnnnnnnnnnnnnnnnnnnnnnnnnnnnnnnnnnnnnnnnnnnnnnnnnnntgtccatggggatgctgtctatgggtatcatgttcatgaggatggtgtgcatggggatggtgtccgtggggatgctgttcatgggaatgatgcttatggggatggaggtcactggaattattattatg

SEQ ID NO: 313358 - DNA, 838 bp, Homo Sapiens
  misc_feature (785)..(785): n is a, c, g, or t
  misc_feature (805)..(805): n is a, c, g, or t
  misc_feature (826)..(826): n is a, c, g, or t
taacaaaatgaaggcactcattgcagcactgcttttgatcacattgcagtattcgtgtgccgtgagtcccactgactgcagtgctgttgagccggaggctgagaaagctctagacctgatcaataaaaggcgacgggatggctaccttttccaattgctgcggattgctgatgcccacttggacagagtggtcctatccaggaaatactggaatgactgtgagccacctgattccagacgtccatctgaaatagtgatcggacaatgtaaggtaatagctacaagacattcccatgaatctcaggacctcagagtgattgactttaactgcaccacaagttctgtctcttcagcactggccaataccaaagatagtccggtcctcatagatttctttgaggatactgagcgctacagaaaacaagccaacatagcccttgagaagtacaaagaggagaatgatgactttgcctctttcagagtggaccgaatcgagagagttgcaagagtgagaggaggggaaggaactggttacttcgtggacttctctgtgcggaactgctccagacaccatttccccagacaccccaatgtctttggattctgcagagcaattttgttctatgatgtagaagccttggacttggaaagcccgaaaaaccttgtcataaactgtgaagtcttcgaccctcaggaacatgagaacatcaatggtgtaccgcctcatttggggacatcccttccactggggtgggtcatgagcgtttctttcttacccaccaagnccttccatttcaagcccccntgggatcttagaggatccatnattcattcccca

SEQ ID NO: 313359 - DNA, 778 bp, Homo Sapiens
  misc_feature (669)..(669): n is a, c, g, or t
ggaattggcacgagggcactcattgcagcactgcttttgatcacattgcagtattcgtgtgccgtgagtcccactgactgcagtgctgttgagccggaggctggaaagctctagacctgatcaataaaaggcgacgggatggctaccttttccaattgctgcggattgctgatgcccacttggacagagtggaaaatacaactgtatattacttagtcttagatgtgcaagaatcggactgttcggtcctatccaggaaatactggaatgactgtgagccacctgattccagacgtccatctgaaatagtgatcggacaatgtaaggtaatagctacaagacattcccatgaatctcaggacctcagagtgattgactttaactgcaccacaagttctgtctcttcagcactggccaataccaaagatagtccggtcctcatagatttctttgaggatactgagcgctacagaaaacaagccaacaaagcccttgagaagtacaaagaggagaatgatgactttgcctctttcagagtggaccgaatcgagagagttgcaagagtgagaggaggggaaggaactggttacttcgtggacttctctgtgcggaactgctccagacaccatttccccagacaccccaatgtctttgggattctgcagagcnatttttgttctattgatgttaggaagccttgggactttgggaaaggcccgaaaaaccttgttcattaaactgttgaagtctttcggaccctcagggaacatggaggaac

SEQ ID NO: 313360 - DNA, 642 bp, Homo Sapiens
ccgggctgcaggaattggcacgagggcactcattgcagcactgcttttgatcacattgcagtattcgtgtgccgtgagtcccactgactgcagtgctgttgagccggaggctgagaaagctctagacctgatcaataaaaggcgacgggatggctaccttttccaattgctgcggattgctgatgcccacttggacagagtggaaaatacaactgtatattacttagtcttagatgtgcaagaatcggactgttcggtcctatccaggaaatactggaatgactgtgagccacctgattccagacgtccatctgaaatagtgatcggacaatgtaaggtaatagctacaagacattcccatgaatctcaggacctcagagtgattgactttaactgcaccacaagttctgtctcttcagcactggccaataccaaagatagtccggtcctcatagatttctttgaggatactgagcgctacagctctttcagagtggaccgaatcgagagagttgcaagagtgagaggaggggaaggaactgggtacttcgtggacttctctgtgcggaactgctcagacaccattttcccagacaccccaatgtcttttgattctgcagaacacaattgttctatgatgta

SEQ ID NO: 313361 - DNA, 999 bp, Homo Sapiens
  misc_feature (859)..(859): n is a, c, g, or t
  misc_feature (893)..(893): n is a, c, g, or t
  misc_feature (950)..(950): n is a, c, g, or t
  misc_feature (965)..(965): n is a, c, g, or t
  misc_feature (970)..(970): n is a, c, g, or t
tttctttgaggatactgagcgctacagaaaacaagccaacaaagcccttgagaagtacaaagaggagaatgatgactttgcctctttcagagtggaccgaaccgagagagttgcaagagtgagaggaggggaaggaactggttacttcgtggacttctctgtgcggaactgctccagacaccatttccccagacaccccaatgtctttggattctgcagagcagatttgttctatgatgtagaagccttggacttggaaagcccgaaaaaccttgtcataaactgtgaagtcttcgaccctcaggaacatgagaacatcaatggtgtaccgcctcatttgggacatcccttccactggggtgggcatgagcgttcttctaccaccaagcctccattcaagccccatggatctagagatcatcatcatccccacaagccacacgaacatggacccccacctcctccagatgaaagagatcactcacatggacccccacttccacaaggccctcctccactattgcccatgtcctgctcaagttgtcaacatgccacttttggcacaaatggggcccaaagacattctcataataataattccagtgacctccattcccataagcatcattcccatgaacaggatccccacggacaccattcccatgcacaccattctcatgaacatgatacccatagacaggattcccatggacaccacccccatggacaccattctcatggacaccacccccatggacaccatccccatggacaccatccccactgccatgatttccaagactatggaccttgtgacccaccaccccataaccaaggtcactgttgccatggccacggnccaccacctgggcacttaagaaagcgaggcccangtaaaggaccctgtcccttccattggcagacaaatggatctgtgtaccgactccctnctctaagcaccacanacatnctctaaagccagacattcagccctttcct

SEQ ID NO: 313362 - DNA, 1019 bp, Homo Sapiens
ttttaacaatagtttcaataccatactttattagtatgcccaggtatagcccaagcagtaacagagactctagaattagagttaagtccaggaaagaaggagattctgagtggcatagatttgtctcaagtgatgtagtggtgagtgacagaattaactactaataggcagcactgagttctttcctctcctttccatttgatctctcttctcaggccatctcttttcccattcacattttgctgcatcttcagtatgaaagtaggttgaaaagaactgtaattttcacaattactggtcattttatttatgtttctaattcaatgtattattcattttcctcttcaaaggaatcacattttattttggaaatgtatgtgtaaaaaacatggaaacttgtggaaacccactcttgaacttccctggacatgattcagagactgattgaggaaagggctgaatgtctggctttagaggatgtttgtggtgcggcaatgggaagctgggaaaattggcctcaggaagtggcagcacctcaccttttcttagaggagggagtcggtacacagatccaatttgtctgcaatggaagggacagggtcctttacctgggcctcgccttcttaagtgcccaggtggtgggccgtggccatggcaacagtgaccttggttatggggtggtgggtcacaaggtccatagtcttggaaatcatggcagtggggatggtgtccatggggatggtgtccatgggggtggtgtccatgaggatggtgtccatgggggtggtgtccatggggatgctgtctatgggtatcatgttcatgaggatggtgtgcatggggatggtgtccgtggggatgctgttcatgggaatgatgcttatggggatggaggtcactggaattattattatgagaatgtctttgggccccatttggccaaaagtggcatgttacaacttagcaggacatgggcaatagtggaggagggcccttgtggaagtgggggtccatgtgag

SEQ ID NO: 313363 - DNA, 1703 bp, Homo Sapiens
  misc_feature (236)..(260): n is a, c, g, or t
ttttcaagataggtttttattaatatatggattttattttctggtgctcaagacaatgtaatgctaaactgacaaatgggaatagtcagagtttttttaggtacagtttaattcttaatataaaaagtaaacagatttataagaaacattctaataaatacatcaccatgatttttaaaaataataccattgtccagagttcttgataaagtattgttatagagagtatagagagnnnnnnnnnnnnnnnnnnnnnnnnngaagtgaaactgtatgtacatacttatagcatgacaccaggcctataagtaaggtattttaaagtaaagctttcaaggaaagtacaaatcaggtattgaaattaaattgaagacatagctttactctcttctttgatcataactaaaataatattttagacaaaagctaaaacaaaaagaggatattatacagattgctgcttcttttccaaacacttctcaatatcatcaagcacctgaacggcagcctttggaattcgagtcccaggaccaaatacattggaaacaccaacttcaaacagaaattcataatcctgaggtggtatcacccctccacacatgacaagaatatctggccgtccaagggagttaagttctttgatgagttcaggaactagggttttatgaccagcagcgagggtgcttacgcccacagcatgcacatccgcatccacagcctgctgggccacttcacgaggagtctggaaaagagggcctatgtccacatcaaaaccaagatcagcaaatcctgtagcaataacttttgctcctctgtcatggccatcttgtcccatttttgctacaagaagacgaggtctgcgaccttcacgttccatgaatttatgaaccctcttgatagcagatgttatctctttactttctccaaattcctggcgatatgctccactcaccattcgatcattcgctttatgttcaccaaatacctttttcagggcatctgtgatttctcccactgtacatcttgcccgagatgcatccactgcaagagccaggatatttccatctccgctagcagcacattcggttagtgcagcaagacaacgttcagccaaagcttgatccctgctggatttgatcttcttaagtttttcaatctgcctgtttcgcactgaagtattatcaattgccagaacttctacagcgtcttctttttccaactggtacttatttactccaacaattacttcagaaccagaatctattctagcttgtcttcgggcagcacattcttcaattcgaagtttaggtattccctcagctacagctttggccattccacccatttcttcaatttcattaatgagctttaaagcagcatcataaacatcatttgtgagacattccatcatgtaagaacctccccaaggatcagccactttgggaatcccagattcttcttgaatgatgatttgtgtgttcctggcaattcgagcacttttcacagttggcaaacccaaagcttcatcaaaagaatttgtgtgcaaagactgagtccctccaaatactgctgccattgcttctattgcagtacggacaatattattgtagggatcctgctcagtaagtgaccatccagatgtctgacagtgtgctcttagaagaagagattttgagttttcaggctgaaacattttctctatt

SEQ ID NO: 313364 - DNA, 621 bp, Homo Sapiens
aatggatggaatatgctaaaagatttacttcttatcaaaaaatatttatgggagtgttgctgtttatccatttgtgttaagtggtgaattattcagcaaccttcaggtacttgtctatatatataattattaggtcattcagtcatttcttggttgacaaatgttgaaaagagaattggatgcataaaggcatccagaataaatttttcttaagtaatttcagaagagatgctttcataatgcattaaaaaattcttattttacatttttacagtcatttacttatgtaataaaatgtttaattatattgaatattatggtaaacagatatctttatcacaaaataatgaagttaatggaaccaccatttcatgtttcagatgtacagtgggagaaatcacagatgccctgaaaaaggtatttggtgaacataaagcgaatgatcgaatggtgagtggagcatatcgccaggaatttggagaaagtaaagagataacatctgctatcaagaggtaatatgtaaggtttcttaggcccgaatttcatcttttctgttagcacaattcccttgaatctactgggagcttaatttccttacattcaactgagtattttacttat

SEQ ID NO: 313365 - DNA, 734 bp, Homo Sapiens
  misc_feature (25)..(25): n is a, c, g, or t
  misc_feature (43)..(43): n is a, c, g, or t
  misc_feature (91)..(91): n is a, c, g, or t
  misc_feature (114)..(114): n is a, c, g, or t
  misc_feature (492)..(493): n is a, c, g, or t
  misc_feature (501)..(501): n is a, c, g, or t
  misc_feature (597)..(597): n is a, c, g, or t
  misc_feature (707)..(707): n is a, c, g, or t
tgtgcattcctggtgggccgaaagnacccctcggctgctgggnccaaaaaaccccctagtcccctgaacctcatccaaaagaacttaaacntcccctgggacgggcccagatantcccttgtccatgtggtgggagggggtgataccccaccctcagggattatggaatttcctgtttgaaagttgggtgtttccccaatgtatttgggcccctgggactcgaattcccaaagtctgccgttcaggtgcttgatgatattgagaagtgtttggaaaagaagcagcaatctgtataatatcctctttttgttttagcttttgtctaaaatattattttagttatgatcaaagaagagagtaaagctatgtcttcaatttaatttcaatacctgatttgtactttccttgaaagctttactttaaaataccttacttataggcctggtgtcatgctataagtatgtacatacagtttcacttcaaaaataaagnnaaatcccnaaaaactctctatactctctataacaatactttatcaagaactctggacaatggtattatttttaaaaatcatggtgatgtatttattagaatgtntcttataaatctgtttactttttatattaagaattaaactgtacctaaaaaaactctgactattcccatttgtcagtttagcattacattgtcttgagcaccagaaaatnaaatccatatattaataaaaacctatc

SEQ ID NO: 313366 - DNA, 872 bp, Homo Sapiens
  misc_feature (765)..(765): n is a, c, g, or t
agcagatcaccaccagcagatgtttaatattaagcagttattgaaagctcaagtggttcatcactttctactgacttgtcaggttttgcaggaatacaaagaggggcaactcacacccatgccccgagagatggcaagatctttcaggagaaagtgcggtcaatcatgtacctgaggcattccagcagtggaggaaggtcccttatgagccctggatttatggtaataagcccatctggttttactgcttcaccatatgaaggaagagaattccctctaatattaattccacaacagatggccgccccatatgctgccgttcctagaagcctaccagcattcccctacttcttcactactaacgcaatccacaaaaactgactggaagtttgggttgtagtatcgacaggttacaaaatattgcagatacttatgttgccacccaatcaaagaaacaaaattctttggggagttccgacacactgaaaaaaggcaaagaggacgcattcatcagtagctgtgagtctgcaaaaactgtttgtgaaatggaagctgtcctctcagcccaggtctctgtcagtgatgtcccaaagggagtgctgggatttccagtggtcaaagcagatcataaacagttgggagcagaacccaggtcagaagatgacagtcctggggatgagtcctgcccacgccgacctgattacctaaagggattggcctccttccagcgaagccacagcactattgcaagccttgggctagctnttccttcacagaacggatctgcagctgttggccgttggccaagtcttggtgatagaaacactgatgattgggtcacagtgtaactgaagactgtttggtacctatat

SEQ ID NO: 313367 - DNA, 1582 bp, Homo Sapiens
ctgaagaattgccaagatttaatttttttccatttccagttttttaaagtagacacagatttgcttagaataaagctgattttaaaagcacacaaaagttgaacacaaaggagaggattaaattcaccaatgcagagtgataaagaggaaaagatactgagtaggtgccttcagcagaaaactgatcatccagggtgatcacctaataatcggagacttaattccttataatgcaaaagcaagaagagtttagtgtatgaactgtacagctgagtttgtagctctatcttggtttctgttgattatgaacaattagcatagttatatataatctttctttagtagacaacctgcatccatttaaattaaataatactttctacaatagtgtgatatataaggccacaatatttattttggacaaaccccttaaagtagcgattttattatcaatgttattcattcttttgaaatataaagtacttcagctgaattaaggttgcagataatttttaaaatacaacacacatcatgactagtatattaaaattatttatattcagatatttatatctaatatcaaatgaaaatttactaccaaattttcacagtagacattaatcagtctgacatgcttattgatcccataggtgtaattatagatcaacatgattttagtgtctattcttttattttactaaattaggaacgcagcatttacagaacaaataaacacaagtgacgtggccaccccaggatctaacagctcttcagtgagctatgttgcaagctcagaagtaatccactaacgaaccaagtcagactccagttcttcatcaaaaggtgctggtggaggttgtcagacgccttccaatatagatccccaatccgatggccagcaaatgagagagcagcagagatggaaggaaaactttcagaatttctgcagagaatatgccccctttcttcatgacggctcgtgttcctcatgctgagggtggccgtgcgcttcgggtgtttaaagaggaactccttggggggaatattttccggccgacttgaccaatcccatatccaatctgagtttttcttcaagatgctttcaacttctttccttctttcaatatcatcttcctcagactgtgagctgtttttctctccaatgctatgggtatctgtttcagaagctctgttggtatcttgtggtgtctgcgagcgaggtgggctgtcacagtgagagctcttggagctactccgtccagactcatgctgtgcgtccagcagtattttttccatgtctccattataaatagaaaccgaggctggaacgctgcccccgttcccattattgctgaagtgcagttctacccaggagccctgcaggctctcctcctgcatcccgggcgctccgttctgcgacatggcgccagagggcaactgcggcgatcggagtccgcgccgggctgcgggatgtgcttcagctgcgggcggtgggaaagcggaggtcggagcgccgcggcccagctgcgctcccggactgagcggagccccgcagcccggccggaggaactcacagggcccc

SEQ ID NO: 313368 - DNA, 194 bp, Homo Sapiens
  misc_feature (170)..(170): n is a, c, g, or t
  misc_feature (180)..(180): n is a, c, g, or t
aaacacccttaaagcccgacttttctctgaggtgctcaattacatttaaaaccgtttcctgtacaaacagatcacaaatacttttacaactgcacattctccttccagcttacctgtgagctgtttttctctccaatgctatggggatctgtttcagaagctctgttggnatcttgtggngtctgcgagcgagg

SEQ ID NO: 313369 - DNA, 356 bp, Homo Sapiens
  misc_feature (278)..(278): n is a, c, g, or t
tgcacttcagcaataatgggaacgggggcagcgttccagcctcggtttctatttataatggagacatggaaaaaatactgctggacgcacagcatgagtctggacggagtagctccaagagctctcactgtgacaggtaggcgcgcatcaacaagtgtatgtgttacagtgccgatgtcttcagtgggtgacagtcacagctggaagtgcccgtgtcacctctagggacagtgggctgctgttcgcctcgggccgcgttctgggacttgctcctgctntcagtccgtccttatatagggagcctcgccctctttgggggatgcagtgacctggggactttagtctgttgggggagc

SEQ ID NO: 313370 - DNA, 715 bp, Homo Sapiens
  misc_feature (275)..(335): n is a, c, g, or t
  misc_feature (408)..(527): n is a, c, g, or t
  misc_feature (534)..(534): n is a, c, g, or t
  misc_feature (655)..(655): n is a, c, g, or t
  misc_feature (680)..(680): n is a, c, g, or t
aattattaaaccatgtgtaagtttattagaaagttggattttttaacgacgaaaagagaaggacccacacaccttaattttgtacctataagcttgcggtctgtctgcataacatagatttagcccagtcttagccttcagcgtctaacactttcctaactattcattttaagtctataagcatgggttaaatgattacctcgtgcctggccttgtgttgggggctctgaggaactctgcaatctttttattttcattttttgagacaggatctnnnnnnnnnnnnnnnnnnnnnnnnnnnnnnnnnnnnnnnnnnnnnnnnnnnnnnnnnnnnngtggggctcaattgatcctcccacctcagcctctcaagtaggctgagattacaggcacatgccaccatgcctnnnnnnnnnnnnnnnnnnnnnnnnnnnnnnnnnnnnnnnnnnnnnnnnnnnnnnnnnnnnnnnnnnnnnnnnnnnnnnnnnnnnnnnnnnnnnnnnnnnnnnnnnnnnnnnnnnnnnnnntgacacncgtgcctgggtctgcaatctttttattgacttggggaaaacaaggaaaattaatcaccaggctaagggtatgtaacaacaggcatgtgaggagggcaggggttcagctaaccatattgggntatggagtggcaaaaggaaccagantttatttcagtaagggacacaaggttgaggaagac

SEQ ID NO: 313371 - DNA, 456 bp, Homo Sapiens
  misc_feature (418)..(418): n is a, c, g, or t
tttgtcagtgaaaccatgtgtaagtttattagaaagttggattttttaacgacgaaaagagaaggacccacacaccttaattttgtacctataagcttgcgttctgtctgcataacatagatttagcccagtcttagccttctgcgtctaacactttcctaactattcattttaagtctataagcatgggttaaatgattacctcgtgcctgggccttgtgttgggggctctgaggaactctgcaatctttttattttcattttttgagacaggatcttgctctgtcacacagggctgggagtgcagtgggtaccatcacaggctcactacaggcctcaacctcgtggggctcaattgatccctcccacctcaggcctcttcaagtaggctgaggttacagggcacatggcaccatgncggggggtaattttttgtaggtttttgtaggagacagg

SEQ ID NO: 313372 - DNA, 1069 bp, Homo Sapiens
  misc_feature (10)..(10): n is a, c, g, or t
  misc_feature (84)..(84): n is a, c, g, or t
  misc_feature (95)..(95): n is a, c, g, or t
ctcaataagntcatctctttgccgcaggccttctttaagctcttccatcttatgctgcagcacactacacatatgttctgcctntctaactcctntgatttttcttcattttctctataaaattctgccatctgttcctcctgctcttcaataacatccttgagtgtgtctacttggtagatcaaattgttcttctcattgtctaactgtgcattggaaaccatggctttcttgtatttttcttccacttcagacaaagattcctttagttctttaagcccctgcatgtatctcccttctacatcctgtatctggtccttaaggtcatagatatcccgcaattcacttaatgaagtgtctggatctattaagctgctggtgtccccacttcctcgtctggatgagtttccacttagaggggttgttgctgaggcagaatttcgagatgaaggtcttgtataattttcagcatactgtttgtcagatttttcatccaactctttttgttgtcgttccagttctctcatgcgtatatctcttgcttctgcccgggcagcccgttttgctgccagccttgcctctgcctctctggcaatgttactcaaagcttcatcttctgcagaaaatcggtctttcacaggtgttcttttccttccagaagcaggagtccccatcttgtgttcttaatagtcttttaactttgaaagtgatttaactgtgttttcagcccttagtgatggtagctctcctttccactgacatttacatctagaccccttcatttatcttcccacatctgtgttagggcgcgcgctgcgactgcgtcgctgtccgggaagggccgaagagctgctcgcccgcccggcgaccgctggggctatgggcgaggggcgcagctggacgactcagtcctgggtccccggccaggcgggcggggatggacgcggcggctcccggcactggcagccggctagtcggtcaggccgatgtgccctctgcgccgcggctgagacagcgggaaccggccccgggaggagccgcagcctgagcggccgactgaggaggcccc

SEQ ID NO: 313373 - DNA, 795 bp, Homo Sapiens
  misc_feature (27)..(27): n is a, c, g, or t
  misc_feature (37)..(37): n is a, c, g, or t
  misc_feature (65)..(65): n is a, c, g, or t
  misc_feature (76)..(76): n is a, c, g, or t
  misc_feature (450)..(462): n is a, c, g, or t
  misc_feature (592)..(602): n is a, c, g, or t
acccgacaacggacccccgggaaagcnaaccgggganagggtcactcccccccactaggtttganaacggtccccngaaagaccccaggctcaagccgcgggacgagctccagttgtagagggcctaattcgcctctgttttgtatttatgttgatttacctaaattgggttcattatcttttatttttccaatatccccagtaaaccccatgtatattatccacttatatttaataatccacagtcttagagatgttcatggtaaaagtactgcctttgcacaggagcctgtttctaaagaaacccatgctgtgaaatagagacttttctactgatcatcataactctgtatctgagcagtgataccaaccacatctgaagtcaacagaagatccaagtttaaaattgcctgcggaatgtgtgcagtatctagaaaaatgaaccgtagnnnnnnnnnnnnnaaatacagaagtcatgttgtttctgcactttataataaagcatggaagaaattatcttagtaggcaattgtaacactttttgaaagtaacccatttcagatttgaaatactgcaataatggttgtctttnnnnnnnnnnnttacattattatgttagctgacagtggtactgattttttaggttggttgttttgcggattcccttagtagtgctagtagcctcgaaccacactttagctaactcactctcgctgcacgtccactcccctctcccctcccctccaggcccaccgctctctacgttgctcaccactcactcacccctttcccctc

SEQ ID NO: 313374 - DNA, 745 bp, Homo Sapiens
  misc_feature (646)..(646): n is a, c, g, or t
aaaaaagaaatgtacctgttaaggtattactttttttcatgctgatgattcatatctaaattacattattatgttagctgacagtggtactgattttttaggttggttgttttgtggatttctttagtagtgatagtagcctgaaccacattttagataactcaattatgtatgtatgtgcatacacatatacaaacacactaatggtagaatgcttttttatgtgctagactattatatttagtagtatgtcattgtaactagccaatatcacagcttttggaaaaatttaaaaaatcacactatattaatattttatatttgccaacagaaacatggcagataggtatcaatatgttttcaatgcctgatgacctataagaagaaagtattgaaaagaagagagattagaactgttagaaggagttgaaattttctaaaagacatagtatttagtttataattaaatgcattcttgaagtccagtgtgaattttattaatgctatcatctcgaccaagctcaaagcctacttattagaaacaatgaagttcacaataggtcataaggtctcttccttttcttatgagtctcaacaaagactacctttggctaaatgtctagaagcagagaagtaaagtgagcanaatccagtgttgaggagtcatgacagtactttgatctttatatactctgaagcatttctttaaacttttctacttttatttgtcattgatacctgtagt

SEQ ID NO: 313375 - DNA, 363 bp, Homo Sapiens
aaacttttctacttttatttgtcattgatacctgtagtaagttgacaatgtggtgaaatttcaaaattatatgtaacttctactagttttactttctcccccaagtcttttttaactcatgatttttacacacacaatccagaacttattatatagcctctaagtctttattcttcacagtagataatgaaagagtcctccagtgtcttggcaaaatgttctagtatagctggatacatacagtggagttctataaactcatacctcagtggacttaaccttttcttatctgcagtattcctccagaagagctaaccagggcagggctggcatgagaagtgacatctgcgttacaaagtctat

SEQ ID NO: 313376 - DNA, 1493 bp, Homo Sapiens
tgaaaaattaaaaaatcacactatattaatattttatatttgccaacagaaacatggcagataggtatcaatatgtttcaatgcctgatgacctataagaagaaagtattgaaaagaagagagattagaactgttagaaggagttgaaattttctaaaagacatagtatttagtttataattaaatgcattcttgaagtccagtgtgaattttattaatgctatcatctcgaccaagctcaaagcctacttattagaaacaatgaagttcacaataggtcataaggtctcttccttttctaaaattgaaagacaagaaatttagtgccaatattgtacagacagaaattccatgtatgagtctcaacaaagactacctttggctaaatgtctagaagcagagaagtaaagtgagcaaaatccagtgttgaggagtcatgacagtactttgatctttatatactctgaagcatttcttcaaacttttctacttttatttgtcattgatacctgtagtaagttgacaatgtggtgaaatttcaaaattatatgtaacttctactagttttactttctcccccaagtcttttttaactcatgatttttacacacacaatccagaacttattatatagcctctaagtctttattcttcacagtagataatgaaagagtcctccagtgtcttggcaaaatgttctagtatagctggatacatacagtggagttctataaactcatacctcagtggacttaaccaaaattgtgttagtctcaattcctaccacactgagggagcctcccaaataactattttcttatctgcagtattcctccagaagagctaaccagggcagggctggcatgagaagtgacatctgcgttacaaagtctatcttcctcataagtctgtaaagagcaattgaatcttctagctttagcaaacctaagccaaaggaaggaaagccacgaagaatgcagaagtcaaaccctcatgacaaagtaggcacaagtctacaataagctaaatcagaatttacaaatacaagtgtcccaggtagcattgactcccgtcattggagtgaaatggatcaaagtttgaattaaggcctatggtaaggtaacattgctttgttgtacttttgaacaagagctcctcctgatcactattacatatttttttagaaaatttaaagttcagaagagaatgtatcactgctgacttttattccaatatttggatggagtaagttttagggtagaattttgttcagtttggatttaatcttttgaaaagtaaattccttgtttactggtttgactataattctctgttatctttacgaggtaaaactgcaagctgactagcatgttctgtgaatctgccattcctaaaaattttataaacacttgatacttttcactgataatggatcgctccaataaacatatattgtgaaaatgcatccccaataaatggaattccttcctgcg

SEQ ID NO: 313377 - DNA, 2151 bp, Homo Sapiens
  misc_feature (102)..(128): n is a, c, g, or t
ttccccgccgtttaccccgctcttctgtttatcctcccttggccctttcacaaaacgggtgtcgcgaatgggccccccggggattttttgcccccgccctcnnnnnnnnnnnnnnnnnnnnnnnnnnncccagggattaaagagatactgttttatttttttaaaaagttatcctcaaagtttcaggcgtgactgttcacctacacataagcaagccaaaaaacagtgtgtggtaaaatcagtggtggaagagccgaaggttcgtatgagcgaggatgattcccagttcgtcgcaggcctcaatcacaactttgtcagcagcagaaccggagggagccgcaatgtacgccacaccactccttttagctctgtctacgttatctcggaaagggaagaaggcatcagagctgatagaaacttcagtcagtttctcaacccattccttcttctctgcctcagtgagtaactcagggacttcctcaaacagtgccttccactttatcaaatcttcatcctcgccaatggttccagtcacatattgatcgatggcattggagatttctgctctcttcactcctgttttaaacttcatcgaaagcacttgtggatggtgtctaagccaccaatagtttgccttatctcctgcaaggcgagtgcagtgtatacgagactgctgtcctgctccaatgccgataacctgcccgttcttggcgtagcacacagagttagactgagtgtacttgacagcaatggtggctacgatgaggtctcggagggcagactctggcaaatctttatttttggtaacaacattgctaaataatgacttgtcgacgacaccattatttctcttctggcttaaatgaagaccaaagagagttcgaacttcattttcatctggtttgtaagattggtccatctgaaggacacaatagtttccatttttctttttggaaagtattgtcaaggcttcttcttcatatcctggggcaattataccatcagatacttctctggaaataatttttgcagttggtacatcacaaacatcggacaatgcaacaaaatcaccaaatgaagacatcctatcagcccctcttgctcttgcatatgccgctgagatgggtgtgagggttttatagagatcataaaccatgcagactttggcctcatcttcactgagtggaattccaacagcagcacctgctgggctgacatgtttgaaagaggcagcggctggaatacctaaagcctccttgagttccttcaccagctgccaggcgttcaaagcatcgcacaagtttataaatccaggggctccatttagaacctgtgatgggaagcttgggctgccagtgtgtacagctgggcaggggtctgatgtgggttcattccatatctcaagggcatctgagatacgcctttgctgtactgtttcctgaaataatctgaaattgcttcatcatattgtgccgtatgagtgaatgccttcaaggctaactggcgtctagtctccaaggaggtgtccttactctcggagctctgcatctccgtggacaccaccacatagtcctctggttcacacaccactgtcactcgagcgtggtttttggctgcagctctcagtaaggttactccaccaatgtcaatttgctccacagcctcctcaacagttacacctggagaagccactgtctttacaaagggatagagattgcaggcaacaactcttataagattgaaatcaagtctggccatgtcagcattatcttctggaatattacgagctaggattccagcatggactgcaggatgcaaagttttcacacgtccccccaacatttcaggaaatcccgtcaactcagagacatctctgactgccagaccagcatccctgagagcttttgcagtccctccggaagcgaccagattcaaaccaagagcggtcaggtttcttgcaaattccacaaggccggttttgtcagagacactaaataaggcgagctggccgggagccatggctgcaggcactgggttcagggcgagcgggaggcagcagcggcggcaccacgtgcgccggtaggagggctgccgggatgtggcgcggacgcgtggtcgacgatatcccgtaattccgggccggttacacca

SEQ ID NO: 313378 - DNA, 604 bp, Homo Sapiens
cacatctcaaggaattcagctgttgaaatcatttgaactaatcaaggaataaatcctaatgttctgggactttattttcacatgttaaatgctggaatatattatgaaaatgttttcaagaaatcacttaagtgttcatagaccagtatttctgacaggtaaaatgctaaaataagctacctgtaataagtgtggattatatttttgggttttgtagaatattgcaaattaaccacacaaaaaatgtttaatttatgcaacaagcatgtttgtgcaaatttcatgggactttaaaaagaataagtatttgagaaaatatctggttcacttacactacatttactgtattattcttttatagcattaggtgccttgtattttaaatctgtgacaaaccatggcaaatttttaagggggaagtattattataaaatgaagaaatatgtatttctaagggctatattgctgtaaacttaattgataaagctctgtttaatttagagttttgaagaaatagtctcccttcaattaagaaattttcataatggaatgatttaaattgaagtgccacagagtattatttatttttttcacatatgaatgg

SEQ ID NO: 313379 - DNA, 866 bp, Homo Sapiens
tttttttctttagggacaattattccagtttccatattaaaattaaaggccctggtttgtaccccaaattccaggttcccttgggggggttcagtcaaaagaggtaagacctccagcttggctcacaagagaagcgtccactccttggccctggttttgggattttgccagccttgagctcatcaataatttcttcaatatccttagctgtcaaatcctcatagtaattgtcatttatttgaaccattggtgcgttcacacaggcccctaaacattccacttctataagagtgaaaagtttgtcaggtgtagtctccccaacctttattccaagctttttctgaatggcctccagtatgctgtcagagtttcgaagcatgcagggtgtagtagtgcagacctgaatgtgatactttccaactggctttcgattatacattgtataaaaagttgctacttcatatactctcattggaggtacttgtaaaacttctgcaaccttgttcatagcagagatgggcaaccacccattctgcctttgggctaaatccaggactggaagaacagctgctgctttatggccttctggatagttttttacaattgcctctatcctcttatagttttctggtgtgaaatcaaatggagtatcagggttattctcaggagtatctctgtgcacaaataaagctcctccagctccattttgcatagctgtcttatgcaaattccttacatgtcttccccagtgggcggtgaggccagccgcccgggcccggagcgccgcggagaagaacatggcgggccacactgttcaccttccccagccgcgccaggcgagaatcccgagcgcgcccagggcgcac

SEQ ID NO: 313380 - DNA, 808 bp, Homo Sapiens
  misc_feature (182)..(187): n is a, c, g, or t
  misc_feature (189)..(189): n is a, c, g, or t
cgtttttttatggggggggattcccaacccttatgtcctggccccgggttttccttagggaaccaggttagggccattttcccttttccctttcgggggcccgggggcccaaaggaatggttttagaaactttttggaggggcggaggcgggcccacaagggtggtttgtgggggggcgtgnnnnnntnggaagattggaagtccatattttatttctctagtgacatatttacagttcaatataaattaaaggcctgcttgtacaccaaatccaggtcccttgggtggttcagtcaaagaggtaagacctccagctggctcacaagagaagcgtccactccttggccctggttttgggattttgccagccttgagctcatcaataatttcttcaatatccttagctgtcaaatcctcatagtaattgtcatttatttgaaccattggtgcgttcacacaggcccctaaacattccacttctataagagtgaaaagtttgtcaggtgtagtctccccaacctttattccaagctttttctgaatggcctccagtatgctgtcagagtttcgaagcatgcagggtgtagtagtgcagacctgaatgtgatactttccaactggctttcgattatacattgtataaaaagttgctacttcatatactctcattggaggtacttgtaaaacttctgcaaccttgttcatagcagagatgggcaaccacccattctgcctttgggctaaatccaggactggaagaacagctgctgctttatggccttctggatagttttttacaattgcctc

SEQ ID NO: 313381 - DNA, 1837 bp, Homo Sapiens
  misc_feature (330)..(330): n is a, c, g, or t
atcattttaaaaagggctttaatactgtttaagtagttcaaataggcttcctcactattaatttgcttcagtaaactcttcagcttaactcattatcttaaatttcagaattaatgaggttttactgtaaaagtagaaaagcaaacacttcaaatgataagactccagtatcacccatactaaaaacttaggcaataaaactgcagtttgaaaagctactgtacaatgcagcaaggactaggtgtcaatactgctggaagcgtagccagggtaaaggaacaggaaatctgcacagtattatccctgtgggttcttagactcattcggaantacaggaactgcaatctcacaatgaaacaaacatactgcttattaggaggcactacagttaaagctttttagaaaagagagagaagtatttttaaatgtaggcacagtggtgagctgttcaaattcagttaggcgtcaacatcacacattagcagcaagatgcagccacacttcaggtttctgaatgacatgagtacagacaaaattgagcaaataaaaaccaaaacaaccactacattaaccctgagcttccacattcccctttcacatgagactaatgcagaccatcataattcaggaaaatgtggctttcattacggtcaaatctcaacatgtctcccgaagagtttataaaataagttattctaaacatgtacatttagctttggaatgatggagagacacagagatatatgtaaacgtcaagagaatcactccactccacgtctgggtccacacccttccaggctttgtctggaacattatgtggctggtgcctgattccacagtgaggatgcaggagcccaggtggtgatggataaagcattaggagacaatcaagtgtcaggaattggtcaataagaacggcttaaataatgatttaacaaggaagacgagtaaaaaacaatcccatttcatctttagaaagaattaagtcactaaatgatttcttctaagttgttgccatttgcttggatgagatcttgaaggttttccattctttctccacccagttaagaacacattgactagaaatttgtgacaagaatctagtaaaggccttttccctcctgctcctcattatgccaatgcaagaacacttatagcttcctgtgcaaagtatttgacatccatgtcttcatcttgacctaacttctgtagtactggcttcacttctccctgtaaagcattggtatctagaattggtccaatcttttgtagagatttggccacattgaagcgaacatttgctacttggtctcctgccatttttaatacgatgggcagcatttgcttagtagttatttcctgaccacaggcctcagacagtgcattaatgcagaataaagtggtcattctatgcaagtaattaggatcatttgccattactaacactttgggaacaatagtattttgggcccactctgtaccaaacttctgaactagtttcatgaggttgttggtggcagcttctcggatggcgtatacatggtccacgagcccagccatatataaagaattcagcttttcatcaaagaattccacacccagctggcctgccagcagcggcatatactcaatgatggccaggcggaccctccatttggcatcttctgccagctccactatggcaggaaggagagactgagagagctgacggattccaatcacttcatttacacaatccaaattggagatgatattcaaacgaacgtcaggacactcatcctttaactgagctaagaaaagaggtagaagatgttcaatggtattttctttgcccacc

SEQ ID NO: 313382 - DNA, 172 bp, Homo Sapiens
tttggaagaaaaggaaggggtttattctcaagcgtctaagggtttacaaacgagggcattttgttttaaaaaggggcagggcgacactggcggcctgaggaggggtccattggctggtgggctggccgagccaccctcaggcccctgcccacccggtccgccctctgcctgg

SEQ ID NO: 313383 - DNA, 644 bp, Homo Sapiens
  misc_feature (111)..(119): n is a, c, g, or t
ttaggaaaataggcacactttcaaagagaggtataggggctttttactgccttcgaaatcacttttaataaaagttgtatgataaatcattaaaaatgcgagtgtaaatannnnnnnnnacctctatcagggtttttatttgaaagtgtgctcttaccatttccttgtttgagtaagagagtgaatggttctgagtgtttaggaaggatttgcttgcttgcagcagaagttctaggaaaagcaggcacctcccaaatatcttgaggacactggcagccttatggtgactaaatccacactttctttaaagagatgcagatgaattacttttctgttatttgtatgtgtggttgtgaaacccatacacaagtggatttggccccatctttgggcagtgaggtcaaatgtgaatatgtgtaaaagtgcttttcagaactgcattactatgagaaaacatcaaaactgctgtagttttccatttctactgtatttcagttgcaacctatttttaataaactttgtatgtatttaagtgtatttgctattgttttgaaagtgctgacaaagtttatatttgtaacatcagccttcctcgcccatctctttccatctgtctcttcttcattaaacacttactgagtatg

SEQ ID NO: 313384 - DNA, 943 bp, Homo Sapiens
  misc_feature (172)..(172): n is a, c, g, or t
  misc_feature (174)..(174): n is a, c, g, or t
gagttttattattccaaaatccagttaagtgtttaatcaaatacaattaaacatttaaaataaaaatcaactatagtagaaccagaggtggatgaaggatagattttatcaatgtgattaaaaatatttaaaaggaggaacagcttcagaaaaggaaacaaaaacacaaaananatattcaaagtgtttatcaggaaaaggaaccctgaatagccctcctagaccacaggctttttaacatgaaacccaacgaatattcaaaattcaaaagtctcagcccttgatattgaggcagtccagaagtagaaatacaccctaaatcacagcttaggagttagtttccaaatatcccttttatcatgatttacattcagaggtgttctatccagagaaaccttttgcatctgtagctgtggcccagagaacggcccagacaggagggcattcctccatttcccctttccacacctttgctctagaatcaggaagagcatcagttaaagttcccaggcccctagaggagggatccagtgaactagtaaaatgcagactaatcaagataaagtggatcccaagaaaggactttccatggtttgaacggtgaatcttcactggtcacccttctggcattaggaaaacaaggtagtatgtgttcttctgatgtttctcatcagtccagctcttccggttccactggggattctgccccagtccaagacccgatgctggtgccaacacacagggtgcaggtcctgccctagaggagctcagcccttgggtctaatccatgattcctttggaatagagcggcccacatggcaccactcaacactgactgcagtcgcactgaacaccaggccagaacaagtgtgggttctactcctgaagcaggcttctagagatcagtatcctcatcacttcattgctaccttctagaatctgg

SEQ ID NO: 313385 - DNA, 1536 bp, Homo Sapiens
  misc_feature (613)..(653): n is a, c, g, or t
  misc_feature (870)..(870): n is a, c, g, or t
actggagactcgggtggccgaggggcttcataccagctgaagagcgacaagccgctggcagccgcggatctcaccgccgctcagggtttttagaacttcagccataaaaatgggcagaattttccttgatcatatcggtggtacccgtctgttttcttgtgcaaactgtgatacgatcctgaccaaccgctcagaactcatctccactcgtttcacaggcgccactggcagagcatttctttttaacaaggtagttaacctgcagtacagcgaagttcaagatcgggtcatgctcactggccgccacatggttcgagatgtgagctgcaaaaactgcaatagcaaactgggatggatctatgagtttgccactgaagacagccagcgatataaggaaggccgcgtgatcctggaacgtgctctagttcgagagagtgagggctttgaggagcatgtaccatctgataactcttgaagatacagagagaaatccatcttttcccaggtctccttcactgaaaacaaaaatctacttacatacactgtcaccttagcatcagagtcggattaatgaactgcggaacaagaggttgtgagaatctaagatggaacnnnnnnnnnnnnnnnnnnnnnnnnnnnnnnnnnnnnnnnnncatccaacagcacgtgtgtagagagaatattatgcagatgccgttaattttttaccctatgtttacatcttgaggcagcagagtctgtctgcagctatgtggtgagctatgtaaggaaaaaaatctgggctgttagagtgaaaaagtgtgttttatgtcaattgtgaaaggaaaatgttaggagtatggtttttaaacttgggcttcattttaaacnttgtgttttaaacccagttatttcacttgatttgctagcttcagagaagagatccgaatctgtgcccagcgctaaaggctcagtgttagcatggcttgtgctggccggtgtgccatattcttgttggagatgaaccgtagcaccagagcccattcttccttgtcagtcttggcccaaagatgtcaccattcctagttatttgtcaccacataattggtgttgattggaaactttttctgagatgggacagaactgctgggttgtctttttccatgtaacttaagcatagtaatataaataaagtaatagttgggatgcttttggtcctgtgttgcttttaaaaacaccttataaaagaggagagtatttgataagcaattttcatagtagtaaagttttttttcatctcttaaactaaattgaccatgcatataatattctttgtttaaatgaaagcatactgttgaaacccgcagtgttgcatttagaaaacagttgaacagaatgtcaatgtgcattcatgcaaaaaaacatttaatctgcatctgttttagaaaagggggaaatgaagcaacttgtctattttgacaagtctgtagagcctaatagtttccatcaaaggcctagatctcttatttagcatttttttcagctcttctctcagaa

SEQ ID NO: 313386 - DNA, 416 bp, Homo Sapiens
caagagttatcagatggtacatgctcctcaaagccctcactctctcgaactagagcacgttccaggatcacgcggccttccttatatcgcttgcagctcacatctcgaaccatgtggcggccagtgagcatgacccgatcttgaacttcgctgtactgcaggttaactaccttgttaaaaagaaatgctctgccagtggcgcctgtgaaacgagtggagatgagttctgagcggttggtcaggatcgtatcacagtttgcacaagaaaacagacgggtaccaccgatatgatcaaggaaaattctgcccatttttatggctgaagttctaaaaaccctgagcggcggtgagatccgcggctgccagcggcttgtcgctcttcagctggtatgaagcccctcggccacccgagtctc

SEQ ID NO: 313387 - DNA, 386 bp, Homo Sapiens
gctgcaggaattcggcactagagaatattattcagatgccgttaattttttaccctatgtttacatcttgaggcagcagagtctgtctgcagctatgtggtgagctatgtaaggaaaaaaatctgggctgttagagtgaaaaagtgtgttttatgtcaattgtgaaaggtaaacccagttatttcacttgatttgctagcttcagagaagagatccgaatctgtgcccagcgctaaaggctcagtgttagcatggcttgtgctggccgttgtgccatattcttgttggagatgaaccgtagtaccagagcccattcttccttgtcagtcttggcccaaagatgtcaccattcctagttatttgtcaccacataattggtgttgatt

SEQ ID NO: 313388 - DNA, 827 bp, Homo Sapiens
  misc_feature (43)..(43): n is a, c, g, or t
  misc_feature (53)..(53): n is a, c, g, or t
  misc_feature (73)..(77): n is a, c, g, or t
  misc_feature (79)..(79): n is a, c, g, or t
  misc_feature (85)..(85): n is a, c, g, or t
  misc_feature (87)..(90): n is a, c, g, or t
  misc_feature (93)..(96): n is a, c, g, or t
  misc_feature (98)..(100): n is a, c, g, or t
  misc_feature (368)..(368): n is a, c, g, or t
  misc_feature (498)..(509): n is a, c, g, or t
cccgcggcgggcaaaacgaaatgggttttaggaaagcttcctncgaagggccngaaggcggcccgacaatggnnnnntntgtttntnnnnttnnnntnnnttgggatctgagaatttgttattcaaaaatacataaaaaattgttaaaactaaccattaggttaaacagccccattaaaaatgcacacagatctgaacagacgcctcaccaaagaagatctacagatggcaagtacacttacaaaaagatgctcaacatactagagaactgaaaaccacaaaaagatagcacagctggtctatatctcttagaactgctaaactctttaacaaatgacaaattgctggaggaaaaacaagaactcttntcattgccggtggaacacagtgtataaggcccaactatgccacccccaaatataatggtaggaaaccagaatatgcaacccccaaatatgtccctttggcttaagaattattcccagctaattattttgnnnnnnnnnnnntgctaaccaaggaagttgttaaaacagagttaaagttacacttgtgtaaggaaaatttacctctataaaggaaatccccctttaaaagctacctcttttgaccccaagaagagaaggataacttaatccctgaagagtcttatcaattgagaatgcatggacttaagtctgtataatgaaccttacccttgtttaatgtgcttttgctggttaactttccactactgcacctcaaatcttctttctttaagtttaagatagtatttatgcttgaattgaaagccacctgttggagatttactcatttttccctgaacc

SEQ ID NO: 313389 - DNA, 891 bp, Homo Sapiens
ggttgtttgggtgtgtgggaactttgctgggccgcggtttatattctttgctcttaggggccaatttttgtgggtttttcgcttatattttcggttccccgcccggtattcagatccgtctttctgtttctgggagacctacagggttatttgttataccacaagatctggctcctatttaatgtaggcttcactaaaatcttctactgtcgtttatacagtcctgtatatagcagtttcatatataatgccagctgttcagtagcaagcatagtcaatcattcccatcgtaatcactgtaacctggtaaccactgttccttctctcatggatactagacatcttgtttccatggccgagtcctgatggaaactagcactgaaagaccggcccagacgcccatgctgcttcttggaaatattgtcttcactctcagatttggcaattccctgggcatgtgttggaggttgtgattcttgtctaatggttccaaatggaaagttccaaaggccaaatctttgccagttaagtctctggaatgctatgatgcaatgcaaatttcccccaaccttctttgtttttctatactgcagtcccctctctaagtgccggatatccaggtattctggattttgagtgtttagatcagtaacaatatctgcccattttttacagtgaatggcaggatgttttctacttgattctccaattaagatccaatattcaacttcctgtggtgagagaggtcccctgctgaatgctttattagctttaacaggggttgcttcgaagccaattggacaaaaataatgattttggcaatgatagatataagccagcgattcatctttcaatccacgggtataactttgacagggcccctgaagccct

SEQ ID NO: 313390 - DNA, 1135 bp, Homo Sapiens
  misc_feature (851)..(851): n is a, c, g, or t
  misc_feature (944)..(944): n is a, c, g, or t
  misc_feature (965)..(965): n is a, c, g, or t
  misc_feature (1016)..(1016): n is a, c, g, or t
  misc_feature (1020)..(1020): n is a, c, g, or t
  misc_feature (1053)..(1053): n is a, c, g, or t
  misc_feature (1060)..(1060): n is a, c, g, or t
  misc_feature (1062)..(1062): n is a, c, g, or t
  misc_feature (1071)..(1071): n is a, c, g, or t
  misc_feature (1073)..(1073): n is a, c, g, or t
  misc_feature (1095)..(1095): n is a, c, g, or t
  misc_feature (1101)..(1101): n is a, c, g, or t
  misc_feature (1106)..(1107): n is a, c, g, or t
  misc_feature (1113)..(1113): n is a, c, g, or t
  misc_feature (1129)..(1129): n is a, c, g, or t
tccaaagcgctggaattacaggcatgagccaccgcgcctggcctgtatatgtgatttctaaaaaatagatgcatgcatatgttaacattgaatagtcaatcactagatgaagatgctctctaccatggtttagattgcaagtgtactttataccattgtttcaacttcaacctttatttttgtatatattttttcaactacttaaactgttcatgaataggcgtactttctgtatttaaaaatggcccctcaagcaccgttaatttacattccagttatttacatgataattcatgacattctgaaacttgcctgtatattatctgaaaaatggatttcttgaggaaaagatctgtttattgtatgtaaggaaaaattttacctgaaaacaaacaaacaaaccctaaaactcagcaccactaccatttccagaagcttttttagcaagtgaatattttttacataatggataataaatggtatttattcatcatgattttctaagtaatgcttatcagccccttcagtggtgttattctaacaaaatgaatacattacaaattattaagttaggcttttcagagttttaatataggaagttactaggcactggacacactggattttgaaatgtttccaaaatgagtaggatacgattaggatcctttaccttttaatatctagtttttcccaaaatgatagtaatatcttttgaaggactatgctttttcaaaagcaaaatcaactctgtataatagcacattctctactttttaaagatcagaaatgctagaattcttgacttttgtgtatgggtagtaaatctagctcactgaaaatcagagtgaaancctttacatttgtgcggatagagaagttaactctccctcatatgtcactgtgctaccataatccctacattttctgtctgttctagtctaagnatattgttatagatggaagtnaggaccattagcccacagatgcgtgtattctctcagacataccggtgtagntgcntatttctgatgtctcttaatgtctgtgaagcantggcacnanaataaatcncnttagactggtagaggctcctcnctttgntgtcnngtggtnccttcgtggacagcgnaataaa

SEQ ID NO: 313391 - DNA, 1364 bp, Homo Sapiens
  misc_feature (72)..(104): n is a, c, g, or t
  misc_feature (157)..(175): n is a, c, g, or t
  misc_feature (205)..(209): n is a, c, g, or t
  misc_feature (211)..(213): n is a, c, g, or t
  misc_feature (215)..(216): n is a, c, g, or t
  misc_feature (219)..(220): n is a, c, g, or t
  misc_feature (222)..(224): n is a, c, g, or t
  misc_feature (226)..(227): n is a, c, g, or t
  misc_feature (229)..(240): n is a, c, g, or t
  misc_feature (627)..(627): n is a, c, g, or t
  misc_feature (898)..(898): n is a, c, g, or t
  misc_feature (957)..(957): n is a, c, g, or t
  misc_feature (964)..(965): n is a, c, g, or t
  misc_feature (974)..(974): n is a, c, g, or t
  misc_feature (981)..(981): n is a, c, g, or t
  misc_feature (1021)..(1021): n is a, c, g, or t
  misc_feature (1023)..(1023): n is a, c, g, or t
  misc_feature (1047)..(1047): n is a, c, g, or t
  misc_feature (1052)..(1052): n is a, c, g, or t
  misc_feature (1056)..(1057): n is a, c, g, or t
  misc_feature (1059)..(1059): n is a, c, g, or t
  misc_feature (1061)..(1061): n is a, c, g, or t
  misc_feature (1073)..(1073): n is a, c, g, or t
  misc_feature (1078)..(1078): n is a, c, g, or t
  misc_feature (1080)..(1080): n is a, c, g, or t
  misc_feature (1090)..(1090): n is a, c, g, or t
  misc_feature (1106)..(1106): n is a, c, g, or t
  misc_feature (1109)..(1109): n is a, c, g, or t
  misc_feature (1189)..(1189): n is a, c, g, or t
  misc_feature (1208)..(1208): n is a, c, g, or t
  misc_feature (1211)..(1211): n is a, c, g, or t
  misc_feature (1223)..(1223): n is a, c, g, or t
  misc_feature (1227)..(1227): n is a, c, g, or t
  misc_feature (1245)..(1245): n is a, c, g, or t
  misc_feature (1266)..(1268): n is a, c, g, or t
  misc_feature (1270)..(1270): n is a, c, g, or t
  misc_feature (1273)..(1274): n is a, c, g, or t
  misc_feature (1295)..(1295): n is a, c, g, or t
  misc_feature (1297)..(1298): n is a, c, g, or t
  misc_feature (1301)..(1301): n is a, c, g, or t
  misc_feature (1303)..(1303): n is a, c, g, or t
  misc_feature (1311)..(1311): n is a, c, g, or t
  misc_feature (1318)..(1318): n is a, c, g, or t
  misc_feature (1334)..(1334): n is a, c, g, or t
  misc_feature (1337)..(1337): n is a, c, g, or t
  misc_feature (1351)..(1351): n is a, c, g, or t
  misc_feature (1354)..(1354): n is a, c, g, or t
aattcccaagccccttttttcaaggcccccaggttttttctatggaaaaacaggtttatgggccctgttttnnnnnnnnnnnnnnnnnnnnnnnnnnnnnnnnnaaaacaaatggtgtaaaaaaatttttttggaggggcgggggccggcccacaannnnnnnnnnnnnnnnnnngttgttgtttgttccgggggttgtgtttannnnngnnntnntgnngnnntnngnnnnnnnnnnnnttccaaagacaatttgattttactttattgaatactatcacacacataatatttacagatgtaattaaacagaatttataagattaccatgtggaatatttttcaaagttaatctgaaactcttaatgaaaatcatcaatacatgtgtgttacaatacaataatagaatgtagaacttttcagccaatatcatgatggttcatttaataaaaactctcttttcaaaaagaggtaagtcggaggaaatataaaaaaaagttcggaaaaaatatttccatatctagtcataatcttccagcttttctgtaaaataaattatagactttctcaattgcatacatgactattttcttaaataccatatttaacttttagcatattggagtngtttttcttttatcgtattttcagcataggtttaaatgtttttcttatgtttcaaaaggaatacataatctaaatttaaaaccacatctgaatattactttaaaaatagcaacgaggcacgtggccaccatcactaccttggctctttattacggctggtccacggaagggaaccacatggacaacaaaagtgagggagtcctctaaccagttctaagtgtgatttattgtagatgccagttgctttcacagacattaagaagacatcagnaatatggcatctacaccggtatgtctgagagaatacacgcatctgtgggctaatggtcntaacttnnatctataanaatattnttagactagaacagacagaaaatgtagggattatggtagnanagtgaaatatgagggagagttaanttctntatnngnanaaatgtaaaggngtttnantctgattttnagtgagctagatttantanccatacacaaaagtcaagaattctagcatttctgatctttaaaaagtagagaatgtgctattatacagagttgattttgnttttgaaaaagcatagttnttnaaaagatattantatnatttttgggaaaaatagntattaaaaggtaagggtatannngnatnnaaaattttgaaaatttaaaananntgngnaagtaaangaaatantttttaaaaaatgganganaaattatatttgtntgnttaatttgtt

SEQ ID NO: 313392 - DNA, 1171 bp, Homo Sapiens
tttttaaaataagatgaattattttatttctgaattctgaaggtctgctgggcttggccaggtgattctcattcttgtggtctcttatgaggtcagtggtggctagggctgaaaccatctcaaagccttcctcactcacatctcatgggtgatcccagctgttgctggaacctcatctgggactatcggccaaaacactcagaacttctccatgtgtctgggcttcctagaagacactgttattggtttttaagtagatcatagccaaagctagagtagcacctggacaagtcacatccacatttatggtatctccttctttgatttgataacttggtgatttatgtttctccctatgcattcctgtttgaaagcgcctatgtcctccaaccatgtactgatagagctgctcaggcacattgagatcagacatacctatcaaattgctgccatgccccaagcagaccatgcccagggccaagccagcagctaaggagtatgactctctgtcagttcagttttccatttcaggaccaggaggccgtcctatctcagccaacaggacttctgcagtatgtctgtgagctgtcccttgatatacaaggccaatgccaaccactgcagccacttggacattgtgaggaacatccagctctgtggacgttgggggtaagagagcaggaatgcgaatgctaagaagccgagtaatagacatatccatggtgcctagttttgcagcagaaacaccaagtagcagtccaatgcttgtcatttcatggcccttggtcaagtagtcatggatattgagagtcgccagcttggtaaggtgcccattcaaacccagagccatgagaaagccagcatactcattggccaactcagcatgcttgggcttattgtaaacaatccaagctgagtcgatctgggaggcaggagctatcttcaggccagcagccacaccattatgaaagctggcccagcttgtcatattgggaggcacatcgatgtttccactattaaggtctactgttgtgttccgaggaggggcacgcccagtcagattcaatttaggaataggcaatggctctgttggaacaggatggtacgaaaacaaggtaaacattcctcgtcctacaggaagagccatagttcgctgacacaattggagcaa

SEQ ID NO: 313393 - DNA, 546 bp, Homo Sapiens
aaaataagatgaattattttatttctgaattctgaaggtctgctgggcttggcaggtagattctcattcttgtggtctcttatgaggtcagtggtggctagggctgaaaccatctcaaagccttcctcactcacatctcatgggtgatcccagctgttgctggagacctcatctgggactatcggccaaaacactcagaacttctccatgtgtctgggcttcctagaagacactgttcaagtagagggcaagacaatcaagaatctcaagctctatttcaaaacatttcttcccactccactactgctctatatatttttcacaatactttataccttctaacgtaatagttattatagaggtacatgtatggtcttactataacataaactccatgagggaagatatttttagttttgctcaatgaaatatccccagtgccaaggaagcactgccctacacattcatccaaatagtaaaataataaatatctatttttaaacactttgttaattctgcacacatttactttttctaaagggagaa

SEQ ID NO: 313394 - DNA, 483 bp, Homo Sapiens
  misc_feature (421)..(421): n is a, c, g, or t
taagattcaaggagcttttcagtgttccacatttctccctttagaaaaagtaaatgtgtgcagaattaacaaagtgtttaaaaatagatatttattattttactatttggatgaatgtgtagggcagtgcttccttggcactggggatatttcattgagcaaaactaaaaatatcttccctcatggagtttatgttatagtaagacatacatgtacctctataataactattacgttagaaaggtataaaagtattgtgaaaaaatatatagagcagtagtgggagtgggaaggaaatgtttttgaaaatagagcttgaggattcctggattggcctggcctcctaccttggaaccagtgtccttccaaggaaagccccagaccaccatgggaagaaggttcccggaggtggtttttgggnccgataggtccccagatggagggttcccagcaacagccggggaatcaccccatggaggatgg

SEQ ID NO: 313395 - DNA, 1569 bp, Homo Sapiens
ttcttcctcttttcacttaaatccactgagtctctcgccaagtcagtgatttaggtaatcccgccgcccctggaatccatttgtgacgccggaactgatgtgccgtaggtggctgcggtcggaggactgttttggtaaaggactagcagttctctgcggagggccggttgatacagttccggtgggagaacgcggctgcgaggttttcggctttggctcctgatatgcagcgacagaattttcggcccccaactcctccttaccctggtccgggtggaggaggttggggtagcggaagcagcttccggggaaccccgggcgggggcggaccacggccgccctcccctcgagacgggtacgggagtccgcaccacacgccgccgtacgggccccggtctaggccgtacgggagcagtcactctccgcgacacggcggcagcttcccggggggccggttcgggtctccgtcccctggcggctaccctggctcctactccaggtcccccgcggggtcccagcagcaattcggctactccccagggcagcagcagacccacccccagggttctccaaggacatctacaccatttggatcagggcgtgttagagaaaaaagaatgtctaatgagttggaaaattatttcaagccttcaatgcttgaagatccttgggctggcctagaaccagtatctgtagtggatataagccaacaatacagcaatactcaaacattcacaggcaaaaaaggaagatacttttgttaacatttctgaaattcaactggaagcttcatgtgtcaggaacatcttggacaaaactttaagttgtgttgatataaatttacccaaagatgatgactttgattggataattagtaaggtctttttgttatttttcatcgtatcaggtattgttgatattagagaaaaaagtaggataacttgcaacatttagctctggaagtacctaccacattttagagatttaccgtttccatatatttaacattcctggttacataatggacatttgtcttttaatgttttttcaatgttttaaaataaaacattttgtcttccaaaaaccggcccgcgccacctgtgattagccccttgccggcccggccccggccccctccaaaaaccttttcttagacaccttctgttgtgggggccgccgggtgccccccaagggttaacgtggaaaccccggggcccaataaccgcgccctttccctaaaggagaaatcccctgcgcccctggacattaggggcgcttgggacatttctttccaccaataacaaataaaccggccccgcgggggggcacccccgaaccccgctgtttttgaaacccatatttcacacaaagggcaagcttctggcgaggcgccctatacctggggactccgagtccacccggggaaatcgccagccgcgaggcttctgataataccaacattgacagcccccggggcgggtggcgcgagtccttttaccaggcacgcggggtgggaaacccctcttcacacacgcgttcctttgcgccccacgccggcgaagccccacc

SEQ ID NO: 313396 - DNA, 730 bp, Homo Sapiens
tataaggaatccacttgaataatcaaagtaaatttatttctgaattacataaggatcatgaaacagaaacattaactctcatgttataaaaacagtagtaaaatacagtacacaggaatgtcaattgaatgacaacaatgaaagtacaatagcaaatgaaaaatagtaacttttaactttaaatacaaagtgaagcaatttaatatgaaattttgttaataagaaaaatatatgtcccatgtctttattacatactgtacaaaataaaatattgcacctttcatataataaatatatacaaagagtatgttacaaatcgatctttcttttaatttaataaccttcaacaatcagatgtgattggatgattaacaactaatcgggctgggtgtgtcctcctcactgtcccccatccattcccaatcaccaaaccctccacatacagtagtgctcaacccagtgtcagtgaagctgaagttagaacaaaagagaccgtgtgctcagaatatggtagagaaactcagcaagcttgtccacagacacatccaaagccaaaatgcactgttcagttattactgaccaggaactaggctcagcagagcctgtggcaggtaactttgttgccaagaagatgtaggcagcaggtgtacaggcagctgagaccctgaataaagaagtatgaccacttatttggacttgtgtgacatctaaagacacaactggtagtata

SEQ ID NO: 313397 - DNA, 668 bp, Homo Sapiens
  misc_feature (609)..(622): n is a, c, g, or t
gggcttacattgataaaatgctttgatagctacaatcaatttcaccttctagtaccagatccaatgcctccttgatcagcagatggatgttactaacacattcattttatatagaactcacacatattcagtttctaaaaatgttttgctctgcaaaactgtgactgctgagagtgggaaagattggagactaaaatgtaatgagaagagaaaaagataaaatgctgacaatttttactaacagaccattaaattataaagtacatacaggtagcttttatgattcaccaagaaacttcacattagtttacaaagtgctatggactctaattttatttttgtttaatccaaccaaaagtgaaaaccacacattatcaaagaattctgaactccttctacatgtcaagttaccagaggttttgaggtgggcagaccccaagacaggtttattttgtttgttttaaaggcaaagcaaaattctcccaattgaaacatctaccaaatacatttgctttgagaattaatttcaaggataaaaaaaatctttttattttccgggcattaatgcccgattcccgggtaccaacacaatgggcgcgctttcccagnnnnnnnnnnnnnngctcgtgcagaatcttggagcttggggaataatgccctaggtggtt

SEQ ID NO: 313398 - DNA, 515 bp, Homo Sapiens
ggggggcagccatggcgtcctatttcgatgaacacgactgcgagccgtcggaccctgagcaggagacgcgaaccaacatgctgctggagctcgcaaggtcacttttcaataggatggactttgaagacttggggttggtagtagattgggaccaccacctgcctccaccagctgccaagactgtggttgagaacctccccaggacagtcatcagaggctctcaggctggaggaggagactgccattgagatgccttgccatcaccttttccattccagctgcattctgccctggctaagcaagacaaattcctgtcccttgtgccgctatgagctgcccactgatgacgacacttatgaggagcacagacgagataaggctcgaaaacagcagcagcaacaccgactggagaacctccatggagccatgtacacgtgaggaggttggggctgagtgctggccctctgcgtcttccttattaaccttgaatcctcattaaaggtttctttacccac

SEQ ID NO: 313399 - DNA, 790 bp, Homo Sapiens
ggggggggattaccaaggccctaagtccatggcccagggattttcctagggaaaacaggcttaggcccatggttcccgttgacctgggtggcccgcgcggggccaaacggaatggttttaaaaaagtttcttgaggggccgaaggcggccgaacagatttttaaagcggacaggtagggggtcatgggggtaaagaaacctttaatgaggattcaaggttaataaggaagacgcagagggccagcactcagccccaacctcctcacgtgtacatggctccatggaggttctccagtcggtgttgctgctgctgttttcgagccttatctcgtctgtgctcctcataagtgtcgtcatcagtgggcagctcatagcggcacaagggacaggaatttgtcttgcttagccagggcagaatgcagctggaatggaaaaggtgatggcaaggcatctcaatggcagtctcctcctcctcaaattccaaaagacacacggggcacttgagctcagcctgagagcctctgatgactgtcctggggaggttctcaaccacagtcttggcagctggtggaggcaggtggtggtcccaatctactaccaaccccaagtcttcaaagtccatcctattgaaaagtgaccttgcgagctccagcagcatgttggttcgcgtctcctgctcagggtccgacggctcgcagtcgtgttcatcgaaataggacgccatggctgcccagccttctgacacagccctcggaccctgctcgatagcggcctagcggcgctggccaat

SEQ ID NO: 313400 - DNA, 636 bp, Homo Sapiens
  misc_feature (529)..(529): n is a, c, g, or t
  misc_feature (540)..(540): n is a, c, g, or t
cgactttctggagtttatttcaaatgattaggaacccagaagcaatgaaagcagctactgaagaagtgaaaagaacattagagaatgctggtcaaaaagtcagcttggaaggcaatcctatttgtttgagtcaagcagaactgaatgacctgccagtattagatagtataatcaaggaatcgctgaggctttccagtgcctccctcaacatccggacagctaaggaggatttcactttgcaccttgaggacggttcctacaacatccgaaaagatgacatcatagctctttacccacagttaatgcacttagatccagaaatctacccagaccctttgacttttaaatatgataggtatcttgatgactacatgccctttggatcgggagctacaatatgtcctggaagattgttcgctatccacgaaatcaagcaatttttgattctgatgctttcttattttgaattggagcttatagagggccaagctaaatgtccacctttggaccagtcccgggcaggcttggngcatttgccgncattgaatgatattgaatttaaatataaattcaagcatttgtgaatacatgggctgaataagaggacactagatgatattacaggactgcagaaca

SEQ ID NO: 313401 - DNA, 748 bp, Homo Sapiens
  misc_feature (124)..(124): n is a, c, g, or t
  misc_feature (126)..(126): n is a, c, g, or t
  misc_feature (144)..(145): n is a, c, g, or t
  misc_feature (149)..(150): n is a, c, g, or t
  misc_feature (152)..(152): n is a, c, g, or t
  misc_feature (159)..(231): n is a, c, g, or t
  misc_feature (234)..(237): n is a, c, g, or t
  misc_feature (241)..(246): n is a, c, g, or t
  misc_feature (248)..(253): n is a, c, g, or t
  misc_feature (255)..(270): n is a, c, g, or t
  misc_feature (272)..(279): n is a, c, g, or t
  misc_feature (281)..(291): n is a, c, g, or t
  misc_feature (293)..(312): n is a, c, g, or t
tcctcccgcgcgggtggggtggtggtgggccccgcccgcggcggtttttctgtggccggggggttgtctccttttgcggcgtggggccttttgggcccactgttttctcttccgccccttgtgngnctcgcccggcgcttcccnncccnntntccgggnnnnnnnnnnnnnnnnnnnnnnnnnnnnnnnnnnnnnnnnnnnnnnnnnnnnnnnnnnnnnnnnnnnnnnnnnccnnnncccnnnnnncnnnnnncnnnnnnnnnnnnnnnncnnnnnnnncnnnnnnnnnnncnnnnnnnnnnnnnnnnnnnngtgaataagttatacttttatttttcagaaacaaaaatgacaagtggcaacttgcctttgtaaaagattaaagagtatcagagtaataagctatctctcatagagacagaagcccgagaaacactattatacagctttcaaaggaagtcctattaaataaatctcacaataatatactttaactcaacaaaacaaaaaccacaaaaaattatacagaactcataaaatggtatatgaatgaaaaagagaaatctttaaatccatacactagaagttctctattaaaatcaaggaggctcaaatcctaaaacagaaagaagaaatacgttaaaacacaatattttttaagagtccaatgaggttattgcagatgtacattttaacatttcatttgctcaatgtattttttttctcattcttggagcacttctgtacc

SEQ ID NO: 313402 - DNA, 2018 bp, Homo Sapiens
  misc_feature (411)..(411): n is a, c, g, or t
ttcctttaaaataaaggtggttttattataaaattctaaaaatgtactttaaagtacagtcatgagaatactgcataagtagaaatgtgtcttcatactgcaaacaatcacacagattttatattgtccatggaattaatacttaaaaaaattcttctttttagttaagaagagtcttcagagcaccattattctaatagaagttattttgcatatcagagttcatctttggtctttttcctatggcaagtacaagggaagaggtcgtcctcagtctgtggttctacccttttcatgccctctcggatttggggctcactcacttgtaaattggcatattcctggaaaagtttgaaataataacagaatatgtcatcgcccatgagattatttcttgcaaattcttgtccntgcttttgctatctttttgggcctcttcatcgtgatctttcgcccatttaagtttttctagcagatcgcacaggttgctcttaactgggaatgtagtgtttccagggctgcagctcattgtaaaaatgttcatagtagatggaatcctgcttcagcacaacactgtcaccaactagcaaatatggcaggcgataagctgctacagtgccatcgatatttatttgatacttatgcttgaagaaatcaaaaaatgaaatatgtttcacaatgggaccatacaggttttcatcgtgtttaaagaagaaaaagttggtgaaagcagcgtctatgagttctgggtgttttctactgagtttaaccagctcgagtctctctttgcggctgtctcgccctctccagacggcagtggaatttttgctttcccagggaggacccgtgttagcttgcacggacatcatatccagacttacccggcccatggtttccagaacagaatcagtcaaatcgtacgtaggcatcacgatatccttggaatctgtggagccacaccaggaaaagatcggatggatgtttgaattggatttctttttttccaaaggccagtctcccaaattaacaaagagctccacatctggcatcttcacctttctagtcaaagaaagtagtatggcatccatgaaaattctaaaacctacatgttcaccatgagtcttgatataaaccttgttatcctttaaggtgtagtgacataggctctgcctctgtccaaatctttttgggatttctactgcaatcttttctggatccacagcagggaaatgtgccagatctctctgaatctgagcaatggtttcagggcagttcatctcccgtagccaggctgcactatcttgcagaggacagtcacagttctcatggtaaaccggcccttttaaaatatatggggatttggccacatgttgcccttggaatttaatttccaccttcagatttttgtagcttgcatacattctgtatcttactatgaaggacccatcttttcggtctaaaacctggactccaactctagtgaattgctcctctggtgctgagactttcacctggaagaccttttcgcctggagaagatgtgaatttattccctgatgtatccactgcctgaatatagaaatagcgggcgggaaggacgacgtctgcttttagcccgggtccccatatttcgctcttctccgggctcagctgcctttctccgccggtctcggcgagtgctggaactgtcgccagaaagaagcaataaagtagcaaagtgccaaacatttacaagacggactctcgaaatgatccaccgataaatgaagaagtgtaagaggtggacagaagcagccgagccttcggcagggacccgccggccgatcgcagcagccaacgcgactgcaaaggttgccgcccggcgtgcagggcaggcgcgcgggtctccgcgaccccaggacaatcaaagcccgtgccccggcgcgcccaggtgagggtcccctggcgttctgctgtcccggccgagaaccgcgctgctcctctctctcaggacaatgatgcacttgagctgctcctgcc

SEQ ID NO: 313403 - DNA, 945 bp, Homo Sapiens
  misc_feature (98)..(110): n is a, c, g, or t
  misc_feature (130)..(165): n is a, c, g, or t
cttgtcaaaaagatttattaacttaaaatagaagtacttcaaatacagacaaaatcaactttccattcaagtttgaatgttcaatatacaagtatggnnnnnnnnnnnnntctgaatcttcatgttgtannnnnnnnnnnnnnnnnnnnnnnnnnnnnnnnnnnnggcactacaaggttctgtaaagaatagaagtgacaatttaaaacacatgaaattctttcctaacttttaagaacaatatataaagtctgaagcaaccaaagtatgaatacagctaatagaaaataaagaatgtaattttttaaattctctctttatacaattcatcaaggttaaacaaaacataaaattcccttaaaaatagggtaataaaatagatgaaatttgtatcactcaatttggtgatactagtaaaaactatagttcatatttatatacaaataatacagtctgtaaaaacagtcttagaatttaaataagctatctaaacgtgttaaaattttaaatcaggacctgatttgttttgctttccattaaatgtcactttttctggtgaaatgtaactgacattgaggtacggataccccttgagccagcaggattggctggttgctgtgcatcggtggacccgctgaaagaaaatggactcgcattactccgacacgtttcctcttggtgggtggggacaacgctctctacaccgacgggtggcacatctgtcttgagtatagaaaggtttgttgggctggaatcgggcatttccctgatgcatgaagttttgatgcaaaccataaggccacgaagctgggacaagggggaaatggggacgcggtgcatgttcccaaggaattggaggagtcagtcctcgaaagcctggctctgaattccccactgcaccactgtttaccagggaatttggagccacagtacggggccagtgtc

SEQ ID NO: 313404 - DNA, 1305 bp, Homo Sapiens
  misc_feature (495)..(503): n is a, c, g, or t
  misc_feature (1273)..(1273): n is a, c, g, or t
tttttcctgtgtgtaagcaataagtgaagttacatttgccctaaccctagggatgattctttacccagttttaaagcccatcatggtattctaaggtgttgacaccctccatcctcagagcaggtcgaaaatattaaatagactggggactctatgatgggcagcctgtgctttttgacttcagtttgctatttttctgtgatcacattagtactgattcatagattctatcttttataattctggagaaaaagatttgttagttttgtaatttttttgtaagaccaaatgtatgtattttagtagctccattgcatgagaagagtgtaactcacactgacttgtgatatcagccttctctgggccttgtgtgtggagagctttctatcttaccaagtggtagggctaaaacaacaacagcctttttggtagtcacatagcagaatgatcagagttacattgcttattccaaaacattggttctttttaaaacannnnnnnnnacccaaagaaaagaataatagaaattactaacaataaatataaattcagagtgttgatataggattcagtatccagagtttatttttaatcttaatcctcagcttcttgggagttgctgggcttcagtgtctctgtggtttcaccagcttagcttgagctctggttattttggatcttttctgccttttttaagtaactgagtcatttttaccacacagcccagcttgcatgtatagctaggaaacatgtattgctctagatagggcagtttaagtctttttaaagaaagttagttcatagatgttgccttttaactcatagacaagcttcagtctttcaaagagagatgtgtgattttcatttactcgctgatattttgtagtttggagatacttgtgggcattattctaactgatacgtagacactcactcggaaatttttggacattatattaaatgagtgctatctgtgaaattggttatattaggtggcttgactaatgttttttctataattgtatatggactgcatttttaaaaaaaccgcatttgcctttatgctagattgtaaaaaattatattagaatgcataagacatgtttttccttcatatgctagacttttcctagcatttcgtatttctgtgttgtcagtgtgtgatttttaaaccggaatttggtttaaaaaaaatctggtggtaatatatgtgagctctggtgtttaccttatgtacactactctctgttgtcaacagataatcatatatagnctgattatctgtagatctgtcttgtcactttt

SEQ ID NO: 313405 - DNA, 802 bp, Homo Sapiens
  misc_feature (48)..(48): n is a, c, g, or t
  misc_feature (65)..(65): n is a, c, g, or t
  misc_feature (86)..(86): n is a, c, g, or t
  misc_feature (139)..(139): n is a, c, g, or t
tgtttaagggaatttgtgggagcccatcccccagaatgagggagtccntaaagatgggattattngtgcctgccttggcctcaaanccgtgtgccttgaacaccccctggaaccctgccctgctcccctctcccccagncccagcctagtttgggggcctggggaagcctcaggcaaaaagagggtttccccaggatgcagattagggtccatggcaggcctttacccggcattgatgtggctcatgtttccaggcagacttggggtcccttaaggtggcaagtcctttatggagagaaaacttgacattcagatgattgtttttaaatgttttacttttggtacagttgatagacatcataaacgatatcaagcttacacttcatatggagttaaacttggtcagtgttaataaaatcaaaacgtgattctactgtacattgcattattcataatttaattgtttgaaattacattaaataaatcaactaattaaatactaaagttttgttcctttttaaaggaaataaccacaagatttttcccagcccaaattccagcgccaattttaggccaactttggctgttttcttccgctgctgagtttgatctgtgaaggtagtgaaatgtggccctgatgtttcttaaccctgatttggtaactaccagccctgacaccatcagtgcttgatgtagcctggaaccccaggcccactgacgcactgggcacggggctctgggtcgaaggctggagccgtcactgttgttcatgtgcatttggagcactgtgggaatagtctgg

SEQ ID NO: 313406 - DNA, 1550 bp, Homo Sapiens
acgtccatccgagcgctgcctcagggatcgataaagtttcactgcagaaagtctccactgcggtatgctgacatctgccctgaaccttcaccctacagcattacaggctttaatcagattctgctggaaagacacaggctgatccacgtgacctcttctgccttcactgggctggggtgatccttggtgcctttgtttccacaaggccttttcctgccccctgccttgccaaagacatttaatcagcacacagctgccagactattcccacagtgctcccaaatgcacatgaacaacagtgacggctccagcctttcggacccagatgccccgtgcccagtgcgtcagtggggcgtggggttccaggctacatcaaagcactgaatggtgtcagggctggtagttaccaaatcagggttaagaaacatcagggcccacatttcactaccttcacagatcaaactcagcagcagtcatgacctgtctgtcacctacactggggatccccaattcccacataagcacttttgggaagaaaacagcccaaagttggccctaaaattggcgctggaatttgggctgggaaaaatcttgtggttatttcctttaaaaaggaacaaaactttagtatttaattagttgatttatttaatgtaatttcaaacaattaaattatgaataatgcaatgtacagtagaatcacgttttgattttattaacactgaccaagtttaactccatatgaagtgtaagcttgatatcgtttatgatgtctatcaactgtaccaaaagtaaaacatttaaaaacaatcatctgaatgtcaagttttctctccataaaggacttgccaccttaaggaccccaagtctgcctgaaacatgagccacatcaatgccggtaaaggcctgcatgacctaatctgcatcctggaaacctcttttgcctgagctccccagccccaaactagctggtctgggagagggagcaggcaggttccaggagtcaagcacacgcttgagcaagcagcacaataatccatcttaagactcctcattctgggatggctccacaattcctaaacagcagtctgcaaactccacaaacaaaggctcttgcatgtaagctctcatgagctttgctttgtcttctccctgatcgaggttgaccatcaactgcctgaggtgtggattgagcaataagcttcttaatgttgcagattcccctaaattctttaaattctgcaaagaaactctgtcttcttcctcatcactattgagaaaatcagctatagagtcatcatcatctttgttttccacaggctttacggttttggtaggaagagctgatcttatttttttctcaacaggacgagtttcagggttgcactgttctttgtgcttccggaagcagactaccgagcagtagggcacgcggcaggctggacagcggtatttgggcttctccaagcagatcacgcagacgacggtgctacatttgagcgacgccatggttttgtggaaggagactgttcagtgcgccgccgcgcccc

SEQ ID NO: 313407 - DNA, 424 bp, Homo Sapiens
  misc_feature (414)..(414): n is a, c, g, or t
gtcgctcaaatgtagcaccgtcgtctgcgtgatctgcttggagaagcccaaataccgctgtccagcctgccgcgtgccctaaacagtgcaaccctgaaactcgtcctgttgagaaaaaaataagatcagctcttcctaccaaaaccgtaaagcctgtggaaaacaaagatgatgatgactctatagctgattttctcaatagtgatgaggaagaagacagagtttctttgcagaatttaaagaatttaggggaatctgcaacattaaggaagcttattggcttcaatccacaccttcagggcagttggatgggtcaacctcgattcaggggaggaaggacaaaggcaaagcttcatggaggagcttttacatggcaaggggccttttgttttgtggggagtttttgcaggactngctgttttag

SEQ ID NO: 313408 - DNA, 664 bp, Homo Sapiens
  misc_feature (70)..(70): n is a, c, g, or t
  misc_feature (93)..(93): n is a, c, g, or t
  misc_feature (133)..(133): n is a, c, g, or t
gtaccataaaggaaggaacaggccgtgttccaaagaaaatttatttacaaaaacagacagtggggccagnattggcccaaccctgaattagcnggaaagtatttgggttaaaaaagggacccaataaattttnagacccatttttgcctttctacccaaacgagacatttatttaaaaatttcaatgttgctgtagctaaaacagcattctttaggggcaattctaattttgttaaaggataagtaatattaatccttatggatacagaataatcttactctagtaagaattcaaaaattatcacagaaatcccaggaaacataatttcattttcaaatgttgcacagcagatttcacatacaatattagcgagggagtgaaattccaaacagtgactcaaaacttctcagtttaggcaactctatgttttattttaacttttcatagagagttttaatacatagctttctagggaaatacttgatttgctgaattaaagataatgtcttgagataaagatgaaataagagaagaataagaatagtcattaggaagagttcaacttatcacatgtaggtaattttgtccctaaatcatctaaatccagatgcaaatggaaatacccagacttcattctaaggagaaatgcacatcctataatct

SEQ ID NO: 313409 - DNA, 955 bp, Homo Sapiens
ggctgggccatgtcatcatgaatttattttcaggcaatatgataatctattaacactcagcatactttgaacttacagaataagtcccacgccatacttcctcattaaggactatcattttacatgagctttttccacaatcacaatgagagaacagattgctacatgtttgctggtaaatgcattcagtaaggcactcaaatcctagacacgaactaagcacagaacgcttttccctgctttaataaattgaaacatgatctcatttccttcattttcaatactttttataaaaagacacccttgtcttgaccttgtcttaacataggtttatataaactaatgcattatcattatagttatattcaagggaatgatttcacattggcggttttttaggtagggataagcgaaagcactgcagcagtttttgagggagtgtcttttttgtggttccccatacttagtacgatgcctggaatgtagcagggactaaatacagtgaacaaatgggcaaacctttaattcccagggatctgctacatattgccttgactggtagatcatttctccagaagaaaggaagaaaccaaaagacaaaaacaatctttttaaacctcacaggattttcttagaaaaaagttttaatttatatatctagtgcaattctctttgtaaaatatatttcataaaaaatccaaagcaaaagccctgtcattcatttatttcaaaagacaaatcatttcagtacttcttccttgaaatgcctgcaatttcttcctctggcctcagagacgggcattggctccatgctttaccatgtcaggataaaaatccaggagggagaaatcttgttgtaatggatagctgttttcatctaacacaaaaaggctctgaatcttcaatacacaaggttctgcgctgactgccaaggagtggaacaggtctgccacaa

SEQ ID NO: 313410 - DNA, 341 bp, Homo Sapiens
ggaagatggcggtggagtcgcgcgttacccaggaggaaattaagaaggagccagagaaaccgatcgaccgcgagaagacatgcccactgttgctacgggtcttcaccaccaataacggccgccaccaccgaatggacgagttctcccggggaaatgtaccgtccagcgagttgcagatctacacttggatggatgcaaccttgaaagaactgacaagcttagtgaagtctacccagaagctaggaagggcactcacttcaattttgcaatcgtttttacagatgttgggactgatgattccatgaccctgcagtcgcaggttccagataggagattcttgg

SEQ ID NO: 313411 - DNA, 845 bp, Homo Sapiens
  misc_feature (32)..(32): n is a, c, g, or t
  misc_feature (43)..(45): n is a, c, g, or t
  misc_feature (47)..(47): n is a, c, g, or t
tgagggccggccgaacatgtgtgttgttgttntttgtggtttnnngntgtatggattaccacacatatatttaacagtacagttttacacagaatgctaagagcacttttcttcatattttacagaagggcttgaaacatacagactattcgtaatcatacaatagcacatccaaatctaactcctaaatagatgatgcattataatttgtttagaatttaaaggcttaatggcaataatcaggggaggaagaagagtatgtttattttacataactgacggaaaaataaattcaacaaatagtaaatagaatttaatatggtctcatgcgccctgaaggaggtggtgcccgatttggaggggtaattgctatgtccaagtaatctcctatctggaacttctgcgactgcagggtcatggaatcatcagtcccctttctgccagacatggtgctgccaatctccttaactcgatagccaggtcttttaacatctgtaaaaacgattgcaaaattgaagtgagtgcccttctttctagcttctgggtagacttcttttactaagcttgtcagttctttcaaagttgcatccatccaagtgtagatctgcaactcgctggacggtacatttccccgggagaactcgtccattcggtggtggcggccgttattggtggtgaagacccgtagcaacagtgggcatgtcttctcgcggtcgatcggtttctctggctccttcttaatttcctcctgggtaacgcgcgactccaccgccatcttcctcctacggcctgcgagacgctcgccctgacctccgacccctgcagcgagcatgagcactaagtct

SEQ ID NO: 313412 - DNA, 1166 bp, Homo Sapiens
  misc_feature (51)..(51): n is a, c, g, or t
  misc_feature (1046)..(1069): n is a, c, g, or t
ttattttttattttaatcatacgtagtacagttatgaagtcacattcaatnccactgaatatattcaaggtattaataaaaatattatacatctttattcactatcttaatataattaaagtatttggttcttataggtaagattaattaccatattcattcatatatgcactgctagtcaaacaacatggaaatgaatgtatggattatgatagtgggggttcagtcctttttgatctgaagtctaagtttcaaaagtgaatgttttcttttttaaatgtcacaatatttgaatcctagaaagaataggcaactaatttaaggcaagatattgaaacttttatacaactttaatttgaaaaaagaaatgatcaaagatcatacatgccttaacatttagatacctatagattcatataaaggcagtaataaaaatatcagtgcaagttctacattgggttcctcagtagagaaaataataggttctttgagtggaaccattatcttcaaatcccaaaacactggcaagaagaaataattcttctgatgcaggacaacatgtagcataattatttttagtcaataaaggtgagtataaaatattgtgattatacataaaaattagtgtcttggccagtttgttaaactttttttagatttactttaatgtcagcttttaaaaaatgcttaaaaatccaactgatttaaaatttattgatagtagtagtgcaaagaggctccactctactttttggtacgggctgaagattagcatttcataaagaaataaactatatgtaaaatgtatgtgtgtttgaatgagtaaagaaggcacaaatgagttaaattaagagaaaacattaccacttgttctgaactcttaactgtacagtattataatatacacttagatatgaatccagatttcttataatggaagtgacaggacattttttagctctattatttgtgctaaaagacactgtcataatagactgcaaaaggcagtacatgttgagtctaattaacgacctctaccaagacannnnnnnnnnnnnnnnnnnnnnnnaaattacagtggctaaggtgataaccgaacgcgtgggtcgacgatatcccgggattccggaccgtaccgccgcttttagacagctgttcattccgca

SEQ ID NO: 313413 - DNA, 699 bp, Homo Sapiens; identical to SEQ ID NO: 63024

SEQ ID NO: 313414 - DNA, 984 bp, Homo Sapiens
  misc_feature (16)..(16): n is a, c, g, or t
  misc_feature (48)..(48): n is a, c, g, or t
  misc_feature (68)..(68): n is a, c, g, or t
cccagcacgacggtanaacgacggccagtgaatttttttatatgatanagacataaagtgatttatangttggggagaatttatgatcaaaggattgtctccaatagggtatatctgaggttccataccaggagcgtcattaaaattgatgccaattttatgaaatatgttcattttgaagcagatgtgtattagtagacaagccaataatttaaacatactcaatgaaaattccatagtgcaattttatctaaggtattttatgattactctcttagagccacagttttaagcagctttttcctaaactaggctcgttattaattttcaacacttcatactatgatgaagacatcacatactttagacagccttaatagaacaaattattcaacaaagttgattatacgttctataaagtaaatcacattctctcattgagtgagctgagtctttctgagtgtggggacagagtccctgcagtcaggagctccaaggcatagaactgcctgccctgctctgtccagcaggtaatgctgcattccacaggcctcttcttcagccttgcccactcagcagagtacctcaggttgtgaccatgaacgactgatgagagtaacttctgacttgctcaggggatcctcttgccatcaattcccttcagtatgaccaaccgcagtggcttactcgcttcttgtccagaccatccaccatctgtctgccccatgatgctctcaaaccccaaagtcctaatatcccaggcctctttgtctgtgagaggaaatggttccctcactttaagttctgtaggctaatcagaaagggatctctctatagtttcaaaaagtgaaattttacttgcactacagaaataagaaacttacagatttgtccttgaagacctactaacctgcaactttagggtcctgaaagaggattagtatgtttataagtacttttattacagtattttttatttgtttc

SEQ ID NO: 313415 - DNA, 612 bp, Homo Sapiens
caagaccctgtgtccgaaacacataaaaaatactgtgataaaagtacttataaacatactaatcctctttcaggaccctaaagttgcaggttagtaggtcttcaaggacaaatctgtaagtttcttatttctgtagtgcaagtcttaaagtgagggaaccatttcctctcacagacaaagaggcctgggatattaggactttggggtttgagagcatcatggggcagacagatggtggatggtctggacaagaagcgagtaagccactgcggttggtcatactgaagggaattgatggcaagaggatcccctgagcaagtcagaagttactctcatcagtcgttcatggtcacaacctgaggtactctgctgagtgggcaaggctgaagaagaggcctgtggaatgcagcattacctgctggacagagcagggcaggcagttctatgccttggagctcctgactgcagggactctgtccccacactcagaaagactcagctcactcaatgagagaatgtgatttactttatagaacgtataatcaactttgttgaataattgttctattaaggctgctaagtatgtgatgtcttcatcataatatgaagtgt

SEQ ID NO: 313416 - DNA, 273 bp, Homo Sapiens
  misc_feature (196)..(196): n is a, c, g, or t
  misc_feature (261)..(261): n is a, c, g, or t
ataaaaaatactgtaataaaagtacttataaacatactaatcctctttcaggaccctaaagttgcaggttagtaggtcttcaaggacaaatctgtaagtttcttatttctgtagtgcaagtaaaatttcactttttgaaactatagggggatccctttctgattaggcctacagaactttaaagtgagggggaccnttttcctcttcacagacaaagggggcctgggggtttttgggacttttggggttttgtggagcatnatgggggcagac

SEQ ID NO: 313417 - DNA, 642 bp, Homo Sapiens
gttaatttcaaaactggagaaaaacaaaacaatgaagtctgaagataaagcagaaataatgaaaactttagaggttttgacaaaaaatattaccaagttgaaagatgaggtcaaagctgcttctcctggacgctgtcttccaaaaagtataaaaaccaagactcagatgcagaaggaattacttgacacagaactggatttatataagaagatgcaggctggagaagaagtcactgaacttaggagaaagtatacagaattacagctggaagctgccaaacgagggattctttcatctggtcggggcagaggaattcattcaagaggtcgaggtgcagttcatggccgaggcagggggcgagggcgagggcgaggtgtgcctggtcatgctgtggtggatcaccgtcccagggcattggagatttctgcatttacggagagcgatagagaagatcttcttcctcattttgcgcaatatggtgaaattgaagattgtcagattgatgattcctcacttcatgcagtaattacattcaagacaagagcagaagctgaagcagctgcagttcatggagctcgtttcaagggcaagatctaaaactggcatggaataaaccagtaactaatatttcagctgttgaa

SEQ ID NO: 313418 - DNA, 1697 bp, Homo Sapiens
  misc_feature (1008)..(1008): n is a, c, g, or t
tttagcctgatagtagaaaaaatacctttttattaattattaggaataatccattcatgtaatgcaggatgtatgttggagaaggttaagtacagccacatgaatgaggggaaacgtgcaagaggaacagtggtgagaagggggatggtcccccactttccacaaactataaacagcaacatgaacacagagaatcacaaataagagggtctttcctcatgtctcctctcaccccattcttccataatgagtcccagttggtccctagaggtgccagggcatctggaagttctgggctgggagtggggtgcagtgagtggcctcaaagttgtgcagatgcttccgagccagaaacaaagccagctgccgccgtccatctgcactcatgtcctcccccacgctccaggggaagtcgggcccgtgttctgcctggtaggagcggaggacagacagacaccagtcctcttccacctcccatcggctataaattgaggcttcctccagctgtgaggaggcctccaaccactgcctcaccactcgaagaccctcctctgccatcacccggggataccgatgctgcaggagcttcagcaggaggtcattgcctcggttggacatgatgtcctcaggaaccgtggtggtgatgatctcatccttggttctccggatcagcagtacaggaccctggtatctgcacagctgctccgcgttgtttagattgagatgctgcctcacggtcctggtcaccaggcccctccagctgtctggcatgaccttcaaggccaagggcaccaggtcatcaaaggaggcatccaggatcatggcactaacatctgggtaggacatggctgcccacgtggcagtgaagccgccgatggccccggcgtagatgatgatgtcctggggctggaagcccaggccggtggatggcaaactgggaccaccacatcccatggcattagcctcattctgcgggaatggcacccccgtgctttccagcaaagcctnggatgattccagccccaggactgaatatccagcttccaggggcgtggagacgcagcccaccttcataaaaacccagcattcccctcacagcagatcaccagcttctgtccctggggctcagctgtcccccgccggtccacaaacatggtgtcaatctcattgccatcacaggccagcagctttgcccggcgcccattacactcttccaccagtcgggcctggccctgcagcagcacaggcatgagggccttctgcagcaggtacacagagcctggatacagcatccggcgccctagggtgtgcgccaccaggtagctggtgatctgacaaggcagcttcttaacccggttgaggagggtgtctgctgtcccccggtgcaggggctctgggcgaagcagggccacaccccggcgggaagggccccctcgagactccttccggctgctgggttcttcccagtggaagtcgactggccagctccggaagtcaaagttgtagttggcaagctgcctcttgttttctgaagactggttccgatgtgttgcttccaagatggtgatgaactgccggtactgggggttggtccagcggccaatgcctcggaggcaggccacacctgccagaagtagcagcaatgtcccagcatagtgagaaaacggcaccactttggacaaactcaagtacctttc

SEQ ID NO: 313419 - DNA, 913 bp, Homo Sapiens
cagcccccccttattaaaacccagcatttccccttcacagcaggatccccaggtttttgttcctgggggctcagctttcccccgccggttccacaaaacatggtgtcaatctcattgccatcacaggcccagcagctttgccgggcgcccatttcacttttccccccagtcgggcctggccctgcagcagcacaggcatgagggccttctgcagcaggtacacagagcctggatacagcatccggcgccttagggtgtgcgccaccaggtagctggtgatctgacaaggcagcttcttaacccggttgaggagggtgtctgctgtcccccggtgcaggggctctgggcgaagcagggccacaccccggcgggaagggccccctcgagactccttccggctgctgggttcttcccagtggaagtcgactggccagctccggaagtcaaagttgtagttggcaagctgcctcttgttttctgaagactggttccgatgtgttgcttccaagatggtgatgaactgccggtactgggggttggtccagcggccaatgcctcggaggcaggccacacctgccagaagtagcagcaatgtcccagcatagtgagaaaacggcaccactttggacaaactcaagtaacctttcctgtacaagtagaagaaggcgaagggagaggagtaataagagatggaccagaatactgaagccagtgccaggatgctgtcagcatgtttctccagggcacggggctgatagtacgtatcccaggagctggaatggggggcagtgactgccgttggcgtctcagggacgctggccggggccctttcagagtccctctcccggtagattttgtagagccgggggcctaggacgcagctcagcagcttcgccatggccccggctcgggc

SEQ ID NO: 313420 - DNA, 439 bp, Homo Sapiens
  misc_feature (182)..(182): n is a, c, g, or t
  misc_feature (416)..(416): n is a, c, g, or t
agtagaaaaaatacctttttattaattattaggaataatccattcatgtaatgcaggatgtatgttggagaaggttaagtacagccacatgaatgaggggaaacgtgcaagaggaacagtggtgagaagggggatggtccccactttccacaaactataaacagcaacatgaacacagagantcacaaataagagggtctttcctcatgtctcctctcaccccattcttccataatgagtcccagttgggtccctagagggtgccaggggcatctgggaagttctgggggctggggagtgggggtgcagtgagtgggccctccaaagttgtggcaggatgctttccgaggcccggaaacaaaggccagcttgccgccgttccatcttgcactcatgttccttcccccacggttccnggggggaagttcggggccctgtt

SEQ ID NO: 313421 - DNA, 857 bp, Homo Sapiens
  misc_feature (158)..(162): n is a, c, g, or t
  misc_feature (164)..(165): n is a, c, g, or t
  misc_feature (168)..(169): n is a, c, g, or t
  misc_feature (172)..(172): n is a, c, g, or t
  misc_feature (174)..(174): n is a, c, g, or t
  misc_feature (176)..(176): n is a, c, g, or t
  misc_feature (178)..(178): n is a, c, g, or t
  misc_feature (180)..(180): n is a, c, g, or t
  misc_feature (182)..(185): n is a, c, g, or t
  misc_feature (187)..(187): n is a, c, g, or t
gtttccgtgtgcccccgggattttttccctagggggaaagccgcggcttatggcccccagggttcccctttcccctaagtgggggccccgcggcgccaaaagagaatggttttaggaaaggtttcttgaagggcccgagggcggcccgaccattttgnnnnntnnttnnttntntntntntnnnntngggttttatagatttattttcaaagagtaaaacacatacaatttaaatacaagtccatcagaatcactctgtcagagtcagcaagaatgccaaaatgtgtcctcactgccagacattcgtcactatcatctgagtcctctctcagcaaagccaaagggtctgatactttattcatatacatccttcttatctgcaatgtaatctacaatttcttgtggacacattaacttttcagcatctatatcaggaatttcaaacccaaattcgtcttccatggccatgataatctccacttggtccaaactgtctaagcccaggtctttcataaaatgagaatttactgaaagcttctctgggtcaatcttgtcatagagtttcaatacgtaaagaacacggtcctggatgccctctaacgtcaaaggaggcatgtcgctatactggcggcacaactgtgtaactctaccaggaacctgcgcgagcactaaggccggctgcaaagtcccgagcctcgtctgggtccccgcggagcagagagcggtgctgagaggccgggccacggccagcatccggacccggggcagcggcgcaaaggccgcgggcaggcggctgacataggctgaaaggacacgagacgccatggctacgccaacccaggatgcactgcgccccc

SEQ ID NO: 313422 - DNA, 1273 bp, Homo Sapiens
  misc_feature (22)..(22): n is a, c, g, or t
  misc_feature (35)..(35): n is a, c, g, or t
  misc_feature (42)..(42): n is a, c, g, or t
  misc_feature (790)..(790): n is a, c, g, or t
  misc_feature (821)..(821): n is a, c, g, or t
  misc_feature (826)..(826): n is a, c, g, or t
  misc_feature (838)..(838): n is a, c, g, or t
  misc_feature (845)..(845): n is a, c, g, or t
  misc_feature (847)..(847): n is a, c, g, or t
ccccatgtcctcccgtaaacanccttccctgtaanttaacancgaattccaaaagatgtccattgtcctcccggggaacagttgtaaaatggcaaggcaacaggtccttgaatgaaaacatccatgttccttccttccatgaccctcgcccgtcaagggcaacttgaaactcccaccggcagggtggtggttcctgtaagggggtgcagcatcggccgtcggtacatactcccacagaatttagctcggtatgtccttcatgctggtgcagccagaaagctcaaacttgataggcttggaaattttgggagtacggatgcactttttgcccttcttaatgttctcttccaggttcattcgcaaggcctgaccatgcacaggcggtctgcttctctagcctgcaggaggcgttgtcattggtaacccgggtggagatgcccatcccacaggtcttggaacaggcgctccactctgtggtctggaccaggcagttggctctaatcatagttgggtctgggccaaacgtgtcttccagtcggtaagccgcgagggcaggcccaaccacggtttggtccttgggctcgtcacacacccactcctcgcagcatttcccgggcagcttgaccctcctcgggaaggggcagtcagggctgggcagacgaacgtccatgctgcacaggggcatgcagcccaccgccccgtccaggcacgtgcactggtacttgcagctgctctggaagaactctccgctgcggtacaccgtaccaccgaagatgcagggagcaccatntttggcggtgcacacgccaatcttgcggttngccgnggagccgaagtnacagaanangcccttgtgcgggtcgcaggggtcgcgctcggtgcacagctcgcccagctgcttggcgcagacgcggcagcagccgcagccgtccagcacgaggctcacgcccgccgggcagcgcggcgccggctcgtccgggcaccggcacggcccgctgcagttctggccgacggccggccggctgcagagggcgaggaggaccacgaaggcgacgcggacggggcccatactggcggcggtcatggttggcactgcgggcggagcggagggcgcggtggcggcgagcggggagcggcggggcctggagcgctggcggtggtcggaggtggggaccgggacgcgccgggctgtcgtctcggggctgtcggccggggcggctgccgtcgagctggagggtggagtcgcactggctgtctcctctcagcgggagcg

SEQ ID NO: 313423 - DNA, 1467 bp, Homo Sapiens
  misc_feature (400)..(416): n is a, c, g, or t
  misc_feature (468)..(488): n is a, c, g, or t
  misc_feature (1405)..(1405): n is a, c, g, or t
  misc_feature (1408)..(1408): n is a, c, g, or t
  misc_feature (1437)..(1437): n is a, c, g, or t
tttatagaaaaaatatacactttattttcaactagaaaggtgcaaacatgtaacttttggtcacactctcaacaaataaactgtccgaaaaacagtcatatcaaagtagaaacaaatgcttccaggtgaaaaaactgatcagctatatagagtcactcagtttttaataaaggccatttgttcattaaaagtgaggctaccacatttcctacctagaaatcagcctgccaaggacactgatgcctcccctttgcaaacaatctgttttgacggactgtcattctatctgagcagaatttccatataagtatccatttcatgctttgaacgatcagacaagctttacattctacctatggtgttcagaaattgaggctaacattgaaatatcaaagcattnnnnnnnnnnnnnnnnnggcacaaacaactttaaattaacttagataactgtacatatatatatatatnnnnnnnnnnnnnnnnnnnnnatatttacaatataaattttaaaaaatctggcttgttacaggcaaattcacttgccacaagctgtccagtctaatcgacagggttccgattcctgaacagtgtcattcgaatcagaatgtcagagctgagtctgctgttctgacttaaggaacaacttgactcagtctcttgatggctggagaatgcacatcctagctgtcactggggctacaggcaggtcagtgagcacgctaaaattttccttctcaattacacttcaaatagcaggcatattactcgtataagatgctatctgatgatactaacctttctgctggtaccctcccactgctcctaaagccacaccttaatatacattctggtgctgtgtactaatgtagttccactgtcaagtcttaacattcttcaaaccagtgtctggggttgatagactatttgtttgacatggcacaatgttttgaattgggtgggaatcttttcccccagttagaaaaacagatttaaataacttgtgctactgaaatcatttttacggaaaaatgagatgtgaatcagttcaagttccagtctaatgagttaatgtctctcactctctggcttcatgccatgtctccgtacatcttcctgtagtacagcgattcaaagatgtcattgtctccgggacagttgtaatggcaggcacaggtcttgatgaacatcatgttcttcttcatgacctcgccgtcagggcacttgaactccaccggcagggtggtggttctgtggggggtgcagcatcggccgtcggtacatactccacagaatttagctcggtatgtcttcatgctggtgcagccagaaagctcaaacttgataggcttggagattttgggagtacggatgcactttttgcccttcttaatgttctcttccaggntcngttcgcaaggcctgaccatgcacaggcgntctgcttctctagcctgcaggaggcgttgt

SEQ ID NO: 313424 - DNA, 417 bp, Homo Sapiens
  misc_feature (342)..(342): n is a, c, g, or t
agaaaaaatatacactttattttcaactagaaaggtgcaaacattgtaacttttggtcacactctcaacaaataaactgtccgaaaaacagtcatatcaaagtagaaacaaatgcttccaggggaaaaaactgatcagctatatagagtcactcagtttttaataaaggccatttgttcattaaaagtgaggctaccacatttcctacctaggaaatcagcctgccaagggacactggatgcctcccctttgcaaacaatctgttttgacgggctgtcattctatctgaggcaggaatttcccatataggtatcccttttcatggctttggacggatccggncaggcttttaccattcttcccttggggggtttcagggaatttggggggcttaccattgggaaattttccaagggg

SEQ ID NO: 313425 - DNA, 799 bp, Homo Sapiens
aagtcaatgtgtgaatgctttgatagtgaccaattcctgaatggaaagcctattagaattggctataaaatttggtgtggtacaaccacacagggttatctggtttggtttgaaccctatcaagaagaatcaactatgaaggtagatgaggatcctgatcttgggttaggtggaaatctagtgatgaacttcgctgatgttcttttagagagaggtcagtatccctatcacctgtgttttgatagcttctttacaagtgtcaaattgttgtcagccttgaaaaagaagggggtgagggcaacaggaacaattcgtgagaacaggaccgaaaaatgtccccttatgaatgtagaacatatgaaaaaaatgaagagagggtattttgatttccgagtagaagaaaacaatgagataattttgtgtcgttggtatggggatggcattatcagtctgtgctccaatgctgtgggcatagaaccagtcaatgaggtaagctgttgtgatgctgataacgaagaaatccctcagataagtcaaccatccatagtaaaagtgtatgatgaatgcaaggaaggtgtagctaaaatggatcaaattatttcgaaatacagggtgaggataagaagcaagaaatggtactcaattttggtgagctacatgattgatgtagccatgaacaatgcatggcaactacacagagcctgtaacccaggtgcttctctagaccccttggattttcggagatttgttgcacatttctacttggaacacaatgctcatctgtcagattagggtacat

SEQ ID NO: 313426 - DNA, 546 bp, Homo Sapiens
gcttatcaaaatattttattttaggagacccctcaaaaaaagacccaccacattagacagacgccccaacaacacccttggcctttttttggtctttcctgtatttttccctttttaaatcaactaaaacaatttgatgcttaaaataaaagacaggaaatatttcctgatgagactttagtcgagaatatagatatatttctgatccgggggcgggtgatcaggggcgggggaggagaaggatgtgccaccagtggttcgcgaggttccgtttctcagctcaggagggagcctgggctgcctgggacccgggctagggacccagagctggggctccacagggcctgaccagggccagggaagaagacggaggaggaggaagagaaggcggggctggcggctggggcttgtaatttacatgagaaccgtgctggtcactagcgctgtctgtgtctgtctgtcctgcgggacttctgctctggggagggaggctgggattcagcgtcgttgtcatttcctgtgtggcttcttttccagctgagaaac

SEQ ID NO: 313427 - DNA, 770 bp, Homo Sapiens
  misc_feature (84)..(84): n is a, c, g, or t
  misc_feature (250)..(250): n is a, c, g, or t
ttcaaattttatagagtaggctggggtacccaaacatttccgtggaaggtattcttttaatcccctgccacaaatttcattaanccgcatactccttattatctgtgtttccacgagatttcttgtaatttgcataatcctcagaaatggaatccacattcttcttggcaggaagataaaagagctgtttttgcctggtaattaagtcccagtcatcaacaagccacggttttagctcttcaggaatctntactttaacttcaactctgttcatgaatgtttcctcattttcaacagtaggatctacccgggcccttttcttcccgaggagggtggaggggtctcactggtactgccaccatctccatttccaggtgttttctgtttgttctttttcgttttcacttcaacatttttctgttgcagaccagatgtcttctttcctggggcagcccctctcatcttcccctctgcatactgctcctgattggctttttgaagttctcgctgtttctgcaaattggtgtccacgtatttgagtactctgctctccggaacccattcatcccaatttttattccaaccactgtaatgtatgaagtatttcacttgtttgtcctttatggcaacctttacacactttgcttcataaagaagaggcccatgaaagcacagcactcgctcaccctcctggaatttaggcttcgggtcctgcttcggcgccatttataagtgattcgccgcctcctccttctcccacccaactccct

SEQ ID NO: 313428 - DNA, 2796 bp, Homo Sapiens
  misc_feature (82)..(82): n is a, c, g, or t
  misc_feature (100)..(100): n is a, c, g, or t
  misc_feature (102)..(102): n is a, c, g, or t
  misc_feature (213)..(213): n is a, c, g, or t
  misc_feature (459)..(459): n is a, c, g, or t
  misc_feature (692)..(703): n is a, c, g, or t
  misc_feature (740)..(749): n is a, c, g, or t
  misc_feature (793)..(804): n is a, c, g, or t
  misc_feature (851)..(851): n is a, c, g, or t
  misc_feature (854)..(991): n is a, c, g, or t
  misc_feature (1470)..(1470): n is a, c, g, or t
  misc_feature (1476)..(1476): n is a, c, g, or t
  misc_feature (1485)..(1485): n is a, c, g, or t
  misc_feature (1489)..(1489): n is a, c, g, or t
ttcaacccgctcgaagaagtgggtgttttggtcggcggcggggggaagcatgcatctcttcctatgtggtggtaaaccccancgaccgcaagagacttcntnctgtagagatggcgagcgcgcatatttattccggtcatggagcgctttttatggtggggtggtacagagctctctccctcctccccacactagataattagagaaccaaantctttgtatactgagacgcgtgcggcgagcgtgcgttctggtgcccgcgagcggcggacagccatcaaggctctttatctgctgcaacaagcagggccgctatcacaatgtatgtttgtgttgatgaggcgcttctgtgagtcgaggttatatagtgagggagtgggtagctaatctcgcggccgccgctgtgtgtggagcgagagcttcggtgctccacagtgccgcggcgggcggaagagaggnctccgtggctcaaggggggggtatggatgtcctctcgttgtgctttgtataaaaaggaaagtggagcgggcgtgcgggacgagttggactttctgattctgttcggaggttaccgcgtgtgcgggcgcccggggtgggggagtggtaccccctgggcgggggcgctgggggagagtgccgttgtggcggtgtgttgcgcgacgcgacttcgggtttgcccccggggggggtgnnnnnnnnnnnngtggaaaaccggaggcgcagcgcggggggggcgagannnnnnnnnnaaaacaaaacacgggggccgttctcccttttcttatttgggggnnnnnnnnnnnnaccaaatgctttgaaaagttttttggggggcgaggcggggcgcgccntcnnnnnnnnnnnnnnnnnnnnnnnnnnnnnnnnnnnnnnnnnnnnnnnnnnnnnnnnnnnnnnnnnnnnnnnnnnnnnnnnnnnnnnnnnnnnnnnnnnnnnnnnnnnnnnnnnnnnnnnnnnnnnnnnnnnnnnnnnngaaatttaaagaaaaaatttattgaagatctgaaaaacaattcctaaaagattgacttttccagaaaactagctacacaatgcattgcgtctatcatgttaaaacgtgcattagacacaaatacaaaaaccatgaaacaagccaccattcttcaacaatttgagccaagataaaatgcctaagtaacaacatggatgacttgcaaaggatgggctctttactttaagcaccataaaaaaaaccaaaagcacaaatggatgagtgtgttcagttatatacactgaattgaacctttggcactaggaatcagagcattttgtcatatagcattaacatgtattataaaagtgcgtagtgtcaaaggaatagaaccaccagcattcaaaagcagctttgtcaactaggcaataaaacactctacagcatatccctctgttgtccatcattgaaaacactggcagcaattttgaaatgaaaanaaaagntagataagngaanaggagctattacccccttttattttttctctgtttaaaatcaaacagaaaacaaacatcaattgttatacactaacatcttcaaagcacatcgtttgtacaagagatagactaagaacaaaaatgtgtttacggagatccaaacataagtgagtgagagtgcctctcacacagctttccgatggtactcaggaggagccacttcataatcgctggcactgaacaaagttgcagaattctttgccaggtactttaggaaatcgtgaagataattgagtaataaagcaaggctcttctcatccagaggtgtataagccaacattgctccaattcgtacaaataatctcaggagatgtggcgctccatacacctgggacatgggtgcatcgggatgatctgcaagaatttcagcatactgtggtctctcaaatttatagagtagctgggtacccaacattacgttgaagtattcttttatccctgccacaacttcattaaccgcatactccttattatctgtgtttccacgagatttcttgtaatttgcataatcctcaagaatggaatccacattcttcttggcaggaagataaaagagctgtttttgcctggtaattaagtcccagtcatcaacaagccacggttttagctcttcaggaatctttactttaacttcaactctgttcatgaatgtttcctcattttcaacagtaggatctacccgggcccttttcttccgaggaggctgaggggtctcactggtactgccaccatctccatttccaggtgttttctgtttgttctttttcgttttcacttcaacatttttctgttgcagaccagatgtcttctttcctggggcagcccctctcatcttcccctctgcatactgctcctgattggctttttgaagttctcgctgtttctgcaaattggtgtccacgtatttgagtactctgctctccggaacccattcatcccaatttttattccaaccactgtaatgtatgaagtatttcacttgtttgtcctttatggcaacctttacacactttgcttcataaagaagaggcccatgaaagcacagcactcgctcaccctcctggaatttaggcttcgggtcctgcttcggcgccatttataagtgattcgccgcctcctccttctcccaccacccccgactaccgccccctactctctaccccacccaactccgcgtcagacgcgccgtcaggcactgccagctctacatcctgggccggatttgccagcgcccgcagacctcacagcaccgcgacccgcgcaccc

SEQ ID NO: 313429 - DNA, 787 bp, Homo Sapiens
tttgagaatgtcaaatccagaattactttatataaaagtacccattcttaatatatgaaaagatattttatcattattactttactatatattactgaatacaccagactgcattttctcaaatggcaaatgaggcacatttctctttgattcccccaggaacctcggcatcatctgtcttttggaggattcagattcttacgacatctgtgataccgtccatgaggataccaacggtgcttagtagtaaagaacattttgctaagttgttctatcataggtccttcctcaaggtgttcaactttttcttccaatctggttttcagcacttgatcatgtgtttcttcattattatgcacaggatctggccgagggataggttttgtgtgttcatatggaatgtccacagaagggtggtagcatactattgtcctgccatcagaagtcagagcaagctctacgttgcaattatagtcatctggtagaggagaatacgtagatttatgacaaacacaatataaagctccattttggactggaaataaatgtttcaagatagttctctttgacatcacccattttactgcagctacagccatggtgtttcaagatgcttatcaagtggtatgaaaaaagatgttctgaagagaaactgcttttagaatctgcttctaagcataccaatttctactccttgacggcttctcaccacgaacccgccatcttgtttcaatcctggtctcaccgacgcgtggcgacgcgtggtcgcatctcccaagtccgggcc

SEQ ID NO: 313430 - DNA, 2117 bp, Homo Sapiens
  misc_feature (161)..(169): n is a, c, g, or t
  misc_feature (230)..(262): n is a, c, g, or t
  misc_feature (319)..(319): n is a, c, g, or t
  misc_feature (1673)..(1732): n is a, c, g, or t
agggcgcgtatatatcgcgtgcgcggtgcgatctgtgtggcggggcggggggagagacaagataataggcggggcctgagggctcaccgctaccctctgtctgatcgcatgccggcgcggggtggggatagggggtaatgaggtgcgagattacgaatgtnnnnnnnnncgggtacgcggttcggtaatatgcggcaatggagggggcggatcgtgtaaatgtaaatgannnnnnnnnnnnnnnnnnnnnnnnnnnnnnnnnataacagaagccatatcggggtcatctttagggaaggttggcgggggttggggggtngggcggaacagggtgggtgtggttatctttttgcggtggcgcggtgcccggggggcgattttagttcggaagcctagaggggtgcatttcccttttagacacggatgggagggcaggggtctttcaaaagagagaaaattcagggcatgaagggggttcattcaaatttggaagcgaaaatagcctaagttgtgcactattgccttaggaaagggaaggggaagggtgagggataagggaacagtcaactcagtatcaaacttgagaaagtaaagtcacttctgctcagttctgagtttacaaatatgcttataaagacaaaaagtggtaaaattatatttaatgttcaaatttatttagctgtagtctctataatttctgtacttgaaatggctttgggccactggctgatctatctctgaggtccagattagctggtcagttttcaaatggcaattttatattcctttgttcagattccaagggagtttaggttcagctcatggtcttttggaatgtttagagattattgccaccactccatagccaagctgaccaacttttgctcacttgtatcattctagcctttcagaactattttccccatacacatgtgcagtaattctaataaaggagttttgcttcttctgcagtgtagaggtaatggtaatgaagacacctgcattggaatcacaaactattcctcagaaaaatacatcagactactagaaatgtcattcaggcagttgatttgaatagcaaacttggggagggaagattaactgtgaaacaaaaatatacgaaacattcaaatgcagaacaaagggtctatgctactaaaaatgcccatgacattaaacactccacaaaccccccatctgttgttttaacctaaaaattctattggctaacttatacaataattttgattaataacctgagaagttaaaatcttgaaagtggcaaaagcaaaccgagagagcatcccttacttattggtaccatgttatcaagtcactttttctgggtagccctggttattaaatctccaaattgtaaattataccatctcttcctgtagaaacctgtatgtacatcagattcagtattttggttgttatttcaccaacagcaattccaatttatctttgaaaatgcagcctttattcttagttttaaataacaataatcatgtaagtgcaactaacttagaatcccttgctactgggagtaaaaacctaaataacaagttaataacggattcagcctcaaaaggataatcaccgtgtcagactacccgttcctggaatttaaaaagtgatttatgttgtgtagtcaagtttcacagcatgcnnnnnnnnnnnnnnnnnnnnnnnnnnnnnnnnnnnnnnnnnnnnnnnnnnnnnnnnnnnncatacacatttctattcaaatagtaagattccatattcaaaagtttgtatcacaatatatggaaaagaattaagtaggcggtgcaaagcaacttactttctcctaaaaatgtaatgtcattcctatattttaagaaagctatgtaagtattttgcttttatgacactaggtaggaatgctgcaccactgcccagcagctttattaaacaattaaaacaaaatgttaagattgaccattactcttctccatatattgggtaaaaaactaagagggaagaggaaaatcagtaacctttcaaaactgatgatctttatcagcagaactagactgaatttcattacattttagaatgaacagctctcaacaacaaattatcaagatgcc

SEQ ID NO: 313431 - DNA, 446 bp, Homo Sapiens
cacgttttacatgtacagagtttatttgttgtttttacttaaaaagatacccaactgaaatattactaatgattaaaaacaaattcagagttaattacaaattcagttgaaacaaaatttcagtttggattaaatttacactgtgaattacaatgaagtgtcactcaattgcaaaatgatttccattcatacagcattttgtttttcataaattttgacctctgaccaaagaaaacacagctttttgggtaacattcatgaaaacattgaagcctataatataaatttttattaccactttcaatagtcattaatataaaaagttaacaaatttaaacaacaaagtttaagctggggagagccccctcggggaattccggttcaagctgctgaaccccctgctcaccgccagcagcaggtgcaacctgggagtgcgtgaatgcgtc

SEQ ID NO: 313432 - DNA, 1833 bp, Homo Sapiens
gaaacaatttttctgaaatttatttctaaaagtcagagacaaaactttagaagtgacacatttatactaagcatacatgcgtgagcaaaaaaaataagcacagaatacaaaaatgaaatagtaaaattttaatacagtattctgaatacaagtagaataccactagataagaattgtatttacctaagaaatctatgatagtgtgggtggagataaaccagtttaggatagccacttcactattcacattttaatcagtgctgaccagaagctaaagcaatttcttttaggctaagattggcaaaaaatcatagacccaattttccttgttatgaatcaaatgaacatgttttaaggtgatttgccctcatttaacggtagctggagtaagtcaaaccacagagagcccttacaaagactaagcaccaaatgatgaactgtttgtggcttttgttttgggccatcttaagttttgtgttttccattaacattcatgtgcaaattcttacaggcaaaagttttaacgtgtaagtttcagcttggagatcttgccaactgtacttacaacagttttaaagcaattgatactttcagaacaatctcaagcttaattggttaccattataagatgcagaactttttaatgttttctggtccctgaaaattcaatagggccaaatgcattaactggaaatagcatttttttaaagtcttaatcaaagatgataatggataaaacaactatataggctctcatacacaatctttcttaattttcaccttgtaagaaatgattacaatgtccttcaggcttgttatacacccccacagaatcaagaagaaagccaacaaagaattgaacatttcaacaagctaggaaatatttactgtaagcatattgtgaaattctggaagacatactatcaatactttgagaaaacactattaacatgtgttgaagaaggcagtttataaatgaaacattacaaatcttatgtttatgcataccactctatcataatagaaaaagagctgcgtatgtttatccaatagtatagcaatcacatctcacactcatatagattagagtatatgataggactaactgtacgacaacagatgattcacacctcctacgcagcagaatactcgtccttagaaagatcactccatcatgtgatatcacaacatatccctaatcatgtttctacagggatgtgatacacagttgcgaccaggttaaaccaatcattctgctgtatttatttaactttagacacagttaactagcttcagggaacaaaagttccataatcaatgaagaaacattaataccaaatccccacaacaggatggaaaacatttctaaggagaggatataatcctaacagaatggactatgcccctagttacagtgaatgtgggaattaattaggagtctgaaaaaatacattaagatatataaaatttaagtgattatcaaatcagtagtaactactaaaacttaaatatgaattattgatgtttttctaatgcaacatcatccagtttactgcttaggaccactctcaaagctgatctgccattacattttgctattagtgcaaattaatacccaaataatagggagcagtttgaatcacatggaatttcaaaaaacagaatgattgtgtatctttttgtattctaaaatagtgctataaaactcaatattctagttctaaatctccatcttagaagttaaattaacaggtgcctgcaaattctttttagaggaagtaacgcaaaacacatatggttatgttttgctgctggtctcctcatacatgtgct

SEQ ID NO: 313433 - DNA, 741 bp, Homo Sapiens
  misc_feature (111)..(111): n is a, c, g, or t
  misc_feature (114)..(114): n is a, c, g, or t
  misc_feature (583)..(593): n is a, c, g, or t
accttttacaaccaataattatctttctagaatataaatgttggtctatttgataatgtcccacagattcattagtctgggcccattgttattttttaatctttctgttcncangagtattttccattttcttctcttcaagttcatggcttcctctgtgtgtgcaaatatactcttaaatccctctggtgatttttaaatttttatcattgtagttttccactccagaatttgttatctctttgctgatattcctactttttaatattttttctgattcctttatttctttgtttatgttttccttttgacatttgagtataatgaagacagttgttttaaagtctttgtctggtaagtttgatgtctgggtttctttagggatattttctgtcactttattttgttcctttgaatgagccacactttcccattctttgtatgccttgtaacgttttttgaaaactggacattctaataattataattactatgtggttactctgtaaatcagacctccccctacaaacacagtgatgttttgtggttttaaattttctttacttattatattgttaaggannnnnnnnnnnagtgaaattttccaaagtgatttacaaaactgtttggtttataaggtgtggtcaccgaagtctttttgtttccttaacaaatgttaagctaatgttttgacagtgattttctggtatgtcaggaaccaatcaaacaggcatatacaag

SEQ ID NO: 313434 - DNA, 1928 bp, Homo Sapiens
  misc_feature (187)..(196): n is a, c, g, or t
caataggtatcttctttttttattccagataactacttccactcacaatgagatgaattgtctttttacagaatttagggattccaagttgcctggttttaatataatacatattcacaaaatttacacagctcatgcataccataacttatacagagaacagtttagcagtctgcttaaaatgttnnnnnnnnnntcataaaaagccattgttctgttacacataatctgtactgaagtcataagcatcatcctcttcaatgattttatccaagataaaagaccttgtagactgttcacctgctgtagtctcctcagacagtgcctcccctgtctcttctgcagcaaacatgcctgagctgttttcatcaacttcttcatcaacagtttcctggtcactgtctttgtcatcctccctctcctcctgcttcctttctttccgttttggcaattcttcatgtatgtccttttcttctattattccatttgtcagaccggaagactggaaaaggatgctattggccaaatgagggcccttgatggctcttatgctctgtgcattgttcttttccagttcttccagattgaagccgcttttcatgtctaccacaatactctcattaaaatatggaggaggagtccagatgtagggggatggcaatagtaagctaatgaggcacctgtccactcagaccacagcagtttggcagcaccttccaacatttgggattcccacctttttggtggcataccttcttctctgagcaagcatcagtaaaaaattccagagaattcctgtagcctgggacagtatatttcagtactacctgtcgagcatcagcctgggaaaggatggcactggcagcctccatcggttttactacttcaatacttgctggacttcgcagagcaagcgcagaggaggaattaagtggagatacgatgaagctcggactatctatgattgtgatctgtttgtccaaggggacaacttgcatgctccttgtaagccccatggatacaccaacattacacatctgttcttgttttaagctattgataatgctgcttttccccacatttgggaaaccaattactccaacccgaatggctttgctgcaagtttcctgaaaacctccaagaagtttccaaaggccctctttcccaaagcagacttcacttctgaatggagcagcattcttctttgccttcacacgcttggttatcttccctttatcctttggttttgttgaggctctgaacaccactgttggcaattctttcttcaaataatttagccagctctccaaattctcctttggtaccagatctgatttatttaatataagtaccagctttttctgtccactctggacaatggcctcttctacctgaggacatctgcaaccaagaggatctctggcatccaacacctctaggacaacatcggaggcttcaatcacctttttaagttcttggcagtacagcttctttgaattctgtttgcccgacttggctttgttctcagttttgcaaagcccaaactccttttccataggttccacatttgatggcttaatatcaggattagtttcaagttttcttttcttttctagttccttctgcctgtcaagtttctgctgctgttttagttcttcaagcctctgtttccttagctcagcttccctaagaagagcctccttaaagggagcactgtttggaactcctgggtctttcctaggcttcttgtgaccccgctttttagcctcctttcttaattttcgatgatgttctcgaacctttttttggattttataccgcttatggcaggtcatgcgtttacttgctttctttaacttaggccttttcatattggctgtagaaggaagcacaaacacatcaacctgccgccacccaggcctcgctac

SEQ ID NO: 313435 - DNA, 997 bp, Homo Sapiens
ggcctatcctaggaattgggatctggtttgtccccaaagggggccaacttggcatgctcccctttaagcccccatgggatccacccaacattccaccatctgttctggtttttaagctattgataatggctgctttttcccccccctttggggaaacccaattacttccaaccccgaattggctttgctgcaagttttcctgaaaacctcccagaagtttccaaaggccctctttcccaaagcagacttcacttctgaatggagcagcattcttctttgccttcacacgcttggttatcttccctttatcctttggttttgttgaggctctgaacaccactgttggcaattctttcttcaaataatttagccagctctccaaattctcctttggtaccagatctgatttatttaatataagtaccagctttttctgtccactctggacaatggcctcttctacctgaggacatctgcaaccaagaggatctctggcatccaacacctctaggacaacatcggaggcttcaatcacctttttaagttcttggcagtacagcttctttgaattctgtttgcccgacttggctttgttctcagttttgcaaagcccaaactccttttccataggttccacatttgatggcttaatatcaggattagtttcaagttttcttttcttttctagttccttctgcctgtcaagtttctgctgctgttttagttcttcaagcctctgtttccttagctcagcttccctaagaagagcctccttaaagggagcactgtttggaactcctgggtctttcctaggcttcttgtgaccctgctttttagcctcctttcttaattttcgatgatgttctcgaacctttttttggattttataccgcttatggcaggtcatgcgtttacttgctttctttaacttaggccttttcatattggctgtagaaggaagcctcgtgccgaattcgccacccaggcctcgcttctt

SEQ ID NO: 313436 - DNA, 868 bp, Homo Sapiens
aggtgaaaaaccccccttccaaaggaaagtgttgttcacaaaaagggcccctttctttttccccaaaaagccaggaccttccacctttcggaaattgggaggcaggcattcttttcttgtggccttccacaccgccttggttaatcttccccctttaaccctttgggttttggtggaggctctgaaacacccactgttgggcaattcttttcttcaaataatttagccagctctccaaattctcctttggtaccagatctgatttatttaatataagtaccagctttttctgtccactctggacaatggcctcttctacctgaggacatctgcaaccaagaggatctctggcatccaacacctctaggacaacatcggaggcttcaatcacctttttaagttcttggcagtacagcttctttgaattctgtttgcccgacttggctttgttctcagttttgcaaagcccaaactccttttccataggttccacatttgatggcttaatatcaggattagtttcaagttttcttttcttttctagttccttctgcctgtcaagtttctgctgctgttttagttcttcaagcctctgtttccttagctcagcttccctaagaagagcctccttaaagggagcactgtttggaactcctgggtctttcctaggcttcttgtgaccccgctttttagcctcctttcttaattttcgatgatgttctcgaacctttttttggattttataccgcttatggcaggtcatgcgtttacttgctttctttaacttaggccttttcatattggctgtagaaggaagcacaaacacagcaacctgcctccgctggcgccacgtgtgaactgaagcccc

SEQ ID NO: 313437 - DNA, 541 bp, Homo Sapiens
  misc_feature (37)..(37): n is a, c, g, or t
  misc_feature (54)..(54): n is a, c, g, or t
  misc_feature (135)..(135): n is a, c, g, or t
gaagcctccgatgttgtcctagaggtgttggatgcangagatcctcttggtgcnagatgtcctcaggtagaagaggccattgtccagagtggacagaaaaagctggtacttatattaaataaatcaggtgagtanagagggtaccctttgtcttctgtgtacatgggtgaggtacgaggaaacagttctgatagtccctgaagattgattggatccaactctgttctcggcaaagccggagtacgtgccctttgccagggccattgctaggcagtggggagccagttgacttttacaactgactcaactggtttctactattcttttgccattcagtatttaccatcttttaaataaagagtgtaagctgctatacccagcttattgtgtagtatatttcatctaggaagtgatgacagtgtgacaaattccccacacctacacaatgtcgggtattagttcaagagtgaaataaattggaacgtatgtgacaaaatatttaaatgaaatgcataattatgcatctgagtttgagcggcaa

SEQ ID NO: 313438 - DNA, 742 bp, Homo Sapiens
  misc_feature (326)..(616): n is a, c, g, or t
  misc_feature (619)..(619): n is a, c, g, or t
  misc_feature (626)..(626): n is a, c, g, or t
attctgggaagcggcccattgggtggggaccggaaatggccctttagcccggcttaggccaggaatttaccttaatttattttcacaggctttaaaaaaaccaacacctttgtatcttctttattttaacattcttgtttggttcccattgtgctcctaaaaagtgtagaatataggagcaattttttaaatggttttgctttctgactcatttttggagtcaaatatttcatttattatttggcatgttagcccccctagcaattttacctgaacccaaagagaatagacagagctttctgagctttgaaaaattatgcattcgnnnnnnnnnnnnnnnnnnnnnnnnnnnnnnnnnnnnnnnnnnnnnnnnnnnnnnnnnnnnnnnnnnnnnnnnnnnnnnnnnnnnnnnnnnnnnnnnnnnnnnnnnnnnnnnnnnnnnnnnnnnnnnnnnnnnnnnnnnnnnnnnnnnnnnnnnnnnnnnnnnnnnnnnnnnnnnnnnnnnnnnnnnnnnnnnnnnnnnnnnnnnnnnnnnnnnnnnnnnnnnnnnnnnnnnnnnnnnnnnnnnnnnnnnnnnnnnnnnnnnnnnnnnnnnnnnnnnnnnnnnnnnnnnnnnaanaatccanaaacaaaaattgccgccgaattcgggctcacttggccaatttgcccttttggggggtcgattacaattcactgggccggcgtttacaacggtttgacttgggaaaccccttggcgt

SEQ ID NO: 313439 - DNA, 470 bp, Homo Sapiens
attcggcacagtaaaataccaataaatttttgaaccttaaaaactttgaagaacaaggtaaattggtgttttatttaatgtcctaccctttaatttgttgcattttcctatactctttacactattttatcccaaactatgtatatgaggtgaaaatatatatgaaaagggatactgaagaatatttagtttaaaattaatttcttacgatcacgagcacatggtggcataattacaaagcttggaagtattcaaatagaaaatcaaaggtgtttcaatacagtagaatcccaggactgcattttaaaatcgcctcacagatcacactcgctggtggcaaatatcatcatcgttgctaaaggacagaaaatactgatgtgtgttttaactaactggtatattgatccatgggaggctgcacagaagaccctgcggccaggagggggcattgtcagtggctgcttctcctg

SEQ ID NO: 313440 - DNA, 581 bp, Homo Sapiens
ttttaaaggggaaaaatctttaattgatttctcaggtaatttttttccagattgtacataaagtgttcttatgttctctatttggatgtttcaggagacatacaaatgaaatacagtacatagacaaatgaaatgctaataagaagtaggatgatattaaaatatccttactttgcctgtatggaacaaaggcagtctactccatcggggaatcaaagcaaatgtgaataagaggtttccaccttgcaaaactgtgagcttcatttgccctgggagagaactactaggcaaggcttcacatgacagtacctgtagggatgtccatggggctgtgaagcaggtgtattgtatcgaacatgcagctgcaatgaaggcgtggagctcaggagaagcagccactgacaatgcccctccctggccgcagggtcttctgtgcagcctcccatggatcaatataccagttagttaaaacacacatcagtattttctgtcctttagcaacgatgatgatatttgccaccagcgagtgtgatctgtgaggcgattttaaaatgcagtcctgggattctactgtattgaat

SEQ ID NO: 313441 - DNA, 2171 bp, Homo Sapiens
  misc_feature (136)..(136): n is a, c, g, or t
cagggtatcaatccaagccggtgtggtggagggggtttaccaggtttggccagaaatgggtaaatgtaatataggggcccatttatttgggaagaaggggaacaagggcgggggggtaaaattgagatattgaggncttggctgggggactcccatggggatagaatcccagggaaggaaccttcaagaggcgggcatattggggttgggtttcaaagacggcttcgggtttcccgcccgggcgggtgtttttattgggggaaaaattccaagccactgagttcatgacccaggggttttcgttagggaaaacacggtatgggcccaagtttcaactttacctggctggggccccggcgcgcccaaagggaaatggtttaggaaaggttttttaagggcgcgaggcgggccggacatttttgtgggttattgcggggacgttttggtgggggggctgatacagagtttattgaattagatttttctatttacaactgagatcacatctacatactattttgctagtctacatgggtacattatttccaacaagcttaagacttaccatgaatgggctcattcatacaaaaacacactcacactaattcttttaaaacagtagtgcatacattatactcctcctataaagccaactttgattaaaaaccactagtttcaaagctcagtctctgattttgaagatgaaccaagatatacgccatatgatcctacaatctattttagtcattttgtacagctgctatcttattggactacagtaaatattttttaaaaggacaccaatgaggggcaccatctggtgttaaccttaaccagaaagctggtttcctcctcctccccgcaaaaacctttggccaagagttctccactgtgaagactgaaaggacctggtgacatttcggcatcagtcctgttaccacttggaggtaacagaagcaggctcgtgtcctcctttaattctaccacactacatgactcgcaattggttctgaaattagaacgttcaccatcgtacttaaaatcttaggggcatgaagagtcagctagaacaaggaaaaagaaagtcgcaggtagtaggtaagtaggtgggcacatgaaaagccaagctgctctgtccaacaccagtgtacatgtgctttaactaaatgaactccagaggccaacagcagcagacctgctcaattcaccttccaaatcagaacaagaccaaaaagctcaggcttgagttgtcaactatgcataggttccgccagtgatgaggagctcgtaagcaggatctctactccttctgcacaacacgatgcaagcacacagcatgcccagcagctgaatagctgcaaatgccagtgcggcccagatcacatgcatcatgatttcttgtagcttcttcacaactagagcctcacacccctcagcatagaggtcggaagggtgggccaggctgccattacaattgctggcagtctctctgcagcagctaagagggacactctggtttttggtttctttgaaccaatctgtattttcccagtctgagtagttgtgaattccacaacaatgcagctgtctctgtacataatcaatagcccggctagcagcatcagggttggttccattgtaggtcttatacactttctgaatgctgcgatcaacctcattttccacctttgctctgtaaacatatcccaaaaccactacaacaacttctgtgacaaaaaccaagagcaggatgatgacaaacgtggcaagtccacagcgactttcccggattgtggcacagcagccaattagcccaatgatgaaaagcagggctcctacagctatgatcactacagcagggatgagcgtgtacacatcttcaaagaagtggtcatagtcatcataagtgatgaagacataggctcccacatagcataaaatgccagctgccccccagaagatgaggttgagaaagaccagcacggtcttggaggaggtgatgccgcactggcccatggcgccggtggcccgcgaaggcccggcccggagagcggggctgcgctcaccgagagagcggcaatggcggcggcgcctcctcgctaggaactgcacggcctgcgcggcgctccccgcagcccctgcgccgtcgcgcagccccgaccccagcaagt

SEQ ID NO: 313442 - DNA, 1006 bp, Homo Sapiens
  misc_feature (969)..(969): n is a, c, g, or t
  misc_feature (987)..(987): n is a, c, g, or t
agaagtatagatgttctctaagacctttcttacactaagttagcgacttaccactttctattatttctccatacacagaagaggaaagcccagaagaggaaaggccttgccacactaacttaagttcccacaactttaatgtttgttgagtgtatgtatgattcataagatttctgatcaatactatgtgtgtgacattgaaaggagtcaaaatgaatgtatgactaagctgcatttatcatttattaattgatgacacatttatccaatgataaaagcatttgagaatctcaacttatgcttgagcctctttcataagctattatggtattatattcacacaagttcatgcattgaatttatctgataaggacagattcagaggcataggaagcacattctctaaagatttgaccattagagtcgttacacagaagattctaatgattatttattttgctttgtatttcagaacaatcttactttggatttttgatttaatttcactgaaattcagtcagcattacctgatgctagcatgtgaggcataatctggaagactgaatcacaatttactgctaggggagcctgccaagctttgccattctttcaggggagggtttccctgagaagccagtttttttagatagtcacttggctccagttggggaatatcagggttctgcctgtaatatttctgcaatttctctagaactgtgggcaacccaactgtggaagcatagaacatgggcccgcccttgtgccttggccatccatatccatgtaaatagacaacatcaatgtgctctgggctagcagctatcccttctcccaagatacggaatgcttcattgataagtgaatataagcagcgttcaaggatctcatcctggctaatggtacgtggttcaatgtgatgggtttttctataccgtgataggaatttggaaagccagggatcaggttgcncgtgccgaattcttggcncgaaggcaaaattccctat

SEQ ID NO: 313443 - DNA, 934 bp, Homo Sapiens
  misc_feature (24)..(24): n is a, c, g, or t
  misc_feature (84)..(84): n is a, c, g, or t
  misc_feature (114)..(280): n is a, c, g, or t
cccggccgggtcctcaaaaattcnggcccctcaaaacaaacccctcccgccctcagcccaccccaaagtgcctgggaattaacnaggtgtgaagcccactgtgccccggccccnnnnnnnnnnnnnnnnnnnnnnnnnnnnnnnnnnnnnnnnnnnnnnnnnnnnnnnnnnnnnnnnnnnnnnnnnnnnnnnnnnnnnnnnnnnnnnnnnnnnnnnnnnnnnnnnnnnnnnnnnnnnnnnnnnnnnnnnnnnnnnnnnnnnnnnnnnnnnnnnnnnnnnnagccccttaatttttaactacacaaggcaaaaagtaaaaagagaagaactcttacaacaaaatcatacaaaatatgttttgcaacaattttagatttttcaagattcaaccatttccatatgtaacatcacagaggcttgtcatgacaggaaaactggtgtcattactctatcacagaattgggaaatcctagaaggttagatgttctctaagacccttcttacactaagttaacgacttactactttctattatttctccataaacagaagaggaaagaccagaagaggaaaggcttgcccacactaacctaagttccctgtgctggtttgaagtactcagttcccttaccaatttccaactgtctttttcctacaactttaatgtttgttgagtgtatgtatgattcataagatttctgatcaatactatgtgtgtgacattgaaaggagtcaaaatgaatgtatgacttagctgcatttatcatttattaattgatgacacatttatccaatgataaaagcatttgagaatctcaacttatgcctgagcctctttcattagctattatggtattatattcacacaagttcatgcattgaatttatctgataaggacagattcagaggcataggaagcacattcctaaagat

SEQ ID NO: 313444 - DNA, 689 bp, Homo Sapiens
ttttttttgaaagttagggtcctttattgggggatgtcagcagagaacgtgggacatgaaaacaagtcttaggagtttgagaaggggctcccaggacaggctcctctgctttaaggagcctgtcctgggagaataagcagggccccagtatgtgcagaagttgtcagggggtgcccaggggtatggtgaaggagaggtagtccccaagggcaccccagcggggccggtagatctggaagatggtgatccaggaggtgagcactatcacccagaagaggaagcccacagctgagcgccagacatagcctttgatttggctctgttctgtgtaggctgggacaaggaaggcctctcggaagaaccagaagatgttgaccaaccagagaaaaggcaggaaagcaaacccccccaggtagtacttccggcacaggttcaatttctcctcattggacactcgctccaggttcatagctgcgctggggccgggtcgtcccaagggtctgcggggcaagacccaagccttgaccctaagtaacagatgcaaggatcacgaacaaccacgccccaggagagctcacttcctccggctggggtgccttagctactttcagttatggacgtttgcgcgagacgccccaggtttccctggagattgtagtcttctttgggcgaggcaacactgcacgcat

SEQ ID NO: 313445 - DNA, 1302 bp, Homo Sapiens
  misc_feature (686)..(686): n is a, c, g, or t
  misc_feature (1137)..(1137): n is a, c, g, or t
  misc_feature (1202)..(1202): n is a, c, g, or t
acttcctgcccagacactgagtttgttttcaagggcgatgacgatgtttttgtgaacacccatcacatcctgaattacttgaatagtttatccaagaccaaagccaaagatctcttcataggtgatgtgatccacaatgctggacctcatcgggataagaagctgaagtactacatcccagaagttgtttactctggcctctacctttcctatgcagggggaggggggttcctctactccggccacctgggcctgaggctgtaccatatcactgaccaggtccatctctaccccattgatgacgtttatactggaatgtgccttcagaaactcggcctcgttccagagaaacacaaaggcttcaggacatttgatatcgaggagaaaaacaaaaataacatctgctcctatgtagatctgatgttagtacatagtagaaaacctcaagagatgattgatatttggtctcagttgcagagtgctcatttaaaatgctaaaatagatacaaactcaattttgcatagaaaggtgtattttgaatagttcccatgttgtgttctcacattagagtaatttctatattaaaccatgaaaattgcctttatgagtgatacccatttgagggcctctaaacccttcaatttggtactcacgtgaagagggaaagcggaagatggtaattttnttttatggatgatatggcaggatgattggttctgatcttaccggctagtggtcatttttaaaaaacttgtaccctcttatctgaaatcctgtttctggaatttggccattttaagtgattttgtttgccctcttctataatattcctacttcccataataatgactgatttatttgtaattcaggtatttataaacctattggctacaaagactttgttaaacattatccagtggttttcgtgaaatggaattatgtttatttttatgggatttgggtaaattttaaattgtctagaaaactgaaatttcagttgtcagttgtggaattcagtttttcaattgtggaaatttcctgccaccccaacagtattttttgtgtgttaattaattttgcaaaatgagaatcatggtgtgacactcatctaatttatcttggtgggatggtatggncataataaagagaaagagggtttaattttttccttgaatttggtttccctggggggaatcatagngggaattttaagatttggaaaatcgggggggattcccttattggcccacctggaagaatggattggccggtcaacaacccataaaccgggttaaggggaa

SEQ ID NO: 313446 - DNA, 360 bp, Homo Sapiens
tacggatgaatatggccaggatgaattggttcctgatccttacccggcctagtggtccatttttaaaaaacttgtaccctcttatcctgaaatccctgtttcctggaatttggccattttaagtgattttgtttgccctcttctataatattcctacttcccataataatgactgatttatttgtaattcaggtatttataaacctattggctacaaagactttgttaaacattatccagtggttttcgtgaaatggaattatgtttatttttatgggatttgggtaaattttaaattgtctagaaaactgaaatttcagttgtcagttgtggaattcagtttttcaattgtggaaattt

SEQ ID NO: 313447 - DNA, 634 bp, Homo Sapiens
ttgcagaagaatgcaggaagcatttattgagggccagagctgcattctacaagaggcaagaggcaggacacaggcaatctctagtgggttagaggagaggttggggagagggcagtgacaatgagagaacagccaggcgctggcttgggaactgccggtttctcaaggctgcctcctgctagtcctctgggaaatgcaggtagaaatggatcctctatgctactgcctcagccagaggcctgatggtgtcccttccctgggaggggcccttagccccagtctcctgtgctacaagggacccagcagcaggtaggggctttggtaaatatagtcactcatcattaactgagtaagagcaccttctcatcttcacagcagcaggagcattcctgaggcccaaggagccctctaaggtcactctttcattccaaagcaccctgtcccaaccctatcttccatactgaccttaactccctccagcctcacttgggggttccagatctaacatcaccccggtaagtcccaaacccaaactgtccctcacctttagcaacatcctggtatcctttcacctacatacgtttgatcctcagccaattccatacccccagctgatcctgaagctaatattctg

SEQ ID NO: 313448 - DNA, 567 bp, Homo Sapiens
agagagtcccccctccaacctcaaagttgttacaccccactgatcggcctcttgggtgaatatggaggagacagtgactatgaggaggaagaagaggaggaacagacccctcccccacagccccgcacagcacagccccagaagcgagaggagcaaaccaagaaggagaatgaagaagacaaactcactgactggaataaactggcttgtctgctttgcagaaggcagtttcccaataaagaagttctgatcaaacaccagcagctgtcagacctgcacaagcaaaacctggaaatccaccggaagataaaacagtctgagcaggagctagcctatctggaaaggagagaacgagagggaaagtttaaaggaagaggaaatgatcgcagggaaactgacagtgatcgtaaacttgttgataaagaagatatcgacactagcagcaaaggaggctgtgtccaacaggctactggctggaggaaagggacaggcctgggatatggccatcctggattggcttcatcagaggaggctgaaggccggatgaggggccccagtgttggagcc

SEQ ID NO: 313449 - DNA, 1013 bp, Homo Sapiens
  misc_feature (36)..(36): n is a, c, g, or t
aaaataaaaaatataagtggcccggggggcgggganccaaaaatttggaaatgcgggaggtcccacatggggggcttccagtggggggggagatcccaggtaaatggcccctccagaaaacctcccatggtgggaattttgtttcaggagcccgccttcggtttgcccgcgcgggcgggtttttttatttgggggagaaatccacaagcgcttagggtcatgaacccagggtcattcttggggaaaaccgggtagggacccaaggttccactttgccttactgggggcccggcggcgcccaaacgcaaatggttcaggaaaaccttttccgagggcccgaaagcgggccggcaaggaaaaaagggaaaaggggggatggggtttcgggcatggaaaaaaagtttatttaaaaaaagttctagcaggcaagagcagtaacaaaggaaaaggagagccaaacaaaacaagagggaggttgtatcccatggaacttgtctcctttcttaatcgagttctttatatcgagcaagcatgactcttcgagcagcatctcgataagtctcgttggcctgtcttttgctggttcttcctgaggctccaacactggggcccctcatccggccttcagcctcctctgatgaagccaatccaggatggccatatcccaggcctgtccctttcctccagccagtagcctgttggacacagcctcctttgctgctagtgtcgatctcttctttatcaacaagtttacgatcactgtcagtttccctggagtacttaatccgtttcctttctggagagtcaaaagactggagcttttccctgcgatcatttcctcttcctttaaactttccctctcgttctctcctttccagataggctagctcctgctcagactgttttatcttccggtggatttccaggttttgcttgtgcaggtctgacagttgctggtgtttgatcagaacttctttattgggaaactgccttctgcaaagcagacaagccag

SEQ ID NO: 313450 - DNA, 1150 bp, Homo Sapiens
gtgcacaaaaatgcttctggtttgcacacagctgagagttcagcaaagacctgcttcttcaggctcatttcctcaaatactgcttcaggtcctgaccaagggtggccgctctgttgcattttgaaggcttctttttccaagacagaggttatcatcttgtttgcagttgctagctggtttttgtccgagtctacagcaatcacaggaatcctggcccttgcaaaagaaatgacaaatgcctcggcccattgttcccaagccaacaacaccaactgaggagacaggccgcgctgatgctgttttcccacgatgctccggagggagttgaccacttatttgctttcctttcagcgaagaaagcatattgcagggctctagcctgccctgattgcaaaagatatagaaacagctcctcctccttcttgatgcccacttcatagggattactgcacagcagcctggactgcacggacacaagcctcctgtgcaagacacccagggtgctcctccgcatcttcaagagggcctcactaaaaatgctgtccatgttgggcaagctctgaattggcttgttgcagagtctacgggattctagaggttgatctgaaactctctgagcaaatctgattgcttcttcaaccgggtctgagtttacaactttatctagaatgcccagcttgagtgcttcatctgctaaaatacgtcttcaatgaatctgagagtcatctcactttgaaagctgaggtaattaagtcaagtgcagcaggaactccagtgagtctggggagaagctgggttcctcttgcaccagggagaagtcccagtgtaacttctggtaagccaacttgagcctctgcgtgggcaatcctatagtgacagcccagggccagctctagtccccctccgaaagccatgccttggattgctgccaccacgggcttctcatttctctgtatttcatctactacatgtcccagtgtaaggccaaatgtcctaggagcactgaagccacgaattgtatggtctattacagctttctgtagtccttcatgtcacggagtaaagtcgtactgatcgcgttgaccggcgggtttcggaggcggattagcgccaaggcgttgtgcagccgcgtatactcgcccatgtttcc

SEQ ID NO: 313451 - DNA, 719 bp, Homo Sapiens
  misc_feature (682)..(682): n is a, c, g, or t
  misc_feature (699)..(699): n is a, c, g, or t
acccctaactccatgttcgggcacagtccacatccaacgcagcaagatcaggcactgtacaaggtcccaagatccgagctcttccagcacctgatctacctcctatggtgagctgccttcttctgcaagcaaatatgcctgattgtagtaaggattcaacattcgattcgccacaaatcctaaacagttgcctacaacgactccaatctttttaatcttttttgataagttcataacagtggcaatggtagtgggggaagagtattggctgggaataacctctaacaacttcatgacatgagctggcgaaaagaagtgggtgccaatgaccaagtgaggacgatcagtggaagaagcaatctcatcaacatccagggctgaagtattagtgcacaaaaatgcttctggtttgcacacagctgagagttcagcaaagacctgcttcttcaggctcatttcctcaaatactgcttcaatgactaaatctacaccaccaagctccttcacagatgaagttaacctggggttttgggtcctgaccaagggtggccgctctgttgcattttgggaggcttctttttcccaagacagaggttatcatcttgtttgcagttgctagctgggtttttgtccgagtctacagcaatcacagggatccgggggcctttgcaaaaggaattgncatgcctcggccctttnttcccaggccacacaccact

SEQ ID NO: 313452 - DNA, 459 bp, Homo Sapiens
  misc_feature (262)..(262): n is a, c, g, or t
ggatgaaggcgaggaatctaagataagaaataatcgtgacgaaaccatttcccatcatcctttgttctgagattcgctgtaccctttaagatatccatctttttctttttaaccctaatctttcacttgaaagattttattgtataaaaagtttcacaggtcaataaacttagaggaaaatgagtatttggtccaaaaaaaggaaaaataatcaagattttagggcttttattttttcttttgtaattgtgtaaaaaatggnaaaaaacatgaaaagcagaattttaatgtgaagacattttttgctataatcattagttttagaggcattgttagtttagtgtgtgtgcagagtccatttcccacatctttcctcaagtatcttctatttttatcatgaattcccttttaatcaactgtaggttatttaaaataaattcctacaacttaatggaaaaa

SEQ ID NO: 313453 - DNA, 1702 bp, Homo Sapiens
tttaacagcttgtactttattacatatgcaaccttgccatgcctgccaggttaactcccctcccgccaatgttatcctcatgatatcagctccctcttggggccactgagctgcccccctttccttctgggctggagtagtggtgcccctcaagcaggcaatgggcagggggagatccacaattaatcgtcgcagttctcttaaaagtattaacacttaaataagcactcttggggagttgcaaaggatattcaggatgggatgcagtgggaggctacccctcatccaaggtacaggctggaatgagctacagctggtctatcgtgggcctcagaaggtgaagagggaccgtattctggggcttagtgtgggtggggcatatcctccccaaacttgttctggtgggcgatgttcttcacatctaggagagcctggtggtggacataggcctgacagtagtaacaccaggctgacaggtcgatgtagctgaggaccagcgggtgtccagaatttccatggtgttggagcatgtggccattgatgtaacgaccacagtagacctgatagcaagagagacacacccaattctcttggattgttccacagtccccacaaggttgggtcacgtctaggcctgctgcaggtatggggcatactgccaccaaatggggacaccagggcagtggtgtcacagcataaaatatggcctgatcagtgaggcccctagatccctgcatcagcatcgaatcagccatgtcctgacctccagctgcctctcctagtaggttctcctctcctggggcctgagattctgaggccccctgagattcgctgcctagctccaaggtcctgagactcccaatcagtgtactgggagatatctggggtgtagttccctgcacaggtgaggttgggggggtctggtggtctgtgctcgaggctagaggagtttggatcagctcggtgccccctggagcctcctctgacgtattgtggtccagtgtggctccctccatggctgcctccgaggtggtctgggccagtgtagctcctcctacagcctcctctgaggtagtctggcccagcgtggctcccccaacagcatcctctaaggtggtctggtccagaatggctcctcccacatgtctcctctaaggtggtctggtccgaagtgcgctcccccgacagccctctaaggtggtctggcccagcatggctcccccaatggctgcctcagaaatgtgtctgggccaaagtggctccccctgtgcctgcctctaaggcctggtcctaatgtaagggccaccacagctgtctctaagttagtctggcctgaagtggactcttctcgtgtggtcatccgctcagctaacataggtgctctggttggggtgccttcttggtgaccatcttagatctagagggtccttctctgtcttctaccttcatgacccgtaagctgcgccagtatctgcgatggacttggatggtctcagtgattgaggccagggcccctgatagtgggggccgtggcagggtcagcaggggtggtgggtctccaaggagggagcgagtgcaggcagccatggactctgagatggatgtcaggttatagccaccctctaggataaggataatgcggccactggcaaggcccatcagcaggtgggtgaggtgggcataaccctcaggtgacacctgg

SEQ ID NO: 313454 - DNA, 886 bp, Homo Sapiens
  misc_feature (16)..(16): n is a, c, g, or t
  misc_feature (22)..(22): n is a, c, g, or t
  misc_feature (41)..(41): n is a, c, g, or t
  misc_feature (85)..(85): n is a, c, g, or t
  misc_feature (111)..(111): n is a, c, g, or t
  misc_feature (181)..(181): n is a, c, g, or t
tgccccatacccaacngtaggnaaaaatcaagagaccgtantccccaggccctacataaagtcaggccccagttaagccatagtngccccctcgaatctgctgttgttganggcccccatccaaggtggctgtgttgtgggtaattttaactaaaggaggcaaaataatactcagatgtgnatacatgttatctccaatagacaaacaggcatacccagctattgagcttcttttaggtgggggctgccaaggacaatatttgactttatcaggaatactcctctaattactggaccaggtagctccagggactgcacttgttgggcaagtcttgggatcttatcagggctgacaactcaacctgcatgtgtcatattatctatgaccttatgtatggagtggtcaacttgtttcataggctggcaatgagcatgttattaatatagtggatgacaagtacttttcgaagtaactggacatgttgcaggtcaggggaatggaagtattgctatggactgaactgtgcccccaaaattcatatgttgaagccctgagctctgacatgattgtatctgaagtcctaaagccaggaatgaggaaggctgtgaatgtccattgttccatacaagaatgactcttctcttggctatttagagatcatgagggatactgccccagtttccacaggccagatggtctccaacaaaagccacgggggagtcacccctgcctggcagatctatcgggtcaggaccaccgcccagggggtcctggagaggacagtataggaccaaagaggattattcatgagcctaagatctcatgaaacgtgccttgctaagttttagacttgcataggaccatcatccccctgctcccccatcc

SEQ ID NO: 313455 - DNA, 1893 bp, Homo Sapiens
  misc_feature (1509)..(1509): n is a, c, g, or t
  misc_feature (1515)..(1515): n is a, c, g, or t
  misc_feature (1698)..(1698): n is a, c, g, or t
gatggtgtgaagaatttgtagctttaataacagattagttagggggtagggatgatacttctgtcctacctgtgccattcttcaaaagcagagactcccttcacctaagagctagacaatgcctgcttcatttttgaatcaagaaagcagaacataccttacacacacatattcatcaaatagacttctttccctaattatgtcttcctcctttgagtttcttatggctaatgatcatgtcttctgctttcagctcttgcctcttaaaaatctcaacccttaaatctttactgatcattaaaaccttcatgacctctaaacttataagggtgaaatctgcagtaaatggattagaacaatttgtttactataaatgaggctggaaaaattggtgaagagccccacagagatccggaatgcagtaaccttgcccagaatccttattctgtgataatttcaaccctggactgcagcctcatctgactctggataatgtcattgtttcacgtgtctcctaggccctgcttcctttaatgattctttacattcttctatgccaatctgtatctccaaatcatttccaaactagtaatgggactgatggtccccttactgaatgcaaagccacagaacaaagagcccagaaaggagtggagctaagagggttgctgaggaaagaggaaccccagcatctgaggggaagagatgcagcttctctaagtctggcaggaaggctcgggcatcctccagtgctgcctgagctgccacggtaaagttgggatcaccagaaattaaaacatcaaagacacaggaatggaagtaagcatcttccactggaagcccttccttgcacagccgtctggcagtatcaatggttatagctccccgacgattgcgctctgatcgagagagtcgctgacttggagggcaccccccaacacagagctgcaggtcctgttcagctgagaaggccatggccacatcctctgctaccttgatggagaaggagagctgcccagctgtctgccgaatgattatagttgtgccaatgtaggcagcttggatctccacatggttcccagggttagcagtttgaatcgacaaactggatcccccaggtcggtcacctccattgatagaaccatcttcaaaggctacaggaagattatccacctcagcctgatacaccttctgatcaatgcattcctgcatgttcttaaatatgatggtgagcttccgggtggcggtagcgttggcccccaacgccatgggggagctggtggcttggacaaagaggaagtcattatccagtagaggccaagctccttggacacggcatgtgtgaaagtgatggtggaagctgcgcacatgggggtccccgaaggaagcgcaatgcaagaaccccgggggacgaccatgcagccgggaaaaccggccttcatagtcacaagggtccggggcagggaggccggagcccgcgcctggaagggcggggccccggggcggggnaggggntgtagggcctggcgggagcagttgtgctggatcatcaggtcttcgatgccatgtaccgccgaatggaaggcgaggtccccgcggcaggtgcgggcggtgcgccgagtgcagagcgcataggagcggagggctcgacagaggccgccagagcccacccctccaccccggcctcctcctcctccncctcgaagtgctcctgatgaacccccacctctaaggctcagagtggacgatacgtactcagcattgcagcggaggatcttgcattgagaatgagtgtttccagaggtcaaacattactctgctatccaattctccagccatgattccctactctgtgggtcagctccagccagggggtcctccgtgtctccccca

SEQ ID NO: 313456 - DNA, 1150 bp, Homo Sapiens
  misc_feature (598)..(627): n is a, c, g, or t
ttttcaaagtagcttccatttattcacagttttaaaaacatttttcaagtttagtcaacttcccaatataatcaaaggacaaaatggcaataaaaaatatacttcatcagatcttagagttatacaatcagttaaaaaatagatattgggttttaaacaactgacatatgctttccttttccccctttaaaggttttcagtagtctatctgaaatcactgaatcacttttcttctcctccacagaattcagaactttttcacccggaactggagaaggagcactccgtcattagctgaggggaatggcaaggatccaggggtcctccatgactacacaaccatcctcctgagcacctttaggaaatccaatgctgtctgagaagcagcagggccagatccagatctatggaaaattaatatctgcagtgcttcctgaaggtcacctcagtctttatgccatttcaaaagctagcccggggcttgagaagaaaagggaagtggcattccagccatatttggggtgcaatttaattttcattgcgtacctcatgaacaggggcaataacacattctaggacattcttccagcccacccannnnnnnnnnnnnnnnnnnnnnnnnnnnnnaacgagtggtagtgacaggatgcaagtctgcgctcttggtagataaacggagaagcaggagaaagaactattccataatcagttaaacggggagttttcagaatcctgtcttgtcatttaaagtgacttactgaagtcctactaagttattgagactatatttctttactttttgcactgggacaattgaagcattgagacaccagaagtccaaaagacgaaaaatgtgaaaatcacaaatttaaagaaaatgtagaggtctcagttctgaaacaccatgcttcaagtgttgtcatttttgagaacatttttaaaaggcatctaatattccaggacatacggttcccattactggcccagcaggtacacagggtctcccactttgatggtccctgggttttccagcacaaaatactgcccaaagagtggtgattttccatataactttcgttctgaagggtcacactggcgataactcttcagtgtttccagcggttccttcctgctcatgacaccggtgtct

SEQ ID NO: 313457 - DNA, 797 bp, Homo Sapiens
gttgctgccttcgtctgcacttaccttggaagccaatatatcttcacagaaatggcctcgcgggtgctagctgcattgatcgtcgcctctgtggtgggtctggccgagctgtatgtcatggtgcgggcaatggaaggcgagctgggagaactgtaactggtgcttcatcatcaagtctagagaagactttgggggcttcaggctccaattggcagtcaccgactcagtcaacccatcagactttttgtattcagctccagttagtcagaagaccagcccaggccagctgctgtttctgtggggagccctaatcttctgtgaatttccaaagggagcattggaggagattgagataacacatctttcatctgccttctccagttcattctaaacactgctgggactagggtttttccatcaggagcaaatggaatccaggccttcccagaagtagaccatactgccttgaacttgtccatatgtacaaactaatcaccagctttctccatacatttttattgcagacctgttattgagttcagaggcctccaagaaaacagaaaggatcccctttctccagtttgtgctggaagaggagctgatcagagacatcaaataagagaaagatgggttgctagaggatggtagaactggaagcaaggcagctacctttttgcttaaatgatcactatggtccttcttctgttaaatggagccaaagacgcctatgttgttctgaagtcttgtaatgtttaacttctgagaacttagattagtggtgtgatgatagagtctgt

SEQ ID NO: 313458 - DNA, 1115 bp, Homo Sapiens
accatccttctcctatttgtttttcttggaggtttttgaatccaattacaggtctgcattaaaaatgtatggagaaagttggtgattagtttgtccatatggacaagttcaaggcagtatggtctacttctgggaaggcctggattccatttgctcctgatggaaaaaccctagtcccagcagtgtttagaatgaactggagaaggcagatgggtaccagattcaggaagaggtactgatagaccaagaccagttctttctgttttaaagatgtgttatctcaatctcctccaatgctccctttggaaattcacagaagattagggctccccacagaaacagcagctggcctgggctggtcttctgactaactggagctgaatacaaaaagtctgatgggttgactgagtcggtgactgccaattggagcctgaagcccccaaagtcttctctagacttgatgatgaagcaccagttacagttctcccagctcgccttccattgcccgcaccatgacatacagctcggccagacccaccacagaggcgacgatcaatgcagctagcacccgcgaggccatttctgtgaagatatattggcttccaaggtaagtgcagacgaaggcagcaaccaccgtgacaatgaaattgaagatggtgatgaccagagccttcaatgatctcacttgctttcccaggtcgctgagagtcccaccatgtcttgtatcctgacaagtgacgttgcgggtgatccgtttatattcctcattggccagctgtatcttaatcttctccagccgggcaactagttctgggttccgtggaggcttcacaacttctgggagatagatttcactgccttctaggagctcatggaggtatagtttggaatccctttctctcagatgctggtgcagatcccggatgagacggaaagaaaccaagcgttgggggccactggagctatcaccgcccttgtgcttcttccccagcgcggcctcaagctcggcccgcagctttcggggtagccgctctggctccagctccccgccggggcccaaagcacgcaccaatcgctcgcccgcaagcaaagaggacgccatatctagccggctc

SEQ ID NO: 313459 - DNA, 642 bp, Homo Sapiens
tccaaaaagtccatctagtcaaattgtaaaccaaaatgaaccaagtgaaaactttcaagttcctttagaaaaaaatttcaagaatttcatttcctagctatgaatctttaactttttagacacaaagttggatttatttttacaagatacaaaatgtaaacatggcaaaataaatagttaaaacaagtgatgcaggatcccatttcatgctcatgatcccattaaagaattattttttaaaatccattcagttgcaaattcaagtgcaaaagcatgatgatgaatatctactattcaagtaccagaaataatattgatgatacaaataaactattttacaaggtagtgattttcccaattttacaaaatatacatcatatatggatttaacatccaatatactatagtccatttaggtccattgttacactctgtgatccacagagtgttgccttttgcattcagctggaatatgaatgactgcacaccattagcacaggtcagagccacgtgttttaggttatgtcacttccatagctactgttgtctctgctattccatttaagcccaatctttctggttcgtggttctctcttgctatgctgctgatggcactgctaggagtaacctttggcactctgt

SEQ ID NO: 313460 - DNA, 758 bp, Homo Sapiens
  misc_feature (446)..(446): n is a, c, g, or t
acgttaaaagaattgaaaattcagatcatgcatgcatcttcaggtgctccttttgaccagaatttgtcaattgatggaaagattttaagtgatgactgtgccatcctaggcacccttggcgtcattcctgaatctgtcattttattgaaggctgatgaaccaattgcagattatgctgcaatggatgatgtcatgcaagtttgtatgccagaagaagggtttaaaggtactggtcttcttggacatttaatctttgaatacttgctgactgctaagaaatgaccagaggggaagaggagtttgacatgttagggcattaaagcaaaggtggatttaagaattaaaccattacatgccccttccagcagattgcactgatggacatcagacttgaaggaaatgtttccaattttatatttaaggggggtggtgggtgggagagggcnagttaaggccgtacaagtttagtagcagtaattggtaatcatgtttacatatgaaacttatagtcgcggtaagggaattaaagtctgttatatttccttggtcgagttcataccatatgcgttgttccataaaggattgtttcaagtaaatggtacaacaatctgcttttaacgaaatgtattttagcgaccataccttgtttaccaatgcctgtttttgatttataattctacctttaaatatagccttgaaggtgatcaaatattcatctttcgctcttttcccttctctacttcactctttttcctacc

SEQ ID NO: 313461 - DNA, 915 bp, Homo Sapiens
ttctaatagttgctgtttgttgcacagaatggacaaatcatagtttatatagtcatgcagtatttatgagaatgttgactcttacttgggtagataaggtacttaaagaaaatgtaattaatagttgatgttgttaaatcttggctggagagttgtttaagggtgttcataaatgagtaaatgaatgaatgaacaaacacatgaataaaacaagagagggcaaacatgggacaaaggtgatcatatctcattgtcgtaaattctttttatgtagcttcagcatccgtttttaacctaagtttaactttctcattccagaagcaggcttagtcacccttgacacagtttgcagttatccacctcctccaagttcttaatatgttagatccagataactgccttgtacagccacctccaggatactgcctccctaaaaaacagctagatacactgaccccacagcctatgtggaccacacagatatactggcttgctctaaatgcaccagtgagaactctctgcaggaaacctgcttgggaaatgccatagcctgcaatacaggctttccccttcccgctggccctgtgaggcatgcaggatctgtaagtaataaactgcttctgttgtttcatttcatgtgttttgttgagttgcttcctctgtgtctcacctgaccaacacacttgaattgaacttctttcctggtcagggatctcctagagaatggctatcttggcaggaatagactagatgtaggtcagacaagaaccacaggggtactgccagtgtaaatgagtttcctatgagagggacacctggtaatggataggatgcttaggcattagactgtctgctgggataaagacgtatcccgtaaaagatacgctgtaaacacccatgaccacctctccagtc

SEQ ID NO: 313462 - DNA, 453 bp, Homo Sapiens
  misc_feature (114)..(114): n is a, c, g, or t
ttgaaacaacagaagcagtttattacttacagatcctgcatgcctcacagggccagcgggaaggggaaagcctgtattgcaggctatggcatttcccaagcaggtttcctgcangagagttctcactggtgcatttagagcaagccagtatatctgtgtggtccacataggctgtggggtcagtgtatctagctgttttttagggaggcagtatcctggaggtggctgtacaaggcagttatctggatctaacatattaagaacttggaggaggtggataactgcaaactgtgtcaagggtgactaagcctgcttattggttggttcatggctcattttccacagaggtcacaatcaagatcttcatcgacaaagtgtcattaatttcactctggagcctccattctgtgggacacaaggctgatattaaaaaggatgaaaaaacctagattt

SEQ ID NO: 313463 - DNA, 788 bp, Homo Sapiens
  misc_feature (57)..(57): n is a, c, g, or t
atatcctgctgagtgaagatgcctggggggacaaacttgacagctggcttcccaagnacaggcgtaaatatgatgctatctgggactttagtggtgagaattcatgtctttagactcgatatttttctttaccgtgctcattgatgacgcatatgtgattcagatctctgaagtattcattgtaatctaaggcatatcccaccacaaataagtttggaatctcaaatccagcatagtcaggtctaaagccgtcacttctggatgttctcttcaccaacaaactggctaccttaatcatgttgggcttgtatttctctatattgctgagtagtgctttcatggtcctcccagttccgacaacatcctcaacaatgagaacattctttccagccagcgttgaaagatcatcgcctccgattatctgcatctcacccatggactggtcattcctgtaactttttagtctgatgaaatcaaccttcattgagacaaatcgatctgaatttcggctgatgttcttaaggtgttctacgagatcagcacagaatttgtaacctcctttaagcacacacaggaccatgatgtcactatatcctatgtctttcataatatccttggccagccgctcaattctgtccacaatgataccatgagggatgaggacatactccaagtctccataatagtgctgtgggtacgtgaataaattcaagtcataccctggccaatcatccataatcagttttgcaagaacatctggtcagattgtaattgttccggtgttgcat

SEQ ID NO: 313464 - DNA, 2272 bp, Homo Sapiens
  misc_feature (422)..(422): n is a, c, g, or t
  misc_feature (426)..(428): n is a, c, g, or t
  misc_feature (431)..(431): n is a, c, g, or t
  misc_feature (470)..(470): n is a, c, g, or t
  misc_feature (480)..(480): n is a, c, g, or t
  misc_feature (491)..(491): n is a, c, g, or t
  misc_feature (548)..(548): n is a, c, g, or t
  misc_feature (560)..(560): n is a, c, g, or t
  misc_feature (602)..(603): n is a, c, g, or t
caccaccaaggtttttattccaaaacagttatttggctagacgtgaaccgttaagatacgggatcaatggagttacaataaagacaatgaaagtgacaatttattaatacacagtaagttctagaaggcatctttcaaaacaaaacttgatttcttttgtatttacattttttgtttcaagtcttagcaaaatgctaaaaggcctggcctagtcacaattactgacatccttctgggacacaattttctgggcctgtgttgaatgaggataaattatcttttctctaaaatgccacatgacccctctctatattcccacatgaagggggatgggagggtaattatttgggcttttcttctgtttagggggattgagctgaacgactcatttttttaaaatcacacttaaaagacacatgggnaaannngtnccccaaaactactgtcttaccgaatttgagagggggggnaatgtatggngcttaacagcnggcttcaaaaggcacctttccaaagaaattgtactacctctattaacgtgtaaaccnccacccacaaancaataataagttactccatcaaacacgttattatccataagnnagacttcaacattgtagtggaagatctatttaagcataaatagtactaagccccaattactaatctgggggcctcctcacaggtccaagggcaatgagcaacctcgagaggcaggtgactgcacaagcagtaagctatggattaaaaattaaaaggatttcacattctttccaaagtgtactgcccggtgtctggcacacgcatgttacaatatgacaatctgctctatttgtgagcacctgagtgtattacaggggattacacatgcatatgatagaatctggctcccggtacagtcaaaggagaacagcatcagccaccaaatgtgctgatcttacactgaaaagggttgactgaaaacatttcaagggtaatgtaaacacaagaataaagctgtgggtctattacttagtgatgtggttttatatgctacatacgtagacctctctttatacaatgaatatggacagtgctgcaataaaaactgatgacacgtcaaattgttcacctgaagaaaaaccctattatagttcagaaaataatgcaaccaattttaatttaatctagatacaggtactttatttacaaatatttagattaatagcattttgttacatcaaatgaagagtacagcagtctgaataaatccttcagtcacaaaaacaataaaacccactgtaactaactttgggagtcagggtattgcacctcaacaagccgcagtctttagtttgtgattgctaccttatatcccaatgggtggtttgtttgttttgtttttgtaaatatacacacacaccagcaggtcatggtccctgggtgagtcccttgtgatgcaacagtgtaagcaaaatggatcactgtaagtctttaacagaatataccaatctactccagaaatcttatttttttaaaaagttaaacaaagacaaaaataaaaatgaatccacaaattaaccaaagcctactttctgcacattccagttttggcttttatttaacattgactatacaatactctggtactaccacatgtttacaacccagaaagatgtacttttatgttagtgtctgtaaagagggatttaaaatgtgtattttaaacacagcagttgagctgagtgcattttctatagtacgctgaggtgttacctattctatttcaaataaattctcaattcccagccactgaatcataaatgcaataaaaaaaatcaacagaaatgaagaacttaataaaacatgttgtccaaaaaaataagattgtttctcttgctatacagtattaattcagtggccaaaccacctggtgcaagtaataacttactttgtatcagcacaagcgctgaaacacctttagaaacactttcccttttacaaaacaatttatgccaacatgacataaaacagcccctcacactgtgaacacagggatatcttaagttatttcactgtagggttaaaaatgcacaatttaaaatcccttaacagcagacctgtggttctgactgtccagttcagaatctgaccattccaagaagataaaggtataaaagcttaaaatgtgcaatagtaaacccagccttttttctttttctatacagtaaggcaagaatgcagcctgtaatgcaaaaacgtttacaaaaagagaaaagcaggttagcacatt

SEQ ID NO: 313465 - DNA, 585 bp, Homo Sapiens
tatcttgcaaactcaatctttactcggttgctactagttctaggattttattaaaacagaaaatagcaacgaaatgaccataataccactgccccaaatgcacggtttttcaatctcaatctatataaaaatgtcagaaagactaaggggacatattattgtttactgtaatcagttccagtgaaaacttaccatttcttcaggatataaataaactaaaaaacatattttggaatgcagagatctattttactttatttataatgccaaaaagttgtcaatcaatacctgattagttagaggtagaaaggtaatcattctgattgtcttcaaaaacccaaagtttctttggggttgctcaaacaactacactttgcagtctgtcccaatgaaatccaactggacttctcaatccaccactgcaaattggttaatcactcaacctatacattcatcattggaatctgcttcatgatagctaattcattttaccttttacataaaatttaaaaaaatgactgccatttattaaaatgaaaaggtaaattggagaaatacaaccttttggccagcaaaattttacta

SEQ ID NO: 313466 - DNA, 404 bp, Homo Sapiens
acattaaattttaatctttaatatctaacattattgctttaggaaagtatttccctgaaccaagaatacaatgctaattgcataaaaacatacacatataaaaagtagttctccattttcccaggaaaaaatccaagtataacttctagaatagtcaagtttcttatttttattataattaaagtcttggtcatttcatttattagctctgcaacttacatatttaaattaaagaaacgttattagacaactgttacaatttataaatgtaaggtgccattattgagtaaatatattcctccaagagtggatgtgtcccttctcccaccaactaatgaagcagcaacattagtttaattttattagtagatgatacactgctgcaaacgctaattctcttctcc

SEQ ID NO: 313467 - DNA, 707 bp, Homo Sapiens
  misc_feature (12)..(12): n is a, c, g, or t
  misc_feature (138)..(149): n is a, c, g, or t
  misc_feature (419)..(639): n is a, c, g, or t
gttttaattttncctttgcctctttagaacccagtgaaaaataccagggtactggggtgcaactctttcttatgataggtcattagtgctttaagcaaaagatattagcagctttgactgcagcattagcaattaggnnnnnnnnnnnnttaagttccctgcggacatgtaactttgccatcagttttgatgtggaaacactgtgatatataaaatgttgttggacaacagtagttttaagagtaaaatatgaaacgtttaaaaagttccaaaaaaagctagctctgtcctttacttattgagacactttaactttttcctttgtatttccattgtattagataaataaatgtgaatgtaaaattgtaaaaaaataagaacactataaacataaaaacatgtcggccgcctcggcccannnnnnnnnnnnnnnnnnnnnnnnnnnnnnnnnnnnnnnnnnnnnnnnnnnnnnnnnnnnnnnnnnnnnnnnnnnnnnnnnnnnnnnnnnnnnnnnnnnnnnnnnnnnnnnnnnnnnnnnnnnnnnnnnnnnnnnnnnnnnnnnnnnnnnnnnnnnnnnnnnnnnnnnnnnnnnnnnnnnnnnnnnnnnnnnnnnnnnnnnnnnnnnnnnnnnnnnnnnnngggcaacctgattgccgaatgaattttgaagccgtaataattggtaaaaattcgcgttaaatttttgt

SEQ ID NO: 313468 - DNA, 1091 bp, Homo Sapiens
  misc_feature (649)..(649): n is a, c, g, or t
  misc_feature (1011)..(1041): n is a, c, g, or t
tgccatttcagtaccaagcctttctgctcccaggtcaaggaacccagcagcacaaacactgttggggcaacagtgaacagccaagccgcccaagctcagcctcctgccatgacgtccagcaggaagggcacattcacagatgacttgcacaagttggtagacaattgggcccgagatgccatgaatctctcaggcaggagaggaagcaaagggcacatgaattatgagggccctggaatggcaaggaagttctctgcacctgggcaactgtgcatctccatgacctcgaacctgggtggctctgcccccatctctgcagcatcagctacctctctaggtcacttcaccaagtctatgtgccccccacagcagtatggctttccagctaccccatttggcgctcaatggagtgggacgggtggcccagcaccacagccacttggccagttccaacctgtgggaactgcctccttgcagaatttcaacatcagcaatttgcagaaatccatcagcaaccccccaggctccaacctgcggaccacttagacctagagacattaactgaatagatctgggggcaggagatggaatgctgagggggtgggtgggggtgggaagtagcctatatactaactactagtgctgcatntaactggttatttcttgccagaggggaatgtttttaatactgcattgagccctcagaatggagagtctcccccgctccagttattggaatgggagaggaaggaaagaacagcttttttgtcaaggggcagcttcagaccatgctttcctgtttatctatactcagtaatgaggatgagggctaggaaagtcttgttcataaggaagctggagaactcaatgtaaaatcaaacccatctgtaattttcgagtgggtggagctcttgcttttggtacatgccctggaatccctcactccctcaagaatccgaaccacaggacaaaaaccacctactgggctctctcctaccctgccctcctccnnnnnnnnnnnnnnnnnnnnnnnnnnnnnnncctttggctctttaggaacccagttgaaaaataccggggtactgggggtg

SEQ ID NO: 313469 - DNA, 977 bp, Homo Sapiens
  misc_feature (284)..(284): n is a, c, g, or t
  misc_feature (856)..(866): n is a, c, g, or t
acaccctttttagattgccctatttatcctagacctacaaaatttaattccaagaaaatataggtccccatgaaagacttaaaagttttataaaactaaaatctagtttttcccgataaattgtactttaggcaaaaccctcccaacgcttctaaaataatactaaaaggggcatctgattatacaagagcaatttaaaaaattaaatatttatttgaataacaagtttaagttcgagctgcaatgttggcaatgcaggtttttaacacagatcacaaaaagcngtgcgcaaaaaagttctggcgcaaaggaccaaataatgctaagaattaggccaaacagctgctgattttaagaaaaccaaaggcctgaaatcactgtacaaaatagaaaatgtattaaacactaccatccacagaacagtctttactattgattatatttaaaaattatttgtgtaattatatattgaattgtaaatgagtattatacatgaacctccattcggaaggcaattccttgtagcactatagaacatctaataacattgcaaaaagtatccttttttgctatcgataaaacagttaatggtattactgtaaatatcaggaaggctacaaaaaaagaaataagatttcttttttgtcttcaaagtgttttccatgcaatgaagcacttgctgtgttgaactgaatgcactactggagaatgttctgggtccgagatgctcttgagagacaagactaggcttttcaaatcaaacactcaaaggaatcatgcaaccctcttatgactgggataccgtcatgtgccacttaccaatgctgtctctccagaaaaccattcaagacgcttnnnnnnnnnnntcagacttatatgataaatatacataaaatgaagacaccaactgctatttgacacgactacgggtaatgcctgtgctatgtgaaagcacctttaaaaagcctatgcggccc

SEQ ID NO: 313470 - DNA, 419 bp, Homo Sapiens
cctttcatctttttcttttaacctggagggtggtgatggtagtagtggcttagttaagcctgaacacccattccctcctgttagtctgtcaacactgagggcacagcaaccacttgggcctaggtgaagcacgtggctcttgccatttatggcctggcttttgggcaattgccctatagtatttatggaggaaaaacagaatcatctttgagaaatttttcctgactaaaaaactcaggccaggtgcagctgactggggaccagaatatcagtgcacattttgttgggaaatattttgattgtgaaactatatcggtccagtgtatgcccccagataagccctgtgtattggttgcagtctttcagcatggaccctgtgaagtaggtgcctacagatatcccttgacctcaccatgtga

SEQ ID NO: 313471 - DNA, 897 bp, Homo Sapiens
  misc_feature (131)..(131): n is a, c, g, or t
aatgcacatcattaccattaactttttccaaaagaaagtttgctaagaatctgctcccctaattagggttaaaaataaaagcaatcttcccatttagaaaaaatcaagaccatcagttgattaataaagcnctattcttcctccccagcaaatttgtactttctgggtcttcatttaggaaattataaattcatgccaaaaggaaccaaattttttatggaataaataacttccaggaacaacagtttataagtattcagttgtttaaataaacaaaactattttccttcctaaaatgtaaacatccagtaaatgaaacatacatgatattccaggtatagaaatcttagtaactcacttatgaaagaggtgcattttggtatgtttggtggtaaggtttttgtttatcttatgtataaaagtacttgcacaaaaaaaacaagcagttattactatttaaaattctattccttcacccagttttctcactcaagtagaaactcatgaatatctgtgattttggctataggaccaggccacaggaaagggctgaaatatctctaaaagttagggaaaagtgttttcttgagacttgaaggcagtcattcatcactttgtgcttgaaggcattcctcagcaaacttctctcgagtcttcagagtaaagcacaggatctaggctcccggaaggggttacttccagctggaacacccaccagcagggcatccttgcaggcattctgcatacagtactgttgaagctctgcagctgcctgagagaccttgatcctctccacgccagcctccaacttgagctgctctaccaagcgctgcagggcgctcgcgctagccccggaggacatggcggcggcgctgggctcctaggggctgctggccc

SEQ ID NO: 313472 - DNA, 1259 bp, Homo Sapiens
aataagcagaattttatttccagctcttcaagaccgttcaaaccacgaataatgtatccttctaaaaaagtgtcccaaattaaatcaaaggcacatcgtcgaagtaaaacacttgtgaagttaagaattcttttaggttgtaatattttcatgttagtttttaatcatttacaatgttctgtgggtcacattttaaacatttttaaatatatgaaattctgtatttctttaagtacagccacaactacaaagcagagaaacgtaaggagtacgaaaatcaaatctgcttcatttatatacacgatgggggcagcctaatgcacatcataacattaactttgtccaaggaagtttgctaagaatctgctcccataattagtgttaaaaataaagcaatcttgccatttagaaaaatcaagacatcagttgattaataaagcctattcttcctcccagcaatttgtactttctggtcttcatttaggaattataaattcatgagaaaagaacaaattttttatggaataaataacttccaggaacaacagtttataagtattcagttgtttaaataaacagaactattttccttcctaaaatgtaaacatccagtaaatgaaacatacatgatattccaggtatagaaatcttagtaactcacttatgaaagaggtgcattttggtatgtttggtggtaaggtttttgtttatcttatgtataaaagtacttgcacaaaaaaaacaagcagttattactatttaaaattctattccttcacccagttttctcactcaagtagaaactcatgaatatctgtgattttggctataggaccaggccacaggaaaggcgctgaaatatctcgtacaaagttagggaaaagctgtgtttcttgagacttgaaggcagtcattcatcacctttgtgtctttgaaggcattcctcagccaaacttctctcctagagtcttcagagtaaagcacaggatctaggactccccggaaggggttacttccagctggaacacccaccagcagggcatccttgcaggcattctgcatacagtactgttgaagctctcgcagtctgcctgagagaccttgatcctctccacgccagcctccaagttgagctgctctaccaagcgctgcagggcgctcgcgctagccccggaggacatggcggcggcgctcgacgcgtgggtcgacgatatcccgggattccggaccggaccgctgctttttaaacaacgtttata

SEQ ID NO: 313473 - DNA, 819 bp, Homo Sapiens
gactttctctaaatttattagggagtttgttacaaatgtttgggctttacaggcatgatttcacggattcaaacaagaaattaacactgatatttagccttctcatgacatacacagaaataacattgctacaaactgcaatggagagaatcttgtttcaaatggcttagtttggggttttgtctaaatgtatcattatataatgaaagcaccaatttgagggtttctcaaatagtgatttgaattttaggacataacagtataacatggtaactttattcttcatatataaataaggcataatcggatgtgtattaatgctgaaaatacattttatcaaaagcataaatacaagtatttgggtacacattgaaagttaggacttaaccaatttcttcttacaaaaaatgataaggacatatggtatttgttgaatctaaatcagcacttctaatcatttctggtattaaggcgatcttatttccttctactttaaaccaaccactgccaccaactgaataaggatttccctaaacagcctcaatttgagagactaaccagaggaccttctctatgcaaattacatgccaatacaccttaaaagaaaataagacaaaagtgaatgagttttttcattccatattgctttctttggttgcagagcaatccagtgccctttccagataataaaattgaaatgaagatttcaatttaatatttggcagacagcaacaatgcaggttattaaaaatattaaaggggcagaggcatgctttgaattactcagattttcagaaaacatttgacaaaaccctttct

SEQ ID NO: 313474 - DNA, 375 bp, Homo Sapiens
accgttccggcggccattgcgaaaacttccccacggctactgcgtccacgtggcggtggcgtggggactccctgaaagcagagcggcagggcgcccggaagtcgtgagtcgagtcttcccgggctaatccatgccgggttggaggctgctgacgcaggtcggcgcccaggtgctgggtcgactcggggacggcctgggtgctgccctgggcccggggaacagaacacacatctggctttttgttagaggtcttcatggaaagagtggtacatggtgggatgagcatctttctgaagcaagtaaactgtgtcctctgaaagatgaaccatggcctatacatccttgggaaccaggttcctttagagttggtcttat

SEQ ID NO: 313475 - DNA, 1793 bp, Homo Sapiens
actgatcttataattgagtgataaaactaaaaagtaatcacctctcccaacaaaaatgtaaacaggaccgataatttatgattttattgtctttcctttgtccggcctttaacatgtttctgtaatttaaataaaaatctatttactttctccattttagcaaatggtttctttacccaaataggttgcactatagtccccatatggttttctactgttccacaaccactatttcacaaagattgacaaaactttaataaaagttaaatttacagacatcttaagataacttgggaaatatgtagtaaaaaagaatcgagtccacaaattaagaatattttgctaatatgcccaacaccaatttcagcaaatccaatctacttaactcatatatttaatgtggtaatttttctaacaaaatttaatgggggtatgaatgatatatttatgcccttgacaaagatgacatgtgtgattttgttgtgactaagaaaggagagtatgatttctggtggttatgatatcactctggctcatcgaagctcacagaatatgtaaggttctgccacgtccaaagatgttaggcaaatgtaatagaaggcgcaccgggctgacacacgttttcatcatacaaatcttctggcagttcctcttcatctccatcaggaaaatatgtagggaatggtagatttttaccgagatccttatatgcaggcagtttagaatctttgacctttactaagcaatttttatgtccaggtacagagccatttacatagattatgttgtgctttgtgtttattctccacactttcagtccatattctgtcctgtatatgtttcccatttttccaggcattttagttccaggccagactctgccaatatcaccagttgcaacagctccaggtctcctgtgggttttcgtttgaccatgcgtagcaggctggcctttaaatccccatcttttcatgacaccttgaaaacctttaccaatagttttggctgtgacatccacatactgtcctggacgaaagtgagcagcataaagaggagtgcctggtttaattgcagcattatctgttatattaaagattttaactgtctgtttcggcggcaatccaagttcccggtaaaattccaatatggatgtagctttacgaaaacgtgatacagtttttcctcctacagacagggttgccatttttccattacagttttcctttgacgtatattttaagacatgacagtcttgtacctgaagtaatgtgaccacatgcttttgaccatccttggtccataaaggcatcatgcccagcttcaaggcaataagaccaactctaaaggaacctggttcccaaggatgtataggccatggttcatctttcagaggacacagtttacttgctaattgggctttatcttcatcagagaccaactgcttaatgaatgggacattttcttcagaaagatgctcatcccaccatgtaccactctttccatgaagacctctaacaaaaagccagatgtgtgttctgttccccgggcccagggcagcacccaggccgtccccgagtcgacccagcacctgggcgccgacctgcgtcagcagcctccaacccggcatggattagcccgggaagactcgactcacgacttccgggcgccctgccgctctgctttcagggagtccccacgccaccgccacgtggacgcagtagccgtggggaagttttcgcaatggccgccggaacggtcgccggccgatgctctctgcgacggaaagaaaaaag

SEQ ID NO: 313476 - DNA, 487 bp, Homo Sapiens
ggcacgagggagaacatctgaatattattgttacccccaaaagcccatatattgacaaaataactcactataattacttgattttatccaagggcaaaattatccactttggcacgagggagaaattttcagatgcatcttatcaaagtataaacattccagtaacacagaacatggttccttcatcccgacttctggtctattacatcgtcacaggagaacagacagcagaattagtgtctgattcagtctggttaaatattgaggaaaaatgtgggcaaccagctccaggttcatctgtctcctgatgcagatgcatattctccaggccaaactgtgtctcttaatatggcaactggaatggattcctgggtggcattagcagcagtggacagtgctgtgtatggagtccaaagaggagccagggcaggtggtggcctcaacaatgccaatgtgttccacctagctggacttaccttcctcacta

SEQ ID NO: 313477 - DNA, 2474 bp, Homo Sapiens
  misc_feature (433)..(434): n is a, c, g, or t
  misc_feature (2357)..(2357): n is a, c, g, or t
ggatgatgtttggtaactatagaaaaatagaaattacactcaggatcactgttactgctattgccactgatgattcctgcaaaaatataatcgaagttttccatcaaatgtataatatgctattaatacacattagatgataacagttgttccatgaatgattctatgaagctatgcatcttagacctcttgagctgtgaattagcactattttctatagttacttattctctggatcattttataatttccatattaatttcaaatatgctcgtgttattcttcagtgatttccacaattgtgcattttattctttggtttaagtcctgaagcatataatgaaagtaattgctaagtagcagcttaaaaattcaattatccgattgtatttaacatctttaagagcatgatcataaagagctttttttgacnnacccccccacttttttaacatttagagttagtaagggttttatatctcttctgtccatattgttttcaaaggaatgaggtgtttaggtggctggaaaagcatttgtaggaagttagatttgaatatagacaaggtgggttattcacgttgagaatgttatttgaagaatgcctgtgaagccaggtgtgggttctactcagtgccatagatagactgagtcttctctcgtaggttaccattacatagtaattttgattctgaatttcacattaaattatttgagtttatacagacctaaattttaaaatctgtacatatattattttgatgtattaagatgaatattgctgatttaaattttatttatgcacatacttaaaggacagaaatgtctgggaaagtaattgttaaataatgatatgtaactttttaactttttaaataaataacaagatttttaatgtgtgtctccctcagggttgtttaaagttttttttctccctcaagtataaatagtggtaactatatgttttgtatcttctagcaccaactgctgtaaagcaatgctgcaaataatgcttgaatacaagtggctaagccaacaacagaataaatacttttatagtagttttataatcctgaaattcgaaagctttcccaattgcacttgcatctaaacaaaactgttgcagtttttactctatttattttgttccccatgtttatgaaagtcctgcacagtttcaaaggcatggtaaataatatatcaatgtttatgtagtctgttacagaaacagctatagataacattatccagtgaagagcaaaattcaagctttagaaaatattcatgcatgcaattttgacatatctaaaaataggtttttgtatatttatggtgggaggtggttgggaacttttaacaaaatggggtgttaatttttgtacagtctgtgggcatttacacatttttaatgtattaaaatttggtaattatgtgtacattaaattaataaaagttacttctagttatgatttgtgaattccctaagaccttggatttttttaagtaactttatatcagaaatgatactgcatctttatatttttaaaattgtattgctgctcaagaatggtaccctcttgtcaaaaaggcatacattcataattgtacattccgcattgtacataatcttatgaaaccttttttgattgaagctattcacaataaaaattttattgcatgaactaccaaacccccccacacaacacgaacactatctgtcccgccgccctggccactctagaattatttcagaccatttcttttgaccccccgcatcccccaacgtccgcggcacccggccccctagtttgacttccccaagaaaaaacattgctcaatcgatcccgggccttgtactttccccaccagataacaaaaatccgccccgcgcgggctaaaatacccacgccggttcccatacattatacccccgataatgccccacctcgcccgcatgggttctccccaccctggcgcactacctatatacacaccgcggggtacgttctcacctccatagttagaccccctatttcatatcccctcatcttgctattctcttcgctacttatcgcgtgctattctagtcgcatctttagccagtcgtaaccgtggttgcgccccagtgtgacatattgacacgactttttcttcatgtcgcatagagaatcgtcctgaaccgcccgtattcagacgagcgcgcggatgaacttattattgtatcaccccatcccaacaacccgaccctatcccgctatatatacactcagcacccgcccacggatccgtccaatctgcggtcactactacacccaaccgcgccgacttagcttagtcgccactaaacacaccccacncagccgcgctattatcacccaccccaccgcgcgcactattatactcgtcgccgcctcgccggtctcatgtaactccacgccggacccccgcgggtgaatcacctccgacccccctca

SEQ ID NO: 313478 - DNA, 465 bp, Homo Sapiens
tgcatcaaaagaagctgttcgtgaaggatctccagcaaactggaaaagaaaagagaagttgcctcaggttacgaggtcttggcacaattatatgtgtaattgtgttatccaggattttcaagcttcggtacttcaagtgtcagattcaacttatgatgaacaagtggctgcacagatgccaactgttcattatgaattccccaatggctacaattgtgattttggtgcagagcggctaaagattccagaaggattatttgacccttccaatgtaaaggggttatcaggaaacacaatgttaggagtcagtcatgttgtcaccacaagtgttgggatgtgtgatattgatatcagaccaggtctctatggcagtgtaaatagtggcaggaggaaacacactaatacagagttttactgacaggttgaatagagagctgtctcagcggaagtttagctcatggattg

SEQ ID NO: 313479 - DNA, 856 bp, Homo Sapiens
  misc_feature (593)..(593): n is a, c, g, or t
  misc_feature (601)..(601): n is a, c, g, or t
  misc_feature (605)..(605): n is a, c, g, or t
  misc_feature (613)..(613): n is a, c, g, or t
  misc_feature (615)..(615): n is a, c, g, or t
  misc_feature (617)..(618): n is a, c, g, or t
  misc_feature (621)..(621): n is a, c, g, or t
  misc_feature (623)..(623): n is a, c, g, or t
  misc_feature (625)..(627): n is a, c, g, or t
  misc_feature (630)..(630): n is a, c, g, or t
  misc_feature (700)..(700): n is a, c, g, or t
  misc_feature (708)..(708): n is a, c, g, or t
  misc_feature (712)..(712): n is a, c, g, or t
  misc_feature (714)..(714): n is a, c, g, or t
  misc_feature (721)..(721): n is a, c, g, or t
  misc_feature (725)..(726): n is a, c, g, or t
  misc_feature (745)..(745): n is a, c, g, or t
  misc_feature (751)..(752): n is a, c, g, or t
  misc_feature (755)..(755): n is a, c, g, or t
  misc_feature (764)..(764): n is a, c, g, or t
  misc_feature (770)..(770): n is a, c, g, or t
  misc_feature (773)..(774): n is a, c, g, or t
  misc_feature (777)..(777): n is a, c, g, or t
  misc_feature (783)..(783): n is a, c, g, or t
  misc_feature (786)..(786): n is a, c, g, or t
  misc_feature (811)..(811): n is a, c, g, or t
  misc_feature (813)..(813): n is a, c, g, or t
  misc_feature (825)..(825): n is a, c, g, or t
  misc_feature (838)..(840): n is a, c, g, or t
  misc_feature (853)..(853): n is a, c, g, or t
atttctggaatggctaatttttatttaattctgtaagcctaaggtaaaaagcataggcagtaacttttactagtcaataaaaagcagttctaccaatccactggtaattaatacactaaacagagttggaaagcattttactgaaagcaaaatatttcagagaaaatagacatttatacaaaattataaaatgcttgtaataagaataagtgcatttcaaggaaagcacaaacttaatttatagagccagttaaagctttaaaaaatttaagtggaaattgaaatatgcaaaaatgtataaacattctacaaaagatggtcattcttttcctgagtatactaaagctatgaaacgtaaggtgacaaaaggaaggtagaagcttgggaactctttctcaagggcattttctttctacacactgcttccctccttcttcatattcttgcttggaaatccacatctgttgaaaggtacccaaagaggctagaatggagccgtcaatccatgagctaaaccttcgttccactgttgtattattttcaatcaatttcaaccgcatacttggaggagttttctgagacagctctctatncaacctgncagnaaaactcngnannagngngnnnccncctgccaactattacactgccatagagacctggtctgatatcaatatcacacatcccaacacttgttgtnacaacatnactnantcctaanattnngtttcctgataaccccttnacattnnaanggtaaaatnatcctnctnnaancttaanccnctctgcaccataatctcaatttatncnattttttatatnataattaaaaatnnncatctgttcaacnact

SEQ ID NO: 313480 - DNA, 882 bp, Homo Sapiens
  misc_feature (469)..(480): n is a, c, g, or t
ccaaaccaaagatcggtgtgttaatgcttttcgttgttcttttttgaagtgttagaaaaaccggaatcaagaagttcgattcacaactttatgacacatcctgagtttaggatagaagattcagagcctcatatcccccttattgatgacactgatgccgaagatgatgctcctacaaaacgtaactccagtcctccaccctctcccaacaaaaataacaatgctgttgacagtggaattcaccttacaatagaaatgaacaagtctgctacctcttcatccccaggaagcccactacatagtttggaaacatcactctgattgtaagctgaatgttaacacactagctgcattgtaaagaaacaaattgaaactgggtcttttcacatattgtgatggacaagctagtattcttgtctttggacttcaacagaagacacacttgtacgaatgtagatttatttttttnnnnnnnnnnnngcaaagctttctgccagactgagggtgctttttggggggtgggagaaatgaacctgaccagataaacagtaacctcagcgtaagtgaccctgtggatcatcagtagtaccccaagcatggtccctgaacagtgtattagcagagctttagtttatctcagtccctggatgggagagagagggaggagtaaaactgggcaagacaaagagccctggatcgttgaattgatagtttaatttctgctgttggctgttaataatttggattatttatgtttataaatgatacagatctgtttacaaggtttgtagatactttttttgttcctgttcatagatgggaagcttccttataactgatgcagagaaaaattagtccttcaaatactggctgattttcagg

SEQ ID NO: 313481 - DNA, 697 bp, Homo Sapiens
  misc_feature (612)..(612): n is a, c, g, or t
  misc_feature (683)..(683): n is a, c, g, or t
tttcccttcagaggaaggctttattgtaacataaaatacacaactttgtgactgtaactctgcataggatatatttcttttttttgaggcagagtcaaatttgaggccccaaattgtacacaatacttttttttggtggctaaataactaatctgccttgacactaaaatatgtatctgaaataatttcaccaagttttaaaaagaaaaattataaaaagtatactttcattttaagttatattcgattttagtctccccctaccccctagaaaaaacctgcacatctcacacacggagctgaaacttttgaggacttgtgtgtgtctgggagtgggtgagaggctgatggggtcgagacacaccactacctttatcttgtggtttgcaggaacaaggaggagagagaagatagaacgcagagagcgagcacacctttcatcaaaaatctccactctctaggcacagcctcggtaacaccgaggacagctcacaactggacaagcagggaaaccccagctcagggaagccacactcatcagctctcttcctccccaacccagtgccaactgcaaagtgagccaggacggcctggctgctctgtcctcagcangccctggggtgggtccactcccaacctgaaagtgtatcaagtctgacccccaaccagggttgctggaacanaaaacgaagtctca

SEQ ID NO: 313482 - DNA, 845 bp, Homo Sapiens
  misc_feature (43)..(43): n is a, c, g, or t
  misc_feature (708)..(708): n is a, c, g, or t
  misc_feature (767)..(767): n is a, c, g, or t
gagggcggcccaccacgtttgtgtttttgttaaggccctgtgnttttgtataaagaagccaagtttattacaaccgaaggccacaaaacatggagaagacttagtgtggagaaagtaaacagtcaaatgtcctttgaccacttacagaatgcatttctctactccatttcatcaaagtgtcaacattctgactcttagtccttgtccccatctttgccttcagagagagtataaggaatccgaagtttgccctgcacacggctcagggtcgggctgcactggcagtctgtggtggacagacgtggtcttcctgtgtctgctgaggtgagacttgaggctgaagccccgcccacacgtcttgcacacatatggcttctcccccgtatgtgtcatttgatgtaaggtgaggtgtgacttttggagaaagccttggccacactctctgcacacacaaggcttctcttccgagtgagcccgcttgtgtgtaattagagcttgacttattgccaaagcccagtccacactgccttgcacagtgtagggcttctccctcgacgtgcttccgcttgtgcctgatgagaccaggcctggtgctaaagcctcgcccgcactctcggcacacatacggcctctcccctgagtgcgtcctctggtgtgcaacaaggtttgacttctgctgaagcctcgcccgcactccccacacaccancggcttctcgcctgagtgcgtcctctggtgtctgatgaggttggattgctgctgaagcngccggccacagtccttgcacacaatgggcttctctcctgagtgtatgttctggtgtctgttgaggtgtgacttgagac

SEQ ID NO: 313483 - DNA, 260 bp, Homo Sapiens
ggcattgacaacctgagtacagtgggcactaaaagacttaggactcctcctcttcactttccgctcttccattgttttaagttccttattgcaccacggccagctttttaagacctgaagaagaagggtattggggcccccttccgcaacccgcaaagacccgacagcctcagaagccaccgccgcagccacaagcagagccccggtcacatcccgggacccgctcctccgcagctccgtttgtttacggcccgggccat

SEQ ID NO: 313484 - DNA, 473 bp, Homo Sapiens
  misc_feature (365)..(373): n is a, c, g, or t
  misc_feature (402)..(415): n is a, c, g, or t
aactaagaaaagaattttgtggacatgctcttcatgcagctgctaaactttaagatctcagattcaaaggaagaaacctaagtaatgagagtactgcaaattcatttggttaaattacaaaccctaaagcatattgtttgggattttctagcacattgaatttaaaattggaaaaaatttattctagtattgcagtatgggtttctaagaattataatctttctactaattaagtaacaaggtcttcatacagtccacattccatgaccacaatgccattaaatgtacatagaaatcaataataaaaaaagatatcctcacaggcttggggcaaaaacacttctaaaaaactcaggagtcactgnnnnnnnnntcacaatagaaattagaagacacttactnnnnnnnnnnnnnnccttatataacaaagccttgtgaatatagctaaaagcccggccataatggccggattt

SEQ ID NO: 313485 - DNA, 709 bp, Homo Sapiens
  misc_feature (40)..(40): n is a, c, g, or t
  misc_feature (77)..(77): n is a, c, g, or t
agaaggcaaagtacaagttccctttattacttgtgctgcncagcgggactggaggtcaactgtgggaatggcagccncaagggactggacaaagccaatcactgctatggttgacttctcgatgatagactcatcaaggaaggggtaggcaaaactataccctgttgcaaagattacacagtcaatgccctcaaatatggtcccatcctcaaaaatggccgaggtctctgtgaattccttcacgttaggctttacggacacaatgccacacagaatgcttgctgggagctcatcgttaaatacaggctctttcctcaggactccatttaaaggcatcaagccatagttttcatgcttgaatcttgcattcatctgcttcacgtacaaccagtcagagatggctgtcggtaaattgttcttgaggaaggttccaaatcgagtgacgagcagcatgtcccaagtataaccattgtcccagacccggctcttcacccaggagccacttctggaactgatcatgacctgttctgctgtgcggttgagttctgtggcaatatcacagcccgaattccccaggccaaccaccaggacacgctttccattgaatacacctggttctttatagtccctgctgtggaagcatttgcctttaaagtggtttagtcctggaaagctctcttgtggtaggttgggatacacatgatgtccg

SEQ ID NO: 313486 - DNA, 591 bp, Homo Sapiens
  misc_feature (538)..(538): n is a, c, g, or t
gaaaaagcgcaaatggtttggcaaaagcgagaccatacagacagattacattgtttatatggatgaactctcctccttcattgtggcaaagcccaacatcccatggctgtttctcacagatcccaaattggccatggaagtttattttggcccttgtagtccctaccagtttaggctggtgggcccagggcagtggccaggagccagaaatgccatactgacccagtgggaccggtcgttgaaacccatgcagacacgagtggtcgggagacttcagaagccttgcttctttttccattggctgaagctctttgcaattcctattctgttaatcgctgttttccttgtgttgacctaatcatcattttctctaggatttctggttactgactacccagacaggggctttgctatttaaaaattacattagtcagtaatacagtgttatttctaggctctgaaatagccactttaagaatcatgtcatgatcttaagagagcactaatcatttctgtttgagttccactaacacttcanaatcagaactatgttctttatatctaacttatcatttcctgcattttgacatg

SEQ ID NO: 313487 - DNA, 738 bp, Homo Sapiens
gacgagcagcatgtcccaaggataaccagtcccagacccggttcatcacccaggagcccacttctggaacttgatcatgacctgttctgctgtcgggctgagttctgtggcaatatcacagcccgaattccccaggccaaccaccaggacacgctttccattgaatacacctggttctttatagtccggtaggttgggatacacatgatgtccggaacaaaccattacagcatcaaagacagccgattcttttttaccatccctttcagtggtaacatcccactggccagtagttgcaaaatcaggatgtttatttacactggatacaaatgtcttaaattgtatgtacttcaggaggttcttttctttggcaaatgcaatgatatattcctggatcttgctgttgtgcataaagttggggaagtcatcgggaaatgggaagtctgggaaacacatcatctctttggaagagttggaaaagactgatttgtaaatgctagccctgccctcctctgcatggtctgaaaatttccacaggcccccaatgtcattgctcttctcaaagcaggtgggctccagcccctcttccagacagctcctgatggaggccaagccactcacaccagctccaatgatggccactttcttccccatggtaacctttttaattttcctacccgttctttgtcttcttttcttctgtgtgtctacgtcctgtccaaccgtcctcgtgccgaa

SEQ ID NO: 313488 - DNA, 392 bp, Homo Sapiens
agtaacatcccactggccagtagttgcaaaatcaggatgttcggcaaatgcaatgatatattcctggatcttgctgttgtgcataaagttggggaagtcatcgggaaatgggaagtctgggaaacacatcatctctttggaagagttggaaaagactgatttgtaaatgctagccctgccctcctctgcatggtctgaaaatttccacaggcccccaatgtcattgctcttctcaaagcaggtgggctccagcccctcttccagacagctcctgatggaggccaagccactcacaccagctccaatgatggccactttcttccccatggtaacctaattttcctacccgttctttgtcttcttttcttctgtgtgtctacgtcctgtccaac

SEQ ID NO: 313489 - DNA, 1217 bp, Homo Sapiens
  misc_feature (1193)..(1193): n is a, c, g, or t
ttataattattctgcttaatttgctctttatttagatttaaaatacatctttcatacattgtttaaaaggaaaaaggaatcatgtcaaaatgtttcaggaaatgatttaagttagatataaagaacatagttctgattttgaagtgttagtggaactcaaacagaaatgattagtgctctcttaagatcatgacatgattcttaaagtggctatttcagagcctagaaataacactgtattactgactaatgtctacagagtactgcaaaagatgctgaatagaaaagcaggtggtgtgaaaattttaatttttaaatagcaaagcccctgtctgggtattgtcagtaactttcagaaatcctagagaaaatgatgattaggtcaacacaaggaaaacagcgattaacagaataggaattgcaaagagcttcagccaatggaaaaagaagcaaggcttctgaagtctcccgaccactcgtgtctgcatgggtttcaacgaccggtcccactgggtcagtatggcatttctggctcctggccactgccctgggcccaccagcctaaactggtagggactacaagggccaaaataaacttccatggccaatttgggatctgtgagaaacagccatgggatgttgggctttgccccaatgaaggaggagagttcatccatataaacaatgtaatctgtctgtatggtctcgcttttgccaaaccatttgcgctttttctccattttctcattaatatcattcatcatgtcttccatagaaggcaaagtacaagttccctttattacttgtgctgcccagcgggactggaggtcaactgtgggaatggcagccccaagggactggacaaagccaatcactgctatggttgacttctcaagtagaggaggaaatactcctttaaataaaatgatctcattgtttctgcttttgatgatagactcatcaaggaaggggtaggcaaaactataccctgttgcaaagattacacagtcaatgccctcaaatatggtcccatcctcaaaaatggccgaggtctctgtgaattccttcacgttaggctttacggacacaatgccacacagaatgcttgctgggagctcatcgttaaatacaggctctttcctcaggactccatttaaaggcatcaagccatagttttcatgcttgaatcttgnattcatctgcttcacgtacaacca

SEQ ID NO: 313490 - DNA, 384 bp, Homo Sapiens
  misc_feature (11)..(11): n is a, c, g, or t
  misc_feature (288)..(288): n is a, c, g, or t
atgatgattgnggtcaaaacacagggaaaaacagcgattaaacagaaataggaattgcaaaagagcttcaagcccaatggaaaaaagaagcaaggcttcctgaaatctccccgacccactcgtgtctgccatgggtttcaacgaccggtccccactgggtcagtatggcattttctggctccctggccactgccctgggcccaccagcctaaactggtagggactacaagggccaaaataaacttccatggccaatttgggatctgtgagaaacagccatgggattgnttgctttgccccaatgaaggaggagagttcatccatataaacaatgtaatctgtctgtatggtctcgcttttgccaaaccatttgcgctttttctc

SEQ ID NO: 313491 - DNA, 631 bp, Homo Sapiens
cttattggttaaaggcaatttattttgaaatgttgctttggttgtttgctttctggaaacatattggaacacttgtttttcataagctgtcctgacagtggcacaatcccatccatcttcaggccttttaataaggtcattatgaaatctgaatttctattaatactctggtgcattcatttcatctgcaaaagcaactggcacaaccactccttgccggtgcagctctcggagaacatctaatattgagtctagttctgtgcggaacttctccagctcacgattctttaactgtgccagtcttttccatttttcaacttctttgttttgctcagtttctactacttggtgtgtttgctgtattatctgttgaagttcctgttctctttgtgcatgtctcatttccatctgcttaattttcttttctaagcccacgaaatgtttcatctctggtgtatggttttctttggcttctctcaattcttctaagagttttgtaatctctttctgtagaatttcttctcgaacttcagaaactacgagagactcttgtttactctgcagctcattaacttgactttggaaatgtcttataagtacctcttgagatgctattttacgatttagttac

SEQ ID NO: 313492 - DNA, 1518 bp, Homo Sapiens
ctaaagggcactttcaaaggtcataaatgcagcccctgtgacacaaactggagatattatggagatagctgctatgggttcttcaggcacaacttaacatgggaagagagtaagcagtactgcactgacatgaatgctactctcctgaagattgacaaccggaacattgtggagtacatcaaagccagggactcatttaattcgttgggtcggattatctcgccagaagtcgaatgaggtctggaagtgggaggatggctcggttatctcagaaaatatggaaaacccaaatcatgatattttgaagatcagagatgtggctctccgtcattttggcatcccactgggccgggatctgtatttcactgagaatgctctgctgcacaaactatacaagcccccttccctctaggcccagctactgtcacagaagaggagggggcagaagattgtaagggctggttttaaagaaaaaaattaggtcaaggtcaaacctccaaatcaaggaggggttacaaaaatgcctaaacagctggtaaaacaagtttagttgctttctaaacgattatgtgtcacttttgcatctaccccaaccatgaaaatttatttgcttattatagaattacaggaaaatatttactaacaggataaaaaataccttgtaacaaagcctcttgggtataatactcccagttatgagttatggagataaacatatctatctatatattttttttcagaacaatgcttatgtttgcatagctaattgctgtatgtctttaacaaaagccaagcttacagtagctcaacacacagaagttaaaaataagtcagtctcgtaacttgccttttcgtttttgtttattggcttttacttaaaataataattttaagaggtaataaatgcatgtccatatccattcttacctggcctagaacaatcaattggctataagtcctttgactcataaggccttcagccatagggagtcccatggaagtataggatggacccgagatggggagccatgccaccctagcaacgctgtgggacaaaattaaaatttgctggtttttgatgttgcctctggcaaatcttggccagaaggggaagaacgtaaatgaaaatgaaaattcgaaggccccccacaactatctgaatggacttcctcttcctccagggttcaggccatgatggaaagtgggaggtgggacatgcttcattatacctctctggcattaacattcacagtctattctctctgaagcttgctacctggatgtttcatctgcatgataaaatcccaggtcttcagacaaactcaactaattgtcaaccagaaaatatttaaatttacctatagcctagaaccccccaccccctacactccttcaatgtatttgattgatgcctcatgcctccctaaaatatgtagaaccaagctgcactggattggccatcttctcacatatcattctttgtttataagtgcagtgataatattgaacatatagtct

SEQ ID NO: 313493 - DNA, 1060 bp, Homo Sapiens
ttttgatgttatatgtgtatatctgaagatgcagtaaatcataccatgttcaggtaattagaaatgaaggacaagaagaaagaaaattaaaggaaaatagaacaattgggaagcaaatgataaactcacgtgatggcttctgtatattcaaagaagggactaggtaattctgataggaaagataatattaaaaataactccagtgaggaagaaagggagaaataaggcaattttcaggctactgatgcattcatacatatcttttattgtacaataaagcccttatctgtgttatcctgtccacctctttgcattaaggtagttggtccaccttggtcatgccagccttcctctcacacattaaataatgtttgttctcacagaaggtagggtgcattttcccattatgaaaataagcacaattcatatttccttttccatcttccaaaaactcaaacatattttctgagataaccgagccatcctcccacttccagacctcattcgacttctggcgagataatccgacccaacgaattaaatgagtcctggctttgatgtactccacaatgttccggttgtcaatcttcaggagagtagcattcatgtcagtgcagtactgcttactctcttcccatgttaagttgtgcctgaagaacccatagcagctatctccataatatctccagtttgtgtcacaggggctgcatttatgacctttgaaagtgccctttagttctgattgttttaccacatattgacagaagcgctttgctaattgttgcagagttcctgtgcgattttcattctcatcttgtaggtaattgcgctgcatgacagaccaaatccccagagccaccagcccgacaaccatccccacgcacaggatcagcagaatcaaagccatcacacgccaccaggaggaggatgcagggccaacggagacgagagctggtttccgagttttaatatttaaggtgatgtatccatcttcatcctgcatggcttcccgagtactgcaactgagctcagagttcaatgactttgcaaaatgtagttt

SEQ ID NO: 313494 - DNA, 825 bp, Homo Sapiens
  misc_feature (111)..(119): n is a, c, g, or t
gatttttaaaaaagttcatttgccaattttaacaatctagaaaaaaagaaaagtctgactataatacttgatgacacagacattatgtttaagtagaaaacccaagaattnnnnnnnnngcaattatcagaaaatattgcacaacttcagttgtttcctccaaatttgctttatgtacttgggtggatataaattaataaacagaaatttaagcaagatacatgtaacaatttaacagaacctgataatctaatttctttcaatttttctcaaattcatctttaagtctttccatcatggggctcataaggaaatttaagcaacatatggatactacagttgaatgtcaaatctttacaaagtacttatgacatactacattcctctataatgcaattatgaataaccttcatgacactgtgttttgtatgtagaaaactgttagagttcaatattcaactcaatataaaataataataagaaacacttctgatgtttggttgagaccacttttccttttgctaatgaatgatttttttagctgtaatatcactgaggtgaaccaataagtcacctttgagtacatatgaaaaaataaacacatgctaaatggataaaacattactactacatctttactagaccatctctacctctaacacttcagaagcttagagatttaaagtattcttacattaactgcaagaaacaaaggagaaattccttctttttttgagatcacaactatgaagtcatatggttatacaaattctgcgtttgtgcggacgcgtgggtgacgatatcccgaaattccggaccgctacc

SEQ ID NO: 313495 - DNA, 1345 bp, Homo Sapiens
  misc_feature (94)..(102): n is a, c, g, or t
  misc_feature (112)..(175): n is a, c, g, or t
  misc_feature (216)..(232): n is a, c, g, or t
  misc_feature (243)..(393): n is a, c, g, or t
  misc_feature (656)..(656): n is a, c, g, or t
aaaggcgcccgggggccccctggttgaaagcccaaaaaaccccccaaacaccccctcgggtttttttcaaaacccttgtggtcccccgggcggnnnnnnnnnggggagaaannnnnnnnnnnnnnnnnnnnnnnnnnnnnnnnnnnnnnnnnnnnnnnnnnnnnnnnnnnnnnnnggggcccccccccccaaaaaaaagttttaaaaaattttttnnnnnnnnnnnnnnnnncgcccaaaagnnnnnnnnnnnnnnnnnnnnnnnnnnnnnnnnnnnnnnnnnnnnnnnnnnnnnnnnnnnnnnnnnnnnnnnnnnnnnnnnnnnnnnnnnnnnnnnnnnnnnnnnnnnnnnnnnnnnnnnnnnnnnnnnnnnnnnnnnnnnnnnnnnnnnnnaaagtagtttaataaactccacaaaataatagcagatgcattgaaatatttacataattcgattttcaaatctctcattcaaataaaagggataaaaataaaatttctgcctttacggcagcagaacctctttcctgaaatggattgttaaaataagattctttccctggggaggaactaatttatgtttaagaggtatttcatattcagctaaggaaaaatccaaccttttttcagctatatagattaggggaatataaaantgatattttctacattttttgaccctgtattcaaagttctaaattcaactttgacttgaagagagaaggtgattttggtacccatacagagtagatcatcacaattacaatggaaagataattaacgttttatatgctgtttatttgcttttgaaagtttgggtcagaaaggctgtgataataattctgggcccaacaggtatggttatacctggcaccaatttcactaaaacctaacacttttggcttggagttcttgggatttcgactttctgagtcccttccatttcccaagcatgtttcattgagagcaggcaatgtttggggatcaggtgtatgattccaggctaattaagatgccaaagtttttccagctcacatgggaagaaggttaaacccaggcctgctgctggcactggccttccagaggcttgaaaaggggaacaactcagaaacctgtccctgtggcctaaggaaatatgccaaaaccccaagccttacatatgcaagtgactcacactcttagatttcatatccaattccctatttgatattctatcatcaactttcattttacttgatataaaagattcttattgagtccataaggaaatcagggatcgtcagaaaatgaaaaagtatggtcataattaatgaagcataaaccttcacagtttgaattttgtacc

SEQ ID NO: 313496 - DNA, 828 bp, Homo Sapiens
  misc_feature (623)..(632): n is a, c, g, or t
tttaaccattggatttttttgatgaaactccggttccactctttagaaataagcgcaacccttcatttctatccaatacttttagaaaaaaaagccttagaataaatatctgtgaacagattaagggtaaggcagactggataataacccacctttgacattcccactccgtgcatgtgactccctctaaagggtgaaatggctctggagataactgaactggtaagatatgggcattaaatctcatcctgatcattcagataagcccaagataaatactttttgctcatcaagggcagcaaactatacaaattgtactggaggaatactttgacagaagcacttaaattatattgtgcatcacaactataaaatggcttgaacatttccatttaaccaccatttataaagtgcaactatatattactctgcattttatctgaggtgtgatgaatatcagtccaaactgaaagtaccccagctgccaatttccaccacttctgaaaagacctagctgtgtgaaaaaggaccatcccccatacaaagaaccaatttcacaaacctactggtaaacaaatacatttacaactggaacttcaaaatgctagagttgtactcatttnnnnnnnnnnccattcagctacctttggtctttaaaaaagcctacactgcaatatcctaaacattgttatgtgcatctcacaatgaagaagagtggccttgcagtgcagaatgaggagagtacaacgtcactgtgaagagtagcatgctatggtttcaaggaagatcagcatcacagcattggaccctgtgcatcaggatcgaggt

SEQ ID NO: 313497 - DNA, 1469 bp, Homo Sapiens
tataagcacagaaagcttttattaccacagaggaaatcaggaaatgctggaggcagcctcgttagctgtgtgatcagggaggggacagcaggcgggaacccgtcatcaatcatgtctgggcagtctcccaaccaacaggtttgtttggttcaggagaggcttttgctgggctgtgtgtgtgtatgatcaggaaggtcagcctcaacaaatgggcttcttcctggacataggacagccagaatcggggacaccagctgcacagacaccaccttaaaatggaaatcaaattaggttcattacatcaggaagtacatttcaccctgatcataaaagagggacaagggagcactgggctctactggatagcctttcttttagataagatgcttttaaaagttaaacattggcagggcctttcccctagctaacagcaagcagcacacaattccaagtcagcttgtaaagcttttgttatctttgttatctgttattatttggattttgaacgaaattgatggagtacgagccggtagaggaatcctgtttgatctggaaattttccgtggagagcccaaaaggtcggagaaccaagttcccaagatcttttaatttacctaacatctcttcttttagtctttcattacgttcttcaatttgcttaggtaatctcatacaagcttctcttgcttgatgtattgatggatctttttctaatatagatttatagtcttccagggcttcatctagcttgtccgtcttctcatacaactctgctctcctcaatattgccctgatatagctggggtttaattgaattgctttgctgcagtcattgatggccatttctttcttgtcctgtttcatccttgctgcagctctatttgaaaatagaatcgacctctccttttggaagcaggatgggcacatttcgagggctcgactataagaactttcagcttctatataatctcctttcttaaactgttcatttccctcctcctttagtctagtgctctcttctcttcttttctgtttctcttcatccgacatgtttttttccagttctattaggtattcttcatctagttcagaggaattcacatcttcattagatttgttctcaaccttgtccgctcctggctcctcctcaaatgaggcactgcagtcatgaaaacactcctcttctccctggtcctcctggagatgggcctcatcatccctgagcagcttactctgggaatgctgatttttgggatcaggaactggagggccagcacactcggcttcctgagtatctgtaaccttcaaaccatttaacagatcctctggaaccccacagttctctgacttctcccccatgctgcccagtgagggaggtgacgctaaagaacctcacagcttctccggtctccaccttcttagcctctgagagctcctacttccgctcagtcaggtgcacttccgtcgat

SEQ ID NO: 313498 - DNA, 782 bp, Homo Sapiens
  misc_feature (157)..(191): n is a, c, g, or t
  misc_feature (368)..(477): n is a, c, g, or t
atttgggggggaattcccaagccctttgtttattggcccagggttttttctttgggaaaccaactttggcccatgttccatttccctaatgggcccccggcccccaaaacgaattgtttagaaaactttttgaaggccgaaggcggccgaccagggnnnnnnnnnnnnnnnnnnnnnnnnnnnnnnnnnnnccagaaatctcttttatttctttagatatataaaacactgttactttatattctctctgataattctagtatctgggtctagagtcaatctgttgcttctgctgggtctcatagtgtattgtttccttgtggtgtttatgaatttttaaacctggatctctcattttctttctttcnnnnnnnnnnnnnnnnnnnnnnnnnnnnnnnnnnnnnnnnnnnnnnnnnnnnnnnnnnnnnnnnnnnnnnnnnnnnnnnnnnnnnnnnnnnnnnnnnnnnnnnnnnnnnngatgttccttttccttggaacttgatcaacacaaaatcctgaggcctggtgtgggtgtgttcctctggggcagattctcaactggggacacttctgcccccaaggacacatttcaacatcctgagacatttccgggtgtcatcacagtgtgcacgcacgtgtatgtacctgcacacgctactggcacctcgcggatagagcccagggacgctgctcacatcctgcacggagactgacccgcccagcgtcctagggcaggctccaggcagggtctgcatgtgcctctgccagccacctagaccccc

SEQ ID NO: 313499 - DNA, 410 bp, Homo Sapiens
  misc_feature (170)..(323): n is a, c, g, or t
  misc_feature (359)..(359): n is a, c, g, or t
  misc_feature (366)..(366): n is a, c, g, or t
tgtagagatggggtctctcactgcgttgcccaggctgctctggaactcctggcctcaagtgctgggattccaggcgtgaaccaccacgcccggctgagatgttccttttccttggaacttgatcaacacaaaatcctgaggcctggtgtgggtttgttcctctggggcannnnnnnnnnnnnnnnnnnnnnnnnnnnnnnnnnnnnnnnnnnnnnnnnnnnnnnnnnnnnnnnnnnnnnnnnnnnnnnnnnnnnnnnnnnnnnnnnnnnnnnnnnnnnnnnnnnnnnnnnnnnnnnnnnnnnnnnnnnnnnnnnnnnnnnnnncggagacttgacccgcccagcgtcctaggggcaggntccaggnagggttttcatgtgccttttccagccacctagaccctgccagcc

SEQ ID NO: 313500 - DNA, 1355 bp, Homo Sapiens
tttttaaggaatcaaaaacttttattcagaataagcgttagaaaaatgaaggtaggtgcctcataaatgcagggccccagagtactcagaaagggattagaaaataattacaaaaatattttgccacatattaacatgaaactacaatcactggctgtaaaatatagtcaaatgcaatcaagctgaaaagaaaaggtgaaaatctccaggttatctgcccaggtggcaggaaatcgacagccccgagaacgcaagtgctgctgtgccgccaggcccagggctatgatccaaagtgacgggcagactaccggcctgcaccaccccactcaggctgcacacaagacagccagcttaggatctccgtgggctgctacctatgtcacagagggctgattaagggcttgcagtgttcccaaatagggcctccaatgagaggagtggaagctgcattacaagaaattcactggggctgcacttgactcttcaacttggcgagtctcatgaggcactcgtccctccactcctcctggcagctaagtgctccgggtcatcagggaccttcatgcacatgtcctggttaaccttctcaatgccttcgctgtatctgtcgcagtagcttaacataccttctgcattgagatgcatggtttccaggggtccaatgaatgcataccgcatgcccaacccttctgacatgacaaggtccaggtcactaggagacacgattccttcctccactagccgccaggcctcgctgatgattgcatattgcaggcggttcagaacgaagccggccacctccttctggactcgcatggggcactgtccaatcttcttcatcagggcgtgggttctgtccactgtcgtaggggccgtctccgggtgggggaccagctcaaccagcgggatgtagtatggcggattcacaggatgagccacgatgcattgcttcacatggaccaagccagcaaacaacttggaaggcatgagacaagaagtggaactgcttaagatcactcgatcatcaatgatggaatctaactgagcaaaaatcttcttcttcagttctagatcttctggaacacattcctgaatgtgcatggcgccctctactgcttcttggatattgggacaaccactgatgagtgacagctgctcttccacactcagggccagggcgttccttatctgctgttgctcaatgtcatagagtttcacctggaagcctccactggcaaacagcatggcccagcttcgcccaatgactccactgccaacgatcaccacgcagccggccgcggaggacgccatggttgggccggggacgcggcgcctcgtgccgaatcctgcagccc

SEQ ID NO: 313501 - DNA, 657 bp, Homo Sapiens
tacgagtggtaatgaaaatacacgtgactaaaagcagagcactgatatttttggggggaaaaaactttaatttattaaggaaagaaagaaattgaaccaggccattgttttaatatgcacataattaactgtagaactttatattgtgaaatttaattaaacacgttctagccatttgggttttgaaatgctaggtaaaatactaagttaaagatgtgaggaatcaatattatccttctggcatttttgtttcagctacataataacttttttagtaggtgtgtaaaaaagctcctgatatttttgccttgatctaaaggaaaatatgttctataaagggtaaatctattaattagagacccacacaactttctttcttgctagtgtaatcgttaaattgatttttccagtccatcatgtaattgttccagcgatggaatcctgctttccactcccattctgtttcatcaatatttcctgtcatttccaagacttttggaaaaaatgatgtccagaatcgacattgttgagcacgtagtttcgtcattattcttgttgactctgtattcaaggttagatatttttgttcagtgcttttgaagacaggccagcttgtgctattgttctgagtctcatttggattcctgatggaatggt

SEQ ID NO: 313502 - DNA, 794 bp, Homo Sapiens
  misc_feature (97)..(157): n is a, c, g, or t
  misc_feature (341)..(341): n is a, c, g, or t
ggcaaatgaatggcattagaattagtgggtggcttgtaagttgtagttataggcactttaccacttcctgccattagcaggcatccttgttttttcnnnnnnnnnnnnnnnnnnnnnnnnnnnnnnnnnnnnnnnnnnnnnnnnnnnnnnnnnnnnnaattctccttcctccttactgtagatcccaagcttctagcttaggtttgcaagtcatattgcttggccctccacattcactgagaggtgaagataggctgaccccctgtcctcttacatttgagggatcatagactgctgtgtgaattctggaaagtctcaggtccctaccagggcactgaatnggcttctcaatggctgtagagacagtacagttttccaaagcagcctaattcatctggacagctaccaggcactttggaaagttggttcagttactactatgaggccataatatatttgctggtattaaaattcttcagaattggaattactatttgaaataatattttggttgacttaagttttgagagacaattctaaaattgatctagagactcattcaatagcaatgtgaccttttaaatacttacattaagtgagcttcctctatttactactgttgaacttcagtaatttttagaggctaaataatggtcgagaatgtttttaagtgtgctcttttattacatgcttgtgcaggttttgtaattcagtacagaaaagtttaaccttgtacatttttgtatgtaaaaagtcttttaagtagtcttatccttatttaaataaacagaata

SEQ ID NO: 313503 - DNA, 544 bp, Homo Sapiens
tttttaggtgtggtattattttatttattggacgacttacagaaaagggttgtatttcagttatttatgcaaatagggctactgtggtcccaacagctctggctctgggcagcacaagaccctttgcccactcccagctttccaaagaacccaaacccaaatccctgccagctccaacttgctcagcactttaattgctacagtgggagccacactggtgccacaactgctcccaagcagcaatatttgtctttcagttgtctttctggtgacaatctttcagcacaaaagaatgcctcaaacagagtaggaatcagcccctgtggcaaatttttgggaagcactttggagtaggtgtccttcaggcttgccttcactggtgactaaaaaagtgactgtgatggcaggtggataatggacttgctttgccaaatgtccattctagtaaattatgtttatgattgaaataatgtcccacttttaagaacagattctcatgcctgagctagagtaccatctggaaactagtgttacttattgaaag

SEQ ID NO: 313504 - DNA, 698 bp, Homo Sapiens
  misc_feature (381)..(442): n is a, c, g, or t
  misc_feature (629)..(639): n is a, c, g, or t
caattttttaatttttaaaaggttttaatttattctaacaagatatgtttttcatactgagttttagacttttaaccactttttactaagatttatatgtcagggactatcattactgttcatggtttatatctgagataaaagaacatttaacttgtaggaaaagaagaggcaaaacatttctgggcaagaggaaagcagttgcagtaccaaaatctaaacacttttggcaaggcttctaaacagcaaatgaactaattatatatccaaaacaaatccattgaaaaatgccatttttgtttcatagacagagaataatgggcatgctcatattaggatattatatattatatccacatttatatgcggattaaatatggnnnnnnnnnnnnnnnnnnnnnnnnnnnnnnnnnnnnnnnnnnnnnnnnnnnnnnnnnnnnnnttcccaaagctctttgtaatataaagccccaattaaatgggcccagaaaggtgaaaactaaatgtttcagactcttggaaatccgtccatgttcctttccctcttgaggaaaggtttcgtcgcttcaattagaccttgggaaacacagttatactggacacccacccagtgcgaaaaggggaatgcnnnnnnnnnnnatgttggggcaaaagacatatttagtttcttctccctcgggaaggctgggcgagaatcg

SEQ ID NO: 313505 - DNA, 758 bp, Homo Sapiens
ccatgcgccaaacatacagaggcagctatacatcttgtgaccaccaaagaatgtttaaatcagctccagtgcatccattttctattagtgtccaggctcctacccagaggcaactgtggagaacgcgatcacagcagaaggcattggtctccaagcttttaacacacagaggcaaccagaaaccttatgaccatggaagggtgcttaagtcaacttgagggtgttcattgtgagagtacaaagcaaaaaagataaaaagatggaaatattctgtccatttatccacacatttctcctttcattctattagtcatgtaagtatgtgtgaaactattttttcttgagaaaacaaacaaccatgaacatggtcctgacccaaatgacctcacatacgttattattatttttactgtatatgccatcctgcagcaagcgagtaatacctctgagtcatttatttgttaatagaaagaagacctcagtgtttttaataaatgtgaatagtatttcttatttcaccatatatttccataattggacaacgcctatttttatctttatgcagttaaaatatatttgcttattgattcattgatccaattataaaaatagagggaaaatgcatgaacgtgaagaccaagaacaacatcctcaaatattcctaatgtctatccctaggatagaaggtgaagactagattttttattatattggacctcagacttccagacctgtattcgatcggtcaatgacttcgc

SEQ ID NO: 313506 - DNA, 664 bp, Homo Sapiens
aatccaatgggctcatttttaaaaaactgggtgtgaatttatgaccccttgtgactatactcatatactgcattcttaaaaagaaaatatttctttgccaaataattcccttataagcatcatacaacctgttggactaatggagaagttaaaatatgcatgggaaatttaatttttcaaaatttatgttaagtaattttgatcattcctatatcctgtcaatagtggaattgccttttttcttcttacataatgtcaggattgtatatagtagaatgatatcagcaaatatatttcattaaattacctaacaagttaaatatacctattctcatatttcaggattgcatatagtagaatgaaatcagtaaatgtacttaatcatcattcacaatttatatttaacaccaacctcacaacacttgttttagaggatgacccatgtggttataatagcggccacattaccttttttgtgttcttaacacacatttaaaaatattacttgttatgaaacctaaaaataatttttagaaaatttgtaggccagtgaaccatgatgcttggtctaaaaggaaaacagagtggctaaatcaaggtgggtatgggcgggaataattttgacatacaaatatgtggggaatcggaaaaaaatttaaattcg

SEQ ID NO: 313507 - DNA, 664 bp, Homo Sapiens
ttttaaagaaaaatttaaaagtttattgttcaaacaagaagtacagaccacaatctagaagactcaaatcaagtggtaagaaattaatcttacagcagttacaacacagtttataatgcataaagggggggaatattttgaccttttttataattggctgttatacattctttttagggcaagttgagctgtttaagcttgttggtctatagctgattggtttaatttcagtgaatcatgctggcaaggatgtaaagcttacattttgcatttcatttatgatcagagacagcatttcaggaaaatcagaatgattagttttggttacacggttgcgggtagtcagccttagggtatttctaaactggggcttccatttttatttttcggtaataatacctgcatgagatgggcagcttaggtcttaaggtcacatacagtgcttcagggggcaagtgttctgtttaaatagagtccaatagcaggcttgtagctgccatcaaaaggattgttttggccaccatctttgggtatttatatgtccaaaacccaagggcttgtgcattctggtagcagtctcttgttgcggagttttcaattggtttggtagaagtaaagagaccctgaggttcccagggccccccattaagtgaggccatgttat

SEQ ID NO: 313508 - DNA, 806 bp, Homo Sapiens
  misc_feature (28)..(28): n is a, c, g, or t
acagtatgtagttgagtggaggctgggngttttaagcataaatccctgtttagtgttacatgggaataaggaatttcattcacttcagccactaagaaaagtttagaatcaccgaaagcttaactgctgtggtttaaagtacagtttctctaaagatcagacatggcactgtctccctctcaagcctggttgtagttcagatgagtcttttcaacatggtcttcaacatggtctagagcttaccagtgatcttctgatcttcaagaagactaagtttgagacttgaccagcatacaagtatagagacctaggaggtggtcttgtggtggtacatttggttaacccattgctggcagtgggagctgatttaggcagggtaaacaggaaagcattaaaagttaaaattcactacaggttttttgttacttttaaagggaatatggataagcatagtaacaaaacccaccagaatctaagcagttttcaccccctcagaaaccactgtcattagtttacaaagttagccctttgaagtaaaacttaatgaggaaggaagtaatgttacctatccttgataccatgaccatttattagatgttttgctatataaattaccgagagaatagtttgtcatccccttagtgtgttagctggtggggtacaatataacctctcatctcaggctattttaaaaaaacaatatttgcttctataacaaaaggaaacaaatctaagaatcattcctgtactacagaagggttaaggcaaaggtagccttttgggctttttaatgaatatgaccccta

SEQ ID NO: 313509 - DNA, 649 bp, Homo Sapiens
ctgtgttatacagcctcatattatcgagctaatgacaggtgacatctgattcatctgttgttggccagcgttgatgagacccgctttcgcatatcgagagtttcttcgtactactaaagatttatcaatctgttgtcgatacattcattcagtagtgtccgattttcttttacacaggtgcggttgttcaaactacactcattgcggcttctgtcatcacctctaatcctaggacagttgtttgaaccaatggtgcctcttcagcttgccgtcaccattgttacctcactctggtacacaccacagttgcatacagattctgttggtgttatctgcctcggatgtgattgaagacgagctgtattcatgcataacgccaatctagacatacctgtgttgttcagcattacactgtatgtctgattctcatggattacattcaacatttcactatgtgtttgggctagatagcattccttaatcacttgcattacacatctacggccatgtgtgcagcatgactgtggaggcgcaactcttatacacacatatatctatatagtactcaggtgctgctgcatgcacccatattgcactcagtgtatcagattctgtgtgaatttgtgaggcgcttatatcgtgaatacct

SEQ ID NO: 313510 - DNA, 1297 bp, Homo Sapiens
aagcacggggtatactacagtgccttcagtctgcacaaagattaaggtaatttacagtcaatctgtgaatgaatgttgagacaatgttacctactgtacaacaaacctgactaaccggcacttttgctgggagatgtttgtcaaagatgctgtaagattctatacaattaggaaatactcagctttaagagtattttcttatcttcacttttttagttacaggtgttttgctcagagagcctattgcagtatgtttccagaaatgcagtcccaaatgtgcatactctatattgtatacaaataaaacaaaattatcagtagtataaatcttacagcattgtttgcaaaaatgcatgccaaagtcacaataagcaatactgtaccacaaattatagagtgcaaatgatttgcttctttttaatgcttttattctacataaattactaccataggctaatgtttaaaaagcaaataaagtggacagatgcaggacaaaatctggtcacccaactataaaaggtgatgtttttaaaaaattacaataaatgcagaagtgatgcatgcagtagccttaattcccactgttccagaaaagaaaaatacagaaaaacccacacatcttactgtactccaccttaaaatgcatcatattgggtttgtttataacagcacagaattccaagagtcaaaatgaaataaagcaggtattttaaagtttaagagccgttatcaaaaataaattacattttttcaagatacagaaatgctgctatgatggctgggagcccagtaacctttcaatagctgcattgatatcacctcctgttgctattagagcttgcaagtttgcttcacggttcaaaaatcccattgcactgagttgttccagttgttgctgaaatctgacttctggattctgtagctgaggatttactccagcaagagcctgcagcatctgctgaataaactgctgatgtccaggttcagtggttcctgctgtgggacttgtgttttcactaggtgtggcgttagatccattagttcccgaagagcctccagtgcttcctaatgcccccaagccaggagtaaaccctgggatgaggcccggggcttccgttgctaatgtctgtaaaccctgctgaatctgtaacaaggcctgcattgctctagggtttgacattgctgatagtgtatcaggattctgcatttgttggaggaaagttgggagctgttgtctcatttgttcttgaagctgaggatttccagcaaataggggattattcagcatcatctgtgc

SEQ ID NO: 313511 - DNA, 897 bp, Homo Sapiens
  misc_feature (177)..(177): n is a, c, g, or t
ccggaacaacagctttgtggccacaaactcgcagcgtggtggtgacccctccataacctgcgtctaggagactcctcccgttagtaaatacactgcccggccaagacccacacttgtgaggccttctacccccccatgaccaaaccagatgtcttaccctaatagtccgcagcttangatattcttgcagtcctgctagaatgacgcaatcaaccgactctagtccaggttagtctctactcactccgtgtcatacatgtgatggatgccgggcgcagtgagagtcatgggatgtgagcattgagggtgaagagatgccagcatgtctagaacgagtatggcacccggacagcaagctctgaatgtcagcagtgttagaccataccctgtatgcggccaaggctgtgagcagactccgatgtgatcacctctatgattcagaatgataaatctggcagcattatctgagacataaagagcaccacttagtagacaactcattcacctgttaagttacaatgctctcaaggtagctttgcaaagacagcaaccctgtgtacttggccctcacttgctgcctttagattaaaccgaaacccccaaaaaccgggcatatacacataaattggcaatttgacacaagttgaaatctgatgtgtcccagcacttaggaaagccatcagtgctgttgaatttgttgaatgcctggaaatagtgcatttgcactgggcaaatggtaatgaaaacctgagatctttctatattggaattacaaagaaacttctcatcaaaggggatttcttttcaaggatatgtcaagatggctattcatctatttaccccactctttaatgagctaattgtctttctgacatagtgtcaccacatctcgcgtgc

SEQ ID NO: 313512 - DNA, 722 bp, Homo Sapiens
  misc_feature (671)..(671): n is a, c, g, or t
  misc_feature (694)..(694): n is a, c, g, or t
gcacgcgagatgtggtgacactatgtgagagagacacttagctctttaaagagttgggtgaatagatgaatagccatcttgacattccttgctcagtttttcattaccactattggccacgtgcaaatgcgactattttcagtcattcaacaaattcaacagcactgatggctttcctatagtgctgggacacattagatttcaacttgtgtcaaattggccatttatgttatatgcccgttttttgggggtttcgttttaatctaaaggcagcaagtgagggccaagtacagaggtttgctgtctttgcaaagctaccttgagagcattgtaacttagcaggtgattgagttgtctactaagtggtgctctttatgtctcagataatgctgccagatttatctttctgaatcatagatgtgatcacatcggagtctgctcaaagccttgggcgcatacagggtatggtctaaacactgctgacattcagagcttgctgttccggtgccaatactcctttctagacatttctgcccttctctttacccctttatgggcctcacctcccccatcaggtttttcactgtctcccgggcatacccatcaacatttaatgtacatctgtagtgagggtgaggaggcactttacaccctgtggattcagggcaggntctgggttttgagttctggcctnttcccttttcctgggtaggggtggacct

SEQ ID NO: 313513 - DNA, 845 bp, Homo Sapiens
ccacgggaacttcctctttattcctgcagggaaaacaatattttcttatgtcagatttctctcaatcttttagtcaatgaagacctgaactacaacaatatagagtcccattttaaattcaaacaaagatatttaggtttgacaacagactcatggtaatgtcatttaaaaagatgggatccaatgaccccaggcaaacatcaaagttttcaccatggcacaaaacttctgccacaatcactcataataattcagctgccttcatatttggcagtaacgtcatgcaagtgaatttgctgatgattagcaaaattacaaaatgagagtcaaggtctcttaatcaagaattacagcaacagagaaattctaggaatgcaggtcaaggcaagaggctgcagctggcctgataatgataccacttgcctaatgttcatttaggaatttgctatcacaaataaaacacgtatctcctctgagttactagaacagaaaaggaaacaatcaggtattacttatcaccattatatgaccatgaaattaaaatatttccttaataatgattaagagaaaaaaatcattctcatgtgttcataatagaagctctatttctgaatttaaaacactactcagtatttgcttaagtactgaaatttagacaatatagcttttgacatattaaaagttctataggaaaaactaagacctcttaattttgctttaatatcaaactaaacagagcagatgaaaaaattcaataagagcatgggttaatccgattcaagaagtgcttccaaaattcaaccacctcgcttcttcttaggagaaactgtacatcaacacagaac

SEQ ID NO: 313514 - DNA, 539 bp, Homo Sapiens
gacggctgtgataaaaagttcctctttttacccgaacagttgagactggttagagccacgacaactgacaaaagcagccaaggaaaggaagacagcgggaagttcaccgcccatttccagaagacatgaatattcttcccctcgctgttcacctccagccccttcagtacagaaaccctacatttagcccctgcccgctcacctgttgagaagttgaactgtgggccaagctcctgcttctcagtccgtggtcactgaataaagtcggcttcggtttcatgtatcggcttcgtgacaccaaacagggaaggaccccatcttttgggcaaccggctttctcagtagcatgtggacaagtctgagagctaaggactcccgggaagacccactcacaggaggtctccatgctcttgtgaattttacttcctggaatgctgccaggttctcacagcgaaaatcagagccccctcagggctctagcagagacaggggagaagggaccattttgaaatacgccagagtgctctgccctctttagg

SEQ ID NO: 313515 - DNA, 402 bp, Homo Sapiens
gtctggagacgacgtgcagaaatggcacctcgaaaggggaaggatgtatttggtgtctgccatatctttgcatccttcaatgacacttttgtccatgtcactgatctttctggcaaggaaaccatctgccgtgtgactggtgggatgaaggtaaaggcagaccgagatgaatcctcaccatatgctgctatgttggctgcccaggatgtggcccagaggtgcaaggagctgggtatcaccgccctacacatcaaactccgggccacaggaggtaggaccaagacccctggacctggggcccagtcggccctcagagcccttgcccgctcgggtatgaagatcgggcggattgaggatgtcacccccattccctctgacagcactcgcggggggggtcgcccg

SEQ ID NO: 313516 - DNA, 589 bp, Homo Sapiens
gtgcaggtaggaggcccgggcgcgacaatcggggggcatcctgcggcgaggggaccctgtggggcttgggacgagagacgggggtctttccgtgggaaccgagctaggtgccgggcaagagacgcgcggctggcccacctggatcctggccaactcgggattgagttcgttcctggtctcagaaggcccgttttgctttcagggaggagcttgtgaaaaatggcacctcgaaaggggaaggaaaagaaggaagaacaggtcatcagcctcggacctcaggtggctgaaggagagaatgtatttggtgtctgccatatctttgcatccttcaatgacacttttgtccatgtcactgatctttctggcaaggaaaccatctgccgtgtgactggtgggatgaaggtaaaggcagaccgagatgaatcctcaccatatgctgctatgttggctgcccaggatgtggcccagaggtgcaaggagctgggtatcaccgccctacacatgtcggccctcagagaccttgcccgctcgggtatggatcgggcggattgaggatgtcacccccataccctctgacagcactcgcagg

SEQ ID NO: 313517 - DNA, 784 bp, Homo Sapiens
agtgtggggagagaaatctccaaagccccctaggttccgtggcccacgggtttttccctagggaaaaccagcttattggcccaagtttcccccttacccttaccggggccccgccgcgccacaaaagaatggttttagaaaaacttttctgagggcccgagggcggccgaaccacgggggaccaggagcccttattctcatggggtgtaaatctgttaccctaaaaaaatgagggttgttacatgaaggcaatttattaacagaaaatattttgaggaatcttgttcacagacggcgaccacggcgaccccccttcctgcgagtgctgtcagaggggatgggggtgacatcctcaatccgcccgatcttcatacccgagcgggcaagggctctgagggccgactgggccccaggtccaggggtcttggtcctatttcctcctgtggcccggagtttgatgtgtagggcggtgatacccagctccttgcacctctgggccacatcctgggcagccaacatagcagcatatggtgaggattcatctcggtctgcctttaccttcatcccaccagtcacacggcagatggtttccttgccagaaagatcagtgacatggacaaaagtgtcattgaaggatgcaaagatatggcagacaccaaatacattctctccttcagccacctgaggtccgaggctgatgacctgttcttccttcttttccttcccctttcgaggtgccatttctgcacgtcgtctccagactccacaccggaaagagagcccc

SEQ ID NO: 313518 - DNA, 160 bp, Homo Sapiens
cctttttaaaaatcagtcgggcaaaagtttttcctcacattctactgtctgatgagattggagagcagcaagaacttgctgtcagcagtcattttacaaacacagctcaggaggtgggtggcacctcgtgccaattcctgcagcccgggggatccactag

SEQ ID NO: 313519 - DNA, 911 bp, Homo Sapiens
tatatataaaaatcagtcgggcaaaagtttttccctacattctactgtctgatgagattggagagcagcaagaacttgctgtcagcagtcattttacaaaaacagctcaggaggtgggtggcacctacatcatgttgtggtgattgttcctgtcaataatgtccacaggtgaaaggatttccttccggatagcaggggcaggcagggagagcgtcgtcttagtcttgaagaggtcagacacgaagaaaactatgcagcaggccaccagggctccttgagcaaatcctgccagaacatcactgggatggtgcttgtggtctgatacgcgagacagtcccgtgtagaaggccatcatgatcaaggtgaactgcaggaggggccggagcaggcgggctcctcgccaagtgaagcgggcctgcaggtatagcaccaaatacagcatagtgtacatggagaaggaggcatggccagagaagaaggactcctggcttcctggactttgctgtcatcacctctgcatctgtagttctgaatgtagccttcagagcagttgatctggctgaaatcagggttgcagacactcaagaagtgaaggacgcaggcgccctatggacactttggcaatgtctgtgaaagactggctgatggcacagccaaagaggaagcagcccacttgcttatagagtgctgccacgtaggggttctgaatcgtcgaccgcgacttcttcaggtaatagatccggtagaattcccccgtgatgatcgcgaggatggccagtgggtacttgatgctctcatcattgcagtaaaaccctcggtggtaaggcttgatggtgcttgtctcgatgatgaggaaggggaggcccgccatgaagaggcagaagaggtcgaggcagatgagcagcacccgc

SEQ ID NO: 313520 - DNA, 455 bp, Homo Sapiens
  misc_feature (390)..(390): n is a, c, g, or t
  misc_feature (404)..(404): n is a, c, g, or t
tgccttgcacaaaacaaaaatttattgggagaaagatggctgatgggaggcaagatctggattcaggaatcctcaattttagctctcgctctgtcaccaaaaccctccgtccctcccagagcctcgaggagtttccccttgtgtaaaccggtatcgcgtcccttccagctctgacatcctgcggttctagaatacccattgattgaaagagctgtggccaaacaggaaggacagagtaagagccgctgacaaaggattctgccaagacagaatcccaaggtcacaggagagaggcttggggcagtgaaagccctctcgggtcttgggctttgggaagtgtgggacttttaccaggcaggatggggccctttggggaaggccaacaggggnacaatttcaagggntgggaggaggaaaaagggccacctttttgaccccaggcagaagggcagagg

SEQ ID NO: 313521 - DNA, 1028 bp, Homo Sapiens
  misc_feature (61)..(61): n is a, c, g, or t
gggcccacaaaacggatgggcttgtgggggtgcttgtgttaagaactttggttcaaccttngtaattttgtccaaccaatggctcccaacagggcgtttcaacgtcccggattatgtggggaatccccctcaaaacaaaaaacactggttggcaccattggccagtgggcccataggtgacgtaggaatgacccgtgatcccaacccatgtctgccgtgcaccagaacacatcctctgcatggaagtcaaacacatacttgaaggggttgtggctacatagagcatgtagcccccaactgtgtgaaccacacccttgggtttgcctgtggagccactggtgtacaggatgaagagtgggtcttcggcatcacaccactcgggctcacactcatcccctgcttcttgcatgagctcatgccaccacaagtcaatcccttggttccatgagatctgcacatctgggcatgacctcttaattgggggggactggctggtggagtcacccatgccgagctctgcccgccccaggtgcttgaccacaatgcagcatcttactgggaaacccttctcctgacacttctgcagggcctcgtcagccagctccttcaggttcacaagcttttcccccctgtagaaggcatctgtagtgatgagaagactgcagctggaatccaagatccgttcacatagagactctgaagagaagcctgcaaacacaatggagtgcaaagccccaatgcgggcacatgccagcatggccaccacaagctctgggatcataggcatgtagatggccactcggtcccccttctgaatgccctgttttcggagaacattgctgaactgacacacttggaccagaagctgatggtatgtgatctgagtggtctcccctggctcattgccctcccagtaaaaagcaactttatctccaagctttttctcatggacatttcgatccagtacattgtagcagatgttggtagttgctcctttcatccctcgtgccgaattcgccacccaggcc

SEQ ID NO: 313522 - DNA, 1035 bp, Homo Sapiens
  misc_feature (789)..(789): n is a, c, g, or t
gacaatgagatgctttatttaaacttgatacatttactatataagaattctgtgaaaaaatggggtatgaaattattttggatctgaatctttgcattataaaatctaacccaaaactatgtcatttcactgtattctgtgactattagcagatggatgaccaaaggcaactacttcctttcctggcaaaacaagacaagtttcagctgacttccccatggtgttacaagttctcctagtgaagtaaaaagtcccaacccctctttctatgcatgtcatctccaggaaggtgagctttaggaagcacctgcgccagccctatatctgtgcttggcatgaggttcacacaggttcggccttgagatggggatgttcctctcaaccaaacaactctacttgaattattccgagactccttggaggggtgaaacttcaggcctgggtgtctctgcagtgagatgtctgtggttggtaaacagttctgtagagtcttgttctactgatctttcttctaggtctgactctgggattgtagtacaaccacctggcatgaccatggtctgtggggctgctgcatcggtacttaggcagagacggccacctttggataatctatcgcagagcaaggtgatatgtttcttcagttggcttgtgtctttgggtatgttcagctggctgttgaggttcaaagcctgctccttagaactcttcgacaggcaagtcttcaacaggtgggaaatggcggcatccaccgtttcttcccagcccaattcttgagtgtcttcttgntaggcagaaatgccgcttccagaatagcaacctggtcagcactaagcttctgccacagcgcgatcagcagaatcaccaaatgggtggcactcttcagcctggtgaatgactggaacagattgccttggttttcctccactgcatctgctagagcaattacctgcttgtaggttccatctaacaaggtgtccaggtgttgaagaggggcaggagttttatctttgaatcttgctagtagccgtcgtt

SEQ ID NO: 313523 - DNA, 604 bp, Homo Sapiens
  misc_feature (40)..(40): n is a, c, g, or t
ccctccagcgatgctgacccagtgagtcagtagggccttnttcacgactgttcttaatccctgtatttcagatgccaatgcattcttctttgagctactttccagtgactcagatgtactggatccagagagtggaaaagtgaaagatgacaggctgccttcactcacctggctgctttgagatggcctcctctctgaatggaatggaccagctttgattcttccaacttccaaggttactgtgcctagggaacactttagcaaagcggcaaccgccttgggtggcattacgaacgtcttccccattcaccattaatatctggtctccctgcatcagtcttccatcggcatcaccaacaatacttaatcctaggcccccggcttcttctgcagctcaatagtgagggtgtcacacacttcctcctctttgtatggggcctcatctctgtagagtgtcaggcgcactctctgtggcgtctgtctcaggacattgattgcttcatcatgtgtggcctttctcaagtcaattccattcacctctaagatctgatctccagcccagagtcttccatctttacatgctgctccttcttcataaacttca

SEQ ID NO: 313524 - DNA, 853 bp, Homo Sapiens
gcatttcaatggagccagatgcatttttcagtaggttaactgcttgggtgtgagtcatgccctcagtggatgtgccacagatggtgacaatcctatccccagctctgagtttttgggtctgtgctgcaactccagttgggtgcatcattgcaataaatgtaggctcatcaccaagtgggctgcctactcctccagcggtgctgattcccagtgagtcagtagggccctttttcatttcgactgttcttaatccctgtatttcagatgccaatgcattcttctttgagctactttccagtgactcagatgtactggatccagagagtggaaaagtgaaagatgacaggctgccttcactcacctggctgctttgagatggcctcctctctgaatggaatggaccagctttgattcttccaacttccaaggttactgtgcctagggaacactttagcaaagcggcaaccgcttcttgggtggcattacgaacgtcttccccattcaccattaatatctggtctccctgcatcagtcttccatcggcatctgcaattcctcctttgacaatgtctgacacaaatactccagtatcgtttcaccaacaatacttaatcctaggccttttcccggcttcttctgcagctcaatagtgagggtgtcacacacttcctcctctttgtatggggcctcatctctgtagagtgtcaggcgcactctctgtggcgtctgtctcaggacattgattgcttcatcatgtgtggcctttctcaagtcaattccattcacctctaagatctgatctccagcccagagtcttccatctttacatgctgctccttcttcataaacttca

SEQ ID NO: 313525 - DNA, 386 bp, Homo Sapiens
cagcgtgtctgaacccccaacgatgctcaggcccagccctgttcgccctttggaaatctcgatggttgtttcgcagccagggataatggggcaggttgcaggatcagaagcaaaaattgctggtgttgatgatctgcttgtatttcggatggacttttctccactggctgcaccagctgctgaaggaacagcctgggaatctggattctcagcatggatggtaagttttactgtcatctttgctgtcttcagaaggctaataaacttttcaatagggtaaccaacaacaatttcatcatctacagccagtatctgatctccgactttgagtcgtccatccgtggctgctaccccatgctctgttaagctctttatgatgactccac

SEQ ID NO: 313526 - DNA, 669 bp, Homo Sapiens
gacaatgtctaccacaaatactccagtatcgtttctttaccaacaatactttatcctaggctttttccggcttcttctgcagctcaatagtgagggtgtcacacacttcctcctctttgtatggggcctcatctctgtagagtgtcaggcgcactctctgtggcgtctgtctcaggacattgattgcttcatcatgtgtggcctttctcaagtcaattccattcaccagcagcgtgtctgaacccccaacgatgctcaggcccagccctgttcgccctttggaaatctcgatggttgtttcgcagccagggataatggggcaggttgcaggatcagaagcaaaaattgctggtgttgatgatctgcttgtatttcggatggactccggttctggggagccagactgtgggaccatcagagactgggagctgttctttttttctccactggctgcaccagctgctgaaggaacagcctgggaatctggattctcagcatggatggtaagttttactgtcatctttgctgtcttcagaaggctaataaacttttcaatagggtaaccaacaacaatttcatcatctacagccagtatctgatctccgactttgagtcgtccatccgtggctgctaccccatgctctgttaagctctttatgatgactccac

SEQ ID NO: 313527 - DNA, 605 bp, Homo Sapiens
  misc_feature (57)..(57): n is a, c, g, or t
tgcactccagggatccctccatcctcataacccatttcatagaagtcaccatcttgnaaataacacaagtactttccactgtcagaggctgtgacgttgtgtattcggagagcagccttccctgcagtgatgccatcccgcagaatagaagttctccctggatcggtgccactctgcttgtcttccacttcctttccatctgcatacacgttcaccacctgccttaggctggaacttacccacttcagctccttggtctctgcactcatggtcgggaacaggttacaagggcagatcagcgtcttcaccccaccatggccaggatgggcccagagggtccaagcacagaaaactgagctgagcaaggagtgagcagctggaccaagaggagggagacatgaaagttgagcagaaggaaagccagggaacttgccattttcatctatgctctgccaaaaatgtctgtccttgagtgtctttacctttgggttccagtatggaaaaccatcccttggtattcccattggagaatcagagcccacagaataaagacggtcaatcaataattctccattctttctattatggcttagcctctcctcgtg

SEQ ID NO: 313528 - DNA, 627 bp, Homo Sapiens
atttgctttctctttttcctttcttccggatgagaggctaagccataatagaaagaatggagaattattgattgaccgtctttattctgtgggctctgattctccaatgggaataccaagggatggttttccatactggaacccaaaggtaaagacactcaaggacagacatttttggcagagctcagttttctgtgcttggaccctctgggcccatcctggccatggtgggtgaagacgctgatctgccctgtcacctgttcccgaccatgagtgcagagaccatggagctgaagtgggtaagttccagcctaaggcaggtggtgaacgtgtatgcagatggaaaggaagtggaagacaggcagagtgcaccgtatcgagggagaacttcgattctgcgggatggcatcactgcagggaaggctgctctccgaatacacaacgtcacagcctctgacagtggaaagtacttgtgttatttccaagatggtgacttctacgagccctggtggagctgggttgcagatggagtgggcctgtatgcagtagcagcatctgtgatcatgagaggcagctctggtgggggtgtatcctgcatcatcagttcccttctcggcctgggtcgcg

SEQ ID NO: 313529 - DNA, 1296 bp, Homo Sapiens
  misc_feature (855)..(855): n is a, c, g, or t
ctgaaaaggaaaacacaacaactgaacgaggaagggatgctgttggcttcagagatcaaacacctgccccgaagactcctaataggtcaagagagagagacccagacaagcaaactcaaaataaagagaaaaggaaacgaagaagctccctctcaccaccctcttctgcctatgagcggggaacaaaaaggccagatgacagatatgatacaccaacttctaaaaagaaagtacgaattaaagaccgcaataaactttctacagaggaacgccggaagttgtttgagcaagaggtggctcaacgggaggctcagaaacaacagcaacagatgcagaacctgggaatgacatcaccactgccctatgactctcttggttataatgccccgcatcatccctttgctggttacccaccaggttatcccatgcaggcctatgtggatcccagcaaccctaatgctggaaaggtgctcctgcccacacccagcatggacccagtgtgttctcctgctccttatgatcatgctcagcccttggtgggacattctacagaacccctttctgcccctccaccagtaccagtggtgccacatgtggcagctcctgtggaagtttccagttcccagtatgtggcccagagtgatggtgtagtacaccaagactccagcgttgctgtcttgccagtgccggcccccggcccagttcagggacagaattatagtgtttgggattcccaacagtctgtcagtgtacagcagcagtactctcctgcacagtctcaagcaaccatatattatcaaggacagacatgtccaacagtctatggtgtgacatcaccttattcacagacaactncacctattgtacagagttatgcccagccaagtcttcagtatatccaggggcaacagattttcacagctcatccacaaggagtggtggtacagccagccgcagcagtgactacaatagttgcacccagggcagcctcagcccttgcagccatctgaaatggttgtgacaaataatctcttggatctgccgcccccctctcctcccaaaccaaaaaccattgtcttacctcccaactggaagacagctcgagatccagaagggaagatttattactaccatgtgatcacaaggcagactcagtgggatcctcctacttgggaaagcccaggagatgatgccagccttgagcatgaagctgagatggacctgggaactccaacatatgatgaaaaccccatgaaggcctcgaaaaagcccaagacagcagaagcagacacctcc

SEQ ID NO: 313530 - DNA, 1214 bp, Homo Sapiens
  misc_feature (215)..(256): n is a, c, g, or t
aattgattttatttttttacataaaaagttcagtaaaaattggataaagtaaagtgattttaagcagtaaatcaatcttatcaacatagcacaaggctggccaaaaccacaaggcagcctgctttggaatatttacatgataacaaattaaaccttgcaggagaacttaaactgtccttacaaagtcttcctgtgatcctagcatgtagaggctnnnnnnnnnnnnnnnnnnnnnnnnnnnnnnnnnnnnnnnnnnttattttcaatatattcccatatccattaaaatataattccagatcatccagggtaaagggttgtgggtggggatgcgcatgggtctgtgcgctgacagcaccgccaaggagaagacccaggtttaagagtggagtcaggtctggccagggtcttttttaagcccttgcacctctgatggcttctaaccacatgccaacagctcacaactaggtaatcacttgtagatggagttcatttttgtggccttcagttgacatctgcagggttgaattccccagggtgatgtatcatcagtagcacagtgctgacaggggtgggacagaaaggcccacaggatttcctctccctagagtctgtcttacctgaccacccatcctcccaccctggcccaacagtcactctaattcagtgtcctctttgggtttgtaaacagccccaaacttctgcatgtacttcttaatgtactccttggttttgtgtttcacattctcattgcactccaggtcctcaggattcttacagtacttcagctccttattcataacaccgtgatcagcttgcgagccagatgtttaaagtcttcagttgtggtaattcttcccactttgcagtcaggtttccggtaagggttcaggcactggacgatgaactgggacatctcttttctgaatacttctttgcttttctttgctagttcactggaggtgtctgcttctgctgtcttgggctttttcgaggccttcatggggttttcatcatatgttggagttcccaggtccatctcagcttcatgctcaaggctggcatcatctcctgggctttcccaagtaggaggatcccactgagtctgccttgtgatcacatggtagtaataaatcttcccttctggatctcgagctgtcttccagttgggaggtaagcctcgtgccgaattcgccacccaggcctcgctcttt

SEQ ID NO: 313531 - DNA, 965 bp, Homo Sapiens
aaaaaacaatattttccaatatattcacatatcccttaaaaatttattccagttctccaggtaaggggttgtggggtggggatgcgcatgggtctgtgcgctgacagcaccgccaaggagaagagcccaggtttaagagtggagtcaggtctggccagggtcttttctaagcccttgcacctctgatggcttctaaccacatgccaacagctcacaactaggtaatcacttgtagatggagttcatttttgtggccttcagttgacatctgcagggttgaattccccagggtgatgtatcatcagtagcacagtgctgacaggggtgggacagaaaggcccacaggatttcctctccctagagtctgtcttacctgaccacccatcctcccaccctggcccaacagtcactctaattcagtgtcctctttgggtttgtaaacagccccaaacttctgcatgtacttcttaatgtactccttggttttgtgtttcacattctcattgcactccaggtcctcaggattcttacagtacttcagctccttattcataacaccgtgatcagcttgcgagccagatgtttaaagtcttcagttgtggtaattcttcccactttgcagtcaggtttccggtaagggttcaggcactggacgatgaactgggacatctcttttctgaatacttctttgcttttctttgctagttcactggaggtgtctgcttctgctgtcttgggctttttcgaggccttcatggggttttcatcatatgttggagttcccaggtccatctcagcttcatgctcaaggctggcatcatctcctgggctttcccaagtaggaggatcccactgagtctgccttgtgatcacatggtagtaataaatcttcccttctggatctcgagctgtcttccagtgggaggtaagcctcgtgccgaattcgccacccaggcctcgctctt

SEQ ID NO: 313532 - DNA, 1206 bp, Homo Sapiens
  misc_feature (441)..(441): n is a, c, g, or t
  misc_feature (1192)..(1192): n is a, c, g, or t
gcaattaacattttctttaatgtatatttttcaaagaggaccacggaatcctgttctctaacccaaggggcagtgtaggtggttttaagcccacagaatattgagatatttctcttgtggttttggtggggtggtgggatgcagaaggttattaaagatcaatttaagcatcagatagactatcccttttatttttttaacttttaggttctggggtacatgtgcaggttgttatataggtaaactcatgtcaagtggttttgttgtacagattattttgtcacccaaggtgctaagcctagtacccagtagttattttccctgctcttctccctcctcccaccctccaccctcaagtaggccccagtgtctgttgttcctttctttgtgtccttgagttctcatcatttaagctcctacttctaaatgagaacatgtatnttggtttcctgttctgtgttagtttgctaaggataatggcctccagctcagatggaatatctctatcatatagacctgttgttacagggcaggatcggatgatggacactgaagtcctcagcttgctaagttcagttgctctccctagcctccttttggcttcagagtcttttgattccatctatcctggtattttttgtgtgctgatgtttagttctggattggcttcagctgtgctaataggaagggcgttgtcttttcaagcaatcttaaaaggtggtcaatcaaaaggccagagtctgaatcccttctgtggcttaaataatttgaggatcaagtccagtgtcttgttaatccctgttctactgtgccagacactatcttgaatgcttttatatgttcaggttcaaaatcgctctttcataccaggggatgatagtaacgtgtaacttgcaatagattccttcatcttagtaataagatgatcagtctagttaggacaaaatagagattgaataaattaacttttccaagtttacagagtaaaaatgagcagatctctgcctggttttgtgaaaaagagttagcactggtaaatagaatatttctactcctacaccattctttcagtatatcatcactgaagacaggaagataggcacacagattcttcctcgtagtaattcatagtgcactaggtggagatgaagtatgtattagtacaatgtgatggcatttattattcagattnccaggattctaggg

SEQ ID NO: 313533 - DNA, 1201 bp, Homo Sapiens
gtcctcagcttgctaagttcagttgctctccctagcctccttttggcttcagagtcttttgattccatctatcctggtattttttgtgtgctgatgtttagttctggattggcttcagctgtgctaataggaagggcgttgtcttttcaagcaatcttaaaaggtggtcaatcaaaaggccagagtctgaatcccttctgtggcttaaataatttgaggatcaagtccagtgtcttgttaatccctgttctactgtgccagacactatcttgaatgcttttatatgttcaggttcaaaatcgctctttcataccaggggatgatagtaacgtgtaacttgcaatagattccttcatcttagtaataagatgatcagtctagttaggacaaaatagagattgaataaattaacttttccaagtttacagagtaaaaatgagcagatctctgcctggttttgtgaaaaagagttagcactggtaaatagaatatttctacttctacaccattctttcagtatatcatcactgaagacaggaagataggcacacagattcttcctcgtagtaattcatagtgcactaggtgaaagagatgaagtatgtattaagtacaatgtgatggcatttattattcagataatcccaggattctagaagaaaataaagaagagtgacagttcagttagggtgtgaacttccagaggagcactgcttaagctgaacttgagagcattgtgcaaaagcacagtagtctgttaagaactagaaataacctagcttgtgccacttcgggagtattaagacataagcctagaaaggtaggcaaaggttagatcttagactgtcttgtatttttctcattcctgttgattacctacctcaaaattgaatatgtttttcctcctgcctaacacaaaactactcaagggcagaaatttaaattcttccttggtgtatgtgcaaagaaggttgaatatattcatgcctaccttattttgggactagggaatacagtagtattacttttccgaagacttgcctgaatagtatattaaggtgggaggcaactgactagttaggtcagtatttttagaaactcttaatagctcatactcttgataccaaaagcagccctgattgttaaagcacacacctgcacaagaagcagtgatggttgcatttacatttcctgggtgcac

SEQ ID NO: 313534 - DNA, 622 bp, Homo Sapiens
ccaagccctgacacacagtaggtgctcaagaagattgtattagttattaaaaccaatgggtaaattaactggtatctaacccgaagcaagaagcttctcattcagaaaaccggacattgctactccaagctcctgaccaagggctccttccacggcccctgcccaggacagggcccctgaccctcagcttgggagcctggaggacggaaggcgcagggccaggcatgccatcacaccccaggaacacaaaggagcaaagaaggcttccaccctgggcaccaggactgcaaactacacaagcgccactgctattaaacctgattacacagatgaacatgcctctgtcctgccaagtccgatgaaggtggattcatctccctgtttataaaaccagacaagatgatgagcatcaaaaggctggggctgagacgagactggttactgaggtcatctagctgcccagttgtttaattccttagacaaatgtcaatgccctcaatcaaaagctatcccactcctccgcctccctcccactttaggaaatgtggaagacagggacccactgttccagcattgctcttctcccaactacgcggtcgcttgtatctgggcctgacctgtt

SEQ ID NO: 313535 - DNA, 687 bp, Homo Sapiens
  misc_feature (11)..(11): n is a, c, g, or t
ctgaggtttanttccaaacaggtcaggcccagatacaagcgaccgcgtagttgggagaagagcaatgctggaacagtgggtccctgtcttccacatttcctaaagtgggagggaggcggaggagtgggatagcttttgattgagggcattgacatttgtctaaggaattaaacaactgggcagctagatgacctcagtaaccagtctcgtctcagccccagccttttgatgctcatcatcttgtctggttttataaacagggagatgaatccaccttcatcggacttggcaggacagaggcatgttcatctgtgtaatcaggtttaatagcagtggcgcttgtgaaatagtttgcagtcctggtgcccagggtggaagccttctttgctcctttgtgttcctggggtgtgatggcatgcctggccctgcgccttccgtcctccaggctcccaagctgagggtcaggggccctgtcctgggcaggggccgtggaaggagcccttggtcaggagcttggagtagcaatgtcgggttttctgaatgagaagcaaaacaacactcgggaaatgagcctcgtttggctggaaatagtgtgccagtgttttcttgcttcgggttagataccagttaatttacccattgttttttattaactaatacatctttctgagcaccctatgtgtgtca

SEQ ID NO: 313536 - DNA, 636 bp, Homo Sapiens
  misc_feature (545)..(545): n is a, c, g, or t
  misc_feature (571)..(571): n is a, c, g, or t
attttcttcctcagagattttggcctagatttgcaaaatgatgaccacatctttgatttgggggattgctatagcagcatgctgttgtctatggcttattcttggaattaggagaaggcaaacgggtgaaccacctctagagaatggattaattccatacctgggctgtgctctgcaatttggtgccaatcctcttgagttcctcagagcaaatcaaaggaaacatggtcatgtttttacctgcaaactaatgggaaaatatgtccatttcatcacaaatcccttgtcataccataaggtgttgtgccacggaaaatattttgattggaaaaaatttcactttgctacttctgcgaaggcatttgggcacagaagcattgacccgatggatggaaataccactgaaaacataaacgacactttcatcaaaaccctgcagggccatgccttgaattccctcacggaaagcatgatggcctgggtgacagaaggcatgtattctttctgctaccgagtgatgtttgaaagctgggtatttaactatnctttggcagagatcttacaaggcggnacacacagaaggcacatattctaaacattctttgacacttcaagcttcgacgtcttttcgccctg

SEQ ID NO: 313537 - DNA, 655 bp, Homo Sapiens
  misc_feature (438)..(438): n is a, c, g, or t
  misc_feature (603)..(603): n is a, c, g, or t
  misc_feature (607)..(607): n is a, c, g, or t
  misc_feature (609)..(609): n is a, c, g, or t
  misc_feature (612)..(612): n is a, c, g, or t
  misc_feature (621)..(621): n is a, c, g, or t
ctttctaatcagagattttcttcctcagagattttggcctagatttgcaaaatgatgaccacatctttgatttgggggattgctatagcagcatgctgttgtctatggcttattcttggaattaggagaaggcaaacgggtgaaccacctctagagaatggattaattccatacctgggctgtgctctgcaatttggtgccaatcctcttgagttcctcagagcaaatcaaaggaaacatggtcatgtttttacctgcaaactaatgggaaaatatgtccatttcatcacaaatcccttgtcataccataaggtgttgtgccacggaaaatattttgattggaatttcactttgctacttctgcgaaggcatttgggcacagaagcattgacccgatggatggaaataccactgcacggaagcatgatggttaacctncaacgtatcatgagaccttcagtcttctctaactcaaagaccgctgcctgggtgacagaagggatgtattctttctgctaccgagtgatgtttgaaagctgggtatttaactatctttggcagagatcttacaaggccggacacacagaaagcacatattctaangccntnccnattcacatngtcaggactgcgcacaatgccccggagaaactgc

SEQ ID NO: 313538 - DNA, 625 bp, Homo Sapiens
  misc_feature (387)..(410): n is a, c, g, or t
aacagaaccccctccagctccagtgtctggtgcttcgtgtcaccggaattgccttgacacatttccgaaatcactgccaagggacagctggcttctccgcgcggcgacgctcgcgaggcctagcgaatgcgcgttgctttaaattaccataccaatcacttcttgagggtgagtcccctctgttatgaaggggagcgggacaagtgaaataatgtaccgtgctgctcttagtatcagaagcgaacaaaggccaagaatcatgctggggttcccggctccccggcggctttgacattgatcggaagtgcgccatctcgtggcggctgcgcgcctaggttgggccggagttccagccccgagccgagagacggaaaccagctccgggcnnnnnnnnnnnnnnnnnnnnnnnnatgtgcccagcccgctgctattgagatctcatttttacatctaagaaatcgctgcaaaaccccagccgggtttatagcggcgcattccaaatatgcaaattggccggccccggacgggtttacgaccacattgtcacagccatcggaggatgggcttttatagggctcagaaatcaaacccgcgcccgaccgccgcccgcccgcgagcagtcctc

SEQ ID NO: 313539 - DNA, 1159 bp, Homo Sapiens
tttatcttacaaaatcaaatacattttattctattaaataaaatcaagtttattcaaggaatgaccaggagttttcatcacctttcttcctacctcttctctcttccctccaccagatctggcatttaagggcacgatgggagcgggagacaggaggggcatccggtcctggaggctggactttaagtgctccacgcagcagcggcctcccatagtgcacaatggtggaaggaggcggttcgtatgtccccagggcggcatcccaatgccagaccttcctcccatggctctgttcaccctttacaagccagctacttgcagaaaagtggggcactgtgttccatccaacctgcaggcaactggtgcaaacggaggggtgtgtggctcagcttagcagcctagagctcaggaaccaggacagatcctgaaacaggagctgaaagggccagaactggcacctttgggatctcacaaaaatggaaagagccgctttttcacaatatagaggaccgtagcaagaaacagggctagcgcaaggaagatgagaagcgtccgtcagctcccggcgattgtattttgtgataagcttccggcccagctggatggtgcccgacatggacttaaattcttcatgcatccaggatcgttcgtgaagaagtgactagagactgcatggcctcctcgctctgctggacctgctgggccatcatcctgctgatccccatgaggctctcagtgatggtactggatgtctgggccaggctctctttggtggcctttgccttaagagatctcctccctgaagaagttctgctttctctagattgtcgattgcaattttgcaggtgagattagctttcctccatgaggcctgattgctgagcatctgctttttgtgattctccacttcctggagtagaagttgtttctctgattctttgtcttgctctttagccaactgctccaggtcctgtattctgtgacgcaactgttgaaatttctcttttactttagtattcagttcagtaagagcacttaagggtcctgaacaatcacggatatcctgaataagcgccttcacctccaggtcaaatttgacaatctcttggttacagatccggacgtggacgtcttggggagccgccatgttggggacccc

SEQ ID NO: 313540 - DNA, 428 bp, Homo Sapiens
  misc_feature (24)..(24): n is a, c, g, or t
  misc_feature (36)..(36): n is a, c, g, or t
gaagggtaacgggaagtcctgggnccccaggctccnctttgggtgggttttccctttggccccttaaaaaagaacctccctcccctgaaagaaagttcctgcctttcctcctaagattgtccgaattgccaattttgccaggtgaagaattaagctttccctcccatgaaggcctgaattgctgaagcatctgcctttttgtgattctccacttccctggagtagaagttgtttctctgattctttgtcttgctctttagccaactgctcccaggtcctgtattctgtgacgcaactgttgaaatttctcttttactttagtattcagttcagtaagagcacttaagggtcctgaacaatcacggatatcctgaataagcgccttcacctccaggtcaaatttgacaatctcttggttacagtattcg

SEQ ID NO: 313541 - DNA, 1928 bp, Homo Sapiens
gaaagaaagctaatagaccctttaatgcatgtccaggttaaaaaataataataataaagaaatgcttctggtggcccttgagccaactgttcaggtgtggagaaggggttcagtcctggccggagcaggcaggaataaacgtgggtgttcactgtggccagcagctccctcagacacaaacaccgtccttcccgtggtctggcccgttgtcgtgtaagcgggggacaggaagcatgagggagcttgtggaggtcgggccacgtgccatcccagacatcaagaggccccaatgggtttttacttgtttctcgcagtctggaggggcagccatgaaaactccaagcgccccttggcataagaaggagatgccccagactctccacgtccagaaactggtgggatctggctcatggggaggggcagagcggcagtgataggacttcaggtgagcccaaggggctgggggaacagacccagctactgagcaccctgcggcatgagactccttgagaggtggggagcacggggccttcaggactccgctgccttcttgttggtcttgttcaagagtttcttgagggtggaagacatgaaggtaaagctctgggccgagccgtcattcctctccaggtcctccaagaagcagaggaacagcgtgtccacacacatgccatagacgctgaagaaaccgtgtgcaatcaagtaggagccaacgatcaccgtcagtataggaacccagtaataattgaggggtggtgctgtatcctgcacgatcctgatacggtgggtgaagaagaagaaagccaggatccccacactaccaacgatcagaagtttgcccaacaggaagaggaagtcagtaactttatccaggacagccactctgatgatgtttctcatgagcaggaagaaggcattcctggccgaggtgcagaaattggtgccgtagatggcaatcatgatgtaggcattcctattaaggaatttgatgaacttctccaggcaccagaagcagcatttgagacaggtcatgaggcacttggcaaacttgttctctgcagctttcagccgctgatccaggtactcgagtatcacacggatgatctgcacaatggccaggatgagcgcgccaaaggccagggagcctgtgtggtacctgagcgcccggccaaaggcagagaagagcgggaaggccggcaggtcgtccggcttgcgcagggcccagtagtaggaggcaaaggccccggccagcgtgacctggcccggcgccagcacgaagttggccaaccagaagaaccatgaaggcattgaagatctgcaggcccagcagggcccggtggtagcccgactcaccaccgtagaaggcgaactggcaacgggcattggggcattggcgggactcattggaggaggggaaggtctctgggttgcaggttttcgcagtaaatgggcaggggctgtcatcaaagatcttatagaccgcttcgttggaagtggacaggaagacagcagtgctggcccagtaggcgatgcagaggcacagcaagaagaaggtgaccagtgggtagagcaaggagcacatgacgtatcccacagccctgctggcttctttgatgagtgcaatcgcgatgagaattctcttccggagaaagatgagcagcaagatgataatgacttcaaggatactcagaatgatcataaaggccaaccaggtctgccgtaagtgcaggtacacccggaaatccgtctgaaagccgaggtccaccaaagagacatcagagccggcctcaccacgcagtcgggagtactccatgtagcagtgaaatattccgtagcccagcaccagaatcaccatgatgatcatcacccagaccataatccagccaggaagcgaagcaggatgatgaacaggaggctcatcgccatgg

SEQ ID NO: 313542 - DNA, 526 bp, Homo Sapiens
ggctgcttcccgcttacccccagcgacgctaacgttaaagcagttcgtaagaaggcaacaagttcttctcctctacagaaggattttgcaaacaattcggcaagttccaaatgattctgatcgcaaatacctgaaagattgggcaagagaagaattcagaagaaacaaaagtgccaccgaagaggtgagaacaaaatcatggatacaatccggatgatgattactcaaggcaatatgcagctcaaggagttagaaaaaacacttgctttagcaaaatcttaactatagcattattctgaaggattttcaaagtctccatgtgttttgttgcatttaggattaacaatggacaacacaaagcccagtcttactatttatatgtacagtatttggtgatagagagcaaaggaaaaacacatcagaacagttgccttaacactgaaaaacataccctgcattttgaaaatgtttatggatgtctcagcagttcttaaaagaagaaaaaaaccactaacaaatggccagt

SEQ ID NO: 313543 - DNA, 750 bp, Homo Sapiens
  misc_feature (85)..(154): n is a, c, g, or t
  misc_feature (156)..(156): n is a, c, g, or t
  misc_feature (183)..(183): n is a, c, g, or t
agggtaaatttttgtattttttagtaggaggaggaggttttcccccatgctgggccagggtgggtcttgaactccctggacctcnnnnnnnnnnnnnnnnnnnnnnnnnnnnnnnnnnnnnnnnnnnnnnnnnnnnnnnnnnnnnnnnnnnnnntncatagtagtttcgatttacacttcccnaaatgatgtgtccagcatctactggccatttgttagtggtttttttcttcttttaagaactgctgagacatccataaacattttcaaaatgcagggtatgtttttcagtgttaaggcaactgttctgatgtgtttttcctttgctctctatcaccaaatactgtacatataaatagtaagactgggctttgtgttgtccattgttaatcctaaatgcaacaaaacacatggagactttgaaaatccttcagaataatgctatagttaagattttgctaaagcaagtgttttttctaactccttgagctgcatattgccttgagtaatcatcatccggattgtatcctcttcggtggcacttttgtttcttctgaattcttctcttgcccaatctttcaggtatttgcgatcagaatcatttggaacttgccgaattgtttgcaaaatccttctgtagaggagaagaacttgttgccttcttacgaactgctttaacgttagcgtcgctgggggtaagcgggaagcagccatgtccaccagaggtccgccggagcctcagcgcgcccc

SEQ ID NO: 313544 - DNA, 1264 bp, Homo Sapiens
agacaaatgctcagttttattgatttaattttgacactagggaatctcacagcagaagtacaaatcatatgtacaagtatttatatcaatgaaaatttccattggtgattttttggcagaatattggtcttgactctgtggaataaatgacgacgtaaacgtagctgcacaggggtgttcctgtataatgcttgaatcaattgtgtgtgaaagcatcatgcaaatggctaattaaattgggtgatgactgaaaggttataaatccttcattccagctccacgagcaggatccccttctccaactgtgtctccagcttgacagtgcacagatttcaccgtgccagttttcccagctgtcatactattctgcattttcatggcttcaatcacacaaatttcttgaccttctgctaccgcgtctccaggcttgacagagacggccaccaccactccgggcatcggggaacgcagaacactgcttgtgtcctcagtcactttttccagcataaatttgttcaattctgcggcaagtctggttaagatattcaccttgtacactgtaccaagaaactgaatgctcatgtttccacctgcttctcgagaaagacactggacagtcctctgagtgccatcaacgctgacagacaataagggcgaagccaggttccacgtgctggtcacatttagtttcgacccatcaacttccaccgagaacactgacccattgtttgatgctactacggtatgaactttatcatgcaattttactgagagctcccagttggctatgtctggtttaataacaggcattcttgaattttcttgaaaatgttgtgctcttaactggaatgccacaaacaatgatgatgctattgccaataactggttcttctcactcttggttagcatgtgtcctttgaagccatcaggatacacatcggagagaaatttagtgctgatgtctccttttacaaagcgtgagttgattatcacctctcgaagtaatgcaatattatgtgtaacacctcgaataacatagttatccagtgcatctgccattctcttcagtgcctcagttctatcagagccatatgtgattagttttgaaatcataggatcataataaatgctaatatcacttcctggttggatgccactgtccactcggacaccaggtagatgtaacggttcttggtactgagacaatctcccaatagatggtaaaccaccagacttgtaggggtcctcagcataaacccgacat

SEQ ID NO: 313545 - DNA, 736 bp, Homo Sapiens
atgtcgggtttatgctgaggacccctacaagtcttttggtttaccatctattgtgagattgtctcagtaccaagaaccgttacatctacctggtgtccgagtggacagtggcatccaaccaggaagtgatattagcatttattatgatcctatgatttcaaaactaggcactcggataactatgttattcgaggtgttacacataatattgcattacttcgagaggtgataatcaactcacgctttgtgaaaggagacatcagcactaaatttctctccgatgtgtatcctgatggcttcaaaggacacatgctaaccaagagtgagaagaaccagttattggcaatagcatcatcattgtttgtggcattgcagttaagagcacaacattttcaagagaattcaagaatgcctgttattaaaccagacatagtcaactgggagctctcagtaaaattgcatgataaagttcataccgtagtagcatcaaacaatgggtcagtgttctcggtggaagttgatgggtcgaaactaaatgtgaccagcacgtggaaccttgctttggccttattgtctgtcagcgttgattgcactcacaggactgttcagtgtctttctcgagaagcagtggaaacatgagcattcagtttcttgtacagtgtacaaggtgaatatcctaaccagacttgccgcagaaatgctttattctggagggtgccgtctcttgtcgcctggg

SEQ ID NO: 313546 - DNA, 483 bp, Homo Sapiens
accaaaggcccaggtttattgatttaattttgacactagggaatttcacagccgaagtccaaatcatatgtgcaagtttttatatcaatgaaaatttcccttggggattttttggcacactattggttttgactttggggaataaatgccgacgtaaacgtagctgcccaggggtgttcctgtataatgcttgaatcaattgggtgtgaaagcttcttgcaaatggttaattaaattgggtgatgactgaaagggtataaatcctttattccagctccaggagcggatccccttttccaactgggtttccagcttgacagggcacaaatttcaccgtgccagttttcccagctgtcatactattttggattttcatggcttcaatcacacaaattttttggccttttgctacctggaatggccaaaataggcggatcttttcagacagactctcggttgcctggggttaaaaagggaaggggt

SEQ ID NO: 313547 - DNA, 482 bp, Homo Sapiens
  misc_feature (368)..(368): n is a, c, g, or t
gagaggtgataatcaactcacgctttgtaaaaggagacatcagcactaaatttctctccgatgtgtatcctgatggcttcaaaggacacatgctaaccaagagtgagaagaaccagttattggcaatagcatcatcattgtttgtggcattccagttaagagcacaacattttcaagaaaattcaagaatgcctgttattaaaccagacatagccaactgggagctctcagtaaaattgcatgataaagttcataccgtagtagcatcaaacaatgggtcagtgttctcggtggaagttgatgggtcgaaactaaatgtgaccaggcacgtgggaacctgggctttcgcctttatttgtctgttcagncgtttgatgggcactcaggagggactgttccagtgttcttttttcgaggagtcaggttggaaacctggaggcatttcagttttcttgggttacagtgtacaagggtggaatatt

SEQ ID NO: 313548 - DNA, 561 bp, Homo Sapiens
  misc_feature (475)..(491): n is a, c, g, or t
tcaaagtataatctttttatagccaactgctaatgcaaattaaaacatatttcattttaacatgatttcaaaatcagtttttcatactaccctttgctggaagaaactaaaaatatagcaaatgcagaaccacaaacaattcgaatggggtagaaacattgtaaattcatttgaagtatattcttattggaaatgtacttttggataagtagggctaagccagttggatctctggttgtctagtcattgtcataagtaaacctagtaaaaccttgttctatttttcaatcatcaaaaagtaattataaatacgtattacaaacaagtggatgtttttaatgaccaattgagtaagaacatccctgtcttaactggcctaaatttcttctggtagtgtcagttcaactttcagaagtgccacttaaggaaagttgatttttgtttttgtaatgcactgtttttaatctctctctcnnnnnnnnnnnnnnnnnggtttaaaaagaccaatactaaactttatttgttaaacatttgaactatttaccctttttgtcttatttg

SEQ ID NO: 313549 - DNA, 1841 bp, Homo Sapiens
  misc_feature (60)..(60): n is a, c, g, or t
  misc_feature (66)..(66): n is a, c, g, or t
  misc_feature (79)..(79): n is a, c, g, or t
  misc_feature (83)..(116): n is a, c, g, or t
  misc_feature (128)..(128): n is a, c, g, or t
cacaatcaaacttatttttattccaaccaaaattctctcccccaccccttttcccacaanccaaanaataactaccccncccnnnnnnnnnnnnnnnnnnnnnnnnnnnnnnnnnncacccctccccnccagacacaacacaaaacaagggacttgagaagttagagaaaacctttaacacgtttctgtaaaatcctttctgaggtggtttagtacaggtactacccatcagcaacttagcggccaggtgagttggtgcagaagcgcttcgggtgaattcataccagagccaccgggtgtgactcggctacctctcccaattaccacagggaggtcttaaaattgaatttcagtttcagcagatacttcagatttacctgagcaatatcatagacaatgtactcgttatatagtagagaggtgtcattcacaccagatgaaatcccggtcccaagaggaacgtctacaccatccagactaatgttagctgaaggatcaggggtagttttgcccaaacctttgacactgtgcttgcccttgggtaacttgctgatatgtgaagcgtgcttcagttcatacatgtttccaagggcaacttctcccaacaggattaagcctattgggtctccctgagacgtatggcagtagttggcactcttggagaccatgtcagcgaaatagatccctttaccaaacatgtagcctgtcacgggcgcttcaggcggggctatccgaagaccctgggacaggatcccagcaaagttggtggtcctggacccgtgccacagcaatcttcggttatgaagctgcttaaagggcttgtaacgctggcattcgccttcacgctctatcttaaagatatcgatgacttccaagtcatacgcattgtgtgtggttgcatgagtgttcttaacatacttcctgatgatctcggcttcttcagaatctctgtcaaccaccttaatgtcagttttgagcttctcatagttgacatcgatgggatccttgctgctatcatcagaccctcccctgagcagactgtaggccacctcgatgtccagcaggttgtcaagcatttccaccttggcctgcacactgtctgcattgttcaggagcggaggcttcttcatcccaaagtcgtgggggatcagggtgtaaaagcgatttgagagatccaggatctgagagtcgctgctgccctgagacaccgcctgctggacctcactgaggatggagtatgcggcctggatctgccttttgctcagcttccccaagggcatcttctgaaggtcgatctcatactccaccatggctttcttcatactttccacatcaaagatcatcttgatgaggtcctgaactggcttggggagcttggacttggtgccaggatttactgtcagcttcttcactgcctcttcatcctggccatagtcaatctccagggggtagaactttttgggatacttcgtggaaatttttggagtgccaagcgttcccggttttttcttcatataatttcatgaagtgctcaatggcatcctccttggacggcatctgttccagtttgttgctaccgatcaccgtacccacacggccccaggacctctacagagtcacacaatggaaagagcaagggctcaggtatcggatatattgggtgttaatcttatatccaacacccacctgctgtgttacctcgggcaagtcacctaacttctctggacttcagttttcctcttcaatcaaatgggaccataagaaggatgataataataatttcattgatttgttgagcagtgcctggcacacggtaggcactcaataaatatttgttgaat

SEQ ID NO: 313550 - DNA, 764 bp, Homo Sapiens
  misc_feature (294)..(345): n is a, c, g, or t
  misc_feature (581)..(635): n is a, c, g, or t
acacaaatttctttaattctctttgagtgcctgagtaccagaaggcatgtgcatttttaatcgagtattactattagcccttggggtaagtatatttgtggtagagttttaatttggaagacaaaagtgcccataagaaagtcaagaatttcaaatgcaccttttaatactacatatttcaagagctcccatgttcagtattcctggagaaggaaagctctttttgtttctaagtatgagaaattgttagcgttccttcctttggtcttcccacacccttcaccacaagaggcnnnnnnnnnnnnnnnnnnnnnnnnnnnnnnnnnnnnnnnnnnnnnnnnnnnnctaaatagtatgaaattagtttttatttttaactaaaaataaatgcttaacatctttccaaaatcaaaactaaagacgaacacttagaaaaaagggtggaagtgtatttttccttccctggggaaaccagtaaggcagacattctaacgaagcttggttttttccataggactagtctatgcaacagaatctctctccagccttttctctatgtcagttttatctacctggcaagnnnnnnnnnnnnnnnnnnnnnnnnnnnnnnnnnnnnnnnnnnnnnnnnnnnnnnngggacttgagaagttagagaaaacctttaacacgtttctgtaaaatcctttctgaggtggtttagtacaggtactacccatcagcaacttagcggccaggtgagttggtgcagaagcgcttcgggtgcc

SEQ ID NO: 313551 - DNA, 848 bp, Homo Sapiens
  misc_feature (25)..(25): n is a, c, g, or t
  misc_feature (28)..(28): n is a, c, g, or t
  misc_feature (52)..(52): n is a, c, g, or t
  misc_feature (95)..(96): n is a, c, g, or t
  misc_feature (100)..(104): n is a, c, g, or t
  misc_feature (345)..(399): n is a, c, g, or t
  misc_feature (427)..(427): n is a, c, g, or t
aggggcgggcgcgtgccaggggaanaanatattacgtttcatgttggcgggngagggggggcgaccctcgattccttggtgttgtgagttttccnnccgnnnnnaagtaggaaaattaggtttttatttttaaactaaaaaattaaatgctttaccatcttttcccaaattcaaaactaaaggacgaacccttagaaaaaaaggggtggaagtgtatttttccttccctggggaaaccagtaaggcagacattctaacgaagcttggtttttccataggactagtctatgcaacagaatctctctccagccttttctctatgtcagttttatctacctggcaagnnnnnnnnnnnnnnnnnnnnnnnnnnnnnnnnnnnnnnnnnnnnnnnnnnnnnnnagggacttgagaagttagagaaaacctntaacacgtttctgtaaaatcctttctgaggtggtttagtacaggtactacccatcagcaacttagcggccaggtgagttggtgcagaagcgcttcgggtgaattcataccagagccaccgggtgtgactcggctacctctcccaattaccacagggaggtcttaaaattgaaatttcagtttcagcagatacttcagatttacctgagcaatatcatagacaatgtactcgttatatagtagagaggtgtcattcacaccagatgaaatcccggtcccaagaggaacgtctacaccatccagactaatgttagctgaaggatcaggggtagttttgcccaaacctttgacactgtgcttgcccttgggtaacttgctgatatgtgaagcgtgcttcagttcatacatgtttccaagggccc

SEQ ID NO: 313552 - DNA, 379 bp, Homo Sapiens
cgcagacatacacttctcaaactgaggctcgcactctcgcctccagcatgaaagtctctgtgcgcccttctgtgcctgctgctcatagcagccacacttcattccccaagggcttgctcagccaggtaagggcccctcttcttctccttgagaccacattgtcttctctctgagttatcatggaccattcaagcagacgtggtacccacagtcttgcgtttaacgctacttttccaagataaggtgactcagctagaattccagctgtgaaccccaaatccagcttctttcaggattccagctctgggaacacacttagcgcagttacttccccagctggtttcagcagagtttggggatcagggttcgaggggtgggt

SEQ ID NO: 313553 - DNA, 830 bp, Homo Sapiens; identical to SEQ ID NO: 121654
  misc_feature (59)..(63): n is a, c, g, or t
  misc_feature (66)..(70): n is a, c, g, or t
  misc_feature (77)..(77): n is a, c, g, or t
  misc_feature (79)..(79): n is a, c, g, or t
  misc_feature (82)..(82): n is a, c, g, or t
  misc_feature (84)..(84): n is a, c, g, or t

SEQ ID NO: 313554 - DNA, 855 bp, Homo Sapiens
ggtttcaataaactgtcctttccccaccggcggtccccaatcagaaggcgccgttcaggtcctggggccacgggggatggccttgtatgcaccatccaactcctcgctttccatgtgtgaggtgatgtcctcgtctgtagcatcagggtactggatgtcaggtctgcgaaacttcttagattttgacctcagtccataaaccacactatcacttcggccatcatatgtgtctactgtggggacaactggagtgaaaacttcggttgctggcaggtccgtgggaaaatcagtgaccagttcatcagattcatcagaatggtgagactcatcagactggtgagaatcatcagtgtcatctacatcatcagagtcgttcgagtcaatggagtcctggctgtccacatggtcgtcatcatcttcatcatccatatcatccatgtggtcatggctttcgttggacttacttggaagggtctcttgtttaaagtcattggtttcttcagaggacacagcattctgtggggctaggagattctgcttctgagatgggtcagggtttagccatgtggccacagcatctgggtatttgttgtaaagctgcttttcctcagaacttccagaatcagcctgtttaactggtatggcacaggtgatgcctaggaggcaaaagcaaatcactgcaattctcatggtagtgagttttccttggtcggcgtttggctgagaaggctgcaactggcctgagacgagtctggtcccgacgatgctgtgctctgcctcctcctgctgctgctgacaaccaagccctcccagaatttaaatgctgctgcagacatcctccaccaacacagggag

SEQ ID NO: 313555 - DNA, 1523 bp, Homo Sapiens
tcggcagtaaaaaagggttatgttttattaattgctggacaaccgtgggaaaacaaataagcaattgacaccaccaaattcttattacattcaagataaaagatttattcacaccacaaaaagataatcacaacaaaatatacactaacttaaaaaacaaaagattatagtgacataaaatgttatattctctttttaagtgggtaaaagtattttgtttgcttctacataaatttctattcatgagagaataacaaatattaaaatacagtgatagtttgcatttcttctatagaatgaacatagacataaccctgaagcttttagtttacagggagtttccatgaagccacaaactaaactaattatcaaacacattagttatttccagactcaaatagatacacattcaaccaataaactgagaaagaagcatttcatgttctctttcattttgctataaagcattttttcttttgactaaatgcaaagtgagaaattgtattttttctccttttaattgacctcagaagatgcactatctaattcatgagaaatacgaaatttcaggtgtttatcttcttccttacttttggggtctacaaccagcatatcttcatggctgtgaaattcatggctgtggaattcacggctgactttggaaagttcctgactatcaatcacatcggaatgctcattgctctcatcattggctttccgcttatataatctggactgcttgtggctgtgggtttcagcactctggtcatccagctgactcgtttcataactgtccttcccacggctgtcccaatcagaaggcgcgttcaggtcctgggcaacggggatggccttgtatgcaccattcaactcctcgctttccatgtgtgaggtgatgtcctcgtctgtagcatcagggtactggatgtcaggtctgcgaaacttcttagattttgacctcagtccataaaccacactatcacctcggccatcatatgtgtctactgtggggacaactggagtgaaaacttcggttgctggcaggtccgtgggaaaatcagtgaccagttcatcagattcatcagaatggtgagactcatcagactggtgagaatcatcagtgtcatctacatcatcagagtcgttcgagtcaatggagtcctggctgtccacatggtcatcatcatcttcatcatccatatcatccatgtggtcatggctttcgttggacttacttggaagggtctgtggggctaggagattctgcttctgagatgggtcagggtttagccatgtggccacagcatctgggtatttgttgtaaagctgcttttcctcagaacttccagaatcagcctgtttaactggtatggcacaggtgatgcctaggaggcaaaagcaaatcactgcaattctcatggtagtgagttttccttggtcggcgtttggctgagaaggctgcaactggcctgagacgagtctggtcccgacgatgctgtgctctgcctcctcctgctgctgct

SEQ ID NO: 313556 - DNA, 581 bp, Homo Sapiens
  misc_feature (361)..(361): n is a, c, g, or t
  misc_feature (383)..(383): n is a, c, g, or t
  misc_feature (413)..(413): n is a, c, g, or t
  misc_feature (433)..(433): n is a, c, g, or t
  misc_feature (446)..(446): n is a, c, g, or t
  misc_feature (454)..(454): n is a, c, g, or t
  misc_feature (480)..(480): n is a, c, g, or t
  misc_feature (510)..(510): n is a, c, g, or t
  misc_feature (562)..(562): n is a, c, g, or t
gcagagacagcatcgtcgggaccagactcgtctcaggccagttgcagccttctcagccaaacgccgaccaaggaaaactcactaccatgagaattgcagtgatttgcttttgcctcctaggcatcacctgtgccataccagttaaacaggctgattctggaagttctgaggaaaagcagctttacaacaaatacccagatgctgtggccacatggctaaaccctgacccatctcagaagcagaatctcctaggccccacagacccttccaagtaaggtccaacggaaaggccatggaccacatgggatgatatgggatggatggaaggttgatgatggaccatttggggacagccagggantccatttgacttcggaacggantctggatggatgttagggatggacactggntggatttcttcacccagttntggatggaggttnttcacccnttcttggattggaattcttggatggnacttgggttcacttgatttttttccccacngggacccttgcccaggcaaccccgagttttttttcactttccagtttgtttncccccacaggtagggacac

SEQ ID NO: 313557 - DNA, 553 bp, Homo Sapiens
  misc_feature (327)..(446): n is a, c, g, or t
gcacgaggccatttttacagatgaggaaacaagcatagaggttaaatatcttttctaaggtcatgcagctaccaaattggtgcagccaggaattgcggccaagcagcgcggttctagaaccaggactcttatcaattttgcgacacagctactagttgtttctaatctcatttcctgtccgtctgttctctggtcacttgggggcagccattctgggctgtgggttcagaataattggagacttatttatcccttaatttttctagtcttattatttctaaaaagaaatagaacctgaggccgggcgcggtggctcacgcctgtaannnnnnnnnnnnnnnnnnnnnnnnnnnnnnnnnnnnnnnnnnnnnnnnnnnnnnnnnnnnnnnnnnnnnnnnnnnnnnnnnnnnnnnnnnnnnnnnnnnnnnnnnnnnnnnnnnnnnnnngtggtgaacgcctgtggtctcaactgctcgggagtttgagcccaggaagtccaggctgcagtgagccgtgatcgtgtcctgcactccagccgaggcaacccgagtga

SEQ ID NO: 313558 - DNA, 463 bp, Homo Sapiens
  misc_feature (44)..(44): n is a, c, g, or t
  misc_feature (82)..(220): n is a, c, g, or t
atgctctctcattagccaccccagcctttcacactttatgcttnccggtcgatatgttgtggtgaaattgtaaccgaatacnnnnnnnnnnnnnnnnnnnnnnnnnnnnnnnnnnnnnnnnnnnnnnnnnnnnnnnnnnnnnnnnnnnnnnnnnnnnnnnnnnnnnnnnnnnnnnnnnnnnnnnnnnnnnnnnnnnnnnnnnnnnnnnnnnnnnnnnnnngcacgagggctgatgagatggtgtgtttttcatccggcaaccaactggtctccttcactgtctccagcaccccgcacaatactgtgtgccaggtgctcagtaattatttatcaagcgcataagagcacagcacatccagggacggaagttccaaagggctaggagagtggttagacctggaagccaaaaggtttacagtctggataaagagcttttaccttgaggccgggcacagtggcttat

SEQ ID NO: 313559 - DNA, 651 bp, Homo Sapiens
ctgaggaattcggcacgagcaccagcatgctttcataccggtccgtggacatccggaagagcttgcagctggaggaactcctggcgagggagcagctggagtacaccatagaggaggaggtggccaagcagaccatccgcatgtggctcaagaagtgcctgaagcgcatcagagctaaacagcagcagtcgtgcagtatcatccacagcctgagagagagtcagcagcaagagctgagccggtttctgaacccgcccagcatcgagaccacccagcccagtgaggacacgaatgccaacagtcaggacaacagcatgcaacctgagacaagcagccagcagcagctcctgagccccacgctgtcggatcgaggaggaagtcggcaagatgcagccgacgcagggaaaccccagaggaaatttgggcagtggcgtctgccctcagccccccaataagccattcagtgtcctcagtcaacttacggtttggaggaaggacaaccatgaaatctgtcgtgtgctggacccggcagctgactgtggagagcgacgaaagtggggatgaccttctggatatttaggtggatgtcaatgtagatgaatttctagtggtgggaaccgttttcttaatgtccttgattggccaatgggc

SEQ ID NO: 313560 - DNA, 763 bp, Homo Sapiens
  misc_feature (74)..(74): n is a, c, g, or t
  misc_feature (106)..(106): n is a, c, g, or t
  misc_feature (171)..(171): n is a, c, g, or t
  misc_feature (504)..(504): n is a, c, g, or t
cccacgcagcaaggatccatcaaagtctctagggatcatgaggagactcaaagagcaacctgatgaggctctcnctgtatggacaaaaagcattaaggattaatanctgcgatgggccaaaatacattccatatatcaaatccatgagtccaaaatgaatctaaggggaanaaaaggaaaaattaagaactacgtggccactgtcagagatgccagtgaagcagctcaatattttgaaatttggtaaataaaaaggaaagattcaaacatatatcctggctttcctgtgtaaatgataccactgggtaaccaaatagtaaataagggaaagtttctctttctagaaacagtccacccaataaagaagaatgatagaattagaatagcatccctctgcaacccctaattgggtatgaatcatcaatgactggtaccatcacaaaaagacacccagatattatgtgcatccaaatagaagaatacagtactacacctatgaggtgnctgtgtgtgtgctggagtggggtgttaacgctgaatctgagagcaagcctctagatgctacaaccaccttaacaatttacaaaaaatccaataaactgccaacccttgctctatgggataagcaagttgcttcaacaaataaaatagtaagaggaaaacagatggaagggaaaacctcctaaaacatttcaatcaatcacaacatacagatcttactggtatctggatttaaacctgcagcccgggggatccactagtt

SEQ ID NO: 313561 - DNA, 723 bp, Homo Sapiens
  misc_feature (536)..(536): n is a, c, g, or t
  misc_feature (634)..(634): n is a, c, g, or t
ggtttaaatccagataccagtaagatctgtatgttgtgattgattgaaatgttttaggaggttttggcttccatctgttttcctcttactattttatttgttgaagcaacttgcttatcccatagagcaagggttggcaggattttgctgattacattcctgtggtggtgttcaacatattcctttgtttattgtattttttgtaaattgttaaggtggttgtagcatctagaggcttgctctcagattcagcgttaacaccccactccagcacacacacagccacctcataggtgtagtactgtattcttctatttggatgcacataatatctggttgtctttttgtgatggtaccagtcattgatgattcatacccaattaggggttgcagagggatgctattctaattctatcattcttctttattgggtggactgtttctagaaagagaaactttcccttatttactatttggttacccagtggtatcatttacacaggaaagccaggatatatgtttgattctttcctttntatttaccaattttcagaatattgagctgcttcactggcatctctgacagtggccagttagttcttaattcttcctttttttccctttagattcattntgaactcatgcatttgaatatatgttgtatttctggtccatcgcacgtattatccttcatgcttttgtccatacagtgagagcctctct

SEQ ID NO: 313562 - DNA, 408 bp, Homo Sapiens
cgggctgcaggattcggcacgagcttttgacagataacatttaatagtaataaataagtggtaataagtaataaataataattgagtgcttttcacattccaggtgctgagctgttttgcatttcacgcccctcatcttcatttatattgttgttcttaattatccccattttaccgatgaggaaagggagattgtaaccaccccgaggctgcacagctaatacccagagagcagaatttcgccacatgcgaagattctagctaatcctgcattatctggtacccaccatttgtatcccggcatcatttatcttctccctaccttgttgccaaggcacgtgtgggtccctaacggctggcaccaattattcaagacaccctaagggagaccagaaggatagcgatttt

SEQ ID NO: 313563 - DNA, 655 bp, Homo Sapiens
gcaggattcggcaccagcttttgacagatatcattaaatagtcctgaataagtggtaataagtggtatatactaattgagtgcttttcacattccaggtgctgagctgttttgcatttcacgcccctcatcttcatttatattgttgttcttaattatccccattttaccgatgaggaaagggagattgtaaccaccccgaggctgcacagctaatacccagagagcagaatttcgccacatgcgaagattctagctaatcctaaaatctgtttttcaccagacgacgccggcccttccggcttgtcgtgcagcacggcattatctggtacccaccatttgtatcccggcatcatttatcttctccctaccttgttgccaaggcacgtgtgggtccctaacggctggaaacaccaattattcaagacaccctaagggagaccagaaggaaagcgatatttaagaaatgcaggcacagaaaatttaagcattttagactcattctccatcagaacagggaggtctttgaagaggctgcttttgtccagcaattagtcaatgactctagaatttcagcgcagatccgatgagtatagaaggacgccgtgtacgccctgtgttgcccatgcaacgcaggcatgcctcttctcctttgg

SEQ ID NO: 313564 - DNA, 412 bp, Homo Sapiens
  misc_feature (149)..(182): n is a, c, g, or t
  misc_feature (194)..(258): n is a, c, g, or t
ggcacgcgagttatatttttttaactcttatttcaggttcaagggtacatgtgcaggtttgttatataggtttgtgtgtcttgggggtttggggtttggtgtacagattatttcaccacccagtaataagcatagtacctaataggtannnnnnnnnnnnnnnnnnnnnnnnnnnnnnnnnntgaccgagtctnnnnnnnnnnnnnnnnnnnnnnnnnnnnnnnnnnnnnnnnnnnnnnnnnnnnnnnnnnnnnnnnngtttgagggatttctttggcttaggcttcctattagctggaattacaggcatgtgccaccatgcttggctttttggattttcagtgtagaccgagtttcataatgttggccaggctgtgcttgcccctgagcttgggtgataccctgtcttcgg

SEQ ID NO: 313565 - DNA, 470 bp, Homo Sapiens
tgagccaccgcgcccggcccctgatggtattttatagagagcccattagctgtaaagaagtgcctttccttccagatggcagcatgagcatgaaggactaagaaagcatacttggagtcagtgccaatgttagttacttttcccttgcttaatttgagtgctcttgtaagagctatcagttcagttagttgagtgcttgtgcctggagagatgggtgcagtttcaataacatcattcagagtgactacgacatatcctgcctaacggactccttgctccacacaggcgtgggccgaatttctggaaccccggggatccactaggtttagagcggcccgcaccgggggggagctccaagttgtggtcctttaaggggggttaattcgagctggcggaaaaaggggaaaagctggtcctgggggaaatggtatccctcacaattcacacacaaaccagccggacctaaaggg

SEQ ID NO: 313566 - DNA, 627 bp, Homo Sapiens
  misc_feature (557)..(557): n is a, c, g, or t
  misc_feature (606)..(606): n is a, c, g, or t
atgaaaatattgaaatttgttcaaaaatagttcaaaatattttgggaaatgaacatcagcatctttatgccaagattcttcatttagtcatggcagatggagcctaccaagaagataatgatgaataatcctcaaaatgttttttaatcctcaactatatgaaagcatttgaatttggcttatcagaataacaagcttcagtgggaaatacagcaattatttatttaaaaaatcagatttaagatggactttcttattgcatgaaaaagatggagaaacatgccatttttcaatgaagattctaatattttatctattttgttcattgaattccatggttaaatctcattatatactttattaaatcatccaaccaaagcataggaaacattgacccagaacctgacttaatggttttgaagatttactatgcaatagggtaactttgagtttcagcaaatgtctttaggttgaaggaattacctatgtcatgaaggacctgtctgtggtttttcaatggagtctttaagcatgatcttttttctggctagtacttngtttcattctggccagcagttctacatttcaccttgtcaagggctctgnttacatctatacattttggtg

SEQ ID NO: 313567 - DNA, 599 bp, Homo Sapiens
  misc_feature (555)..(555): n is a, c, g, or t
atgaaaatattgaaatttgttcaaaaatagttcaaaatattttgggaaatgaacatcagcatctttatgccaagattcttcatttagtcatggcagatggagcctaccaagaagataatgatgaataatcctcaaaatgttttttaatcctcaactatatgaaagcatttgaatttggcttatcagaataacaagcttcagtgggaaatacagcaattatttatttaaaaaatcagatttaagatggactttcttattgcatgagatggagaaacatgccatttttcaatgaagattctaatattttatctattttgttcattgaattccatggtttctcataacctgacttaatggttttgaagatttactatgcaatagggtaactttgagtttcagcaaatgtctttaggttgaaggaattacctatgtcatgaaggaccctgtctgtggtttttcaatggagtctttaagcatgatcttttttctggctagtacttggtttcattctggcccagcagttctacattaaatcaccttgtcaagggcctctgnttacatctatacattttgaagatgattttaggcttgttttttct

SEQ ID NO: 313568 - DNA, 319 bp, Homo Sapiens
  misc_feature (16)..(16): n is a, c, g, or t
  misc_feature (92)..(92): n is a, c, g, or t
  misc_feature (164)..(164): n is a, c, g, or t
gcacgcgccagcagcncaaggatggctaatgcacccagagagttctttgaggggctcgaagagaccgaggaccagcttcagccaccttcccncttccggcctgaagcctctcgaaagccaggcctgaacacggaacagctgggaagatctgcttccttccctgngatgcctgaagggtgacacaggaggtgcctgccagcgccgcatgctggtccgcctgcagacggccctgtccacgcacacacagacacgtcccaaatattgcaggaagatctcttgagggagctcaaactcggcttcccttggaaataaaagtgac

SEQ ID NO: 313569 - DNA, 784 bp, Homo Sapiens
atggctcagtggctgcttcgagccagaatctggtgcatgtgtctgagaaatcctccagtgcaggtccaaagaagccaacatgcacagccatctgcatgcctttgggattggcgtggggcggagagtcttctcctgggcttgcttcagggaaggagactggcttcccggccttttcggaatccagcaggagccctcagttcagccccagcccctgaaacttggcagtgtccgtacagacaaagtaagtcctcagctcgcctttgcctttgacgttgatcaggccacggcattcacaagagtacccgaggccctggaggatggtgcaggtctcctcggtaacctggattttcccaaagttctcccagtgctttccattcggctggccacattgacagtgtttccccagatgtcatactgaggcgggccccaatcactccagcaatcacaggcccatggtttatgccgacgcggaggcggaaggagttgaaggagtgcctgttgatgccgtccagcttactcatcagggcgatgctgaactccaccatgacaccaatgtgggcatgctgccgctccagctcctggttctcgtgccctgaggcgacgctgagccctgcagctgccatgtacgtgctgccgatggtcttgatcttctccacgccgctgaacttgggcttcagtaggagctcgtcgaagtcggcaatgatctcattgagcaggcgtaggcactccagcccttctttgctcgtgccgaattcctcagcccgggggatccactagttctaga

SEQ ID NO: 313570 - DNA, 660 bp, Homo Sapiens
atattatctcagtgttaaccgaaataaaaaaagtattgctgttaatatcaaggatccaaaaggggtgaaaatcatcaaagagcttgcagctgtttgtgatgtgtttgtggaaaactatgtccctggcaaactgtctgcaatgggcctgggatatgaagatatagacgagattgctcctcacatcatctattgttccatcacagggtatggtcagacaggtccaatttctcagcgagctggttatgatgctgttgcctcggctgtttctggtctgatgcacatcacagggcctgagaatggagatccagttcgcccaggagtagctatgactgatcttgccactggcctatatgcatatggagctattatggctggattgatacaaaaatacaaaactgggaaaggactgttcattgattgtaacctactgtcatcccaggtggcgtgtttgtctcacatagctgcaaattatcttattggtcaaaaggaagcaaaacgtggggtacagctcatggcagtatcgttccttaccaggctttttaaacccaggatggctatattgtagttggagcaggtaacccagcagttgccaccgtctgcaagatcttggattggcctgagttgattgataattccagtatactcccacttcggtacaca

SEQ ID NO: 313571 - DNA, 863 bp, Homo Sapiens; identical to SEQ ID NO: 142347
  misc_feature (52)..(52): n is a, c, g, or t
  misc_feature (128)..(128): n is a, c, g, or t
  misc_feature (207)..(247): n is a, c, g, or t
  misc_feature (354)..(356): n is a, c, g, or t

SEQ ID NO: 313572 - DNA, 283 bp, Homo Sapiens
tcgatctctctgatctcgtgatccacaccaccttgggcttccaaagtgctagggttacaggcatgagccaccacgcctagcttcttgagtgtttttgtcatggggtgctgaattttgtcagatgctttttctgtgtcagttgagatgatacgtgttttatgtgtttttttccccttcattctgttaatgtgctgtgttacattgattgatttcatatgttgaactatccttgcattccaggaagagatcccacttgctgtgggtgtataattcttttttgccg

SEQ ID NO: 313573 - DNA, 1055 bp, Homo Sapiens
  misc_feature (11)..(11): n is a, c, g, or t
  misc_feature (15)..(15): n is a, c, g, or t
  misc_feature (29)..(29): n is a, c, g, or t
  misc_feature (31)..(32): n is a, c, g, or t
  misc_feature (35)..(35): n is a, c, g, or t
  misc_feature (42)..(42): n is a, c, g, or t
  misc_feature (52)..(52): n is a, c, g, or t
  misc_feature (61)..(61): n is a, c, g, or t
  misc_feature (63)..(63): n is a, c, g, or t
  misc_feature (72)..(72): n is a, c, g, or t
  misc_feature (86)..(86): n is a, c, g, or t
  misc_feature (105)..(204): n is a, c, g, or t
actcactactnaacncgcctctggatcantnnccncctagcncccaatagtnaactacagntncaccacacnccagctattttgtnttttttgtaaagacgagtnnnnnnnnnnnnnnnnnnnnnnnnnnnnnnnnnnnnnnnnnnnnnnnnnnnnnnnnnnnnnnnnnnnnnnnnnnnnnnnnnnnnnnnnnnnnnnnnnnnnctcttcccagtctacagctcctacagagcactctgagggcctgtctgcccagtggaggaggcttccgctggtgttctagggggcatcttgggcattgactcaggtggggggccactctcttcttggagatgaccctggtaaagccggcgaaggcgagacagttctctctccggtggctgtttccagttgtaccatgggtaccaggggtcacctgagaccagggtgggggctggcggagtagcactcacagccccatgagaggtactgaagtcaaggtcccgtggttcaacctgggggatgtggtaaatgaggagaccatgatccctggctttctggatggcctgggtcaaccgcttgtgctgcttcacacagactcctgtgtatggagcatagaagatgatacccgtgtgggcgcagacaaattgctccaagagcttcacgttcctaaagtcaacatgcaacttgtgatctcgacagatggggcagggattcccaacaactttattccgacgaatacatgtcttccgagtccgctgtgggggtacaccacccttgtggttgcggcggtagtcagcccagacggggcgagaaccatatcgctcctggtattcttctgattccagatatttccagggctcatccttataaggagaaatgggaactgaggacaaagaatcttcctcagagggagctttggtgcaaagagtctggaggggaacctgaactctgtgagaacctcggaagagagatagcataggaagccgcctcagcacggtgtttaatacagacgccgccatcttgaccggacgcgtgggtcgacgatatcccaaggacttccgggaccggtaccc

SEQ ID NO: 313574 - DNA, 644 bp, Homo Sapiens
  misc_feature (25)..(25): n is a, c, g, or t
  misc_feature (89)..(178): n is a, c, g, or t
  misc_feature (277)..(328): n is a, c, g, or t
  misc_feature (349)..(363): n is a, c, g, or t
tccaactgggcaaaacagccccctnaaaagtgcctctgtaggaagctgtagactgggaaagagagcccccagccgtggtggctcactcnnnnnnnnnnnnnnnnnnnnnnnnnnnnnnnnnnnnnnnnnnnnnnnnnnnnnnnnnnnnnnnnnnnnnnnnnnnnnnnnnnnnnnnnnntcgtctttacccaaaaaatacaaaaattagctgggtgtggtggtgcacacctgtagtctcaactattggggaggctaaggtaggatcacttgatcccannnnnnnnnnnnnnnnnnnnnnnnnnnnnnnnnnnnnnnnnnnnnnnnnnnntgacagctagaccctgtctcnnnnnnnnnnnnnnngactgggaagagagctagagggactaggagataatgtgtatgtaggtttatgtgatgggatatcaccctgaagagttgtgtcttttgtggccagtgacaaatccaggaaatgaatgttgctgatagggataaatcttgaggctgagggcgggtggtacagatgtgtatgggaaaccccaacccctatatattgtaaatagatgggctgggctaaacattgttgccgtttcatacttctaccaactcagcttttacacaataaagctctactgtctctggtt

SEQ ID NO: 313575 - DNA, 878 bp, Homo Sapiens
ccgacgggtctattttttgccccggtttcacagtttcctacaagaagcacttttggaggggccctgtcttgccccaggggaaggagggttttccgcttggtgttttaggggagccttcttgggcccttggaactcaaggtgggggggcccactcttcttctttgggagatggcccttggtaaaagcccggcgaaaggccgaggccagttcttttctcccgggtggctgttttccagttgttcccatgggtacccgggggtcacctggagaccagggtgggggctggcggagtagcactcacagccccatgagaggtactgaagtcaaggtcccgtggttcaacctgggggatgtggtaaatgaggagaccatgatccctggctttctggatggcctgggtcaaccgcttgtgctgcttcacacagactcctgtgtatggagcatagaagatgatacccgtgtgggcgcagacaaattgctccaagagcttcacgttcctaaagtcaacatgcaacttgtgatctcgacagatggggcagggattcccaacaactttattccgacgaatacatgtcttccgagtccgctgtgggggtacaccacccttgtggttgcggcggtagtcagcccagacggggcgagaaccatatcgctcctggtattcttctgattccagatatttccagggctcatccttataaggagaaatgggaactgaggacaaagaatcttcctcagagggagctttggtgcaaagagtctggaggggaacctgaactctgtgagaacctcggaagagagatagcataggaagccgcctcagcacggtgtttaatacagacgccgccatcttgacgtacgcccaggacaggaatccc

SEQ ID NO: 313576 - DNA, 532 bp, Homo Sapiens
ttccttgtccagtgctgtttattgagtccatcatcagaggcaggaaagacgccactcatcacagagggcatgtgggctgcgggcaggggcttagggtcctgcagaggacaagtagctgggacagcccttcaccccgacaccccatggccactgtgaggcaggctgaggagacaggacagggaatggccaggtgcagaatctgcacagccccctgccgggtcgcagatggccaccacccagcaggcccctggcactcacccacaggcagttccccaccccacttcccccttggaccctcccaaatcagggccggggagtgagacccagacctggccccgatggcaggaggcaccctagctgcttccagggccaggaggggtgggtgggatacagtgaggccaaacaaggcagaagcgggtgcagtagtccctggctactgcccagcttccgggactcccacagctgggctcagccttggtcctggcagtgctgggctcagaaatacagggctggctcgctgcggaagtccgaa

SEQ ID NO: 313577 - DNA, 1183 bp, Homo Sapiens
  misc_feature (1106)..(1106): n is a, c, g, or t
ggtggcaattcggacgaggcacagtcagcttttttcagctgtagcacacctatgcctctgtacctttgcccatgttgttccttctgtagggagttccttttccttttcctcagcccagtgagctcctattcatccttcaacacccaactcacgggaaaaatctagccctcctaccataacactgtggcatatcccctgcccagcttgggctctctcacctcctgtctccttaaaccccttataccttaaattaaaggtataatttgattaatagttttactgacaataacaaaaatattcgctgtttatttagccccagtatgtcccactttgctaacccagtatggaaactgattcagagctgctgtagaacctaggcctaggaatctgcctttttagcaagcaccccactgtgaatcactcttctagaaggacagctacctactgtgggggagacaagtacccagtgggttgtgatggagagtatgggcttgagtcagatgacttggatgggactcccagcttggccactcactggcattgtgattgtggccaatttcttaacccccttcagcgtccgtttgtttgcacagtgaaatggaaacattaatacttaccttgccaggctggtgcgaggatgagattggggttgtggtatgagaagtcagcacagagcttggcaggtggtgcccatgcaggtgtcagcagagttaaagggattgttgatgtagtagacgtggtcccgcttcacttacaccttgccagaaccacctggagggcacctcaaactccaatttcaaaaacccggcctaacgggttccctggacccaaagcaacttgcgtcccctctagacctggagggtttcctatggcttggcaggaagcgttgctcttaccccctccaagagcaagccccaaacggaaccgggcgagctcgaagccccttggggtggaaaaacgaacccctctaatgacaccagcctccacggtgagggaacctaccaacatccagtccccctatgtttgtggaatggcggacaatcctgtggatagagctactgcagcactctgtagggtgcggcccagtaaggcactaaagctagtgnccgttccacacagtgtgtgcggacacaccccctgtatctccgtacaggtgacgtgggggacattcgccgtcgtgtta

SEQ ID NO: 313578 - DNA, 1890 bp, Homo Sapiens
  misc_feature (266)..(317): n is a, c, g, or t
  misc_feature (1132)..(1132): n is a, c, g, or t
  misc_feature (1808)..(1808): n is a, c, g, or t
tattgcccccacttgttgaaaaataaatgtagttcaaattgccactttccagtatttttgagcttatttaatgagttctggaacatttatatctaatctatattttagataattactttttatacttttttaactcatggtatccccactccccacccccacctcatttttatttgtcccttctcaaagcagccacttagcccacatggggagaatcaagtctccagttatttctgccacaactgcttctaaggcctcctccttcnnnnnnnnnnnnnnnnnnnnnnnnnnnnnnnnnnnnnnnnnnnnnnnnnnnnagtgacagcatcatcgtgctgtttgcctgtattggctatgccttctaactccaaccagtcacttgagaatattctttcaagattctgggccccgattcttttctgtttaaatccctaaagcaaagatctaattctcaagcaatgtctgtagttcagtgggggtgaacaatgaatatattcatgctaggaatttgtgtctgttgttgtactcacagcagcaacatgagtgtaaacagtagacaataaacttttatttaagaaaactgattcagttgtgttggaaaaaataaagaaatctgatattaaacgttttctaagatcatttgtataggttcagtgtattcataagaagtccaccctgagatgcctgtaaaagtcaaatgtaattacacttcaaactttaatcctaaattattgacagatagatagatagtgaccaacttaagggtaatcatatatgtgactaacatttgggaggaaacaggaaaacagtggttctcaaaacaacaatatcccagtctccatttgaaagagcatagatcttggtaaatcattttgaaaactatgtgctttatttcccaaaagatcaaacttaatttttaaaagacacccttttcagaagtatgggttttcattgctgtttagtttcttaggtgtggtatgtcttacgtagcttatgcttacaaagccaaataatcgcagggcaaggcagataaaggcaggcaggatagtgacagtggctcggtgagatccgccaagggcctcagaccactgttaccataaaaacatccacccagtgttatgacgtccgattnttttttcccttaagaaggtggaaatatggcttttaatacataggaaaccttcagtttttaaatgcagggcaaataaacatttttaaacagtgccagccagactgccagttctcaaacagactgaatttccaaagcacaaccttttcatgtttataaaaaatagaaatggcatttagggatacattctaggatttggctctgacttctaagttgcactcttaggaagaaggagaggataagcttaggtcagctgcagaggtcattcccatggggagtggctggggaggaactgggctatgtggaacagactgggctgcgcccgtctacggatgccttctctcttgatttcaatgattgatagcatgtggctttcagacctaaggaagagttagagctttggagaatcacaatgcctgtgattgaaatcaggatttaaaaaagggttagaggcataggggaaggctaccattacaggaagtagttggatcttaattttcacatgtatagggctagacagcttcatctgtaaagttctgtatttccataattgttttatctttaggaagtccagtgtaaagatcttacagtttcactcataaaaatatcctgggctcagacagtgagcctgtggacaaacggaggctactgcagcattctggcattagcactctgattntatctggagagccctttcatatggttctcagggcctggctacccgctgagccagctagaacatgactaggctgatagatatc

SEQ ID NO: 313579 - DNA, 418 bp, Homo Sapiens
  misc_feature (265)..(317): n is a, c, g, or t
  misc_feature (319)..(319): n is a, c, g, or t
  misc_feature (342)..(342): n is a, c, g, or t
ttttcttaaataaaagtttattgtctactgtttacactcatgttgctgctgtgagtacaacaacagacacaaattcctagcatgaaatatattcattgttcacccccactgaactacagacattgcttgagaattagatctttgctttagggatttaaacagaaaagaatcggggccccgaatcttgaaagaatattctcaagtgactggttggagtttggaggcatagccattcaggccaacagcacggtgatgctgtcactgnnnnnnnnnnnnnnnnnnnnnnnnnnnnnnnnnnnnnnnnnnnnnnnnnnnnnanggaggaggccttagaagcagttntgggcagaaataactggagacttggttttcgcccatgtggctaaagtggctgctttgagaagggaccaataaaaat

SEQ ID NO: 313580 - DNA, 384 bp, Homo Sapiens
  misc_feature (56)..(56): n is a, c, g, or t
  misc_feature (293)..(293): n is a, c, g, or t
  misc_feature (332)..(332): n is a, c, g, or t
ttttttcccttaaagaaggtggaaatattggcttttaatacataggaaaccttcangtttttaaatgcagggaaataaacatttttaaacagtgccagccagactgccagttctcaaacagactgaatttccaaagcacaaccttttcatgtttataaaaaatagaaatggcatttagggatacattctaggatttggctctgacttctaagttgcactcttaggaagaaggagaggataagcttaggtcagctgcagaggtcattcccatgggggagtgggctgggggaggnacctggggctatgtgggaaagacctgggcttcgcccctncttccgggatgcccttcctcctcctttgaatttccaattgatttgataggcc

SEQ ID NO: 313581 - DNA, 2847 bp, Homo Sapiens
  misc_feature (131)..(131): n is a, c, g, or t
  misc_feature (638)..(648): n is a, c, g, or t
  misc_feature (1051)..(1069): n is a, c, g, or t
gggcggaatgcggcgccactgacaaacaggtccggtgacacacacgttagaaggagggatagaataatatgcgagatgggtggcgaacacggttggggagataaataatcatcaagacctgggggtggtgngggtctattgtgaggttaacgcttagttggccggctgagtacttacggatatcaaacagaaggggtgcaggggcgacggccggagatccagcgcactcacgcggagaaataagccggtgtgggcaatatcggggcacgagagatataaagcagaacgacacagccgggtgcctatgagaagaagtgtccggcggaaggggcggtaggtataaaagttggacacgtcggcacagaaatgcgcagggtgaggggacgcccagggtagagaccctgaaggtggtaccgctgaggcatggtgtttcaggggggaggccgatgtgccgcccggacggtttattagtgggggaagagttacccaggcgcatagtcccgtaacccaagggtttccctaggaaggcggggtatgacgcagttttccccttaccatgggggggcccgcaggtccacaaggaagtgggatagaaaagttgcttaagggccgaagcgcggccgggcatggaaggcgtnnnnnnnnnnnttaagggaagagagggggcaaaatacaatttcatttaacaaattgaattagctgcgcgggctaatcacgtcgggtgtcggctctgatcagagacagaaagaggagggtgcagccccgggggtccttgtggtagcggtggtgggagcggagcggtgtacacattgagggagacaaatcactgtttggcccaggggagccccacccacagtaatggaaactcagggcaggttagcattttattagataaaaacaggaaggagggtgcctacccacccctgcctgctactggctctgaagggcactcctcaacttccccaagaaagaggacgcgtctctgacactgtgatcatgacaggggttcaaacagaaagtgcctgggccctccttctaagtcttgttaccnnnnnnnnnnnnnnnnnnngatcttctcagttacaaattctgggaagggagactatacctggctcttgccctaagtgagaggtcttccctcccgcaccaaaaaatagaaaggctttctatttcactggcccaggtagggggaaggagagtaactttgagtctgtgggcctcatttcccaggtgccttcaatgctcatcaaaaccaggcatggggaaggccctggcaaactgctccacccgttgcctgaggttggccagacgctgacttgtttctgagtccttaagcaggaaggatttgaaatcctggagcttggcagtcttgctcttcacctctaagccaatgttgaccccttcatctataaagtccacaactctccggaagtcatcctcacggaactgtcgagaagttaaggctggggccccaagccgcaggccgcccggtgtgatggcacttcggtctccaggacaggtgttcttgttggcagtgatggatacaagctctagcacccgctcagcccgagctccatccaggcccttgggccgcaggtccaccagcaccaggtggttgtcagtaccacctgataccagtgagtagcctcgctctagcagggcatctgccatggcccgagcattcttcagaacctgcagggagtactcccggaacatgggggtgcaggcctgctttagggccacagctactgcagcaatggcatgattgtgggggcccccctgaagggatgggaacacggcaaagttgattcggtcctcaaatgtgtaagggatctcccggccagtcttggggtccacagccttcacccctttccggtagaagatgagccctgacctggcccctcgaagagtcttgtgagtagtggtggtgacgatgtccgcgtgcttgaaaggcgagggaatcaccttggcagccaccaggccactgatgtgggccatgtctgccagcaggtgtgctttgacttcatcacacacctctctcatgcgggcgtagtcaatgaggcgagcataggcgctggtgccagctatgatgagccgtggccggaaaagtcgagcagtcagtgccagctggttgtagtcaatgaggccagttttggggttgagcttatagggcatagactcgaagaagatggacgtggctgatatccgcttgacgtcagacatgtagccgtgggtgagatggcccccatcgggcaggtccagccccatgatccggtcgtgaggttgcagaagggctgtgtagacggccaggttggctggggacccggagtagggctggacattgactccccactgtgcaggatccaggtcaaaggcttccaaggcccggcgctggcacagcagctcaatttcatccaccacctctgctcccccatagtatctcttgccaggataaccctccgagtacttgttgttcagacaggaccccagggcctccagcgcagctcggctgcagaagttctctgaggcaatgagctccaggccacgacactgcctgtccttctccctctgcagcaactcccacatctcaggatcactgtccgacaggctctcctggcctgtccagcccctgtttgcttccccagtctgagtctgggctgcgttgctgtgctgagcccgaatggccatcctgaccagctgcccacatctctgcagaggccgagccgcccaaaacaaagagaagtacagcatcgcaactcggaagtcgcaggaggtccagccaccaactctggtctagggcagcaagctgtcggaagaagaccgttcggagaacgcatgcgcgagaag

SEQ ID NO: 313582 - DNA, 754 bp, Homo Sapiens
  misc_feature (155)..(155): n is a, c, g, or t
  misc_feature (297)..(297): n is a, c, g, or t
ggcaggaggtccccatgggcagcgccttgtagccgccactggtcaacctcccgcttggtggaggctcctggctggaagaagagggaacaggacctgggctctggtgccattgggggtgcctgagagcctctaactcgtctggctgctaactcctnggccccctccgcctctcctcagcagcccggcgcatctcatcttcctgtagccgctgtcgtgctgctgacaactcttgcccttgtctcctgcgctgccgttcccgttccaatgcctcccgttcctctctttcttcacgctccncgctgcttctgggccaccagctccaacatcctcttagtttgttcctgtctttcctcttcactcaaagcgggtttgccttctccggcagcagaaccagatccttcaaggccgccttgctctgaggaagtgggctcccgtcccaggatatgtccaaggggagtctctaaaggctcgtccacatcggggtcgtcttcgtgctccatcagccagtccatcgcaagcctcgatgccctggttccctgtgagggccagagccttctccgcgcgtcccctggggaagcccatctcgatgagactctcaagagccgtcagctccgccatggcgccgacaccgcggcttccgcggggacctggtgtgtgacgagaaggagggcgggaagggtcaggcgcgaggcaacccgccctcgacacccgccgacgggcgctcgctctctcacccggctctatcgcagccggg

SEQ ID NO: 313583 - DNA, 1056 bp, Homo Sapiens
  misc_feature (140)..(148): n is a, c, g, or t
  misc_feature (292)..(292): n is a, c, g, or t
ggcccccacgttgggaccttttttggccccccatgggcccaccagagggcaggagtcccagctcctggcagaggccgctccatgtcagttttgaagaggccccgtctggggagccactgagcaattgcccggggtcctgnnnnnnnnntattcctcccccagggtggagctccccatagagcttcccagctgccagttgttcccgggcccggaacgtctgggtcagtgagtccccatctggcagcctgacctgtatgcgaccactggtcatactccccgcttggtgggaggnttcctggctgggagaagagggaaccaggacctggctctggtgcccactgggggtggctgagagcccacactgccaccatacttcttggctctctctgctttgtccctctcgatcttttctctaactctttgtctggctgctaactcctcggccttttccctccgcctctcctcagcagcccggcgcatctcatcttcctgtagccgctgtcgtgctgctgacaactcttgcccttgtctcctgcgctgccgttcccgttccaatgcctcccgttcctctctttcttcacgctcccgctgcttctgggccaccagctccaacatcctcttagtttgttcctgtctttcctcttcactcaaagcgggtttgccttctccggcagcagaaccagatccttcaaggccgccttgctctgaggaagtgggctcccgtcccaggatatgtccaaggggagtctctaaaggctcgtccacatcggggtcgtcttcgtgctccatcagccagtccatcgcagcctcgatgccctggttccctgtgagggccagagccttctccgcgcgtcccctggggaagcccatctcgatgagactctcaagagccgtcagctccgccatggcgccgacaccgcggcttccgcggggacctggtgtgtgacgagaaggagggcgggaagggtcagcgcgaggcaacccgccctcgacacccgccgacgggcgctcgctctctcacccggctctatagcagccgggaacaccgacgagaag

SEQ ID NO: 313584 - DNA, 477 bp, Homo Sapiens
aactaatagttggaatctctcactgatgtgcaaaaaatttatgccagtagaatcattaatactgatgcctggcaaaagggaggccacacattctgaatgacatgattcttatttttatgattagattaattaaagtgactggtgtaaatccctcgcacagtgtggggagaagagaccccaagggctaatctcgccaccatatgctgtagcactttgaaaactgggtaggacgacttcagctcggaatgtctttattgctaaaaatataacaaacaaccaactgcaggatgactcatgcaatagcactcaactttgcattcttcagaaatttctgaacacgatgttttctgccagcgccccatctccaaaaatgtccataaaataaattcctgtctttgctcttgaaaaaatattaggactagtccctgaggctctaccccatgtgaacactgtgtatagaatgataccttatcaagg

SEQ ID NO: 313585 - DNA, 1182 bp, Homo Sapiens
gaacaaatgagacatagccatgtcctccaggaagcttggagtttagccaaataggagagagcttggcatgtttaaatgtaaagaaagaggagccagaggagacagtaaagatgaggagagtggggataattgagtggagaagaacttagaggagcaggactgcatgagactcaatattaagcataggtggcacagctggtgtaagacaaaaaggagggaagaggcagaaaagagaatacagttggaatcagctctatataagtcaagagatgtagcagttgatgactgattacagttgagggtatctgctgagaatgatgaagaaatggaaatttcaatactgacagtcggaaagcgtagaaaagcagttaaaggaacttgctaggaaattgatcggacgttatggccagacatagccaagcatcaggtaatgtgcagctgaaataagagtgagtgtgtggtagcttcattcctgagttttcctaacagcagtctaaagcatgcaggaagattcagaacgcaaaatagcggggtagaagagtgaaagtttaataggaaggtagaagagtgacaaattttaccgatagcctctgttagcttgctgaccatagaggaagctaggcaaggaatcaagagtagtcagaagtgtggtgatgaggccctaaagggaaggaaggccccagggaagctaaatcatcatctcacaggcataagagaggtatcagattttcaaagtagtgctttaccttgactgtggaaagcagggtgcagcagtgctgctgtgtggctgatggactgaggagacctagcttacatgatggagggattgtgaaagcgcaggtcatcagggacatccacacagaagaagggaagctgagtttatcatcaaggatggtgcttcccaagctccagtgtggatctgaatcacctgaaggtgattttggttttgttgttatgatcttttatatttacacacaataattgtatagatctgtggggtatctgtgattttttatatatgcatataatgtgtaatgatcacatcaggatgattatgggtattcactccaaatatttattatttctttgggtttggaacattcctcttctcttccagctattttctagaacttattccttctgcctaactgtatttttgtacccattacccctcttttcatt

SEQ ID NO: 313586 - DNA, 1115 bp, Homo Sapiens
  misc_feature (707)..(707): n is a, c, g, or t
  misc_feature (959)..(959): n is a, c, g, or t
  misc_feature (963)..(963): n is a, c, g, or t
  misc_feature (1023)..(1023): n is a, c, g, or t
  misc_feature (1042)..(1042): n is a, c, g, or t
  misc_feature (1049)..(1049): n is a, c, g, or t
  misc_feature (1055)..(1055): n is a, c, g, or t
  misc_feature (1063)..(1063): n is a, c, g, or t
  misc_feature (1077)..(1077): n is a, c, g, or t
  misc_feature (1081)..(1081): n is a, c, g, or t
  misc_feature (1083)..(1083): n is a, c, g, or t
  misc_feature (1086)..(1086): n is a, c, g, or t
  misc_feature (1091)..(1091): n is a, c, g, or t
  misc_feature (1100)..(1100): n is a, c, g, or t
  misc_feature (1107)..(1108): n is a, c, g, or t
tttttttgcattcaatgagaactttttatttcaattatccacaaaacaatattacaatactttataaaaatattaagtttaggctaccattattcatttaaaaaagtgtgctagaaggctgtttttgccaacttccttttttggtaagggttaacttccacattaagacactgaagacgaaaagctgttggaaaatatctccaaatttacaaagttgtttttcttggcaatttaaaaatacagaacaatttaaaatgaatacacattaagttagtgttttatccctactatacaattgttattatataaggaactgctccattcagttaaaacctaatgaataccatcaacttttcctgccttactttcctgattagatttagtacataaacgtaattttgtcacccttttgaatatgcttagaaaaattacaatatcatagttcacataaagcccttaaaaaatctcatgtcacaagttgttgataagaggaaataatgacagcactcttcttaggaagaccctcttggtagagagtgtcaatactaagcaggttacgtaaacagaaaaaacaaccacaatttttagtaccagaaccactgccaacttgcatgaagtccatctgtcacattttaaaaatggtttgaatttgaacatatatgccatggcacagaatttcgaatctgatgattaagatcaggtaaatnatgatagttaagaattatatcctgaaaatagaggggcctaatataaggcttaatttaaagtgtgactatatgagagtattttaaaacatatacaccagaccttcattttattcatcaatttttcctttgctagacactcaaaccactaatgctgctattcaaatctgtattttgaaattactgagttactcttaagaattagtcttattttgtatgtttcacttttgcactttagggtaaaaactgtccccntttncaccaccgttaatattcagaataagttttcctcccaaatccaccatttaatggattctanaaagggaaaaatgaccccnttacatngacttngaagtgangtaggcgggccggnggcncngcngtaanccgcacttnggaggcnnggggggg

SEQ ID NO: 313587 - DNA, 715 bp, Homo Sapiens
  misc_feature (503)..(534): n is a, c, g, or t
ccccagcgaaaagagtgaggagatcactactggcagtgcctggtttagcttcctggagagccacaacaagctggacaaagacaacctctcctacattgagcacatctttgagatctcccgccgtcctgacctactcactatggtggttgactacagaacccgtgtgctgaagatctctgaggaggatgagctggacaccaagctaacccgtatccccagtgccaagaagtacaaagacattatccggcagccctctgaggaagagatcatcaaattggctcccccaccgaagaaggcctgagcaagggggaggaagaggaggaaggttggaccttcatcagaccactcccttcccccatcctccaggagagggggcaagggcaacccaccatctacccacttactaacctggtcctaacccccttactgtgcgcgtgtgtgtgcgtgtgcgcacgctctggctgtttgtctatatgtctagctcatctagttcctcttcttannnnnnnnnnnnnnnnnnnnnnnnnnnnnnnnctgagtttccccactttaggaggaggtgggggctatttctatgcaaatagaaatcagcacattcctcctactttcctttcctccactccccccatatctttaaagtgtggaagcagggacctgcattttcctacattgaggagctgacatatgggtggtatgggagaggtaggtggatccg

SEQ ID NO: 313588 - DNA, 511 bp, Homo Sapiens
cacttcctttatctctccagtcttaagagtagtagtgacttccggctgttgctcatctttggattgcctcatcatcccccatttggtcattcaattctttccctgtatcaaatttcccttgtctgaaatacctagggtaatttctgttttgctgactggttgttaactgacgtatactctatagtccactctctacacaggggctgaagtggatcccgctaaaaacaaagcagatgggggcatgacccagctctcatccctccaagagcttcccatcatcagaatagatgagaatagaatctcagctcctctggaactaaaaaggcagattcctccttgcccacagtatttctagccacagcagtctgcttgctgttccttccgcccatcaagccagtttctttgcatttgctgtttccattgcaagaacacccttgctgcagatctgtccatggcttgctccctcacatgattcaggtctctgctctagagggaccttcagcgaccatct

SEQ ID NO: 313589 - DNA, 2650 bp, Homo Sapiens
  misc_feature (109)..(109): n is a, c, g, or t
  misc_feature (116)..(116): n is a, c, g, or t
tctacacagtgcgcatacaagatgtggatgcgcggtcaacacgtccacacagagggcgtagagggaagaccgtgggcgtcgcggcggtctcgacggtcgggtcgcgtcngactccnacccgctctccgtacgggaggccattctataaagcaggcccggtggcgcacatgtccctcctcaaaacctaagatgttccccgaagcaccgggggcttcccagatttggtctttcgcccaggccgcccctgagcgacgctaaccagtctttgctgaaatcgttgacacatttcccacgcgaggcaggggtggcacgcctggcggcccatgggagtaccccacacgctgaatatgacgccgtctcgacggaggacaccgccatcattcgggtgggtgtgtcggtttcgcgacgagtgcctgtctgaatgggagttggcgccgcgaaccgagagggcgctttctctttggatattggggtggaaggaaatgccccgaaccccccttgatttccatggcgccccggggatgtttcgtcggcgaacacaagcctggcggcccgaggtgtccaccctcacctgccccggggccccgcggggcccaaaaagggatgggtttaggaaaagcttctcggaggggccgggggcggccgaccattgtgtggtgctctcctcctgtgtcttcctttggccggtaacaggattaaaaagaaatttttaattccttgtctctcttctgatggctgaacagaactgcggtgtcaaatggaaagcagcacacaagaattcccttgcagactttgatctttcgcagaaatgcaaagacgcctgagttatacaacttgcaattattattttctagacagaagtgccaactgttgtgctttccagtgtatcagtggttgctacattctccttcttgtcttcgggtttcatggcaggaaacagaagtacttccttgatgttgttggagtccgtgagaaacatggcgactcgatcaatgcccatgccccagccagctgtggggggcagcccatattccagggcagtacagaagttttcatctatgaacatggcctcatcatcacctgcagccttggccttggcctgttcttcaaaaagctgccgctgccgcatgggatcattcagctcagtatacgcattgcatatctctttcttcatgacaaacagctcaaagcgctcagtcagaccctctttagagcggtgccatttagccaaagggctcattatctgtgggtgatcacagatgaatgtaggattgatgcaagtcacttccaggaactccccaacaagcttgtcaaggagcctggctgtggtccgaggtggagggcattcaacagcttttgccacacagatatcatcaagaattttgcgagtttcttcagtttcaaagaggttcgtttctggcagcttcatccccagggctttctcaagctcttctaccatgttgattcgccggaagggtggggtgaagtcaacatcgtaggcttggccctctgggccatctgggtggtaggtgaccttgtaactgcctgtaatatgcttcaccatccctgaaaccatcttctccgtgatttccatgagatcgtgatagtctgcataggccatgtagaactcacaggtggtgaactcaggattgtgcgtcaaatcaatcccctcattccggaactggcgtccaatttcataaacccggtcgatgccaccaaccacaagcatcttatgatagagttctggagcaattctcatatataagttcatgtccagctcgttgtgataagtgatgaaaggcttggccacggctccccctgggatgatgttcatcatgggagtttcaatctctaggaatcccagctcatctaagaaacttcttatatatgtgatgatcttagagcggatgataaatttctgcctcacaaagtcattcaggatcaagtccaagtatctctggcgataccttgtttccttgtctttgaggccaaagtgaagatgaggtaacatatgcaaacagggagacagcagtgtgatctcatacggaatgatgctcagctcacccttcttggttttaccaggattcccctgaactccaattatgtctccccgacgcagtttgttattaatatgaataaattcttcttctgatttataatttctggaattggccatgacttgcaacttcaccccctctcctcgaagatcatagaagatgagctttcccccagaagctcttttggcatggatcctacctgccacctttaaggtgatgtcagtcaggtgatccccaggctgcaggtgactatatttttggatgaagtcagtgagtgagatgtctacatggaacttgtgtgggtatgggtcttccccattgaccttcagctgatgaattgcttgactgcggattttgtagtattgatttgggtccacgctctcttcctcaggacccacaccattatcagtggtgtggttggtggcagcagcagtggcttggcttagctgtttctcactgagctctttctgtttggcctccttctctgctactttcttctcagctttcaggcgtctcttcagctcattcttgctcagtttcggctcgctgccatccactttcacctcggccgcctgcacggccgccatcttccc

SEQ ID NO: 313590 - DNA, 593 bp, Homo Sapiens
  misc_feature (12)..(12): n is a, c, g, or t
  misc_feature (45)..(45): n is a, c, g, or t
aaacggcccggnaaaaaaggcttcacccaacccctgaaaacccancttctcccgtgatttcccctgaagaatcgtgaatagtcctgccataggcccatgtagaaactccacaggtggtgaaaactccaggattgtgccgtcaaaatcaatccccctcattccgggactggcgtcccaatttccataaacccggtcgatgcccacccaacccacaagcatcttatgatagagttctggagcaattctcatatataagttcatgtccagctcgttgtgataagtgatgaaaggcttggccacggctccccctgggatgatgttcatcatgggagcaatctctaggaatcccagctcatctaagaaacttcttatatatgtgatgatcttagagcggatgataaatttctgcctcacaaagtcattcaggatcaagtccaagtatctctggcgataccttgtttccttgtctttgaggccaaagtgaagatgaggtaacatatgcaaacagggaccaggattcccctgaactccaattatgtctccccgacgcagtttgttattaataccgtgccgaattcctgcagcccggggga

SEQ ID NO: 313591 - DNA, 552 bp, Homo Sapiens
gccttacaacttttctttagaaccacattattggtcataatccttgttactgtcatgaggattgttgcatgggttaaacacaaacacagactagcaatgcacttgaacaaacctggtggtctttggaaataaatcaccattagatttcacctggttatgctgcatcccataagttccaaatgaatcacctgcttatcctattaacgaagcatttaattcacacacaaatgcttgaatttcccctgtataaatgtagtcatgtgatttaacttttctaataagatttgtgaatgctgcatcatgatgaaaatgtggattacactgtgggttgcatgcctgttgttcatacttcagtgatggtcacacacaaaacaagatgagttttacttaggtgaaacattattaaacctgtcctaacaatacagaaacatattctctttgtcgctttttatcaccaaaactgaatggcacatatgtcttgacatcacttggatgaactgtggctagctggaattaacttagccactataattttttggtggttatttgtgc

SEQ ID NO: 313592 - DNA, 1787 bp, Homo Sapiens
  misc_feature (47)..(47): n is a, c, g, or t
  misc_feature (108)..(108): n is a, c, g, or t
gtgaccaaagttcagaccttgattttgcccggagcacggttctactnttcaaccctctttatatcccgccgtagtccacgtatcgaatctccacttcgttggtctctncgtaggaggcaaccacttgggctcgccaccaggccccgtccgcaccaggggcggcacagatgaccgttatttccactggggtgggcaaggtggggattccaggctgagagtaacagaggtacatctgcatggtcggggctgcgcagcgcgtggaaggtagggtgtgtgtgctgctgcacgaacaggtgcccggcattgacctggttgaccacaatgacctccacggtgatgccatcaggcagcatgagccaggatgtcatcggcagagaaggcagtgccagtgaaggcaatgggggagcgtagatattggtgaggttcagctctttgaacttcttcccaatcaagttcagcgctttgtctacatgatgttgagagccttctatgtggcagatctggacgctctgggtgtaaggcagggttgaaatgtagatcttggcaccagatgtttgcttcagaaaactcacatagcgcccctgcttgccaattagccgaccgactaagtgctttggcacctcgatctcccagatgatgaggtcgaccttcttagggttggagcctgcctgggcattttggaagctctcagtcttcttgagactgcaacagctatccacggaatccatgctgttcctgtcagaacctcctgaatgatctgcttccgcatccatggtccatccatcctcagcccccaagtctgacaactcccccttcagcaccccattgctgaagggcacagtactttctggcagtggcggggtgatggccttgtccctggggctcgagctggtctctgtgcaagagtcttcaagccctgaagtgctgaaagaatctgagcagtgtcctggagaagccaccaaagggacactttggctgctgtctgacatgcaggtgacacaggtggcatcttccaccaggatgcctgcccggtccggcaactcttcactgggggtggtcagtgccaggcaggaggccagggagatgtggtgtgcagagatatttggcttactgtccttggtggggctggacagaaggctcttcaggcagctcacgtaggtctttggtggtggtgagccctctgctggtaggcctggcaaggggaggccagcatccggcggggcaacagctgcctctgctgtggcaggctccgcagtgtctgggcccaagacagttttctggtgaactgggacacagctctcttccttctgccattggagctgactggcctgacacacacgacctgcaaccttgccaaccgtggtggccagcacctgttcggttgcttctgagatcacttgggagattatctggaaggcagcccgcttaatctcctcatttctatccaagccctcctcatttctatccaagctctcctcatttctatccaagccctcctcatttctatccaagccctcctcatttctatccaagctctcctcattgcccagttctccctcgacacctctgtcctgggctttggcgtctgcgactgggggtgctggcgccgcatcgtcctttgccagctctgtgtgagccgactcgatgaacctacttggcaacttctctgctacatactcttcctcctgcactggccccaccacctgggatgagctgctcttccccttatcttcttccccctctaaagaggccaggctggggcccttgctgttctccaattccaagac

SEQ ID NO: 313593 - DNA, 379 bp, Homo Sapiens
aataggcctctattgtccggtgattagcctataaggcaaatgtcctgccaagtatccgtgtaattcttcgcctctggtaatagcgatatcgtggtgaatactgagtggcttctcagcatcctttctactcacacatgatcattctatgaaaatctcggcacgttcatcccctctcccagtgactgactcagggacacacagggaaaagtcatctttggactaaagagagataaggagatgcttctgggaaagacaagccaatctcctgttgatttaagtatgctgcctccattactgtgagccgtcatctcgtgtctacaaaggcactcatcttaacattaggtcaacacagtgaaagtcagagagaagagctagaaag

SEQ ID NO: 313594 - DNA, 431 bp, Homo Sapiens
  misc_feature (381)..(390): n is a, c, g, or t
tgcatgggcctattttaagatgattgccttgtagtcatagatgacggctccaagtatggagccagcatactatatcaacagaggattgcttttctttgccagaagcatctcgttatctctctttagtccactttgtcttttccctgtgtgtccctgagtcagtcactggtagagcggatgaacgtgcggtgattttcatagattgttcttgtgtgagtagaatggatgctgggaagccccccagtatccgccgcgatttctcttttaccagtggggaagaattacagtaatgcttggcaggacatttcccttaaaggcaaaagtttccaattagacttctttttacaatttattcccatccctaagatgagctaatcaccnnnnnnnnnntaaagcctaagttattttcagccaggtgcggtggctctcac

SEQ ID NO: 313595 - DNA, 1947 bp, Homo Sapiens
  misc_feature (375)..(375): n is a, c, g, or t
  misc_feature (377)..(378): n is a, c, g, or t
  misc_feature (386)..(387): n is a, c, g, or t
  misc_feature (391)..(391): n is a, c, g, or t
  misc_feature (396)..(396): n is a, c, g, or t
  misc_feature (408)..(408): n is a, c, g, or t
  misc_feature (413)..(413): n is a, c, g, or t
  misc_feature (469)..(469): n is a, c, g, or t
  misc_feature (481)..(482): n is a, c, g, or t
  misc_feature (1371)..(1371): n is a, c, g, or t
  misc_feature (1393)..(1393): n is a, c, g, or t
  misc_feature (1445)..(1445): n is a, c, g, or t
  misc_feature (1449)..(1449): n is a, c, g, or t
  misc_feature (1501)..(1501): n is a, c, g, or t
  misc_feature (1503)..(1503): n is a, c, g, or t
  misc_feature (1505)..(1505): n is a, c, g, or t
  misc_feature (1548)..(1548): n is a, c, g, or t
  misc_feature (1556)..(1556): n is a, c, g, or t
  misc_feature (1566)..(1566): n is a, c, g, or t
  misc_feature (1581)..(1581): n is a, c, g, or t
  misc_feature (1611)..(1612): n is a, c, g, or t
  misc_feature (1646)..(1646): n is a, c, g, or t
  misc_feature (1737)..(1783): n is a, c, g, or t
atcagaatattttatttcaagagttaacacttttttcaaaaagtagaaacaatataattacttccctgagtataaagaaccaattctacaataaaagaccattacaaaattaagcaattagaggtacataattctctgcattcaattatactctattttacaatttattcttaaaaatgtcatgttttggaactttaatgtttcaaaaaaacctcagaacaactcattttgcacctatggtgttaaggttatcagtctgatctgtctttatcaaattcaagggcaatcttcaaagcggtgctattgaggccaacagattgcatgttacatatgatagagacaatgattcctcttggggggaccttgttatttatngnntctgtgtnnggtncttcnggggggggcagnggggnactactgggacccactgcccctccagtatgtgaagcataatgccgttgctttctanacgaaaaaaaannttgtttcttttccacaacaccccacgccattgcatatttaccctctttatcccaagacatctctgtgttagggactggggtccacatcataaccattgtttctggtttgaggtatccaggtaaaagattttcatttgagttcttaaacagcccaacttggtaaccataaagcattgcattcccaaatttcagaaggtcacccactgtagacagaaatccaccaccagcccatttataggagttatccacgtaaggtgtgttgacaagacgtttctttttattgtaaacataaaatcttgctctattgtaaatcactggctcgttttcttcctgcacagtcgtcagcatatccaagtcatggaatattttctgcatatagtccaaatatttacatcctgaagctctctctactatggctgccagtagggtatagccaaaagttgaatacaaaaactgactaccaggtttgaagaacaaaggatcatttttaaataatcttagggattcaattgaattttcaaacttttctctcaaatataattcgccttgttcaaaatcattctttttcttgccaggttttgaattccggcatttggcttcattctcctgctctgttttaaatttagtaaaatcattcttttcattacttttgccttctttttcttgctcaaatgcaacattctctttcatcatcttcaaggctttataagctttctcttctttcaccttttttatgtccttttcataatgacgaattccacttaaatgggaaatcagtaatcttgttgtgacagaaaccttttcaccttcatattctttttctgggaattcgggaacataatgttgtactggaatatcaagatccagtttccctgcttcccacaatttngcaagagcaaccatgttgaganttttgctgatgctagcaattcgcataactttctcttttttacattgtacacntttntcaacatcagcataacctaaaccttctgaccagactttttttccatctacananantccaaccactatgcccggtgcgcccacctcatcctttatcctntgcagcangtcgcggctnctctcgatggctctngcgaagcacctggagcagggcggcgccggnntctgcggagaccacggggcgagggactgctcctntggcggctcggccagaggcgacgcctcagggtcgggggccgcgggggactgcgcccggggccgcgcccctcagcccacctgcctgcttcannnnnnnnnnnnnnnnnnnnnnnnnnnnnnnnnnnnnnnnnnnnnnntggccgagaggcggcagcccggcgcgctgatggaccccgcgtcgtccgcagcttgaggccaagcccccgggggcggcagcccgggcagtcactgctgacaggagccggtacatggcgtctctgcacagccggccgatcccgggaattccggaccggtaccagcc

SEQ ID NO: 313596 - DNA, 871 bp, Homo Sapiens
  misc_feature (97)..(137): n is a, c, g, or t
gcgcaataataaggttcccaaaaaataatttttacccattccccggaaaagctttctttttctttaactaaaggggcttgcccccatttaaggggtnnnnnnnnnnnnnnnnnnnnnnnnnnnnnnnnnnnnnnnnnctcggggcctttcccaagggtttttgaaagggaccaaaaggggattccatttttttaaaataatttctttagggggatttcaaatttgaaatttttccaaacctttttcttctcaaaaatataatttcgcccttgttcaaaaatcatttcttttttcttgcccaggttttgaaattcccggcatttggcttcattctccctgctctgttttaaatttagtaaaatcattcttttcattacttttgccttctttttcttgctcaaatgcaacattctctttcatcatcttcaaggctttataagctttctcttctttcaccttttttatgtccttttcataatgacgaattccacttaaatgggaaatcagtaatcttgttgtgacagaaaccttttcaccttcatattctttttctgggaattcgggaacataatgttgtactggaatatcaagatccagtttccctgcttcccacaatttggcaagagcaaccatggtgagacttttgctgatgctagcaattcgcataactgtctctggtttacatggtacacggttctcaacatcagcataacctaaaccttctgaccagacttcttttccatctacagaaactccaaccactatgcccggtgcgcccacctcatcctaagaccgaaggggaaagaaccgacagttacgggcctgctgaaaaagcccagcgcctcgtgccgaattcgccacccagactaat

SEQ ID NO: 313597 - DNA, 994 bp, Homo Sapiens
  misc_feature (695)..(738): n is a, c, g, or t
  misc_feature (820)..(828): n is a, c, g, or t
gtacggctccggaattcccgggatatcgtcgacccacgcgtcggaaaatattccatgacttggatatgctgacgactgtgcaggaagaaaacgagccagtgatttacaatagagcaaggtaaatgaataccttctgctgtgtctagctatatcgcatcttaacactattttattaattaaaagtcaaattttcttgtttccattccaaaatcaacctgccacatttgggagcttttctacatgtctgttttctcatctgtaaagtgaaggaagtaaaacatgtttataaagtacactaagaccctttgatgaaagatagcaataatattaataattcaaacatgaataactaaaccaaaattgcacccaccatgaggcatctgtaatttgctctttaaccattccttttttaggttttaactaatactttgtttacgtgttattagtttttaattgttttcatactgttttgaaataattttatacttataggaaaaggttggcaggaggtaggtacaagggattcacatatcctctttactcggattcccttaatgttagtttaccgcatttgccttacctttctgtctacatatgtgtttgtttctgaaccatttggaaataagttgtagacgtgatacccctttacctataaatatttacatgtgtattttctaaaaacaaggacattcagnnnnnnnnnnnnnnnnnnnnnnnnnnnnnnnnnnnnnnnnnnnngagtgggtgatcactgagtcagagtccagacaggccgcatgtgttaatcacctctctctataaaatgcaaaatagccaggtnnnnnnnnncttaaccaacagcgaagtgagggaatctttaacgggggtttttatcacaattgcctatacgtggaaatgccttagggaaaaacagcgtgcaacacacagctacacacaatggcgctttccaaacattgacactcactaacacgccctctcgtctattactgttttt

SEQ ID NO: 313598 - DNA, 1482 bp, Homo Sapiens
agtaaaaattctaatatgttaagcatatagatttattaaaaataatgctaatataatcctgggcacatggattccaagagagattttgcagcagatttcattatagttacttaacagctaaataataagggtgtatttaacttacttacagagtcactaaataatggcggggaaaggaaagagtagggctaatccagtagagactgaagctggtatcaaccttccctaagcatctgtctggtccgcagcctggggcaaagcttgtctctaaagggttaatgaggccccaaagtgatttttgcactgagctcctcctgcacctaccaaggtgccaaaggcatgagattcagaagagagcagaaccagtttattaaactgttcaaattggtaaaaatgattaaaagctaaagatttccataaacactattccaaaatgttaattttaaaaatgtgactagcaatgtatgcattccctttatgtcccctccctccctatctcttaaaataaatttgaacacccagtgtaaaaaacacttgagggagaaccagaagtcagccatttgagaagagagtggagagggagcagacggcggggagcagatgccggccccgctcgggctgctgacgcaggcttcagtggcactaaatcccccagtaaggcatcaggtgtcgggactccttctcatagacgtcgggaactatgccataaggtgtctgtaccattttaactgtcgacttcccaaagagctggcgctcgtagtctatcagttgcctccagaagcctacgttgggcctgatgacaggtcgccgggctttcacccagttgtacgcctccagcaggcacacgttgtggaatttcatcaggtacgcgatacacagcgtggctgagcggctcacccctgcagcacagtgcaccaaggtggccccgtgcttcctgctcacactgtggatcttgtcagccacggtgtcaaagtacagtccaatgggggcatgcggcatgtcagccagaggcactttaacatactcaaattggggccagttgaaattagggatctcaatggtagcattaacaatgcaggtgatgccacgagcctggaggaggtgccgattggaggccacactgcctctgcccaggaatagagaggaggtgatttgagcaatgcctcctatgtctccctcggaaatcatccgaggggccatgagagtccttggtagcgtgctgtgacctctggagctcatgaagacgccagcagtcacacttgcatcgttggcggcaagaccagagtgttttattttcctccaccaaggaatccaaaattagagtctccttcttcctcaagagtccagtgtgcgctgcctgggtccggatccagaaagtcctaagtgagcagtgctggtgacagtggatacaaatcaaatcggcgcggcgcggcgcgggttgcggttagggctccgtcctcctgcgcggccaccggcttctcc

SEQ ID NO: 313599 - DNA, 711 bp, Homo Sapiens
  misc_feature (159)..(170): n is a, c, g, or t
  misc_feature (387)..(443): n is a, c, g, or t
gggagtctgagaaagcctggcttgtattatctgtccaaaggaagcctcttcatctcctggtgccttggttgactattttggaaataggcatatcaaggttcctgattcagcactttgctcttttaataacaaatcgtccaaagatctcaaagtaagggnnnnnnnnnnnnagcttccactcttccgcagacttggtcatcgacctatttttgttgaagaatgaaaggcaatgacaagtttaacatatacaaattcgtgaattcttgttcattttgcattcctgcagtcagtgctaatccgtcgttcttaatcaggagttctgccaggtttaaggtcacctgcactcccagccaagtggtgatgtatgcctcccactctctgcaaggnnnnnnnnnnnnnnnnnnnnnnnnnnnnnnnnnnnnnnnnnnnnnnnnnnnnnnnnnaaatagctgcaccatcccaggccctgtgcggagcatcgggaatacaaagatgagataaaacattgtccctgcccccgggggctcacatgccactggaaacaacagactcttaaactaacaattcaagcaggcgccaagtgctacgacagaggtgtgaatgcatcaggaaatcggatggagaaccaccattcacccaagggtcagaggaggtttcaaaggcaaggcaaggaagggtgttgcagagagggcagcatatgcggcatatcgt

SEQ ID NO: 313600 - DNA, 2520 bp, Homo Sapiens
  misc_feature (1629)..(1640): n is a, c, g, or t
  misc_feature (1978)..(1978): n is a, c, g, or t
catgtttcaattataaattttatttaagaatactgactaacacaggaaacagatttaattcatggaattgtgcatatggtcatccgttacattgtgacatgttaattttttttttatcatttattggcactgtcaacagattacttgtgaacaagatcactttgtacgcttaagtctgcgatgctacttagctatggttttctaccatgagcttatatatagataggtgtaggtatgtagatacattaatgctatacacaattttgcatggttactgagcgtcagtaaaaattatgaaaaaacacccatttataataaaagtgaggatgtactaagacttgctattactggaccttgttttctgtaaaagtgatgacacttgctggacggttactaaactctatggcactaatgtatgatggattcatttccagactgtcggccacggaagcacttcttcatggcctctgccctggacagcagcctgtcctccgggctccccatgtttttaccagcttctgctgagtttctacaatcttgagctctgctgagaattcttttccttgaaattcttctacctaaagccccagcccccaaaagagcatgtctcaggaactcattatgccctgagtcaacaagaacttgttgataaatggcttaaaagtttttacaagaagtaacttcccttggtaaggagtaaataatagctctggaattttccagataaaactatttcatttctctgtcagtgccccatggggagagaacgaaatattggagcccctctccctaccaaagagagccacttttctggttgtgccctggcttaaaaccctttggtctccgagaaccatactgaatatttgcacccaatgctaaagttttcaggagaaagcatacttaagccaataaatgaataatggtttggtttgcattttgcttgcttgttaaataaggccttattgaaccttgggatgctgcctgtggaaactggcttccccagtgaaagatgtgatgccatgaactgatatgcctttgcatatgctgttccctctctgcaacacccttccttgccttgcctgcttggtgaactctggctcattctgcaaaacactgctccaatgacaccttttctttgaaacctcctctgacccttgggtgaatggtggttctccatccgatttcctgatgcttttattcacacctctgtcgtagcacttggcgcctgcttgaattgttagtttaagagtctgttgtttccagtggcatgtgagcccccgggggcagggacaatgttttatctcatctttgtattcccgatgctccgcacagggcctgggatggtgcagctatttaatgaaagttaggtgaatgaatgaatgatgaataaatgaatataaaaatgaggaaaaccttgcagagagtgggaggcatacatcaccacttggctgggagtgcaggtgaccttaaacctggcagaactcctgattaagaacgacggattagcactgactgcaggaatgcaaaatgaacaagaattcacgaatttgtttatgttaaacttgtcattgcctttcattcttcaacaaaaataggtcgatgaccaagtctgcggaagagtggaagctnnnnnnnnnnnncccttactttgagatctttggacgatttgttattaaaagagcaaagtgctgaatcaggaaccttgatatgcctatttccaaaatagtcacccaaggcaccgggagatgaagaggcttccttttggacagataatacaagccaggctttttcagactcccccaccaaataatacttctctgctgtcaggctatcaagttctcttttaggagcattcgaggtcaaatcagttcccagagtgtctcacctccagcagagatgctacagcctcagccacagcccctttaagcatttcggtatcatctgcctggtaatctccatactcagtcatctcaggaanatctctcatttcaggaggatcaagtacaaggaaaccacgttgaaccaacaggccacttttccatgcatggagctctggcacctttaattcatggtgcttccctccagaagaaatccagtccagcaatgattccctctgctctggtggaacagccaagctgttcctgggggtcagctcacaagtggtgtgaaggtggatgagcaaaagagaggaagagcctcttagggcgagggagccaaaagtcagacctcaagttgccctgggaaacatgatgcgatggctctgctgccccagaccctgggcttttcctcctggggtgacgggcctgtgcttctagccctgtggctcacgtgtgtccctgtggacactcaggctacagtttcctcccacccaggtccaggtctaggttgacatttaacagggaggagggagtttggggaatggaggatgccgagtaagaatcacgggtaaggccacctggggatcctccaagggcaaagccctgtccagggcagaattcacagtttagggggatccccagg

SEQ ID NO: 313601 - DNA, 650 bp, Homo Sapiens
  misc_feature (120)..(127): n is a, c, g, or t
  misc_feature (472)..(472): n is a, c, g, or t
  misc_feature (566)..(566): n is a, c, g, or t
tttttttattttcatgtttcaattataaattttatttaagaatactgactaacacaggaaacagatttaattcatggaattgtgcatatggtcatccgttacattgtgacatgttaattnnnnnnnnatcatttattggcactgtcaacagattacttgtgaacaagatcactttgtacgcttaagtctgcgatgctacttagctatggttttctaccatgagcttatatataggataaggtgtaggtatgtagatacattaatgctatacacaattttgcatgggttactggggcgtcagtaaaaattatggaaaaaacaccccatttataataaaagtgagggatgtactaggacttgctattactgggaccttgttttctgttaaaggtggatgacacttgctgggacgggttacctaaactctatggcactaatgtatgatggattcatttccagactgcgggccacnggaagcacttcttcatggcctctgccctgacagcagccttgtctccggctccccatgtttttaccagcttctgctgagtttctacaatcttgantctgctgagaattcttttccttgaaattcttctacctaaagccccagcccccgaaaagagcatgtctcaggaactcattatgcc

SEQ ID NO: 313602 - DNA, 513 bp, Homo Sapiens
  misc_feature (303)..(314): n is a, c, g, or t
ttacagataaaatcaactttaatagtatatttaacccattatagccaaaatattgtttcaacatgtaatcaatacaaaaaatattttctgttctttttctaccatgtctttaaaatccagtgtattttacatttatagccccactcatttggacactaaattttcattggaaatactttatctgtatttaggtatcataaaatttgcaattggaaaattagattcaaatacccaagttgttccaaacacaattgtaagttttccaataatcaagtatccatttttaaatgaaaatggaaatgnnnnnnnnnnnngctctcctccctaggattactttggacatccatttataaagaatgtatatagattttgaccttatttctcatttagaatgtagttatagtccctattgccttcttgtttggtccctaattcctttattctatccagcttccctttctttccaagacatgcctgctcatttgattcatctagagttctcctttagttcac

SEQ ID NO: 313603 - DNA, 604 bp, Homo Sapiens
  misc_feature (109)..(123): n is a, c, g, or t
  misc_feature (454)..(454): n is a, c, g, or t
  misc_feature (482)..(521): n is a, c, g, or t
ttttctttctgattcagtaacatttgcctacataagttttcatttatttgtgttttatttattacagggctgctattttcataatgtacatgaacaatgtcacagaacnnnnnnnnnnnnnnngaataattataagtatcagtaaaggaagtgaaagacaggattgcatttaatagataaaacgtttaggcaataattgaacaaaagaatcctggcatatttctaacactaatggcaatttacttatggtatttattttcagtagtaaagacccagcttgaatgtaaattttgtatagtgtaagtatgaagaacatagtgcaactgtacaggtagtcaccagttattgtgatatgataaataattgggctattttgatgaagctttgttcatttgtttctactttctaagagttgccacgattcctctgcttttcaacatttcgtatgactttnttttcgggtgggaataatggagtttggnnnnnnnnnnnnnnnnnnnnnnnnnnnnnnnnnnnnnnnnataatgcacattcttttatgatttttatttggttttttcagtccaattttatttactggctagcatgatctgattgacctttc

SEQ ID NO: 313604 - DNA, 1713 bp, Homo Sapiens
  misc_feature (517)..(517): n is a, c, g, or t
tgaaatcttaggagtattgaatagcagctcccgttattttcactggaaaatgaacctgtgtgtaattctgctgatcctggttttcatggtgcctttttacattggctattttattgtgagcaatatccgactactgcataaacaacgactgcttttttcctgtctcttatggctgacctttatgtatttcttctggaaactaggagatccctttcccattctcagcccaaaacatgggatcttatccatagaacagctcatcagccgggttggtgtgattggagtgactctcatggctcttctttctggatttggtgctgtcaactgcccatacacttacatgtcttacttcctcaggaatgtgactgacacggatattctagccctggaacggcgactgctgcaaaccatggatatgatcataagcaaaaagaaaaggatggcaatggcacggagaacaatgttccagaagggggaagtgcataacaaaccatcaggtttctggggaatgataaanagtgttaccacttcagcatcaggaagtgaacttcactttccttatgtgcaaaatggataacaccatggcataagacaatcccatgaagataagatataaaagaagataatgtttgaaaagaaataagatcttactcttattcaacaggaagtggatgctttggaagaattaagcaggcagctttttctggaaacagctgatctatatgctaccaaggagagaatagaatactccaaaaccttcaaggggaaatattttaattttcttggttactttttctctatttactgtgtttggaaaattttcatggctaccatcaatattgtttttgatcgagttgggaaaacggatcctgtcacaagaggcattgagatcactgtgaattatctgggaatccaatttgatgtgaagttttggtcccaacacatttccttcattcttgttggaataatcatcgtcacatccatcagaggattgctgatcactcttaccaagttcttttatgccatctctagcagtaagtcctccaatgtcattgtcctgctattagcacagataatgggcatgtactttgtctcctctgtgctgctgatccgaatgagtatgcctttagaataccgcaccataatcactgaagtccttggagaactgcagttcaacttctatcaccgttggtttgatgtgatcttcctggtcagcgctctctctagcatactcttcctctatttggctcacaaacaggcaccagagaagcaaatggcaccttgaacttaagcctactacagactgttagaggccagtggtttcaaaatttagatataagaggggggaaaaatggaaccagggcctgacattttataaacaaacaaaatgctatggtagcatttttcaccttcatagcatactccttccccctcaggtgatactatgaccatgagtagcatcagccagaacatgagagggagaactaactcaagacaatactcagcagagagcatcccgtgtggatatgaggctggtgtagaggcggagaggagccaagaaactaaaggtgaaaaatacactggaactctggggcaagagatgtctatggtagctgagccaaacacgtaggatttccgttttaaggttcacatggaaaaggttatagctttgccttgagattgactcattaaaatcagagactgtaacacttt

SEQ ID NO: 313605 - DNA, 888 bp, Homo Sapiens
  misc_feature (90)..(90): n is a, c, g, or t
atataagattcagcctgtttcccagaaaaaagctgcctggctaatttcttccaaaagcatccactttcctgttgaataagagtaagattntcacttcctgatgctgaagtggtaacactttttatcattccccagaaacctgatggtttgttatgcacttcccccttttggaacattgttctccgtgccattgccatccttttctttttgcttatgatcatatccatggtttgcagcagtcgccgttccagggctagaatatccgtgtcagtcacattcctgaggaagtaagacatgtaagtgtatgggcagttgacagcaccaaatccagaaagaagagccatgagagtcactccaatcacaccaacccggctgatgagctgttctatggataagatcccatgttttgggctgagaatgggaaagggatctcctagtttccagaagaaatacataaaggtcagccataagagacaggaaaaaagcagtcgttgtttatgcagtagtcggatattgctcacaataaaatagccaatgtaaaaaggcaccatgaaaaccaggatcagcagaattacacacaggttcattttccagtgaaaataacgggagctgctattcaatactcctaagatttcaaagatgatgagctcaaacatggtgcaagaaaatgcaaacgtcacggagaagatcacctgtacaacatactgacgtatctcatagtctttaaacaattggcgcatgaagaaaagccacccaaatccaaaaaatagtatctgggaggtaatcatgatgctggagtcgatgaggaaactcatggcgaagtgtaaggaaggctcctgcctccacttcccactccccgaggccacagcacgctggggccacaggccc

SEQ ID NO: 313606 - DNA, 759 bp, Homo Sapiens
  misc_feature (133)..(146): n is a, c, g, or t
  misc_feature (734)..(734): n is a, c, g, or t
  misc_feature (740)..(740): n is a, c, g, or t
tttattggatgcaaaaaagaataagacaaaagcaaaagagtatcaccttaggggaaatacatatatatcaaagataattagcacaaagtagttcctgctatttatacttttccagcagatttactttcttagnnnnnnnnnnnnnntttggccgatgcttttactaaaagtactttgctttgttagcattcatgctaccaagagtaaacagtcaatgattgttatttataattattgttgttattattttactgctatcacccaataaaagagatcactctgaaggcatatggggcaggaggaaaatcagtaaacttttagtatatttattataaataatctacacattaataattaaaagttggcttgtatgagttagttatgtgtaatggttaatgttttaaataatgtttccttttgcagtacagatgagagccattttgtctatattacctggcattaatgtgccttgatgtttttagggatcttatccatagaacagctcatcagccgggttggtgtgattggagtgactctcatggctcttctttctggatttggtgctgtcaactgcccatacacttacatgtcttacttcctcaggtaacagagcgctttgcatcctttcttttttgccccattacttcttgaatacatatgtcatattatgccaccatctttaagattatatattagatctatgacactggctttttattcttctcttcctctgnccctgnggggcattgacctgggaaa

SEQ ID NO: 313607 - DNA, 679 bp, Homo Sapiens
  misc_feature (97)..(97): n is a, c, g, or t
cagaaagcaagggtataccagctcctgggcctgtgcaagctcaaaccagatggtctgagggttgtcagctgagccatagacttacaggccagggggnccctttctcctccagagggcttagcaggtggagccgttgcaggctcttcagggcattgcggcagtacaggctttgggagctaggggtccatgagtatgagatgctggcggttgagccccaggagagtgggtccggacagggcctgcatgctcactcgcagcaccccatagacggtgtagccgaagaggggcagcttgctcatggcctcaatgaagctgatctgtgcttcctgggggctgtgtccttccagccgtctcagctcctgacccatcaggttcttgatggaggccgtgttcacctgccgttgcagctgctttggcacgtaagctagcaggtccctgagggggtattcctgttggccttgctgaggtgctgcagggcggccagcctggcgagctgcgcgtctgccttggcgctgactggcagcttcccctgaaggtagtcccacagcacctggctgtagtgggtgctgatgtaggtggagttatcgaagtgcagtggggtctcccagtggagccgccggctgtgcaggctcacgtcctggtccactaccacgctgttgaggtattcggcgggctgcag

SEQ ID NO: 313608 - DNA, 927 bp, Homo Sapiens
gacagtttctccactttattagcctggagctcctccctgccagccccaggggctggtcgctggtccctgggcacagtgagcagggctgaggtcagacgggttcggcccttggccatggcagcttggttgggacagccgggccaagggaaaaaaaggtgcaaaagtccaaatgctggcacttcaggtgtggccggcacccagccaggcgcagtgggtgggcagggcgccatgcttctctcctggcgacaggtcggccgtgtagcagcgccccctcccagcagccactaggaacagctggtgattctcgccaggaactgcttctcccaccactcgtctaggtcaatggtcacaaagttctgcagccggggattgggggtcctctccacgtactgcacaggccttggcccgccctcaccggctgggccaccatccagctgctgttgcacctgctgccaggcttcggacacaaagcggacattctcctcgtgggccactgtgtaggtctcctgggtcccctcgaaggatggggacgtggagggggcccgccggccattcacacgattgaacacaagccttggccctggactcgacaggggccagggtcccggcggctgcgcaaagggctgcgcccgcgggggctgcgaggtcggcggcgcgggctgccggcatttcaggagctcgccgagccggccctccacctgctgctgcgtgggacctgtgcggcgctgcgcgaccagcttgctgggccccttggtgatggtgtacatgacgcgccgctcccacaccgccgccggcccccggccagatccggcccctgcgccggggctcgcacttaacggactgcgggcgccgcggggagggggcgggcccgctacacgcccccggccctaaagggcccgcacgggctcgggctgaccccggacacgc

SEQ ID NO: 313609 - DNA, 746 bp, Homo Sapiens
ttccagcctttccaacttttattccttttccgcacagctccttctcattgcagcaatcactttacctgtctttcctgcaatgccaattcattcccacatccctccaagacccaggagagcttggggaagcagggtcaggggcagaatccccaaagggtcacagtcccttgaggaaggtggcaagaggtgtagatcaaagctgagctgggacaaaaggctgctttgagcctctctgggtgagctcttcaggaaccaggaccccagaagggcaagctcctctctccacggccatcgccatggagggatcctccaagctcccactttctgtgatttcagagtccctcagactcggccgatgggtcatttttcttgtatattttctcttgattcccctccttcatggctgcatatctggctagcgtgaagagatagtcactgagtctgtttaagaacttggccacgttcgcatcggtctctcccatctggacaagaggcaccacacgtctctcggcccggcggcacacggcccggcagaaatgcagcgccgagctgatcttgcctcccgaaggcaggatgaaggccgtgagtggtgggagctggctggtgtacttgtcgatccactgctccagctccaggatgggccccgccttgaacgtggtatactttaagtgagcctcccgggccgaggagcatggtgtcgccagggccgagccgacgtcctgcaatgtgcactggattttctgacc

SEQ ID NO: 313610 - DNA, 513 bp, Homo Sapiens
  misc_feature (433)..(433): n is a, c, g, or t
tcgaagacacccaggatccccaagatttacaccaaaacgggagacaaagggttttctagtaccttcacaggagaaaggagacccaaagatgaccaagtgtttgaagccgtgggaactacagatgaattaagttcagctattgggtttgctctggaattagtcacagaaaagggccatacatttgccgaagagcttcagaaaatccagtgcacattgcaggacgtcggctcggccctggcgacaccatgctcctcggcccgggagcttcactttaaagtataccacgtttcaaggcggggcccatcctgggagctgggagcagtgggatcgacaagttacaccagccagctcccaccactcacggccttcatcctgccttgacagacgctgtcctccagttccccaagtccctccaggtcctcaccggtccctnccagccctgcccacttctggagcagcgttcccgtcgggaggcaagatcagctcggcgctgcattttttgccgggccgtgt

SEQ ID NO: 313611 - DNA, 420 bp, Homo Sapiens
  misc_feature (290)..(338): n is a, c, g, or t
gccagatggcagtgtgttacagttccaggaaaactcgttcacatcttccgtaagatcaagaaggctctggcatcagataagatcaaatgttgtctttctgttttaaatatgtgccgcaaagagatttgcttacaatctattgagaaagctaaaacagagcagacattgtcctgttgcggggtagatgaatagcctaagaatagtttagacaaattctgaaaacgaatttaccttagaagatgttcatgttagatctggtaaaagtaacatgttatttttctgtcaagccnnnnnnnnnnnnnnnnnnnnnnnnnnnnnnnnnnnnnnnnnnnnnnnnncgaaacatccaaaaaggaatgctaattagtgaaatggaagaatttccatttcaacaccttaggaaactgacttgacatcctg

SEQ ID NO: 313612 - DNA, 1756 bp, Homo Sapiens
  misc_feature (190)..(203): n is a, c, g, or t
cctcctttatccccaaagcagcatttatttacccattgaattccaaaacatttattttagaagtctggcatttcataatcacccatcttgattgacatgggctgacacacatggcgctgtcaggatacacaaggacaatagccaaagagttacaaaaaataaatccatgattcttaaacaattgcaaccnnnnnnnnnnnnnngttacaagtatcaaaactttcagatgcattgcattgaaaagaaggtttgtgcacgtcataatttaaagaggcaaaaccaaggagctactgaaacctcacgttaaacagtttattataaagctgatggaaaggagcaagttgtctctctgtatcagcttcccttaacagttttccattaattgaagaaagaggtgggaggggtgaattcatttttgcatgcacaagatgtactgcttaacgaaacactatcagcttgttttaaatggatcttttaaatatcaactgtagcctggttggctaattctttctaatcttccccattactttcgcctagatttcccatagatcaacaggcatagtaaaatgcctcatcagaacacacttctccacacaattcaaaaagggagctcctgtgggctcaaagcaaccatcagtccagcaatgcccatgatttatctgaaactgcttcccaagagacaggagtgcagatctgagtagctgtgctgccaatacagataggtttagcactagatatttagtgattgtggcaaggaagaatcggtgatgatgggggtggtgggtgaaggaagggccaggggacctgaaggatcttcagttgccttctcctgcttcttcatcctgctggtcgctcgtccagagggtgaggttgtctcgcagcaactgcatgatcagcgtggagtccttataggaatcctcgtttagtgtgtccagctcagctatggcatcatcgaaggcttgtttggctaagaggcaggcttgctcaggtgcattctggatctcatagtagaacacggagaagttgagggccaggcccagccggatgggatgcgtgggttgcatctgctctttgctgatttcaaaggcttccttgtaggcagcttcagaagcttcgaccacactgtttttcttctccccagaagcgacctctgctaagtagcggtagtaatcacccttcattttcaggtaaaacaccttgctctcatactggaaatcattgcagttcttgatcaggaacttgtcaagcagagacaggacatcattgcaaactgtctccagctccttctcaatcttctcccggtaagctttaactttctccaatttcttttcgtttccatcagccatggttttctgctcaatgctgctaatgaccctccaggaagatcgcctggcaccaaccacattcttgtaggccacagagaggagatttcgatcttcattggagagaggttcattcagctctgtcaccgccttcatagcggaggccatgtcgtcgtagcgctccgcctgctcggccagccgcgcccgctgcagcagctgctcccggtcccccatgtcgctcgcggctcggcctcgcctcgcgcctcacaccgctggctcgctagccctcccgccggtcagtccgctccccggtcgctgcggaggccgccgccgcgcacgcgcactggctcgccggccggccggaggctgcaggctgcaggctgcaggcagcgccgccgctcgcgccctctcgctggctcgccccgcgcgctccc

SEQ ID NO: 313613 - DNA, 495 bp, Homo Sapiens
  misc_feature (184)..(184): n is a, c, g, or t
  misc_feature (328)..(328): n is a, c, g, or t
  misc_feature (393)..(393): n is a, c, g, or t
  misc_feature (401)..(401): n is a, c, g, or t
attcggcacagaaggtgttttacctgaaaatgaagggtgattactaccgctacttagcagaggtcgcttctggggagaagaaaaacagtgtggtcgaagcttctgaagctgcctacaaggaagcctttgaaatcagcaaagagcagatgcaacccacgcatcccatccggctgggcctggcctncaacttctccgtgttctactatgagatccagaatgcacctgagcaagcctgcctcttagccaaacaagccttcgatgatgccatagctggagctgggacacactaaacgaggattcctattaaggactccacgctgattcatgncagttgctgcggaggacaaccttcaccctttgggacggaggcgaccagcagggatggaaggaagncagggagnaagggcaattgaaaggttcctttcaggttcccttgggcctttcctttcacccaccacccccttcttcaccgtttttttctttggccacattcat

SEQ ID NO: 313614 - DNA, 408 bp, Homo Sapiens
gcttcgcggaaagaagagattactcacactccttctcaagcacagaaccagttgtactgagctttttgctaagctgtttcagccaagaatggctgtggaatctggagtgatttcaaccctgatacctcaggatcctccggaacaagaactaatactagtgaaagtagaagataacttttcctgggatgagaaatttaagcagaatgggagtactcaatcctgccaagaattgtttcgtcagcaattcagggaactttgctatcagtggctaatgccagagttgcacacaaaggagcagatcttagaactgctggtactggagcagttcctgagcattctgcctgaggagctgcagatctgtgttcagcaacataatccaggcggcgagggctgtgaccctgttggagg

SEQ ID NO: 313615 - DNA, 1059 bp, Homo Sapiens
  misc_feature (291)..(291): n is a, c, g, or t
taaaaggccttcccacactggttacatttataagggcttttctccagtatgggttctctgatgttgtgttagagaggaatgctgcttgaagctgtgcccacttacatcacatctataaaggtctctcttctggaggaactttctgacacattatagagtctgtagttagaatcaagcatctttcagcctcatcataaaggtctctctttcctagagatttgtttgtgaagatcacttgactaaaactgcccccttggtaaggagatcttagtttctcccctgtagcacttnccttgcttccacactaaattgctttcatgctcactaattcctcgaaatgaaggttcctgagggagtccctgtgatttttcttctgagatgccctcttttgttgctgtttcactgttctcacaatcacttttaggggaaaggcatggtttccaggatttcagctgtgtctttaagggctggaggtggatgtctgttgactcttgggatgctctgagacatgttaaatccttccatggcactgctggtccctgtggactagctgggacctgctgccctgggtcatcaaactccctctctaaatcctccaacagggtcacagcttcctcgccgctttctggattatgttgctgaacccagatctgcagctcctcaggcagaatgctcaggaactgctccagtaccagcagttctaagatctgctcctttgtgtgcaactctggcattagccactgatagcaaagttcctggagtcggctcagagcctcccggggcccaggtgtctcctggtagcaaaattttctgaattgctgacgaaacaattcttggcaggattgagtactcccattctgcttaaatttctcatcccaggaaaagttatcttctactttcactagtattagttcttgttccggaggatcctgaggtatcagggttgaaatcactccagattccacagccattcttggctgaaacagcttagcaaaaagctcagtacaactggttctgtgcttgagaaggagtgtgagtaatctcttctttccgcgaagc

SEQ ID NO: 313616 - DNA, 740 bp, Homo Sapiens
  misc_feature (156)..(156): n is a, c, g, or t
  misc_feature (172)..(172): n is a, c, g, or t
  misc_feature (182)..(183): n is a, c, g, or t
  misc_feature (238)..(297): n is a, c, g, or t
  misc_feature (333)..(333): n is a, c, g, or t
  misc_feature (375)..(375): n is a, c, g, or t
  misc_feature (396)..(396): n is a, c, g, or t
cgggccatagacaggtgcggttatgccctccaacttgggcaccaagaacaaagccccttcacgcaaacacacacccaaggccattgaaggcaggcatggtgtagctcacgctgagaccagcctggacacaagtgagacctcatctctatgtaaatnttaaattagctgggcncgtagtgtgnnccgcctgtagtctcagataggaaggctgatgggagaggattccttgagcactgcnnnnnnnnnnnnnnnnnnnnnnnnnnnnnnnnnnnnnnnnnnnnnnnnnnnnnnnnnnnnggaagctgtctcagaaataaataaataaataaatanaaagccaatgagtattgtgttctgggagggtcacaagaatanaaataatgataaaaaatttanaaagacaatgggtaaaccaaggttctcctctacctcagtcctcttagcacctctgggctgagaaacagcggttccccttatgtaggtctgggggttctcaactcagccctgcctcagtagagggggccttggagagccctgggcagtggggagcaaggtgctggcagaggaggctgctaagggcccaagatcagactgtccgcaccccagggccagctcttgccctagattctgggacctccctgcaggccgccgcagaggttcgggcccctgagcccatctcgggcctcccgtaatgtctagatagtcacaaggccgtcacccacactcctggaatatctccg

SEQ ID NO: 313617 - DNA, 590 bp, Homo Sapiens
  misc_feature (49)..(104): n is a, c, g, or t
  misc_feature (410)..(410): n is a, c, g, or t
  misc_feature (507)..(507): n is a, c, g, or t
  misc_feature (579)..(579): n is a, c, g, or t
agactacgagggctccagaacccaggaagatggagtcttcctctgtctnnnnnnnnnnnnnnnnnnnnnnnnnnnnnnnnnnnnnnnnnnnnnnnnnnnnnnnnggggttcagaaattgttgccaaggtcagagaagtctcccagcccgactggacgcctccaccagaagtcacgcttgtgttgaccaaagagaactttgatgaagttgtgaatgatgcagatatcattctggtggagttttatgccccatggtgtggacactgcaagaaacttgcccccgagtatgagaaggccgccaaggagctcagcaagcgttctcctccaattcccctggcaaaggtcgacgccaccgcagcagacctggccaagaggtttgatgtctctggctatcccaccctgttttccgcanaggaaggccttatgactacaacggcccacgagagattctgacccttgagcaggtccaggagttccttgaagatggagacgatgtcatcatcatcggnggctttaagggggagagtgacccagcctaccagcaataccaggatgccgttaacaacctgagaggataccanatttcacccct

SEQ ID NO: 313618 - DNA, 346 bp, Homo Sapiens
gtcaatgccgccatcctggacgagagtgggaagaagttcgccatggagccagaggagtttgactctgacaccctccgcgagtttgtcactgctttcaaaaaaggctgaagccagtcatcaaatcccagccagtgcccaagaacaacaagggacccgtcaaggtcgtggtggggacctttgactccattgtgatggaccccaagaaggacgtcctcatcgagttctacgcgccatggtgcgggcactgcaagcagctagagcccgtgtacaacagcctggccaagaagtacaagggccaccgctatggtggagggcttccccaccatctacttcgcccccagtgggg

SEQ ID NO: 313619 - DNA, 2478 bp, Homo Sapiens
  misc_feature (490)..(498): n is a, c, g, or t
  misc_feature (617)..(638): n is a, c, g, or t
aacgcagttcttaacgtttttaatcgtgttttattccattgccacagcctactctaccttttctaccaccccgcagtatctgcctctgggtccagggtcctttctgctccggcactgggggctctcaagaggtggggctgccacgtgggtggcctctccctggagctgagcccaccctgggggaccctggatcatgcccctttgcccccagcccttggtttgcagggaggccgcctggcgatgcccagcctgaaacagcacccctgggcagggctgctcagtggcagctctcactttgtgctcaacaggaagcaatcagaaacacataccagaagccaaatctacgccaacaatttctcagacaacgaaaaagcaaagagcaaaatcaacatgatttggaaaaggaattttaaaccttaaattaaaaaaagaaaacattttcacacagaagaattatctgctttgagaaataaagaaattagaaggtgtnnnnnnnnntttttcaaaccccaaataatgataaaaatagatgtatcctctgtaaaaatctggactaaactattcagtcattcatggttattcagtattcagagcatgaagtgaaacaccaaagtatnnnnnnnnnnnnnnnnnnnnnngggaatccgagatactgtcgtttgttgccggcctcggcgtggacgccccgaccatgggccacgcagggcgtctgcctcctcccaccttccgcagacctcaggccttcaaagctcttccttggtcctgctcagttttgtggcatgttcttctataaacttgctcaaatgctccagatctctgtctccaccctcaaatttaactgggttctttttgtccccactgggggcgaagtagatggtggggaagccctccaccttatagcggtcgctggggacgtcgttggcagtggcgtccatcttggcgatgaccaggcccttttggcccttgtacttcttggccaggctgttgtacacgggctctagctgcttgcagtgcccgcaccatggcgcgtagaactcgatgaggacgtccttcttggggtccatcacaatggagtcaaaggtctttcccaccacgaccttgacgggtcccttgttgttcttgggcactggctgggatttgatgactggcttcagttttccttttttgaaagcagtgacaaactcgcggagggtgtcagagtcaaactcctctggctccatggcgaacttcttcccactctcgtccaggatggcggcattgacatcctccccactctcgctgagccccaggtccttcacctccccagcatagtcctcttcgtccgcaatggcaaaggtgtactcagggaagtccttggccacctctaggactttgctccgccaaaactgagttgcagctctgtaatcaaagctgaagtccacactgtagtagacgaccaccagggggcgcctggtgtagcgcttagcatcgtttgacaccttgcggtggccaaccaggggcagggcgtacttcagcacgaagtccttgatggccgagtcctgggtggagccctggacgtccatcatgtggctccggggctcatacttggactggaatttctcaggctgcattacaaccaactgccccttgggagactttcaagaactttgctatttctgtgctgaaagtgtggtgaaatttgtaatcttctctcaggttgttagcggcatcctggtattgctggtaggctgggtcactctcccccttaaagaccccgatgatgatgacatcgtctccatccttcaggaactcctggacctgcttcagggtcagaatctccttggagggaggcccggactgctcgatcatgtaatcaacgattccatatttttctcgtgggccgttgtagtcataaggccttcctttgcggaaaattttcagggtgggatagccagagacatcaaacctcttggccaggtctgtttctgcggtggcgtcgacctttgccaggggaattggaggagaacgcttgctgagctccttggcggccttctcatactcgggggcaagtttcttgcagtgtccacaccatggggcataaaactccaccagaatgatatctgcatcattcacaacttcatcaaagttctctttggtcaacacaagcgtgacttctggtggaggcgtccagtcgggctgggagacttctctgaccttggcaacaatttcttcctgggttctggagccctcgtagtctacagcctgccccttcttaaggatcttgatggtggggtagccactcacatcaaacctgctggccagcacagacgctgaggttgcatcgatcttggcaacaggaatgggaggatctttatcctttaatatgttggcaattttttcatattccggagcaaactgcttgcaatgtccacaccatggagcataaaactccagcagcactgtgtctttgtcagcctcgtgccgaattcgccacccagc

SEQ ID NO: 313620 - DNA, 616 bp, Homo Sapiens
  misc_feature (602)..(602): n is a, c, g, or t
acacaacctgcattatggtgatacggcctctggaccattcattttctctttcttccccctacgtaggtcctctcagggtgcgccatcattgtccgaggtcagcctcgtggtgggcctcctcctgagcggcagatcaacctcagcaacattcgtgctggaaatcttgctcgccgggcagccgccacacaacctgatgcaaaggatacccctgatgaggtaggtgtttcctgaggccatcgtgagcctgtggacctaggtaatagcccactgtcttctgtcgctgatgccattttgatgtactctttctttgtattttgagtatttttatatcatagaactgctgattctggatgtgcccacaagcagcttgtatctgttgtttatatgtttactacctttagtggcagttgaagtcttagagctttttcttgtaccttttcccatagacttagatttgtcgtgttttcactactacttttcttggaatagtttaggaacatttcctgggtagccttaagcattttgaatcaccattggttatggcagagctcttttattaatttatttttgaattcttcattcatttacattggtcagtgcangaggatatatagtg

SEQ ID NO: 313621 - DNA, 697 bp, Homo Sapiens
  misc_feature (330)..(330): n is a, c, g, or t
  misc_feature (459)..(459): n is a, c, g, or t
  misc_feature (499)..(499): n is a, c, g, or t
  misc_feature (566)..(567): n is a, c, g, or t
  misc_feature (595)..(595): n is a, c, g, or t
  misc_feature (637)..(637): n is a, c, g, or t
  misc_feature (669)..(670): n is a, c, g, or t
gggcagctggagggagagaaacactggcgcctctaccaccccactgtgcccctggcacgagagtacagcgtggaggccgaggaaaggatcggcaggccggtgcatgagtttatgctgaagccgggtgatttgttgtactttcccagaggaaccattcatcaagcggacactcctgcggggctggcccactcgactcacgtgaccatcagcacctaccagaacaattcatggggagatttccttttggataccatctcggggcttgtatttgatactgcaaaggaagacgtggagttacggaccggcataccccggcagctgctcctgcangtggaatccacaactgttgctacaagacgattaagtggcttcctgaggacacttgcagaccggctggagggcaccaaagaattgcttttcctcagacatgaagaaggattttattatgcacagactccncccttactctgcgggagatggggcagagctgtcaacaccnagtgggtaccgaggctggacagtgtagtgagactgcaagttaagaccacattgtctcacagtactgnncgatcaagatcaatctgatgaaactcangtgggaaatgaggaggaaacagaggttcatggacttcgttcnccttttgtacattttggatgcaactgaagcannatttggaatgtccagctatttctgtcg

SEQ ID NO: 313622 - DNA, 3465 bp, Homo Sapiens
  misc_feature (261)..(262): n is a, c, g, or t
aaaagaaccccctgggccggaggaataagcccaaaaaacctttcaagcaagttctctttcagagggccctatgttccaaggtcctggtaaggtgcgggaaacttggtcagggcaaatgattccgcccagcaggaggattgtgcatctgggaggcccaaagggtgctggacaagggctgttttcgaactggtttcagcgctggtgggcctgcagccggaggtcagcccagcagagtctgcagctggagagggcagtgcaacnnaccaccaccggcagctgctgctggaggggctggcccggtggaaaacgcaccatctgcagtgtgtcaggaagagggctcctgcacaggcagagcacccaactgctggcacagagactcagccggacctgcttccgccagtggagacaacagctggcagccaggaggcaggagcagcgggcgacagtgcgggccctgtggttctgggccttctcgctgcaggcaaaggtgtgggccacgtggctggcctttgtactggaaaggaggagaaagaaggcgcggctgcagtgggcgctccaggcctaccaggggcagctcctccaggagggtgccacgcggctcctgcgctttgcagccagcattaaggcctcccggcagcagctgcaggcccagcagcaggtccaggcggctcacagtctccatcgtgccgtccgccgctgtgccacgctctggaaacagaaagtgctgggccggggcgggaagcctcagcccctggcagccatcgcacccagcaggaaagtgacgtttgagggtccccttctcaaccgcattgctgctggggctggggatggcacccttgagaccaagaggccacaggcttctcggcctctgggagctctgggccgcctggctgctgaggagccccacgccctggagctcaacactgcccactcagcgagggaagcagccgcgacgcccacacttcctgttggagcctgcgcagagccagaggcctcagaagccacaggaacatggcctaggcatggctcagccagcagccccctccctgacgcggcccttcctggcagaggccccgacagcactggtcccacacagccccctgcctggggccctgtcaagcgcccctggcccgaagcagcccccgacggcaagcacaggcccggagctgctgctgctgcctctttcctccttcatgctgcggggcggctgcaccagccagggtgtcagcacagcgggcttctcctagggataagcccccggtcccctcatccctggccagtgtccttgacccccatttactccttcctggggacttctcagccaccagggctgggcctggactttcaactgcaggcagcctggaccttgaggctgaacttgaggagatccagcagcaactactgccctaccagaccaccaagcagaacctctggtcctgtcggcggcaagcgagcagcctgcgcaggtggctggagctgaacagagaggagccggggcctgaggaccaggaagtagagcagcaggtgcagaaagagctggaacaggtggaaatgcagatccagctgctggcagaggagctccaggctcagcgccagcccattggcgcctgcgttgcccgcatccaggccctgcggcaggccctgtgctagcgtgttcgcaccaggaacgcaggtgctgggctgtcggggaggcctcaggccacctccaggaacagaacacagttttaagtttgattttttttatttcaaaatgctttgcaattaaatgaattactgttcagaagtctcccacttttcatacaaaaatactgtgctactgatacagttgaaaaaattcaatgatgtctctcctgcaggagaaattcacagcatccccagggtcaacatgaaatctggccctgtccccgccactgggggctccccaggcctgcgttcctgataaactgggacaggttttccaggcactgaccaactatccaccaagggtcctctgcctccaagacagaccctgaatcaatagcagcaactttcccatatttcatgtagggatatgtggagggggacaggaactctcccatttccccagctgggcctactacctgcctgccctgttcactctggtgccatgaggcaggttcagtgattgattggtcttgcctgctgcagaggacctggccagctccagaagggtcactcatcaggtcctgcaaaggtctgtatcattaatcagtgtcatcagtgtcctcagaagacactagcagagtccagggtgatgcgttcagccacaagcacaaagactgctttttctaaagagcaggatgaggtgaatgtgggaacggaaagcagttgtcacgaaggctgtgtggctctgctgggggagaggcatccacagtctgtgccaaggaggtacctcaccctgtgcagcaggagcgttaaggccaaaaaacaaaaggggccaacagaaaacagctcaggtgatggggggaggagcagcaagaaaaaacgacaaccgagaccaactgaaggttcggtcaggaatgcaggctcttccgtctatacagtgtttaaaaagatccaaatgtgactgagatcattccagcctgcactttttatttgtaggcagaaggaacgggataggttgaggggcatgacggggtctcgccacctcttgtctgcacctctggaacaggtgggagccgaatcattcaagtcctacctggtcagactcccaaccacgctgaggcaggcccttacctggattgcctcatgggcctccctcttgaaaagaccctcactctgtttggaaaagatcccttagcagccataatcaggaaagagactctagagcgagcccagggcttccccaaagcggattttctgtcctgttttcagctggaaattgaagtccttgggggcctcgaagatgagcacgatggtggagcccaggttgaactcgcccaggtgctcgcccttacgcatggggacgccctctctattggtgtgcgtcacgaagctgaagtcattgtaggagcccttgctgtgccttgggctgtttgtgtgcaggtcccggtcaaagtagatgcgaatggagcccacgttggtggcccccacagctgtcagtgagaagaagccatgtttccagtcccccgtcaggaccacccgctcgttatggcagaagagctctttgatccagcgagccatgccagggttcactgacatcagggagcctgggaagtggcgccggtgggacacagtccagtcggtgggggagtggaagcagtggtagtccccaggggccaggtagatgacacagtgatagagctcattcccttcccgggtgaccagctggttcttgaaggagtcacacgacgcggctggtggaagggcaggtcctctgtgcacatacgcgggcccaggaacgactccaggtagtaggtatcccccattaccaaaaccaccagacag

SEQ ID NO: 313623 - DNA, 369 bp, Homo Sapiens
  misc_feature (169)..(177): n is a, c, g, or t
gtctgctggaaggactactttggtttaatgagaaagcaggtatatgactgcctcagaaatttccatcgtgaagcctttaatcatcttacccaaggctctaacaacctgggtaaactaaagatgtgaatagagcatgtgaatacagcatgggaagattgtgttcacagannnnnnnnnccggcacgtccttagagatccgatgtatagatgatgaccaccaggggctgtctgcaatacgaaaaattcctgcttgcctgcctgcctgccaatggccctgaatccagcttaggttacttagttcagcatcaagttcttcttaaatgttgggaatcagttattcatattggtattgaggcgaggctgtctgcc

SEQ ID NO: 313624 - DNA, 926 bp, Homo Sapiens
cagaaactcattgattttactctgaagcacccacgaatgacagattcccaggaggggcatgagcacgcctggagaggccatggggctggtgacaagctctggccagaagaccccaagaaggtctgatcctggggtctgatccaggcctgcggcactgggtcctaggcagactgtctgcctggtgagacgtggaaggagccagtgtccacagccgtctcaggacgtcagagagctcggtggcctgtctccagcagcatgctctccagatgcagcctgctgtcgctctccacatagggctggtgcagccacatggacaggtagctcagggtgaggtcgggatccccggtgtgggcaagctccttggccaccgtgcgcttcaggagcagctccttcctgtacatctccaagagcttatgcgaaacctcatagaaatgggttgtaggccacgtgtggaacagagggggtcgtttactctcctccccataatggtagttttctagttcacaaattcccttggtagttgaagacagcttttccattttcacctgtattttggtcaacccatccaaggtggcctgcagttcctcacacagcttctccagttcctcgttatattccagacacaccttttcttcattttccttcgaggctgggctgctgctgtctagttctatcttgtctttattcaataaactgattttcaagttggcaatattatttgcagtggtaaaacctgcatcattgagggtttcccacttcaggattaaattgtgccaatcagccgcattgtccttaatttttcttgcactgacagataagacaggttttctgggcgttacagttccaagagtctttgcttccataaggtccacagatatccgtagaaggagacgcgaagccccgcccaccccaccggaaacgcattt

SEQ ID NO: 313625 - DNA, 541 bp, Homo Sapiens
  misc_feature (55)..(55): n is a, c, g, or t
ctcagaaactcattgattttactctgaagcacccacgaatgacagattcccaggnggggcagagaaggctgagcggcaccacgtggggctggccgcgggttgtgggcatgagcacgcctggagaggccatggggctggtgacaagctctggccagaagaccccaagaaggtctgatcctggggtctgatccaggcctgcggactgggtcctaggcagactgtctgccctggtgaagacgtggaaggagccagtgtccacagccgtctcaggacgtcagagagctcggtggcctgtctccagcagcatgctttccagatgcagcctgctgtctagttctatcttgtctttattcaataaactgattttcaagttggcaatattatttgcagtggtaaaacctgcatcatttgagggtttcccatttcagggttaaaatttgtgccaatcagccgcattgtccttaatttttcttgcactgacagataagacaggttttctgggcgttacagttccaagagtctttgcttccataaggtccac

SEQ ID NO: 313626 - DNA, 1166 bp, Homo Sapiens
tggtacggcccggaatcccgggatatcgtcgacccacgcgtccggaagattgtaaagatgatattttaattaactgtcgacgtgctgccacgtctgttgctatttgcccaccaataccatattaccttgctgttggttgttctgacagctcagtacgaatatatgatcggcgaatgctgggcacaagagctacagggaattatgcaggtcgagggactactggaatggttgcccgttttattccttcccatcttaataataagtcctgcagagtgacatctctgtgttacagtgaagatggtcaagagattctcgttagttactcttcagattacatatatctttttgacccgaaagatgatacagcacgagaacttaaaactccttctgcggaagagagaagagaagagttgcgacaaccaccagttaagcgtttgagacttcgtggtgattggtcagatactggacccagagcaaggccggagagtgaacgagaacgagatggagagcagagtcccaatgtgtcattgatgcagagaatgtctgatatgttatcaagatggtttgaagaagcaagtgaggttgcacaaagcaatagaggacgaggaagatctcgacccagaggtggaacaagtcaatcagatatttcaactcttcctacggtcccatcaagtcctgatttggaagtgagtgaaactgcaatggacgtagatactccagctgaacaatttcttcagccttctacatcctctacaatgtcagctcaggctcattcgacatcatctcccacagaaagccctcattctactcctttgctatcttctccagacagtgaacaaaggcagtctgttgaggcatctggacaccacacacatcatcagtctgataacaataatgaaaagctgagccccaaaccagggacaggtgaaccagttttaagtttgcactacagcacagaaggaacaactacaagcacaataaaactgaactttacagatgaatggagcagtatagcatcaagttctagaggaattgggagccattgcaaatctgagggtcaggaggaatctttcgtcccacagagctcagtgcaaccaccagaaggagacagtgaaacaaaagctcctgaagtcatcagaggatgcgactatcagggagtatctgcg

SEQ ID NO: 313627 - DNA, 1553 bp, Homo Sapiens
  misc_feature (52)..(66): n is a, c, g, or t
  misc_feature (1310)..(1310): n is a, c, g, or t
  misc_feature (1489)..(1489): n is a, c, g, or t
ctgaaactgagaaaatatatttgagtacaaacagcttgtgaaacttaatacnnnnnnnnnnnnnnngcatcatcagagggttttactgaacttacaaccgacttgcccgctcagtatgcagttcagatgtgagaggcgcttctctgtacagcagcctgtactgtcttcaatcctatgcgtgcaggtgtctaccacaggcaaacagttttctccccattttgtagtaatgtgattttcctattagcaaaaagaggtcaccagcccctgtagacttaagggactcaagtcacaggatggggatttcctcttaatattttttattttgttgtttgaactcttgatgcaacattgtagagcagggtgttcaggacctgctgtgcccaagggactgataaaggaaaaagctctatttattctttttgtgatttgatgcacagatgaaaaacttaacacacaataacagaagttggtcgttaataaatcacatcctagtctttcagcgcttccgtaagcagacgacatcttcagttttctagctcttgtagtttcaacactgcaacatcaatgatgcatatgtccagaatcagttacaaagaccatccgattctttttctcttagttcatctatttttcactgtctcttggtcccaagtgtatctgagtgattaccttctggcattctctgctattgctcgttggggtgctctcgattgtccccgtgttttgtgggctggttgggagagggcgcttgggaaggatgtgccactgtcgggaggttgtgagtcactgggatgcctccagggatgatcccttccatggctgcaggaagtcctcctggagccacacccacgatgcctggcggatatctgtatgtggcaccattgagctcaggatgaattgcttgctggtctattactgaccaaggcgctgatgtgacaaagaattccttgttcccacaatttcttaagctttctgggatgcgacctgtgatggctcggcggatctcggtggcagctgcctccctcatctccagtgacgcctgctcactgtacccaggcagtgtgaggagtgcagatgagattcggggcatctttcaacggaccctgagcaaagctgaagggctctgactcatgcacgtcgagggctgcccctcgtatcctgtcctccttgagggcttgtgctaaggctttctcgtccaccaggccgccacgggctgcgttcacaaggaatgctccctgcctcatctgctttatggtaaagtcattgatgaggtggtggttatgttcgttgagattgcagtgcaacgatgnacacagtcactctgatacagcaaaccctgcagggtgtatcagggtcccctctgcatgccctgggacctctctatcttgtcctacaagtaggggtcataaaatacgacgctgaatccaaaggccttggctcaaactgcaaccgcctgcctcatgcaaccgaagcccatgaggcctagcgntcttccacgaatgaggggccacttccatggccacctcgagaatctgcttcacggtctgaacccg

SEQ ID NO: 313628 - DNA, 1282 bp, Homo Sapiens
catagtagtcatccaataaccagtagctaccattattattgaacaagaccttgtactcatcaaggaaagaatgcattaatatttattcattgattcattattaagcacctatttataccagtcacggctagagagtggaactgaaatgtgaacaacttccaacacaattcctggctggtagtcaatatgagtgaaataaaattgtagagtgagtaaggtgaggattacaaagatgcttaagcctttaactcagtatttatttaaatcaacttgcattttacaaggtaacatctttattttaaacagcttgcatggcactgccttttgcccttgcatgaactccaggtggaaactggtgtagggctgagctggcgtgagttcttgagggctcagggctctcattgtatgtagcccactgctgtatcatctgctaggagcagtcaagtgtttctgaagcagggcctgaacaggggctacccccattttgaggaggtggattgttacactgcctttgtcttgtcttacgtcttccagagcatgaagaccaatttgaccagcaattccacttcccatcaatgggggtattcttccgataggagacctcacaggctaggccttgggatccaacaggacagatgcagtcacagcgtgatcctttcaggacagggactccatttccttggcagggagcacagtggcaggaactaacttccttctggaactcctccagtgcctgcttcatgttctgcctcactgtgctggaataggcaaaatctgtggctgtcactagttcatacagaggctccaccttaactttgatgatggctgggttgtactgcacagcgtctccccactcctgcatcaggtccgccgtcggcagctcctggtatgccagggtggtgatgtgctcacttgcccctcctcgtaccaggaccaccaagtcctccaccatggtgtccctcttgtttctgtcttttatttcattcagaatacctctgcatttgcctacagacacacccagactgacgtagacctcttcaatggcaccaccaattttaaaatcatttttggcacaggcatggacgttgttaagagtataatctcctctctccatggcctctttgttcataacgagggtgtattcataaatgcccccaagcacagcctctgtgatgtagtgggtcccaaaatcacggaagagatctctgtattccccgtagctgtactccaggggcagccgcttaactctctgaaggaactcgtaatggagcatgaggcttct

SEQ ID NO: 313629 - DNA, 715 bp, Homo Sapiens
  misc_feature (81)..(124): n is a, c, g, or t
  misc_feature (174)..(174): n is a, c, g, or t
cccaggcggaggctcaagctcaagcccaggctcaggctcaggctcaagcccaggcccaggcccaggcctcccaggcatcannnnnnnnnnnnnnnnnnnnnnnnnnnnnnnnnnnnnnnnnnnnacagccaccaccacacttccagtctcctggggcagccccccagggtgggnggtggtggggacagcaatcccaaccctgcaccccagtgttcctttgacctgaccccgtataagacggtggagcatcataaggacatctgcctcactgtcaccaccagcaccatccaggtggagcacctggccagctcttagagatccgtgctgccacccactgggaagaggaagaagtagtcctggtgtcttctttctccaactcttggtgggaaaagtccttttcttccttgacaggccttggctccatctccttgggcctatgtcacggctttccttcacaggataccatgctttttctgaactcttctttggaacatcagccctcctgattgcaaaggaatactgagctgatggtgtcatccagcagcctcccctcccaagcaaagcttcttgtccagtgtggccacttaccctatccttaccctccttatcctcaaagtttgggctgatgtaagactagaggctggccctcccagataacagaggaaggggagcccctgcaccagcctcttttctattttggctgcgacaggggttt

SEQ ID NO: 313630 - DNA, 970 bp, Homo Sapiens
  misc_feature (42)..(74): n is a, c, g, or t
  misc_feature (416)..(416): n is a, c, g, or t
  misc_feature (868)..(900): n is a, c, g, or t
gacgagcgcagcggagtagattagcgaggaagcggccgcagnnnnnnnnnnnnnnnnnnnnnnnnnnnnnnnnncagtcgacggtaccggacatatgcccgggaattcggccattacggcgcgggggataccatcctttttctgaactcttcttcaaaaggaacatcagccctcctgattgcaaaggaatacgtgagctgatggtgtcatccagcagcctcccctcccaagcaaagcttctaaaactgggggtcggtgctcaagggaaggatttgctatgacctcatagaaccttgtccagtgtggcccactttacccttatccttaccctccttatcctcaaagttggggctgagtgtaagactagaggctggccctcccagataacagagaaaagggagccccaaatgcaaccnagcctcttgttctattcttgcctgcaaaagaacagaggtttctcaaaatgccttagtccctgagagccatttcttcccctacatcgtctcactttgcttcctattgactgctggtagaaggagatttggggtaggggctagacctccttttatttgaagggggcaagggctgagatgtggtcccaaggggccagaaattcccaagttggtcacaggtggcttagaagtgtgtgttatggttttacggatttccttgaagcctctctccttctctgcctacaaagaccctatactctcagtctccccaacccacccccaaggagctgtgggaggctttgtgttatctgtgaaactccaaaacaggggtgttgcggagaagggagagttcaaggcaaacgcaaggactggacttagctccctaggtgccacagtcagatgccggacacggattnnnnnnnnnnnnnnnnnnnnnnnnnnnnnnnnncccactcatcacggccatctttgttgtaaccatttctgtgtttataaatgcattatctctgagaattttc

SEQ ID NO: 313631 - DNA, 1270 bp, Homo Sapiens
  misc_feature (280)..(316): n is a, c, g, or t
  misc_feature (321)..(383): n is a, c, g, or t
  misc_feature (400)..(440): n is a, c, g, or t
  misc_feature (1196)..(1196): n is a, c, g, or t
tgaacacgtggggtcggctatataagcaggctggtccggtccggaatccctggatatcgtcgacccacgcgtccgcacagacggcaacacaacaaagataaacccttcaagtgccacaactgtcatcgggcgtacacggatgcagcctcactagaggtgcacctgtctacgcacacagtgaagcatgccaaggtgtacacctgcactatctgcagtcgggcatacacatcagaaacataccttatgaaacatatgcgcaaacacaacccgcctgatcttnnnnnnnnnnnnnnnnnnnnnnnnnnnnnnnnnnnnntggcnnnnnnnnnnnnnnnnnnnnnnnnnnnnnnnnnnnnnnnnnnnnnnnnnnnnnnnnnnnnnnnggcctcccaggcatcannnnnnnnnnnnnnnnnnnnnnnnnnnnnnnnnnnnnnnnnacagccaccaccacacttccagtctcctggggcagccccccagggtgggggtggtggggacagcaatcccaaccctccaccccagtgttcctttgacctgaccccgtataagacggcggagcatcataaggacatctgcctcactgtcaccaccagcaccatccaggtggagcacctggccagctcttagagatccgtgctgccacccactgggaagaggaagaagtagtcctggtgtcttctttctccaactcttggtgggaaaagtccttttcttccttgacaggccttggctccatctccttgggcctctgtcacggctttccttcacaggataccatcctttttctgaactcttcttcaaaaggaacatcagccctcctgattgcaaaggaatactgagctgatggtgtcatccagcagcctcccctcccaagcaaagcttctaaaactgggggtcggtgctcaagggaaggatttgctatgacctcatagaaccttgtccagtgtggccacttaccctatccttaccctccttatcctcaaagtttgggctgatgtaagactagaggctggccctcccagataacagagaaaagggagccccaaatgcaaccagcctcttgttctattcttggcctgcaaaaagaacaagaggtttcctcaaatgcctcagtccctgaggagccatttctttcccctacatcgttctcacttttgcttccctattgacttgctggtagaaaggagattttngggggtaagggggctaggaccttccttttttaattttgaaaggggggcaagggggctgaggaattgttggggta

SEQ ID NO: 313632 - DNA, 785 bp, Homo Sapiens
  misc_feature (735)..(735): n is a, c, g, or t
attcggcacgagggcaagtggtgggtgcggaagaggatcggagcctacttccctccgctcagcctggaggagctgaggccctacttcagggaccgtgggtggcctctgcccgggcccctctagacgtgcaccagaaataaaggcgaagacccagcccctcggcggctcagcaacgtttgcccttccctgcgcccagcccaagctgggcatcgccaagagagacgtggagaggagagcggtgggacccagcccccagcacgggggtccagggtggggtctgttgtcacatactgtggcggctcccaggccctgcccacctggggccccacatccaggccaacccttgtcccaggcgccaggggctctgatctcccatccatcccaccctcctcccagaggcccagcctggggctgtgccgcccacaggagttgagacaatggccatcctgacaccttcctccactacagccctgaccatagacccagccaggtagctcttggggtctctagcgtcccagggcctggtttctgttccctcttcaatgggtgtgttcccagccaggtcctgaccctcagagccaagtccctgtcacgtctggggcagccccctcgccccacagggacctggacacgcccggccaggatgtggggttggatgggccattttctgtcctatccctcatctccacccccggcacaggctacacgcattccacacatgcaggcacacacagnctgtgacaccatttgttctttgcccggtttcatccccccatgactggtgt

SEQ ID NO: 313633 - DNA, 637 bp, Homo Sapiens
tttttttggctgtaagtttattcaatgcaaaagaatcctctccaattttactgaggtggctgaccacgtccacgaccaaatccgcctctaaactggaattcggttgctgacccagccccagcctcggctttcttgtcggcaccaggtggcacagcactccgtctgtaggtatctctgtcagcttcccctcttgtgagtctcgcaggtcgctcaccctccagacctttaggccgaggcctgccagtctctggacggctacggcgtagggtggcaggcacaatctccgggggcagatgaaggtaatcacggagatactggataccctcattggtaaggtaccagtagaaatgtctccaggcaaactgttccttcacgtagcctcgggacttgagagactgcatggccttcatgacatgaaggttgggcacattcttgtctgccagctccgggtgcttaggcatgtggacatccttcttggccaccatgactccctccttaaaaaggagttcataaatggcaatccggttcttcttaggcatcaacatctctgcggctgcagggtccggtaccggggctggaaaagaaggagcatgcgcggtgctgcgtctcttccgggctggcgtggacccgccccccc

SEQ ID NO: 313634 - DNA, 894 bp, Homo Sapiens
  misc_feature (86)..(89): n is a, c, g, or t
  misc_feature (92)..(93): n is a, c, g, or t
  misc_feature (97)..(97): n is a, c, g, or t
  misc_feature (101)..(102): n is a, c, g, or t
  misc_feature (110)..(112): n is a, c, g, or t
  misc_feature (121)..(121): n is a, c, g, or t
  misc_feature (123)..(123): n is a, c, g, or t
  misc_feature (126)..(126): n is a, c, g, or t
  misc_feature (131)..(133): n is a, c, g, or t
  misc_feature (135)..(135): n is a, c, g, or t
  misc_feature (137)..(137): n is a, c, g, or t
  misc_feature (139)..(141): n is a, c, g, or t
  misc_feature (143)..(145): n is a, c, g, or t
  misc_feature (147)..(155): n is a, c, g, or t
  misc_feature (157)..(159): n is a, c, g, or t
  misc_feature (161)..(176): n is a, c, g, or t
  misc_feature (178)..(180): n is a, c, g, or t
  misc_feature (871)..(871): n is a, c, g, or t
ttccttatttggggcccggcgggccccaaaaggaaatggttttaggaaagattttttgaggggccgaagggccgcccaccattttnnnnttnntttntttnntttttttnnnaaaagggtntnttnttttnnntntntnnntnnntnnnnnnnnntnnntnnnnnnnnnnnnnnnntnnnttttggctgtaagtttattcaatgcaaaagaatcctctccaattttactgaggtggctgaccacgtccacgaccaaatccgcctctaaactggaattcggttgctgacccagccccagcctcggctttcttgtcggcaccaggtggcacagcactccgtctgtaggtatctctgtcagcttcccctcttgtgagtctcgcaggtcgctcaccctccagacctttaggccgaggcctgccagtctctggacggctacggcgtagggtggcaggcacaatctccgggggcagatgaaggtaatcacggagatactggataccctcattggtaaggtaccagtagaaatgtctccaggcaaactgttccttcacgtagcctcgggacttgagagactgcatggccttcatgacatgaaggttgggcacattcttgtctgccagctccgggtgcttaggcatgtggacatccttcttggccaccatgactccctccttaaaaaggagttcataaatggcaatccggttcttcttaggcatcaacatctctgcggctgcagggtccctcgtgccgaattcggcacgaggccggcgcatttgcgggtggttcgggccccagcagctggcttcgagaccaacgagcggctctttcatggtacaagcctgtcgtgctcaccgacgatcaggtggaccangcgctgtgggaagcggtctttgc

SEQ ID NO: 313635 - DNA, 1188 bp, Homo Sapiens
  misc_feature (241)..(257): n is a, c, g, or t
  misc_feature (271)..(271): n is a, c, g, or t
  misc_feature (303)..(331): n is a, c, g, or t
gagtaagggcgggggcgcgcggcgctgttccgggggatgtgtgtacgccgcggccgcgcagaggcggggcaccctacgggcgggtttttgtatgggggcggagaatggccagggcggccggcgtggtgtgcgccgcgggtttcttgtgttcggcgcagggtcgttcgagccggggtgccccgtcccgtgagtggggggccccaccccccacaccgaaaaagggttggaaaaaattttgttnnnnnnnnnnnnnnnnncccgccaaaagggnctttttccccctccggggcggtcgtttgtgannnnnnnnnnnnnnnnnnnnnnnnnnnnnttcaggcccgcccgacggcgcgggggatctcttgtagcgcggggctcggacggcggggcaggcaaagttttttgggctgtaagtttattcaatgcaaaagaatcctctccaattttactgaggtggctgaccacgtccacgaccaaatccgcctctaaactggaattcggttgctgacccagccccagcctcggctttcttgtcggcaccaggtggcacagcactccgtctgtaggtatctctgtcagcttcccctcttgtgagtctcgcaggtcgctcaccctccagacctttaggccgaggcctgccagtctctggacggctacggcgtagggtggcaggcacaatctccgggggcagatgaaggtaatcacggagatactggataccctcattggtaaggtaccagtagaaatgtctccaggcaaactgttccttcacgtagcctcgggacttgagagactgcatggccttcatgacatgaaggttgggcacattcttgtctgccagctccgggtgcttaggcatgtggacatccttcttggccaccatgactccctccttaaaaaggagttcataaatggcaatccggttcttcttaggcatcaacatctggcaagtctccgccacgcactggcttcatcctccccctctccctcggacaatcttcgcctaccagcggccccctaccccataaaataagcctccagcccctatcgctactcagaaatcggtgtgtggggagtgggagagaggccccctgcccgcatcctggggagaagcagccgctaaggcggcaggatagcccggatgggagccgatggaactcgaacgccacagaaactcacctctgcccc

SEQ ID NO: 313636 - DNA, 924 bp, Homo Sapiens
  misc_feature (612)..(646): n is a, c, g, or t
gggatgctccttcttttccagccccggtaccggaccctgcagccgcagagatgttgatgcctaagaagaaccggattgccatttatgaactcctttttaaggagggagtcatggtggccaagaaggatgtccacatgcctaagcacccggagctggcagacaagaatgtgcccaaccttcatgtcatgaaggccatgcagtctctcaagtcccgaggctacgtgaaggaacagtttgcctggagacatttctactggtaccttaccaatgagggtatccagtatctccgtgattaccttcatctgcccccggagattgtgcctgccaccctacgccgtagccgtccagagactggcaggcctcggcctaaaggtctggagggtgagcgacctgcgagactcacaagagggggaagctgacagagatacctacagacggagtgctgtgccacctgggggccgacaagaaagccgaaggctggggctgggtcaccaaccgaaattccacgttttagaggcgggattttggtcgtgggacgtgggtcaacccaccctccagtaaaattggggagagggattctttttggcattggaaataaaactttacaaggcnnnnnnnnnnnnnnnnnnnnnnnnnnnnnnnnnnntgcctggtgcgggccggccctcgggccccctcgaaaaaaggttttctaaaaacctttccggttttgggggcggccgggccccccgtaggggaaagggggaacattggggcaataagctgggttccccaaggagaaaaccccggggtcaatgaaccaaaggggttttggaatttcctccccaaattaaaaagaagcgccccggggggaaaaaccgagagcgttctctgagacaaattcccaaatggggggcttccctgaggcggctttaattgtgggac

SEQ ID NO: 313637 - DNA, 584 bp, Homo Sapiens
atcttaaagatattttactaacatggtaatattaaatcaaataattacatgaactgttggaatttcatttgggcaattttttaaaagataatttttaattgctatgagactggagtttaagagtggatgatttaactgaaatgtgtttagtaagactgggtagataaaccaaacaccctgaattcccttaatagcagttatcattctgacatcttcttattttaaagaaattgctgtttgacagtgaaatcactatatttagaaacgaatgctaccattccaccccaactacatgttcaggttaaatgcgtgcacatcctggtagctggaacatctgtttctagcttgttgttcctcttggctgcttttcaattggatttcctcgagcaggtcccaggcttgtcactgcagccagggtctgttaaccatcaccactggttctacattaagtaggaggttcagggctaagctaatctcgcctgcctttctgactgatcacagtgatgttcgccgtggccacttatcatgcgggctcctttgggagggtgcttttctttgtctgtcctctgggtggtgggtttgtt

SEQ ID NO: 313638 - DNA, 1574 bp, Homo Sapiens
  misc_feature (58)..(66): n is a, c, g, or t
gacctttagtttcatagtgaaaccattttctagaaaatcaaatattttattttcattnnnnnnnnnccttgaataataggaatcattttacacattaatggttgctctttaaaagttagaatctcaagagataccaaaagcacttaagagttaccaccacattttgcccaagttctaaggaaagttctgaaacttagtggtggtgtgtttgtactcagcaagctccagacagtctgagttgctcattccatgaacagaagcttgaaaatgcccttacagttgagatataaacgagggaagaggtgaagctttcaggaagccagagagcccctgccggtcaggtttcctgaggaaggcaggggtgctctatgctcatcagtcattcaagcttctcaggaaatgtgcccatcatgggaacagcagctatcttccaagcttaaaaattatgaatcccaggaagttaaagcccaaccagccaaccaccttcacatccttctcatactagtagagtcattcaaaacagcaagtggtgcttctgaggcagcctcaggaaggtctttgggtggctattctagaggtgaacatactggaaaggtttttacctaaagcattttcagttgaaatgaaaaaagaaggaaagctccaaaagtcagtttcaaattctttcagtgctgctcccagagaagtccgtgtgcaaaggtgtgatgttctggtcataagcggcatactcagaggtgccggtactggccagcttgagctgctgggcagcatgggtcagctggaatgcagcatcagggtgggctgtctcaggcagcagtgtgcattccctttccagcatgtcagccacccctttcagcaggtccaggaaaccaaaggctagagcggcctttcgcaaacggttcagctccttatagaatgtctgtgttttttcaggtagtttccttgcatttcttaaaatcttctgtacatctgtctgcaggccgctgggtttgatccagacagtcacattctgggcataactgcgtttgtttttgggctgcagggggaatggactcttattgtcatcctcgccataagggttttctttagcatctgaaataggacccaactgtgccattttccctagccatgggagaggttctgggccaggctcaaagagagacatcatgaggtttgatttcttcttgctgtcagcttgggagtagagcattccatgccattcaggacctaattgaacaatcgctaccattccttccacttttaggctaccatggagcaggacacaaaagttgggtattttgcctgcaatctgattggctgaattttcatcttcattgtcatcagtgatgccagtacccacctcatcaccttctttgttaagtgctataggtaagaccagatgtctggacagaactgggggacttgaaatatcagctatatcaataaatcccactatttccaaatctgtgttaatgactttagggataggatcaatttcttcatctacaacaaaaggttctggcctggggaagacttgtacatcagcagttaggtggccacacttgagaacagca

SEQ ID NO: 313639 - DNA, 363 bp, Homo Sapiens
  misc_feature (62)..(62): n is a, c, g, or t
  misc_feature (337)..(337): n is a, c, g, or t
ccaaattttgtaaaaaatgattttgcctatatacatgttttacctgtagggcatcctcaaanccccttttgggaaataatgacaaacattagaagtaaatgaattacctaagtatcaaaggaaaagaaaatcaaataaaatgccctgccctgccctaccccaaatgtctcctgtccccagtggaaagcaacataaatggtaatgttacctgcaggccgctgggtttgatcccagacagtcacattctgggcataactgcgtttgtttttgggctgcagggggaatggactcttattgtcatcctcgccataagggttttctttagcttcttataagnaaagacattcttgaaatgacatctgg

SEQ ID NO: 313640 - DNA, 1604 bp, Homo Sapiens
aacacattctcctgctggaacttctgtgcaaaacatgttacactggagccaggctgttaaattccaaaagtttcaagccttgactggggaagcagtgccaagaattattttcattacaaccagagttatcctcccacatacaatgtgaaggacatgcttgtgccgactgcagtctggagcgggggtcacgactggcttgcagatgtctacgacgtcaatatcttactgactcagatcaccaacttggtgttccatgagagcattccggaatgggagcatcttgacttcatttggggcctggatgccccttggaggctttataataaaattattaatctaatgaggaaatatcagtgaaagctggacttgagctgtgtaccaccaagtcaatgattatgtcatgtgaaaatgtgtttgcttcatttctgtaaaacacttgtttttctttcccaggtcttttggtttttttatatccaagaaaatgataactttgaagatgcccagttcactctagtttcaattagaaacatactagctattttttctttaattagggctggaataggaagccagtgtctcaaccatagtattgtctctttaagtcttttaaatatcactgatgtgtaaaaaggtcattatatccattctgtttttaaaatttaaaatatattgactttttgcccttcataggacaaagtaatatatgtgttggaattttaaaattgtgttgtcattggtaaatctgtcactgacttaagcgaggtataaaagtacgcagttttcatgtccttgccttaaagagctctctagtctaacggtcttgtagttagagatctaaatgacattttatcatgttttcctgcagcaggtgcatagtcaaatccagaaatatcacagctgtgccagtaataaggatgctaacaattaattttatcaaacctaactgtgacagctgtgatttgacacgttttaattgctcaggttaaatgaaatagttttccggcgtcttcaaaaacaaattgcactgataaaacaaaaacaaaagtatgttttaaatgctttgaagactgatacactcaaccatctatattcatgagctctcaatttcatggcaggccatagttctacttatctgagaagcaaatccctgtggagactatacccactattttttctgagattaatgtactcttggagcccgctactgtcgttattgatcacatctgtgtgaagccaaagccccgtggttgcccatgagaagtgtccttgttcattttcacccaaatgaagtgtgaacgtgatgttttcggatgcaaactcagctcagggattcattttgtgtcttagttttatatgcatccttatttttaatacacctgcttcacgtccctatgttgggaagtccatatttgtctgcttttcttgcagcatcatttccttacaatactgccggtggacaaaatgacaattgatatgtttttctgatataattactttagctgcactaacagtacaatgcttgttaatggttaataatgggcaggggggatactactttgtaacttttaaagttttaaacttttccataaaattgagtgagactt

SEQ ID NO: 313641 - DNA, 400 bp, Homo Sapiens
agtcagggccgagccaagcggcacacgcgccgtcggtatggacctacccgacagggaggtgagcggcacaggtgctgtcggtatggacctacccggtggggaggtgagcggcacaggtgctgtcggtatggacctacctggtggggagccaagcggcacacgcaccgtctggcagggaggtgaggggcacaggtgctgtcggtatggacctacccggcgggtagtcgagcagcacaggtgctgtcggtatggacctacccagtggggggagtcgagcagcacaggtgctgtcagtatggacctacccagtggggggagtcgagcagcacaggtgctgtcggtatgcacccacccagtggggggagtcgagcagcacaggtgctgtcggtatggacctacc

SEQ ID NO: 313642 - DNA, 392 bp, Homo Sapiens
ctctcctgcagaaggaaggctccacatcaaacaaagcgtactgcccaacattttccagcaaccagaacagagccttttcttaaagttcctctttgaattatagctgtagtaacaagacctcttcctttgtctgtgaaagactctattactgttccttccactggaccattgggatctgctttcaattctaacatttctgcaagagcaactgttgcttctgccaaagccatcagattatcgcccgtaagtgcggagacaggcactgcttgaacatcacctccataatcttcacataccacatcgtaagccagcagctcttttttcactttctcaggatcagcctcagctgtgtcctcgtgccgaattcctcagcccgggggatccactagttc

SEQ ID NO: 313643 - DNA, 1307 bp, Homo Sapiens
agcacagggtaatctgctgctcagttcctcttgcaaatcttcaacaagacggtaaattattttgtgaagtttaatttttactcctttttttgcagctgactgttggataacattgcctgcattcacattaaagccatatataacaccatcaaatgtttcagcaaggttaacatcatttgcacttacatcacccactccaaaatgtactaattctagttcacactcgtgtgaagcatcataggtatctataatgttcaaaatggcctcaacagaaccatcaacatcacctttaataatcacagaaagtacatttgaatctctttcccttttctcttttggctttaagggtatttgttcttttctttctaaaaaccgtagaattgatctcttcttccacagtagatggccatacttctcacgggctttctgatgtgcttctttgtgttcctttcgcttttcttctattattttcagatcctcctgacctttctcctgttcttgttcatatttcctccagtcaacaacttcacgtgcccttggctcagattctacttcaagaatttcttctcctgcagaaggaagttctctccagcctgtaattcccactggcatgctgggataggcctcatcaattgtttttccattttcatcaaacattaagcgtacttttgcccaacattttccagcaaccagaacagagccttttcttaaagttcctctttgaattatagctgtagtaacaagacctcttcctttgtctgtgaaagactctattactgttccttccactggaccattgggatctgctttcaattctaacatttctgcaagagcaactgttgcttctgccaaagccatcagattatcgcccgtaagtgcggagacaggcactgcttgaacatcacctccataatcttcacataccacatcataagccagcagctcttttttcactttctcaggatcagcctcagctttgtcacatttatttacggcaaggataataggaacaagaaaggcaccaatgtgctgagtgatgcctccagtttccactgctgccacttgagtttttcgaaatttgtcaagtaatgtcgttttcccgtgatcaacatggcccattatagtaacaactggggaccttggggttaataaagctggatctgcctggggccttcttacagcatctttattttttctgactttgtcctgttttaatttactccactttaacttcatccctgccttcgttatcacttctttgatccagacttcatctaaatcctcgtgccgaattcgccacccaggcc

SEQ ID NO: 313644 - DNA, 745 bp, Homo Sapiens
  misc_feature (239)..(252): n is a, c, g, or t
  misc_feature (665)..(665): n is a, c, g, or t
gagttagttgcatttttaatgtaattttaaaatcctggatcccaagaaagtcttggcttgaatttgcttttcttcataacaaacaattctgtctcccacttgaaattccatattgtcttcatctaaactgagaccacaatccatttcccgttttgacaattgaaatgtcatctttatggtgtttcaatgaggttaatgagcccttccaaattacatgtccattacgggttagtttaaannnnnnnnnnnnnnctaactgtcccttttggactctgcagccagccacaggaacttttttcttcccttctgttacagagaaggtagctagtatagatgcctcacctactgggtgctcttccacagcacagggtaatctgctgctcagttcctcttgcaaatcttcaacaagacggtaaattattttgtgaagtttaatttttactcctttttttgcagctgactgttggataacattgcctgcattcacattaaagccatatataacaccatcaaatgtttcagcaaggttaacatcatttgcacttatatcacccactccaaaatgtactaattctagttcacactcgtgtgaagcatcataggtatctataatgttcaaaatggcctcaacagaaccatcaacatcacctttaataatcacaganaagtacatttgaatctctttcccttttctcttttggctttaagcctcgtgccgaattcgccacccaggcctcgcttcctt

SEQ ID NO: 313645 - DNA, 652 bp, Homo Sapiens
gtaagacagaatcattaaatgaagctcactaaatgaagttctcatttctctccaacagactgtgctagcaaacttcgttttcttgattgtatttaaataatttagtatctcactacgataatagtttttaactggaagggtgtgatgtgtttttttggtttttgttctcagagttgtcttctgagataattattaccaagtcatttgtggggttgtgtttttttcacatcatgtgacagaaattataactcataagatttaggcataatctggttttccttgattgctgttgttttttaacttagcaggcagcctaggccatggctgttctaatttttatttttgccttcattgtgtgatgatgtgtgcaggttttcctgattttctaatttttatttttgaattcacatgtgtaatttcacatcaataacttgtgtttctgaaatatcctaactaacttgttaatagggaaagaaaccagatttgcttaaatctgttcaaggctgacattctgaaattctaaactggaaataaactcccagagtatttggaaaggttctaagtacaaggatcaggcctaaaatagctccttggaaagaaatttcctttttgatgagaaaacttaaaaactggtttgggaatggaagcagta

SEQ ID NO: 313646 - DNA, 391 bp, Homo Sapiens
tgaagttgtctgcccaaccagccaggaccttctccagtcgaattctctctccacacgcaaggtctagttcaccaattaagatcaggtcttcagaggtcaccttccactggcggctggcaaagtgcaccacggcaaagagcctgccatactgccccgtgacgatcatctcattcaccttcttcacgacctctgcatggtgtctggtctcctcaggaacatatcctggtagatatgaagtgctctgtgaattgaaccttcgagaagcagaccaaagggaggctgctccgggccccgaaggtctcaggatgctgtggctgcacgcggacgccagccgccctaaggtgaccgtcagggaagatgctgccgtgccgaatcctgcagcccgggggat

SEQ ID NO: 313647 - DNA, 849 bp, Homo Sapiens
  misc_feature (98)..(98): n is a, c, g, or t
  misc_feature (101)..(101): n is a, c, g, or t
  misc_feature (104)..(104): n is a, c, g, or t
  misc_feature (111)..(111): n is a, c, g, or t
  misc_feature (119)..(119): n is a, c, g, or t
  misc_feature (122)..(122): n is a, c, g, or t
  misc_feature (125)..(125): n is a, c, g, or t
  misc_feature (130)..(130): n is a, c, g, or t
atttacccctatttgggggcccccggcgccccccaaacgggaattggtttttagaaaaagccttctcgaaagggccgaaggccggcccgcacaaggtnttnttnttttgtngttttttnttnttntttcnggggaaggcaggagtttatttttatccttttgtaagtattaactcggtaatcacaacaaacacggagcaatctcaatgctgtttatccggaggacagtctgcggggtcgtgacgattcttttcttcttgaagtttttccttttcctgaatctcataatgattcttggccatgattctgtcttttcaatgactgtggcttctactcgaacaagatcctttccgaggagtggcttgccaagcagcgtgaagttgtctgccccaaccagcaggaccttctccagtcgaattctctctccacacgcaaggtctagttcatttccaattaagatcaggtcttcagaggtcaccttccactggcggctggcaaagtgcaccacggcaaagagcctgccatactgccccgtgacgatcatctcattcaccttcttcacgacctctgcatggtgtctggtctcctcaactgggtctggcagaacaacttctggccaaggtggtgaactcagggatgttttaggaacatatcctggtagatatgaagtgctctgtgaattgaaccttcgagaagcagaccaaagggaggctgctccgggccccgaaggtctcaggatgctgtggctgcacgcggacgccagccgccctaaggtgaccgtcagggaagatgctgccatggccgcagcctcggcctcgtgccgaattcgccacccaggcctcgcgtccgt

SEQ ID NO: 313648 - DNA, 538 bp, Homo Sapiens
  misc_feature (300)..(300): n is a, c, g, or t
  misc_feature (341)..(341): n is a, c, g, or t
  misc_feature (392)..(392): n is a, c, g, or t
  misc_feature (412)..(412): n is a, c, g, or t
  misc_feature (418)..(418): n is a, c, g, or t
  misc_feature (439)..(439): n is a, c, g, or t
  misc_feature (454)..(454): n is a, c, g, or t
  misc_feature (459)..(459): n is a, c, g, or t
  misc_feature (477)..(477): n is a, c, g, or t
  misc_feature (496)..(496): n is a, c, g, or t
  misc_feature (518)..(518): n is a, c, g, or t
  misc_feature (523)..(523): n is a, c, g, or t
ttcttccctgacggtcaccttagggcggctggcgttcggttgcagccacagcatcctgagaccttcggggcccggagcagcctccctttggtctgcttctcgaaggttcaattcacagagcacttcatatctaccaggatatgttcctaaaacatccctgagttcaccaccttggccagaagttgttctgccagacccagttgaggagaccagacaccatgcagaggtcgtgaagaaggtgaatgagatgatcgttcacggggcagtatgggcaggctcttttgccgtggtggcactttngccagccgccagtgggaaggtgacttttgaagaccttgatntttaattgggaaattgaattaggaccttggcgtgtgggagaggagaatttngattgggagaaggttcctgntggttnggggcagacaatttcacgttntttggcaagccattncttcnggaaaggtttttgtttcnagtaggaaggccacattcnttgaaaagtcagattcatgggnccagnattctttttgagttt

SEQ ID NO: 313649 - DNA, 800 bp, Homo Sapiens
  misc_feature (60)..(60): n is a, c, g, or t
  misc_feature (67)..(67): n is a, c, g, or t
  misc_feature (147)..(147): n is a, c, g, or t
ctgacgtgaactgaacagaggccaagggcaaaccctggaagaattgaaagaaaaaccatncctgtcnccaatcatgaagcatatctgttacattagcgatttgtagactgaagagctagcagagaggtttggacttcatgtaattantcagttccaatgtgctaactaaaatttaacctagaacaacaaccagtttccttaccagttttctttccttcctggtaaggaaactggtatttaaactaaatctaggtcactgaaatttgtgcccatgggaaacatgcaaatagaggactgcctacaccctacttgtttatattgatccagacaggcttaacgctgactactgaaaaatagcctatctgaatttatatcaaatagtgaatcttaaagcacccaagatgaaaaattagggcacactgagatggttttaaaatctttgtcatatgataatcaagcttaaaatgtatcttagagtaacagatttttagaaataaagacctttaaaggctccatagtttggtaccgcagattatccagcatgtttattatgaattatttctcctccttcaatttcaatttgctcatacagccacttgcggtcacagcggcattcagctccacacttggtagaaccacaggcaggacaagcatagaaacatcctaagcagtcttcatccaggcagtcacagaggtccatcccactaaaaatcaggagaccctggctatcatagaccttactctttgctggtatcacttgtctgtctgaaccagcggttgcattttttcctgcagcccgg

SEQ ID NO: 313650 - DNA, 348 bp, Homo Sapiens
ggtgagtgatcaggtaatggttgaatgaactaataagtcgtgtaagcaagcttcacgagagttgaagtggtctttagctttttcattgaatccacttgtccttggatcagatttacctgattttggattaattcagtggatttcatttactattaacatttgtaggctagacccagcacagtttgctaaatgaagagcagcaacagtactggttttcaaaccttggctcttctctatcctcgctgtcctagccccacgtgatcagcagttcagtgcaaattgaagacagatggaagcacctctgtgagggcagcccttcccgctagcttcccgctgctttctcctgtg

SEQ ID NO: 313651 - DNA, 660 bp, Homo Sapiens
agggcaagaatcaagcatgggcatgaaaggcaaagggctaccacagcagcatcgctgcctccaccttgggctacgcgacccagcccagcaggctgtgacctaggagagctgctccagcctggggcatgaggggctctgtgaagaagccaacagtagcacctgactgaagctgaccacgaacagggcaatcgtctcgccaacagaccagtaagagactcggctattaaggtcttccgctcgggcccggtcctgggcctcccgcagccggtaatgcgtctgggagtcaatcaccgtcagagcctcatggatggtcacgcaggcggactccatctgggtgagagctgtgaccctgttccccatgtctgggagaatgggaggctcatcgcccacttgaaagtcaaagtagacggtcttgtgagagaaggtggaaaactcattactgaagcaaaactgataaacgcccttgacttcagcccggtacgtgaagctgtcgtactgcttcttcgtttctctgtagatggtgttcccctgggggtcctctacatagcagtcaacatcgtagtggcctccagtgatgacctggtaatccagggagaacttcacgccctgctccacctcctcgtggaagcactgcttggcgttgtccggcagctcctcgtg

SEQ ID NO: 313652 - DNA, 2224 bp, Homo Sapiens
  misc_feature (544)..(545): n is a, c, g, or t
  misc_feature (635)..(775): n is a, c, g, or t
  misc_feature (2191)..(2191): n is a, c, g, or t
aaccgcaagggcgggatggtgaaacggacagacggcgcgttactcgctgcggggataaaggggggcgtttatccgggttctgcgccatccggagtacgcaccccccgccgggtatggtatcagtgcgggaggggggctacacactgccgcaagagcatgtgttataaagagggggcggcggtattgcgctggcgggtggctgataagcggagatggttgttggttagcggggcggggcggagtaacaaatatataaagcggacatggggggtgatggaagtgggtaaacggcaatagaattctgtcttgggtatataataaaggacaaaaaccgggggtggagtgcgccccggggggtgtgtattatacctctgcgcggcggagtcagggaggggggagaaaatagggcgcgggggcgtcgtcccgccaaggcggggggaaaacgcgttgtgcttgtcgataggaaacacagtcgcttctttcgcgtcataaggagcgcgcggcatataaaggggtggcgcgatctcgcgaaacaacgggacgnnttagcgggggaataaataacgcgcgtgcggtgggtacaggcggaaaacagccgacaaattaaaagtccgcggggcagggggataagaaannnnnnnnnnnnnnnnnnnnnnnnnnnnnnnnnnnnnnnnnnnnnnnnnnnnnnnnnnnnnnnnnnnnnnnnnnnnnnnnnnnnnnnnnnnnnnnnnnnnnnnnnnnnnnnnnnnnnnnnnnnnnnnnnnnnnnnnnnnnncgcggaatcgttttggcgctccacaccttagtttttattagccacagtttcccacagttttctacctcctaggaaatacacagctcaccaagggcacccagtcaccattctgtcctgcttgcatggctgacactgttgctcaccgagggtgagcagatctgcaaagtcacccagggcctggtttcctcaggtacagagaaccccaaagaaagaagagccagaacttagagcccctttcttctccatatgggataggacacccaagacaaatgacccatgcatcatgaaacagaggcagggccctaagctgcccaagaggcctgggcacttggagttcctgccaacagccaggccactgaaccattgcctgtccaccctcccacagtggctaatccctggcctagttgtaaatgtcttttcagcgctgcacacttaatgcagtcggatgccttctgattactggtctctgagaccttcagctgctgaggtgcaagaatcaagcatgggcatgaaaggcaaagggctaccacagcagcatcgttctgcctccaccctgggctacgcgacccagcccagcaggctgtgacctaggagagctgctccagcctggggcatgaggggccctagagcaggatgccggggctaggagtggactgccctgctgatgggtcgtttttctgtgaagaagcttttcaacagtagcacctgactgaagctgaccacgaacagggcaatcgtctcgccaacagaccagtaagagactcggctattaaggtcttccgctcgggcccggtcctgggcctcccgcagccggtaatgcgtctgggagtcaatcaccgttttcagagcctcatggatggtcacgcaggcggactccatctgggtgagagctgtgaccctgttccccatgtctgggagaatgggaggctcatcgcccacttgaaagtcaaagtagacggtcttgtgagagaaggtggaaaactcattactgaagcaaaactgataaacgcccttgacttcagcccggtacgtgaagctgtcgtactgcttcttcgtttctctgtagatggtgttcccctgggggtcctctacatagcagtcaacatcgtagtggcctccagtgatgacctggtaatccagggagaacttcacgccctgctccacctcctcgtggaagcactgcttggcgttgtccggcagctcgaaggtgagctcggccccgcagggctgctcggcccggcgcaggagcagcagcagaagcagcacggaggcggagcgcgggacagtgctgcccatgatgctctcggtcccgtctcgagggccgcggctcgggcgctgcgcccccggcgggctggggcgacgactaccgaccgggtcctaggaggatgtaaggggataaacgtggcaccagcggantctgcgcttccggaagcggcggcggctcagtgc

SEQ ID NO: 313653 - DNA, 383 bp, Homo Sapiens
taaatgtgaggcacaccacccacccctgtgtggaaagtgttgtggcgcttcctgccacccacccacctctctgccgttgctccttgtgacacttgtctgtcgtctcccatccaaactccaagcttacagctacctcagtactgctttgcttgtctgaaacacctcctttgccttccttcagtgtcccgctcaggtgcagcctcctccctaaagctcatctcagcttttgatctgaatgatgatggaaacatgcagacagcctctcagtcttactatttaatgttgtagctgggaatgactctgaatcccatgttctcctacgctgccttccggtctggcatttgttagctcatgcttccttgtagtccagcttctttgtgcct

SEQ ID NO: 313654 - DNA, 701 bp, Homo Sapiens
  misc_feature (20)..(20): n is a, c, g, or t
  misc_feature (38)..(38): n is a, c, g, or t
  misc_feature (55)..(55): n is a, c, g, or t
  misc_feature (107)..(107): n is a, c, g, or t
  misc_feature (137)..(137): n is a, c, g, or t
  misc_feature (140)..(140): n is a, c, g, or t
  misc_feature (142)..(142): n is a, c, g, or t
  misc_feature (144)..(144): n is a, c, g, or t
  misc_feature (205)..(205): n is a, c, g, or t
  misc_feature (219)..(219): n is a, c, g, or t
  misc_feature (232)..(232): n is a, c, g, or t
  misc_feature (236)..(236): n is a, c, g, or t
  misc_feature (365)..(365): n is a, c, g, or t
  misc_feature (370)..(370): n is a, c, g, or t
  misc_feature (469)..(469): n is a, c, g, or t
gaacaaatacgctcagcatngcatcagctgcactgtgnaagcgacggtcggcctnttccagtagacgtgtaacgacggccagtgattgtatcgactcatatagcganttgggtacgggcccccctcgagtttttttnttntntntgtgccaccaccattattatctagtcatactaggatagacactatacagtctagagatcanagacgtccctgccnttaagggcttacnatcntactggagaatatacaggcacatagagaagctggactacaagaaggcatgagctaccaatgcccagacttcggaaggcagcgtagtttgagaacatgggattcagagttccaaacccacatcctagtcncaacncagtatatcagttaacctctctgggttttttcccagctacaccattaaatagtaagactgagaggctgtctgcatgtttccatcatcattcagatcaanagctgagatgagctttagggaggaggctgcacctgagcgggacactgaaggaaggcaaaggaggtgtttcagacaagcaaagcagtactgaggtagctgtaagcttggagtttggatgggagacgacagacaagtgtcacaaggagcaacggcagagaggtgggtgggtggcaggaagcgccacaacactttccacacaggggtgggtggtgtgcctcacatttactcgtgc

SEQ ID NO: 313655 - DNA, 1448 bp, Homo Sapiens
tttgttgccaccaccatttatttatctagttcataactaaggatagaacactatagcagtgctagagatgcaaagacgtccctgcccttaaggggcttacaatcttactggagaatataacaggcacataagaagctggactacaaggaagcatgagctaacaaatgccagacttcggaaggcagcgtagtttgagaacatgggattcagagtcacaaaacccacatcctagtcccaacccagtatatcagttaacctctctgggttttttcccagctacaacattaaatagtaagactgagaggctgtctgcatgtttccatcatcattcagatcaaaagctgagatgagctttagggaggaggctgcacctgagcgggacactgaaggaaggcaaaggaggtgtttcagacaagcaaagcagtactgaggtagctgtaagcttggagtttggatgggagacgacagacaagtgtcacaaggagcaacggcagagaggtgggtgggtggcaggaagcgccacaacactttccacacaggggtgggtggtgtgcctcacatttacagccgatcatttacagcacataattccagagagtagaaaataccagaggataatggcggcattttttcaaacatttcacttgatttccataaagtataaaataatttaacattatacctctacatttcaaaattcacatcaataaaccatcctaattgttaaaatgcaaaccaattcaaagtttacattcttagtaaacataactaaatctcttaattcaaaaggacatttgatacaaattatattactccaataattccaacattcattttccaccatgttccaagcactgtgaaaataaaaatgactatgacaaggtccctgcccttgaagagcccgcagcctggcagatgagccaaagatcacctctgcctacctagagcggaattactgtgatgcacagcctgatcaaggtacgagccgtggagcacaaagacggattcatccttcctgaagtttccacaggggctcaggagagaggtcttgggcacaagaagaaatgagtttggcagagagaaagtgactatgggaggagagggctcccaggcagaggacacacgggcacagagaggaagtccagggccaatgacagggacagggtggctgaagcagggtgtaaaaggcaacagctagtgatacgaaggcccggacttagtcctgtgaaaataaggagccattgcttgtcatgttttaatcatctactaacactggttcataaggtcaggaagagataggacagaaagtgagcaggaaggttctgtctgtattgtaggcagtgactgtctgctctccccagcaactaaactgctcagaagccacactccccatgacctccttccttcatcctttattctgtctcctttttctctttatgatctgcttc

SEQ ID NO: 313656 - DNA, 1037 bp, Homo Sapiens
  misc_feature (46)..(46): n is a, c, g, or t
  misc_feature (64)..(64): n is a, c, g, or t
  misc_feature (112)..(112): n is a, c, g, or t
cttgcctttaccctttcccacccctaggaaagtcctccaaggaaanaggtcttgtcccttcctnagtcctgtgtaaccctctttttgaaaagtgatacacgtttgagcacanacatatcccatgcagtccccaaaagcacaccctgaggcatatgtgcacacaccccatcacacccacccacatgggcctgacccacagccctgaaagtcactttgtgtcagtcaccttgccaccctctgtcacctggaggacatccctgctgagactgggacagtctggagagccagggggttcagagtggcccgatcaatgggtgaccgatggtggcacagaaaaccgtgaaggtgccccggacccccaggagggatcctggggagaccgctccaggacatgtgcgcaagagcggcaacaggtggctgtgtagtaggggtagacgcagagccgggcctgtaccaccagggggcaatgtggagagctgtccttgcattgatcatcagggcgctggctgcagggttggctgttacaggggcgcttcctggagggccgcagttgaggagggcatcgggtgctgagggtctggttggtgctcaggcactggacctcccgtgtctgcgttcccccttggcaggagcgagaacatgggctccagggcgtggaaaaccatcggtcctggcaggcctgcccttgacagggctgcagggcagggggcctggggaggtgagaacagttgctcggagaagtcacgttgaactccgtccccagtttggatacacagatgatgtctctacgctgtgtgccagagccacattcggaggagcactcaccccagggccctgtgtaccagcgccaagttctctcacagggccccaggctgcaggcgcgcatgtcagggggccggcttcctgttggacagctctgcccagttcctgctcctgcttccccctggcctggcccgagggctgccccactcccaaggcagaccacagagcgccgctggattcccgtcccacactcggctgagcacttccagctcccc

SEQ ID NO: 313657 - DNA, 615 bp, Homo Sapiens
  misc_feature (96)..(96): n is a, c, g, or t
  misc_feature (106)..(106): n is a, c, g, or t
  misc_feature (116)..(116): n is a, c, g, or t
  misc_feature (143)..(143): n is a, c, g, or t
aggcccagcccattctgggcaccagtctaaaacctattccagctcacaaccggcatgtagttcaggtccctgaagacccaagcccagctaaggaanaccagtttcntgattcgtgnaccaagaactcctttcccaccactccncactccctcccaagtacagacaaccttccgtcctgctccagttgaaggggtgacaacgattcctgaagcattctgtctgagtctaatggtggctctagccagacacagggaaatgtggctggctggctgcccactaaaataagcactgagaggcaagaccgtgtccctctgagctatgccgaagacttcaggctggaggaaaaagaacagggcttgatagaagtgcaaggtggatccagcaccaactctgccactaatcctaggtcctgagtgaacactgactgccagtttacatctcaggtgtgtagggagcgtggaggaggcaaatcctgtttggagaaagccagtgtccaacacagcacttggtaaacatcaggcatgggaatgctgagtgacaggcaccatgggccacgctgagccccactcgctcatctggctggggtcatcagagggaggcccaacccaggatctc

SEQ ID NO: 313658 - DNA, 725 bp, Homo Sapiens
gagatcctgggttgggcctccctctgatgaccccagccagatgagcgagtggggctcagcgtggcccatggtgcctgtcactcagcattcccatgcctgatgtttaccaagtgctgtgttggacactggctttctccaaacaggatttgcctcctccacgctccctacacacctgagatgtaaactggcagtcagtgttcactcaggacctaggattagaaaatggcagagttggtgctggatccaccttgcacttctatcaagccctgttctttttcctccagcctgaagtcttcggcaaatagctcagagggacacggtcttgcctctcagtgcttattttagtgggaaaaacagctaataccaggggtacaaacattggctcccaaggaactggatcacccaacagccagccagccacatttccctgtgtctggctagagccaccattagactcagacagaatgcttcaggaatcgttgtcaccccttcaactggagcaggacggaaggttgtctgtacttgggagggagtggggagtggtgggaagggagttgcttgtcacacgaatcaggaaactgctctccctcagctgggctggggtctccagggacctgagctacatgcaggttgtgagctggaaaagaaagttctagactgtggcccagaatagggctggggcagctcccagagaatgaatagtgctgtttcctattggactgata

SEQ ID NO: 313659 - DNA, 467 bp, Homo Sapiens
ttctagttgatctctttgatctcttcatggttctcagcttcctgctggaaactggggttggggtgccccctgccagccacacactgtgtccgtgcaaaggcaggtgtcatcgtgtcctggccacccctgaggctgtgtgcttcttgaactatgttgtttgtataaattcaaacttcaagcctgttggaggacaggcctgtaattatgaattcccaggaagactttcttgagcccaagaggagaaaggcaggtttcaaggccatttctctgtgctgggaggtaacttttccagtttaaccttcctgagggtccaattcttagagggtcccagcatcatgtggggtttttggttctaacgtcccgccttgaatgaggggaaatctttatcttctgtttccatgtaggcatcacagcacgagacttcaggggatggggcaggcagaaagcaccaggtgggcatggtgctg

SEQ ID NO: 313660 - DNA, 798 bp, Homo Sapiens
  misc_feature (21)..(21): n is a, c, g, or t
  misc_feature (35)..(35): n is a, c, g, or t
  misc_feature (81)..(81): n is a, c, g, or t
ggaggaaggtcctggtcaagnagcagagccccagnagaagtgacgggtcagtgcaaagcaagccggcattcaagggagaanacacggccaaggccaggggtgcccacatgctctgcagggtctgggcactgtggcagcggcagcaggcttccctgttgctagtccagctgctgaaactccagggagagtcaaaaagttcccaaatacagaggcgtggctggtagtccttcccgggaattcttcttgcttcccgcctgtggaactctgccttccccactctgcctctctgcttgttcctgggccccaggacctctttcccatcttcgatctcttaagtcataccttgggaggcctcccccagcccgccgtgtaaagagggctgtcacagcttctgctgtcacagaagcattacaatgtgcaggtgcctgttaacatctgccttccccactgatctggagctccacaagggagagggcacacccagtaggtatgtgtgggatggataggagggtggatgacacccagtagatgtgtatgggatggataggagggtggatgacacccagtaggtgtgtatgggatggatgggagggtgggtgacccctagtagatgtggggggggtgggtgggtgacccccagtaggtgtgtgtggcatggataggtgacccccagtagacgtttgtgggacggatgggagggtaggtaagtgacccccaggaggcgtctatagggcaggtgggtggatgtggatgaacagcaccttgtttcttcttcccaggtggcttctggcacagcag

SEQ ID NO: 313661 - DNA, 556 bp, Homo Sapiens
  misc_feature (497)..(497): n is a, c, g, or t
ggggaagccgggtggggcaggctggaaggaagacgaacctacgaagcagagatctgaagacagcatgtacacagccattccccagagtggctctccattcccaggctcagtgcaggatccaggcctgcatgtgtggcgggtggagaagctgaagccggtgcctgtggcgcaagagaaccagggcgtcttcttctcgggggactcctacctagtgctgcacaatggcccagaagaggtttcccatctgcacctgtggataggccagcagtcatcccgggatgagcagggggcctgtgccgtgctggctgtgcacctcaacacgctgctgggagagcggcctgtgcagcaccgcgaggtgcagggcaatgagtctgacctcttcatgagctacttcccacggggcctcaagtaccaggtgaaggggaagaagaacatccgtgccaccgagcgggcactgaactgggacagcttcaacactggggactgcttcatcctgnacctaggccagaacatcttcgcctggtgtggcggaaagtccaacatcctggaacgcaac

SEQ ID NO: 313662 - DNA, 1295 bp, Homo Sapiens
ttttttcgcaggaaaagagctgggaaagcacttgtctcctttattgaacatctgcagggggcacctctgcactgaccaggcagccagagaagcaagcaggcaggtggtggggggcaggggagcatggggcaggaagacgcccaccctcatttccagtccttgaaaaattgcttgaagatgggactctcacggccctgaggcagaatctccacctgagtgttcggggcgtactgcatgcgcgagatgaagccctcggccacctgcagggctgcctgccgctccttctcattcgcttttcgccccttccagatatagatcttgccacagagcccgttgtccagcacaaagcagtcatcagatatcagcagttccaagggcaaaggggctggagtcagccaccttggtcaggttcatctgtccagtggcatcagagaccttatacagagctgcggcctgggcatttgccttgtcagctgtgaggtcttcctcagggttgccctccttcagagcaggcttggggcccaggacctggatcatctcagcaggctcctccccatcagtgacaatctccacctgggccttgccctgtcgctcactgtcccggatggccagggccaggtccctcgccttgttgcgttccaggatgttggactttccaccacaccaggcgaagatgttctggcccaggtccaggatgaagcagtccccagtgttgaagctgtcccagttcagtgcccgctcggtggcacggatgttcttcttccccttcacctggtagagtttcttgatggcagctggggctcctgtggaggtcttgtgaaatgctgactccacaccaccttcctggtacttgaggccccgtgggaagtagctcatgaagaggtcagactcattgccctgcacctcgcggtgctgcacaggccgctctcccagcagcgtgttgaggtgcacagccagcacggcacaggccccctgctcatcccgggatgactgctggcctatccacaggtgcagatgggaaacctcttctgggccattgtgcagcactaggtaggagtcccccgagaagaagatgccctggttctcttgcgccacaggcaccggcttcagcttctccacccgccacacatgcaggcctggatcctgcactgagcctgggaatggagagccactctggggaatggctgtgtacatgctgtcttcagatctgccaacgccttgctccgaggccctgggcgctgtctcagccgccccccgcccctggaggtggcggccaggagccgcccccggtgagt

SEQ ID NO: 313663 - DNA, 879 bp, Homo Sapiens
ttgttctatgagcagctggcatactttcaagacatgtttctgacttgtagataattaacaaatcctctgaagaaaaggagcaggccaagtacaagaaatatccaccaaagccaatactgtccattgaaatatccagtagaataatcagaaaacctgacaataaggatccatttgatcaaggaaaggccaaatccgcagatagcaccataccttccagctatggtattggtgatacagaaggataaacaaaatccaagccagttgaaaataaatgccatgaaaaatgccagcatgaaaatgccatcattccccactctgagctggtctgcatcactgaagtcatctcttggtggacactcttcctcctgaattctttgagatgtttctgctgctgcagctgccattgcagcagctttagccttctcagcttcatcgtatgtaggaagagaggtagcaacgctatagggaggtggcacgggataaaactcaccgtaaacttctgtatctgaagttgtaggtacttccacagtaatactactatatggtggaggggaagagtcagtttcaagtgctggtgctgaagacgcagcctgcacaatctgcggtgctgggtttgaagtaggtggctgctctatagccgatgattctgagttatcctcttcattaagaagcacctggtagcgcccagtccccggctggtggtgatccatcctgcccggctcgggatccggcttccgagagagggagtcttctccgtgctcagctcccacggccacccccgtcgacgacgtcgtcgccgcagggccccttccgcctccgttcctgcagccgcggtctcccggcggaagctcttcacttcctgtggctcccgcagcggcc

SEQ ID NO: 313664 - DNA, 358 bp, Homo Sapiens
  misc_feature (147)..(158): n is a, c, g, or t
ccccacaggatatagagatatgggacatggctatagagataaatttatagggttaagaatgaattagcaagaggaaaaaagaatactccaaaaatatctttcaataaattactttaaaattccattatgataaaggatctaaaatgnnnnnnnnnnnngcttacttacagattttagttggataccctgtcgtatctggtctaacagtgcatctcgtccagagcaggacactggccgactgttctgctccactttttttagctgagcgccctctctaatttgatctaaaagagctgctttgtttcctgcagtagttggaacctgatggtccctcgtgccgaattcctgagcccggggg

SEQ ID NO: 313665 - DNA, 682 bp, Homo Sapiens
  misc_feature (569)..(569): n is a, c, g, or t
  misc_feature (608)..(608): n is a, c, g, or t
  misc_feature (622)..(622): n is a, c, g, or t
gactgccccacccacccaggcctgcctggccctggcttccagcctggcgttgatgatgacagcctgacctcagatggtccacccacctcggcatcctaaagtgctgagatgacaggcatgagccacgacgcccagccacaagttcttaattcttaagagacatggcgataattcatgctgaagaggaactctggaaacctgaaagatgcgacattgcttttaccaccacctccaccttttgtatacataaaaataaattatactagtgtgataccctggaaatgtatgaaatgtgacaaagcgtttatatggttgtcatacttgattgtaggtgatagaattcatgctgccaaaactcctgtaagtgtgaagaatgtggcaaaatattttattagtgcttataccttatttcacaggaaagcttttatccttgagaaaaattgtgcagatataaagaatatggaaacgccattaatgcctacttacatcttactgaacagaagaaggttcatagttaataaagcattaaaagtgcaattactgtcaaaaaatctttcagtagaagtctntaaaggtgaagaatattattctgaagacagccattacanatataaagggggtngaagtgcctttacttgtgtcacagatcttagtgcacacatgtagtactagagggaaaccc

SEQ ID NO: 313666 - DNA, 373 bp, Homo Sapiens
gggaattgtttactgggaattaggaagatacagggcagagaaaggagaaaggtcatggaaatcatggatgtaaggagtttctacttccttgaaagccaggaagctcgcttgaacaaagagcacaagaccccaaatctttgtggccccactggctgggagagctcgctggtctttctttaggagccttgctagtttttgcaagcatagttttcacaagcaattgaaggataatttccttagctctatagtgaagctatacccccaagtggggctggccatagagggtctgtagtttccaaagccccaaaggacacctgcaaatcagctgttgcaatgtttcttatcactcactttatgttccccagaatacatc

SEQ ID NO: 313667 - DNA, 775 bp, Homo Sapiens
  misc_feature (315)..(315): n is a, c, g, or t
gatattttaacaaacgttcctttattaggttactgactattatcaaccatcataaaatagaacgggagtttcaaaactgtacaagccacaaggctctgggctggtaggaaagaagggtggggtcgagggtcccagggtgtcggggggtgggagatgcagagagagctagagggtcacccggcatctgtgaggacggctgggtcaaggccataagctgggatctgtacaagggaaacattcatcagaatgtgacccacctgaaacaggagggaggaaaatctttaaaagtcttacaggtaaggtcccctgccccgnaaaaaaacaaccgtcaaaataataagggggtaatgtacatttctcacccagtcttggcaccaattttgtgctttaaaaaatatactcctctgtaagatttacttaaaaagaggtactctacagcagctgtttaacaacacaaatagagtcatctagtgtacctgtgcagaaatgaaccagagttagtctctaagagagttaacttcgagctcaaagaaatggcaaaggcggtggcaggtgctggggtacgctacgtgtaggtgttgccaggtatagtgcatccctctcttccggcaggcgagctacccctcttgaggctctgagaggggttgggatgacctggggctgttaccctgggtgcagagccccgggtggggtgatgagcagagagccgcgctgtgttctgtgaggctctactctgctgctggtcttccccatcccaccctgcccctggcttctc

SEQ ID NO: 313668 - DNA, 1199 bp, Homo Sapiens
  misc_feature (100)..(100): n is a, c, g, or t
caggtccctgtctcgcctgagccctgcctgtgcccagaaaccaccccatggcagtagcctgcacagccgaggctgggtcacgtgaggggtgctcaggggnccgggcccccgcttagggtgtggtgatcacgggtcctagaaaggtgtggcacaaggccccaggtccctccctagctgtgcacacctcctgaataacaagagagggcccttgggttggagtccagatctctcagacctcagctctgccaggagaatgcggacagtgagcagatgagcctgaaagggagcccgcttctcctcacagtgtgtggacagcggaggggcctgtctggggctggaaccctccacataggcacaggtgcccgtactctctccaggtgagtttcaagggagaaaactcacagtctcgagcttcctgggacttggagccagacagtgggagtgtggtatgtgacagcagacactccccgggtttgaatcccagccctgccatctcctgttgtgtgatcatgaggtcacttcactcacaggacctcagtttccttacctgccaagtgggataacaccagctttcatagattgtaagtagcacagttgtttttgttcacacgtgaacatctctgattggaaggaactgtacagttgtagcatcttagttaagattggcagcgtttttccctatggtatgtaaaacagtgttttatgaccagcagtgtctttgatgtgacttattatggcaataagacctgccgcacaggattcacgcaggaaggtgcctctctagcccagtgccaaggcacgctgtaggtgcaaaataaagtacagtggctccttttcctctttctcttgtccccttctcaagacagaacatagtggggacgtgtgcatctcctctgtagcactgagtaacgctcagagcatcaggaaacgtctggtttttagaagataaacacttccttacctcctcttggaaacagggaggctatttatagccagctgcagagcaggttgaacgggccactgactcgcttcttcccaggtcacaggtggccaggagatgcctggtccacctctgggtccaggcctcagtcactggtttcccagtggaggctggacgtgaccccggctggaacccaaggggcagccaggaagggcagcgacgcgtgggtcgacgatatcccgagattccggaccgtacc

SEQ ID NO: 313669 - DNA, 660 bp, Homo Sapiens
  misc_feature (89)..(132): n is a, c, g, or t
  misc_feature (402)..(467): n is a, c, g, or t
gtgctacacgtgaatataaagaatagtgaatatcaaccttttcatgataacttacgaaataacaagccatatctggttatggctaaacnnnnnnnnnnnnnnnnnnnnnnnnnnnnnnnnnnnnnnnnnnnnctaacgtgcttaagaagctcttagcatgtagtaagtacttactaaagctcagatattatcatcattactgttattcaacaaagcttttccctagtatctacaagtgaacactttgctcatttcttgttcttataagaccttagttcagaatttccaaatctcctaaatatgaagaaacacttttgtttctaatgcctgaccctttaaatttaggtctcagaatgagcactaattgaagccacctcattgtttctagtactttacatgctnnnnnnnnnnnnnnnnnnnnnnnnnnnnnnnnnnnnnnnnnnnnnnnnnnnnnnnnnnnnnnnnnnatcaatttttgttattccaatttgatagaaacagggacaataaagtccagagtaatgctttgcttaatgactatactgctactaaatggcagagaggcctaaatgccagtttataacctcctggccagtgctcatgaaactatgcaaagtaagatattctaaaatccctttaaagccaatgaaaccattttct

SEQ ID NO: 313670 - DNA, 1244 bp, Homo Sapiens
ctgactcagccaggcccactttcaccctgaagtcaaactcaccccttcaggaggcttagaaatgatgccttctttcccctgaaaactggtgtcagcttcgcttagctaatggcctgggccaggcaccatttcatctgccctgagagcctgggcttggcttagtgcgtggtgtgagggccccttgtcccatgcccctatggctgtttgcctcttcctagtcccagggactactcttcccttctctgtggtacagcctctctttcctcctgggaacccccactctgctcctctcttggtacctgccctgctttctcctgtcctctgggcatccccaggagccccccagccctgcctctcacctctctctccacatcgccccgctcagccgctaggtcccggaggctctcgcgtagggccgtggtctccctctgatgggctgtgatggcatcctcaaactgggcctggagggccttcagctcctcagtcgtggcactgatggtggcctgcggggagaagggagcccacggtggcaccagggagctgggcccagcagtggagggtgaggctgctgggatgaggagacgtccacggcccctgacagctgtgatgtcgccctctcccgctgcgcagtgccctggggatggggcacaagccctccatcccggctccgagtcaccgagcgtcccccaaggccccgctgcctggacgccccggccccccagcaggcggcctgcgtgtgcctctgtgcagtcagtgagaagggctcccgttcagaatgggcagagaagggggctgcctcccgcgcctggcaccatggcctgtgttctgttcactgcacactgaaccatacattcaacgccagtcaggactcaatgtgggtgtcctttcctgccgagagtttcctctggtgcagggccagccgcctcgggttgtttctcctttggaaggatctctctggcccatctgggggagggcagcccagagacacgtgtgcacctgtgtgggctgacctatgcgcagtgtcaccaatgtctgtgacattgctgtaatggcaacaaagctggaggcaacccagatgcccgtggaaggaagaacagccacaggaagacccagttctggcagctcagcatgcagcccagaaacagaagaacaaagctgcagatacacagcttgggaaaggcaaccgagatgcctttgatagtgagaagagggcccgagcggcatagacttttattccttttgtt

SEQ ID NO: 313671 - DNA, 743 bp, Homo Sapiens
ccgacaatgctccatctccctgatggtgtggtagatgcgtgtgagcgagacaccctcagctgcaagggtggcacgctgttccgtggaccaggctgtggaatcaatgcctgtcaaattcacacatgtatattctctctatgcccaggcccatctgggggagggcagcccagagacacgtgtgcacctgtgtgggctgacctatgcgcagtgtcaccaatgtctgtgacattgctgtaatggcaacaaagctggaggcaacccagatgcccgtggaaggaagaacagccacaggaagacccagttctggcagctcagcatgcagcccagaaacagaagaacaaagctgcagatacacagctgggaaaggccaccgagatgctttgataagtgagaagaggaaagcccaggagccggcatagacttttcattccttttgtattaggagggtgttgcataacagaagatgtatcaggtctttgtcctggatcctcggaggaagcttctaaaccctgggggtttctcagaagtgtggagcgtctgcattagtcctggcgggcccctgtgaccacacctgagtttatgctaatgaggtgactcagggtgggttcctactgaatttcaggatggggactgtctgctggacccgttattagaggggttggggctttgagccacgggatgtcagccccaaccttccagcagtcagagaagtgggcttcaatcacctaacctcactccaccgt

SEQ ID NO: 313672 - DNA, 787 bp, Homo Sapiens
tttggtgtccagagttttattggggtttcactgtgtaacgtgatcggtggagtgattggttaggtgattgaagcccacttctctgactgctgggaggttgggctgacatcccgtggctcaaagccccaaccctctaataacgggtctttcagcagacagtccccatcctgaaattcagtaggaacccaccctgagtcacctcattagcataaactcaggtgtggtcccaggggcccgccaggactaatgcagacgctccacacttctgagaaacccccagggtttagaagcttcctccaaggatccaggacaaagacctgatacatcttctgttatgcaacaccctccaaagattgcttgcaaacagaaatatacagcgttacctccccaacactgcatttttaatacaaaaggaatgaaaagtctatgccggctcctgggctttcctcttctcacttatcaaagcatctcggtggcctttcccagctgtgtatctgcagctttgttcttctggttctgggctgcatgctgagctgccagaactgggtctttctgtggctggtcttccttccacgggcatctgggtttgcctccagctttgttgcattacaagcaatgtcacagacattggtgacactgcgcataggtcaagccacacaggtgcacacgtgtctttggctggccttccccagatggccctggcattaagagaatatacatgtgtggatttgacaggcattggtttcacaagcctggtccacggagcaaagtgccaccctttgaagct

SEQ ID NO: 313673 - DNA, 804 bp, Homo Sapiens
ccttcatctgctgtgccgacagaagcaccgccctgcccctaggctccagccatcccacaccagctcctaggcactgagagcacgagcatgggcatagcgcgctggctaggactccagtaccgtgaagggaggcagtgagagcagacatctgtgcctcattcctgatctcaaggggaaagcaagaacaagggaggcttcctcaggatctcgaacctgcggaaggaggaccagtctgtgtacttctgccaagtccagctggacatacagatcagggaggctgtcgtggcagtccatcaaggggacccacctcaccatcacccaggccctcaggcagcccctccacagggcccctctcctgcctggacagctctgctggtctccccgtcccctggagaagaacaaggccatgggtcggcccctgctgctgcccctgctgctcctgctgcagccgccagcatttctgcagcctgagggtcaggagagcggcttcctcaggatctcaaacctgcggaaggaggaccagtctgtgtatttctgccgagtcgagctggaccacccggagatcagggaggcaggagttgcagtccatcaaggggaccaaactcaccatcacccaggctgtcacaaccaccaccacctggagggccagcagcacaaccaccatagccgggctcaggggcacagaaagcaaagggactcagaatcatggcacctaaggctggacactggcatcaggggttgcttggcttggcggtgggctcaaaactgcattttgggacctgtggggctctctcctgggtggag

SEQ ID NO: 313674 - DNA, 1233 bp, Homo Sapiens
cagcagcatttcacgctatttattccccaaaaccttctgccatagaagacagccaccatacagattggaaaatgtgcacgaggagaaaaggggtgtatggtaagcaaaataaattgtatttttccatccttggggaggataaaggaactctttgcactgctataatacacagcccccaaatgccagtggtttaattcagtggagttcagacctcattcctatatcattgcagtgtggatgctcctggatgaaggctcttgtaggtaactctcctccagtcggtgattcagggacccagcctccttctgccttgcggctttgccttttaaaggtcctcagggtgctctccatgtatcttgccaatggggaacgagtgtggaggactcacaagcgggtctcacatcacgtcctccggggctaatacacatcccttctccccacactctgttggtcagaagtcactgcttggcgccctgctacctttccttctcctccaccacaggaggaggaggcacagcagtcccaaaatgacagttttgagcacagcgacagccaatgcaaccctgatggcagtgtccagacttaggtgccatgattctgagtgcccgctttctgtgaccctgaggccggctatggtggttgtgctgctgggcctccaggtggtggtggttgtgacagcctgggtgatggtgagtttggtccccttgatggactgcaactgctgcctccctgatctccgggtgtccagctcgactcggcagaaatacacagactggtcctccttccgcaggtttgagatcctgaggaagccgctctcctgaccctctgtccagttcagaaagagccggttcacataatccttgtgaatggaaggcggccttgtgctgtagaaggactgcccgtggaagtggccccgtctccaggatattctcacgttgggaactatggctaactcccaggggtaatagaaggagaaggggatttccacagagccacccatggaggctgagaggtgttttggttgagtgaccccataaaggtagcttggaccagatcctgtggagccaccaggctgcagaaatgctggcggctgcagcaggagcagcaggggcagcagcaggggccgacccatggccttgttcttctccaggggacggggagaccagcagagctgtccaggcaggagaggggccctgtggaggggctgcctgagggcctgggtgatggtgaggt

SEQ ID NO: 313675 - DNA, 395 bp, Homo Sapiens
tttctagtcaacaattttattttaaagtttttcaaaatacaaaagttagcagctgaatatttacaattatgtcataggttactattaacagtgcagaggatagagtatgtaagaaagactttgaagaggaaataatatacaaagtacaataaacagcaaggttacatgtcatcgttttgccaccgtacagaagtggaaagtgccgacctggagaggtcaccgttgtttcatttctctgtatccagaaaggaccgtctcttaaatccaccaggggaggacagcctcctgtggctccgttcgcaggtactgggtacagtctgtctttttcagctgagcagcgtttaatctttctgaacacataggacatgtgctttcagtgtttagcatgtcttctt

SEQ ID NO: 313676 - DNA, 1001 bp, Homo Sapiens
  misc_feature (621)..(621): n is a, c, g, or t
tctagtcaacaattttattttaaagtttttcaaaatacaaaagttagcaaaaagctgaatatttacaattatgtcataggttactattaacagtgcagaggatagagtatgtaagaaagactttgaagaggaaataatatacaaagtacaataaacagcaaggttacatgtcatcgttttgccaccgtacagaagtggaaagtgccgacctgggagaggtcaccgttgtttcatttctctgtatccagaaaggaccgtctcttaaatccaccaggggaggaaacagcctcctgtggaaaatgctgtcttctcaggagcattgtatctgcacgtgccaatcacagttcctcctccgttcgcaggtactgggtacagtctgaaatctttttcagctgagcagcgtttaatctttctgaacacataggacatgtgctttcagtgtttagcatgatcttcaattctgagtatagagcagggaagtcacaatgtggacacaccgtccagtcatctttcaacatgtgtcgacctgttggaatgcaatatgggatactgtttttacatccaggacagaggagttcacactttgggaggagaaatttggagaatggacatggaggtcgntggccttttctatttcagatatatcgggtctcctgtgaggaagaatcatgtcatttaaaaatgcccgttttattcatgtaccggggatggcaaagagaaagcatatttggaaaaccagggacatatgacacacctacttcatagtcagactctgggcttagagagatacttacaagctcacaccagcccttgatccactcccagggaggaggaagagtacctaggattggttaggttctagggtgttacatgggccacctttgggaactggagttcatagcacattcaacggcagaaagcatgggtaggtcttgcggtcttctctcttcctgtgctactggagtggtgagcttggtattttccctctgctcgtgccgaat

SEQ ID NO: 313677 - DNA, 697 bp, Homo Sapiens
  misc_feature (12)..(12): n is a, c, g, or t
  misc_feature (648)..(648): n is a, c, g, or t
  misc_feature (651)..(651): n is a, c, g, or t
  misc_feature (654)..(655): n is a, c, g, or t
  misc_feature (663)..(663): n is a, c, g, or t
  misc_feature (672)..(672): n is a, c, g, or t
  misc_feature (682)..(682): n is a, c, g, or t
gtggatccccgngctgcaggaattcggcacgagggatggtggacagcgtgtaccggacccgctccctgggggtggcggccgaagggctcccggaccagtacgcggacggggaggcggcgcgcgtgtggcagctgtatatcggagacacccgcagccgcaccgccgagtacaaggcatggctgcttgggctgctgcgccagcacggctgccagcgggtgctcgacgtagcctgtggcactggggtggactccattatgctggtggaagagggcttcagtgtgacgagtgtggatgccagtgacaagatgctgaagtatgcacttaaggagcgctggaaccggcggcacgagcccgccttcgacaagtgggtcatcgaagaagccaactggatgactctggacaaagatgtgccccagtcagcagagggtggctttgatgctgtcatctgccttggcagtttcgctcacttgccagactgcagaggggaccagagtgagcaccggctggcgctgaactgcgaccacatcctcagtacaggctgtgcacccccagggaataacatctactattagagtgacttgaccaaggacgtcacaacatcagtgctgatagtgaacaacgggccacatggtgacgctggactatacngtncanngtgccggngctggccangatggctctnctggcttgagtaagt

SEQ ID NO: 313678 - DNA, 1074 bp, Homo Sapiens
  misc_feature (766)..(766): n is a, c, g, or t
tttttttcaggaactgaaaaagactatattgtttacccttccgtctgtggaacccacatccctgcaccccagctgtagtctgctctagaggctggccctggtgtggggctgctggtccccatcttccagacagagcctagcagtgcctgggcagaggcttgtgggagctgaggccacactcagtctgtcctcttgagcacgtggatgaagtagcagggaatgtaggtttggcctggcttgtaaggcttgaagtcgcccaggacgctgtgctggcacttacctccgaaggctgcttggagcagctccgtgaaggatgccagacagtgtgggtagtaggagagccggaactttactcaagccaggagagccatcctggccagcccccggcacctgcaccgtatagtccagggtcaccatgtgggccttgttgttcactatcagccctgatgttgtgacgtccttggtcaagtcattcttatagtagatgttctttccctgggggtgcacagcctgtactgaggatgtggctcgtagttgcgatgatcaatgaccagtaggccccctgcccgcaccatgctcgcaatgtttttcagcgccagccggtgctcactctggtcccctttgcagtctggcaagtgagcgaaactgtttccaaggcagatgacagcatcaaagccaccctctgctgactggggcacatctttgtccagagtcctccagttggcttcttcgatgacccccttgtcgaaggcgggctcgtgccgcncggttccagcgctccttaagtgcatacttcagcatcttgtcactggcatccacactcgtcacactgaagccctcttccaccagcataatggagtccaccccagtgccacaggctacgtcgagcacccgctggcagccgtgctgcgcgcagcagcccaagcagccatgccttgtactcggcggtgcggctgcgggtgtctccgatatacagctgccacacgcgcgccgcctccccgtccgcgtactggtccgggagcccttcggccgccacccccagggagcgggtccggtacacgctgtccaccatcc

SEQ ID NO: 313679 - DNA, 968 bp, Homo Sapiens
gccagctgtggtccactggccctgtgctactgaccttcctagcgcctcctcaaaggaaactaaggcatctgtaaaaataaaatgctggtaatagaagaaaaggaagcatactcacatatttttccttctttttctagttttttcaaatgaagtaagagattatgtttagccatttcatgtaaattctcaggagtattcttgtaaataatttttacaagctccattactgtaaatgatttctcaaagttctcacgaaataatgtaagaatttgctgctctcgaatatttctgtgagaaatgtattgttgaattttagcttcagcattatgaattactggggcgtgttctggatatataatatcagctttgattttcaataactcttttaaagagttcatataatcatagaggtcttcaaataccgttgttccttcccctaggatgcaatctccagaaaagatagcattttcctcttctaagagtagagccatgtgatcatcagtgtggccaggggtatatagaactcttagagtggctccctcagtcttaatcacatctccatctttcagataaacatattgttgctctccatttcctataatttcttctctctgaggattccgtgggagttttttaatgcaataggtagtgtcattattgatgcttttacaaatatctcctatgcctccagaatgatctcggtgccagtgagtcactacaatttcctggattgctgtgttaaattcagttagagcctgctttaaacagctgatgtattctggaattgctggttctccagtgtcaatgaggattctcctggggccggtccccactaggtaggtgttggtgccttggagggtcatgggacccgggttacagcccaacacacgcacgactcgattggacagccgctcgacgcgctgcagtacagcagccattcccgcctcagccgcccgccggcgtgtcgc

SEQ ID NO: 313680 - DNA, 284 bp, Homo Sapiens
  misc_feature (268)..(268): n is a, c, g, or t
aagtaggaaagacccttttattggggtggacacggagcacgcactagtccatgataaaaataaaatgactcaagagaaagatcccaagggccgacttctccccaacgtgcgtgcacgctgagtgaggtctgggcatgggaaagttccgggcgaagtttgggacaagaccgagtctcaatggcctggatcggttttgggggggagaaggccactcggctgtcctggtaggtcaggccaccccgggcccgcccctttcgcccggccacantaaagcccccgttaga

SEQ ID NO: 313681 - DNA, 739 bp, Homo Sapiens
  misc_feature (530)..(530): n is a, c, g, or t
  misc_feature (593)..(593): n is a, c, g, or t
  misc_feature (607)..(607): n is a, c, g, or t
  misc_feature (718)..(718): n is a, c, g, or t
gactacctgagtgtagaaaccctcatttttttccccagacctatccttgttacccaatgtgcctctgcttccctgggtttgggataaactggaaggagagaatttctgagttctcttacttattttgttccataacttctccctcatatctgtggttggagactcccacccttgtccaccctttcctgcctcatactagtatcatgagtttagggctgtcgctggaaagtctggcagcccaggccataggattccagttcagcctacgatttcctagggaaatcaccaagttccaaaggctggtttttaaacctagaatatccatgtatccatttcctaatgcagtttggacctgttctagacagagcactcagccttagcaagggaccctcagcccctgggatgggctccttgggattggcccatgcaacaacacagccacaagacattcagcacaccacctcctcctggtgttttgaatctctaaatgaattctgttctaaagcttcttcacgtctctcttcatcctngctcccatctccacctctaatgcttcttgggagtctgaagctcagattcacattttcacattntctcgtatcgttgngtgtgtgtggatgtgcattccagtgatgttactccttcaagcccctgaatcactatagccacgactcttcaactgattccaacctttaccattattctggctctcatatanggaccagtctctggcgggggt

SEQ ID NO: 313682 - DNA, 1084 bp, Homo Sapiens
  misc_feature (990)..(990): n is a, c, g, or t
  misc_feature (1037)..(1037): n is a, c, g, or t
ttttttcaatattcaattattaactttaatgtgcaaataaatagaaaaggaaaactacattcaaaacagctgcaaaggaaggacaagccccagaacagaaattcctcaagaacggaaaagaggcgctccctagaagcatgcggggatgggaatactgggaggaggggctcggcggggtctccggctgcacctggggcccaggtggctctgccgagacggccgtgggcttggtacaggaatcttgatggcaagttcccttcttagaaaaccaggatgtgtacaaagtgcctgtgtgacacttggggagcgggggtggggagcccaggaggacgggtcagcatcggaatcgcccagcctggagtcaaaggcgtcaggagcctccaggttccacaggaaacttctagaaacacatctccacttcctggaaacttgagtccagctgttgcaggatggcaagggtggcggttattctgggcctactggtgtgcagggccagggccaggggctctcatggtcggggagagaggcctggagaagtggtccccagccccagtcacttgggattcttggcacagaaagccttggatgcctccatgggacagtcgcctcagcccctcacaaaaggacaacaatgatccctggagtggccgcgtgggtcccagggtgggtgggcggatggggctccttgggtggcggctgggactgtcagggcggctctcggagttccacaaagggagatctcagccccagggagccgcaggacttggctgctacagaaataacaaccactaaaagcgaaaggaataaatatctgtgcgtgtatacacatacgcctagggtgcccactgcaggaacacgactgggcccgccgccccacagcagggtcgtgccggctctgagggaatactggctggggtccctccccttgtgggcccagagtccagctgctggagttggggttgggtgtcttatccagagcgggttctcccnagcactgcccgcctgctccagctctggacttcaaaatgggatcccanaggtttggctgaagggttcttctcacttccaaagtgactgagggcct

SEQ ID NO: 313683 - DNA, 348 bp, Homo Sapiens
  misc_feature (202)..(202): n is a, c, g, or t
  misc_feature (276)..(276): n is a, c, g, or t
  misc_feature (327)..(327): n is a, c, g, or t
atactgttttcaattcatttattcaatgtgaaaatatttacactcttgtataaaaaagctcttttcaaaaaatgtgaatggaaatgaggtaaaataaataaaattgaagtagttcaaaataatctaatcggtaataatatagtaaaccacatgattatacccttagaagtaaacatgtgacaagcatgaaaaactaaaaggntttgttagagggcatgtgaaccagaggcaactccatcttaaacaggagccgggcaaaatgaggggtgaaatctnttggggctgcattcccaggatgggtcaggttaagggcattctaaggtcacngggatgaggatagggggggtc

SEQ ID NO: 313684 - DNA, 291 bp, Homo Sapiens
  misc_feature (46)..(164): n is a, c, g, or t
ttgggattacaggtgtgagccacagcccctggccttaaaaaatccnnnnnnnnnnnnnnnnnnnnnnnnnnnnnnnnnnnnnnnnnnnnnnnnnnnnnnnnnnnnnnnnnnnnnnnnnnnnnnnnnnnnnnnnnnnnnnnnnnnnnnnnnnnnnnnnnnnnnnncagcctcctcttacttttaaatacattctttcccttattatcctagaagatgaacccagaatattttccatgggcttgtagatgttgttggactacttctgtagctcaatttatttgcaatttgctt

SEQ ID NO: 313685 - DNA, 856 bp, Homo Sapiens
  misc_feature (126)..(134): n is a, c, g, or t
ttttaaggaggttaaaagccagttacttttattataatgaatgagaaatactatgactggagaagaggtttcacgtgactagattattcttggttcacacactatggtatcaaaattaattatggnnnnnnnnncccacattggattacacacatttttattgagttttgtctgatgatagggaaacatttacaaaggagtaaatgttacgtaacttctcacggtatgtaagttagaagctgggcagcaaacatggttaccaagagtcgtctagttcttcatgagaaaagcctgttaaactttcgactttgtcactagattgcagcgtgtccactagggagccttcttggaccatcttttttgagctcttatctgccgactcctggtcttgctcctgctggatgattttcatgtatttctctaaaggattttcactgtgagcagatttgtcttttatttcttgattactcatttctaattcattttccatttctaattccttttttattttaatcttcagtgattcttcaatcatcttcctttcctgatacagtttttctagttctcttcgttccctttctaaaacttcttgtaggttactctgccttcttcctctctctgcttcgtcttttattgctgtcccgaattttcgaggggtgcccggacccattcgcctataggagtgtataccattaatgccggcgttacaaggcgtgactggaaaaccttgcggtaccaacttaaacgccttgcagccaatcccctttcccagctgtgcaatacaggccccaccgaatcgcctttccataagttcccaagccttaatggcgtaatggcaattgttgctcttttggtt

SEQ ID NO: 313686 - DNA, 401 bp, Homo Sapiens
attttcaaggtgtaatacagtttgatcatgtaccggacctggatatttaattttttttccctcacagttaatctcctccttgataaagcaataacactgctttgagtctgttgcctaatagcatgtcagaatcctctcctggatggtgattttataggaaagtttgtatgcatatcacccagtctatcttttaaaaattaagaaatttaaatgtatgctggaagtaatgacactatattgtggcattttattttaaaaattggggaaagttgcatatttttttaaaagtaagtgtttgagtaaaaaaattgaaggtacttttttaaggtttatatgccacagtttacatagacatttcagattcaacacgtactcttgaatattggtttcttttcttggtc

SEQ ID NO: 313687 - DNA, 381 bp, Homo Sapiens
  misc_feature (241)..(323): n is a, c, g, or t
acaccactatattaatgaggatacatcaagatagccatatagatgttctattttctgagtcattttcttagtgtacaatgtctctaaatgtctaaatcagttcacataaaaaaaagcatctctgaattctcaaccgctctgatgaagaaccaattttactaggtatcctgcactgagttagatagagaaagtgaaaaataaccaagaataagatgtagttggcacggcgtggtagctcatnnnnnnnnnnnnnnnnnnnnnnnnnnnnnnnnnnnnnnnnnnnnnnnnnnnnnnnnnnnnnnnnnnnnnnnnnnnnnnnnnnntgaaaccctgtcgctattaaaaatacaaaaattagccaggcatggtggcacatgcctg

SEQ ID NO: 313688 - DNA, 972 bp, Homo Sapiens
ttttcctggtgttgttgatgacgaaggggtcagggttgccatagttgggggggtttgcataagggtcatagccgagctgagccagcatgggggcgatctgggccatgtcccgcaccacatccccagggatgtggccagtccacttggagagcgcttccaggttaacaggcttgatgacctggtccgtggaccgctcgatcttggacagggagacaccaccgggcttgccaatgaggtcttcatggtggaggacagcgtcgctccaggcgatgccgaggaagtcgaggatgagcttgagtgagcgcctggggtgcagcaccatctgctcgtagtacacaggcaggcacttctccttgcctacctccatgcactgggcgtacatcacctcgatggccttgttccacttggtgaggcagtcacggtagctgctgaggtcagagcccgcaatggtgactttgcgcgtgatcatggagtgcacggaggcccggccgtcccgcaccatcagcaggaacttggagttggggcacaggcgcgacaggtagaccgaggacttgagcgtaaatgggtccttgttgcagagcacgcgggccggctctccgtgcttggcaatcacctccaggatgaaggcctgcatggcggcgtccagcacctcatccgtcaccaccgcctcatccagccgcagcttctcacggccagacttggaccaggcctggcgcatggccagcacgcgcgggatgatgcgggtctcctcgccgcagcgcacctcggggtgggcgtccagcatggcgcgcatcaacgtggtgccactgcgaggcacgccacccacgaagatgagcggcatggccttgccatagcggtattccacgtggttggtgcccaccatcaccagctcctcctgctcaggccgcatggccccccgggggctccgcaggcccgccagcaccgcccggcacctcgtgccgaatcctgcag

SEQ ID NO: 313689 - DNA, 627 bp, Homo Sapiens
  misc_feature (499)..(499): n is a, c, g, or t
  misc_feature (579)..(580): n is a, c, g, or t
ccaaagtctgaagagcgtgaagtttggaagcatcaaatccgactggctaggctgctgagctggccctggctcccacaggcccttcctctccactgccttcgatacaccgggcctggagaactagagaaggacccggaggggcctggcagccgtgccttcagctctacagctaatcagcattctcactcctacctggtaatttaagattccagagagtggctcctcccggtgcccaagaatagatgctgactgtactcctcccaggcgccccttccccctccaatcccaccaaccctcagagccacccctgagatactttgatattttcaacgcagccctgctttgggctgccctggtgctgccacacttcaggctcttctcctttcacaaccttctgtggctcacagaacccttggagccaatggagactgtctcaagagggcactggtggcccgacaagcctggcacagggcagtgggagagggcatggccaggtggncactccagacccctggctttttactgctggctggcttagaaccttttctacattagcaggttgctttggatgcactttgnntttttctttggggcttgggttttttttccacctgtgcatattctgac

SEQ ID NO: 313690 - DNA, 709 bp, Homo Sapiens
  misc_feature (246)..(278): n is a, c, g, or t
  misc_feature (589)..(589): n is a, c, g, or t
tcactcagtaggtgtctttattcatacttgttgacatttcccatggggaatggttgaagggaggggcagggagggctgagcgggaagccacggcttggttttcctccatccagtggagaagagactcggtagggacatgctaagtagagtgaacaggggaaccatcactatgtgggctgagatgcactgtgcagtgacttcagacaacctgagtccttctgtcaggaaatgcaatttctaagtggnnnnnnnnnnnnnnnnnnnnnnnnnnnnnnnnngtgcatacaaagcaaactgctaatgtaagaaaggttctaaggcagccagcagtgaaaagccaggggtctggagtggccacctggccatgccctgtcccactgccctgtgccaggctgtcgggccaccagtgccctcttgagacagtctccattggctccaagggttctgtgagccacagaaggttgtgaaaggagaagagcctgaagtgtggcagcaccagggcagcccaaagcagggctgcgttgaaaatatccaagtatctctttaggggtggctctgagggttggtgggattggaggggggaagggcnccctgggaggagtaccacccgcatctatttctgggcaccgggaggagccacttctctggaatcttaaattacccaggtaggagtgaggaatgcttgattaggcttgtaaagctgaaaggc

SEQ ID NO: 313691 - DNA, 642 bp, Homo Sapiens
  misc_feature (50)..(50): n is a, c, g, or t
aagcctctcaaagcatggatacacatatgaagttaatataaaatgttacntacttaataatataaaaatcggttaaccaattacaaatcacaaactgcagacattctattaaagtttttccagttcactgagcaatatttcttgaaaaatatgattatgaacttaaatatgtcctctttaaaatttgctgtttatgctagactgtacaatggtgctccctttatgatttttaaaaattttacttacataactatgtaattccaaaatagaaaagtgagtgagccatcactaaatttactggaaactaatattctttcatggaaacaactgataaacattttaaagttctatatttatttaaatttggctttttaaaataggtaagcttttcatttcaattattgtttaatactttaaagctagtttaaacaaagataaaaccaaggagaactagtaaagcattccttactttacatacagtgcctcaagtgccacatacataataacatatcacaaaagaatgtatatggtttagcagattacagagcaaacctaaaagtttatacaaagctaaacactgcctcccttctgttccatttattgtcttttaatttgatcttggctctgtattatccttctata

SEQ ID NO: 313692 - DNA, 399 bp, Homo Sapiens
cgacctcgtgatctgtccgcctcagtaaaatgaaacaaggtcatttcatttcaaaaattccaaatctattagcataaagatgtaacaaaaattgctttttgctcaatcctagaccactccattgcctcacaaagaaaggtaacatgtgctacagagaaagaagtgcatagaggtgttgtactgcaaagatccagtctattaatctccatactacagctgtgaaccacaggaaagaggcccagcccagttaggactataggccaaggcatgtcactttctgaacatcagttttattagctctaaaatacgactgggctagatcatgggtagctgtctacctttctcagcctccatcctctgcacccatgcatgacaccctgccccgtcagtaacagcatg

SEQ ID NO: 313693 - DNA, 688 bp, Homo Sapiens
cccacagtgagtatggcggccaccacggccatgtgggtcccatgccacagcagcccgattacccagggagtgggcctggaatctgtcttcctccccttcttggttcactttccatatgtgttaaagtgtagggcacctgtggttgctgccagtctgttctaagtaggtctgtatcaccttgtactcaggtgctccagagtctagcagctgcagctggcacttgagaagctggtagtctcggtccagagggtgtggcacctcctccacggtcttctcctgctcagagactgcctgcagggcctgggccagctcgatgtccgccagcaccagcagcatgtccttcttggcctgcagaagctcaggggaattgatgggcgggggctggctgtggccgaagttgtgcgggatgacggtgtaaaagtgtgaggacagctcctccaggctttggccaccatccgtggggcctttcagggcctcctccagcgcctccaaggcctcgaaaccccgtgcaatctgttgcttgctcagctttcccaggggcatcttcttcacatctagggggacaggggagtggggagactcagccccacagccctgccaccctgaggcccctgccaccctgcctgcctctcacccctcacccaggtccatgagggccatggtgttcttgaacatctccttgctgaag

SEQ ID NO: 313694 - DNA, 403 bp, Homo Sapiens
  misc_feature (128)..(137): n is a, c, g, or t
gttgcctctgacaatgaattcttattatattctttgaattacttaaataaaatgttaacatattagagggaaaattaagtaaaatataatctcatcgaaaatttatgaaagtgcaatttctctcaagnnnnnnnnnnaaatgtcactctattttaattactatttttggctagcaaatatttgctaaaatttatttgtatcacaattccatttgagttttaaaaatatgatatactataaactatttgtattgcattataaataaaaatagctaatatcatctattaaaatgagcaaataaactatgaaagcaaattctaccaaaataagagaagtaatttgtaactttggatatccaactatcagtgcctaaaaaatctgctaattttttggttgtgatacc

SEQ ID NO: 313695 - DNA, 1166 bp, Homo Sapiens
  misc_feature (844)..(844): n is a, c, g, or t
  misc_feature (850)..(850): n is a, c, g, or t
tggggaggtgggggatgatggtgatgtaaaattggggcgtcggaatcatagagggggcgggacgatatggggcgtggggcggttccaaggggagttcaaggtttaaatgtagggggaaataaccatttttggcaatagctagggcaccataaaaaaggtaaaccacaatttgctttcattaaccctagatatacttccaagggatgaaagattgaaaggtggctttgttttagttagtttaccctgtttgcatatagtgcagaaaaaggttttcatgttagcactatgtacattaggaagagatccaaatttacaagagaggcagataaaatttgaattttttaagcattcattaaacgaagttttggagtaacatccacgtttatcttcctttcactaatcacgttccctgttaagcacatcataacaacagcacagtgaagtgaatgatgaaataagagcattttgatacactagaaaacagtgctcagtgagacatttacattctatttatatgattaaacatttgatcatacagtaccttcctacaggattactggctaattttggggtggggtttatactattagaggtattactaacatgataactacttcccttatatgcaaacattagagctataattttattgagaggaaaactgattttgcaagttgagcagcttctcaaataatgcagtacatgaaatcatgggaaatatgagcaaagctgcccttgacataaaatgatttatcaacctgcttttcaccacatcaaattgaatcagtacagaccaacacggtcaatcagatcattcttaatatgaacaaatgggtaaaaaganaaaaantatgcatatgaataaacaggggaactagatgcgtttcagcaaggaatgtcaggtggtagttctggatgaaacttgtattgcagttttcatttccacagttgtgtgcctgagagtctgacctggatgaggcttccagaccatcctgctgttgtgctggggggctgggccaaaacctgcagtaggggttgcactactgatactcatgccagccatctgctgattcatctgtgagaggctccactggggctgctgagcttgcggcaggccaaaccgcacgcgtgggtcgacgatatccctaggattcgggaccggtacc

SEQ ID NO: 313696 - DNA, 424 bp, Homo Sapiens
gcattaacagtaaccccaagaaaggcatcagggttctggagtggttgtttgagtgacacagcacaaggccttgatttcatcatgcttttgctgtggatgtagtgtagcttgctgaacaggtatggaagctgtctttgctgttaagtacttctcccgtttgtttatcaacctgcagctaacaggatgtctgcttttttacaggtttatttcacagagcagtgtacattcttgtcttccaggggaacttcaacatggagttacttttgatccctcagttttaattcagtgtctggtttacaagttccttactctattttattcagctctttcacttactctgccatcacttcctacttgaaatctgagttttaggctactgtaggagggtctcagacccttcccttttagggactattaggccggg

SEQ ID NO: 313697 - DNA, 400 bp, Homo Sapiens
gacagagccacgattcaattcacatagtcatctctagaggcacagctctggtaaagggcttgatgactggtcactgtcgtcacgaacttgacctttcctgcagcactgtctggtactttcccagtacagtgttctgccctgacacagccaaggccaagggcagtgcaggcacagccaccgtgactctctgctgtgaggttaacagctccatcagttcagggactgcctgacccagcctgaccaaattagagcaagtaatgggtgtgacataatttgacatgtacattgttaattgaacccaatgggagatgattctatatagaggcgaataccacgctgtgaactatttgtgttatgaagctcttattctcttatccttgcaggagatagttgtgccatg

SEQ ID NO: 313698 - DNA, 351 bp, Homo Sapiens
gactcatcataatctgagatatccatctgaatccatatccatgtgtgaattgtgtatgtgttgctgctctccgtggctctgtctctcgtggagggacatcaatattactttcgttgattggcttaaatgccaatgtagtttgtttctttgtctttgtacctggttctctgctctgtctcttctctaatctttgttttaggccttctagttccacaccatcttcttgagggcttccttcagtattttcattcttaattctctttttatttctcttttctgcctctgctttcatttctatggttattcgtggaatgactctttgaccacgcggagaaggcaacacctcgtgcc

SEQ ID NO: 313699 - DNA, 4004 bp, Homo Sapiens
tctgccaatgtttagaacattttattaaagtacaaaattgttggaatttagctaatagaaaaacatagtaaatatttacaaaaacgttgataacattactcaagtcacacacatataacaatgtagacaggtcttaacaaagtttacaaattgaaattatggagatttcccaaaatgaatctaatagctcattgctgagcatggttatcaatataacatttaagatcttggatcaaatgttgtccccgagtcttctgcaatccagtcctcttagaaattggtttctctctttgggagattcagactcagaggcagccagaggggacaggtcaagagctgaaataatcacataactactctaattttcttcattctattgactgtgtcaagttatagacacagccaaagtgtttttcttcggcctctgatgatttgagaagatgaagaacatgagcaatttctcattgcttaaagaaaaacttggcacataagaggctgagtgtagtagagtatctgtactagaaccataaagttctatctgatggtaaattatgtataaaactaagataaaacagataattatgctctatctcatatctactgaaagtagaaaaggaggaagagtgacacttttaaatcaaactgctctagttttagcttagtggatggttaataaacacactgctttacgctgaagtgatcagatagctatttctacagttcagaagaacttaaaaatcaggttttaaagacaaaagaaagcagactcaaaacacagacaaagcagagaagaaaacaatgcccatgagatggtcactatttagacagtattataaaaagctaaagaacacttgggctttacttcactttgatgtcttgtactaaaaacaccttccccaaactaaattcagaggggaggaagttaagagcttcaggtaactttaaaaccagtcttgggcttggtaagataattacttaaaataatcgcctcacattttaaaacagatcatcttcatctgactcttccaggtactttataggtttctttgcccgtacagattttgcccgaggagccacagctgagtcaaagtccatatggaagtcatcactctcccccttggatttcttgcttgtgactgctttcgaaacaattttctcaaaattagagtcagaatcatcagaagtggatggcttccttttgcggcgattcttggttttggcaggatcaggcttttgagagacaccagaattcaaagctggatcccttttagttccttttggggcagccctttttttggcaccggtagtggaggtggaagactgactttttgctgctgtcttcttcactgtcacattctttttaggaactgggtttgtaatttcagtttcatctgggaaatgtgtagcaggagggcttgaagacagtggtacactgcccttaacatcatcagcttcaaggtctgacacgacacttttctgtggtttcagttctttgttactaagttttggggaagttttggtcttaggtggactagcatctgatgggacaaaatcttcatcatcagttttttcatcaaaatctgagaaatcttcatctgaatccaaatccattggtgaatttttgttttatgttgctgctctccgtggctctgtttctcgtggagggacatcaaaattactttcgtcactgctcctatctgattctgaatcagaccagggatttctcttctttcctttttttgattggcttaaatgccaatgtagtttgtttctttgtctttgtacctggttctcttttctgtttcttgttctaatctttgttttaggccttctagttccacaccatcttcttgagggcttccttcagtattttcattcttaattgttctttgttatttttcttttctgcctctgctttcatttctatggttattcgtggaatgactctttgaccacgcggagaaggcaaaacttcagccatttgtgtttttttccccttggccttcccccctttcccaggaagtccgacttgttcatcttgtttttccttggcttcaacagcctccaattcttcaataaatgtagccaagtcttctttccacaaatctgatggactctttctttttaatgtgtccagctcttgttctttttcatttcttagcctgcagagttcatctttcttttccttggttaaataccaaaggggcatatcaagaagatagttgaaggttggtccagaatctgttacggagtcactcttttcagtttccttttcgttgtcactctcttcattttcttcttcatctggaaccttttgctgggcttctttccaggccttcacaggatccgaatcatatcccctctgaatcagaactttaattaattctttcttaggcttattttcaatgattatttggccatctattttctctaagataaagcgagcctgattattcagtttagcagattcagcaccaagcattcctaggagccattcttttcttaatccataatatttaagtctgagttcaaaaaagtctcttagaatatccaacaccgtgtcatatttctttaaacagcctacgtggtcaaaaagcaccatagagttgcatgtgagactagtttggagtttgaagactttgtgtagtccaactctctctgcctctgccagtttttcttcagtcatcttcacaacaaatttcacagtggtatctgtatggtattccctatagtctgttatgagaggaggtgtcttctcggtgccattcaacatgggttctagaacttgttctcttgtatgtctgggtccatgttctgacgggaagctgtgagatttcaatggttgtagaattaagaatagctaattcaccactaatcacatattgatttggagccagttcttcaatagtacctttgaagtttttgtaacttggaagcattggcaaaggttcttctccatccatcaaacgcctgatgttatttacaatttcacgcacatcaaagttggggattttgcaggaccacccagtaccgattccttcagcaccatttatcagcaccatgggaataataggaatgtaccattcaggctcaacacgctggttgtcatcatataaaaacttcaacgtgtgatcatcttttggtggaaataacaatcgagccaaagagctgagcattgtaaagatgtatcgtggactagcagaatccttgccaccatgtagcctggtaccaaactgaccaatgggctgcaaagaggtttagattattgctacccacaaaaattttgagccaaattgataatggtcatcattagtgacatcttcaccatgatgataagaagacatttcagccactgatccagctaattgggcaacctttacttctcgcttgtcattccgtttgaagcaagtaaacaaaacctttctctgacctggtttcaaaccatccaccatagaagggatagatctctcgttatcagaatttgagaacaagataagttccttgttgatgaagtcattatatgtcagatatgtggtagtttgtccatccaagtaatcttcaggaagcccaagtaactttcgttgtcttctatcttccatgaaattagttaaccattcctttcgatcatctatctgttttttgctaaaggccaggctgatagcagcatcatcttcaggaccagaatatttgaactggatacgatgtcttttcatatctgcaaagtattctttagcttcctttgatgtgctggtgcccaaacctttgtaatatttgactttccattttttatgatttggagtagaactcttccactcttcaaattcaggaaggctgtaaaatgccatttcttgcttgtttttagatacctttacaatgggagtgataaattcctccagaaaacgatgtcgcagaagagagggccagttgtgatggataaaattaatcagcaagcctttgatgtgggaaccatcttggtcctgatctgtcataatcattatcttccc

SEQ ID NO: 313700 - DNA, 484 bp, Homo Sapiens
  misc_feature (15)..(15): n is a, c, g, or t
  misc_feature (86)..(86): n is a, c, g, or t
  misc_feature (117)..(117): n is a, c, g, or t
ggggaggaagttaanaaccttccaggtaaacttttaaaaacccagtccttggggccttggttaagaataaattaactttaaaaatnaatcgccctccacatttttaaaaccagatcnatcttcatctgaactccttcccaggtacttttataggtttctttgcccgtacagattttgcccgaggagccacagctgagtcaaagtccatatggaagtcatcactctcccccttggatttcttgcttgtgactgctttcgaaacaattttctcaaaattagagtcagaatcatcagaagtggatggcttccttttgcggcgattcttggttttggcaggatcaggcttttgagagacaccagaattcaaagctggatcccttttagttccttttggggcagccctttttttggcaccggtagtggaggtggaagactgactttttgctgctgtcttcttcactgtcacattctttttaggaaactg

SEQ ID NO: 313701 - DNA, 1893 bp, Homo Sapiens
  misc_feature (1498)..(1498): n is a, c, g, or t
  misc_feature (1690)..(1690): n is a, c, g, or t
  misc_feature (1699)..(1699): n is a, c, g, or t
  misc_feature (1709)..(1709): n is a, c, g, or t
  misc_feature (1714)..(1715): n is a, c, g, or t
  misc_feature (1837)..(1837): n is a, c, g, or t
  misc_feature (1879)..(1879): n is a, c, g, or t
attcagttaatacatttattacagcaggtctttagtcattattgccattaaaaagttttcatgaaatttcacaaaatcttttaggctattagtattagctttctttttatggagtgacactttgttaatttatgaaatatttacagcatttacaaaaagtaagagaatgtctaataaaatttcttatacttacaaaattcatacattatactactgtatttgagatgtcttacttggtagaccaattaaactatgacataaaataatttacaaagatatatttaatctttcttaattcattgaaaacaaaaccatattagttataaatagtcctttacaaatcattgtaaaacacttcattgttttaactcgagccttagcttttacaaatatacttaataaatgaattagttcagatagcaaatagaactgtgcatttaaaatttcacttaatactataaaacaaaacaacctgaaaaagcaaacggcctggtacttcaagtaaaaatttgtagaaccagtttttatgcacgcgtggggtggggaggggaagccaacaccattgaaattgaaatgcataaacacaatactttcaagaatacgctcaacacatgtacatctggggcactgatttctaaggatgatgctctagcaatagctcatgcatccaagacggtagccctacattttggcagatgagctggactgactagagcaacatttgcgaaaacattcccctaagcagcaggatgctcccgacatccttggacagtgctctctttggggtttgccacaacccgaaaaccattccgaattttaggcaagctcatgaaagaatttagaaaataaaactggcaaatttaaaaaatgcaaatcatatttaactgggccctgtcagttttttaaaaatataaaaataggcttctctggaaaattaggggaaaacattttctacccctaaatttccaaataatgaaaaactcatctatacagctatttctccttaagtcaccactcatgatggtataaaagctggcaattacttaaacaccttgcttttgggtaatgcctaggaagctgagctcaatttggttttggcagtaacatgcatctttcacatttggattcatcttagagaatccaaagcaactgttaagcagcttcaggaaaatccattccacaaacatatatcccctttgattttaaaataatgttgtttcaattaagcccacaaaatatatattgtatatatagtatttctcaagacgtaaattaaatctaaattttgtctttcaaaaactgctttttaaaggtgtcagggttttccaaaacctcatctcagctcctttcttctgattgccgtgtggaccctgtaagttttcttgtaaatatgtattcctagaaggcacatattcaagagtttaagattatgttagttcaagttctacatggaggcaaatattttaatctactttttacaaatgccccaaatgaaagntcagctatcgcctttatttcgagctctaatgcggtggccaggtcccccctcagaagtgagtttgcacatggggcatcatttgcgaaggactggaaggtgaagttgggggatcagaaagcttggcagagttggcgagctgcagttcctcaagccgctttatgtattcgtcgcgtaaggctaaagagctcatgntacgctgcntcactggatncggcnntgtgtgcttgatcctgggggttcatctaatgtagtaattcacccagagtttcaagtgacgcatacctggcactggatataaaactcgattgatttctttagtatagaaaggggttttggaanttttctttattacggggtatcagggaccataaagaacaggcnctttctgaaacctt

SEQ ID NO: 313702 - DNA, 445 bp, Homo Sapiens
  misc_feature (354)..(354): n is a, c, g, or t
  misc_feature (368)..(368): n is a, c, g, or t
  misc_feature (411)..(411): n is a, c, g, or t
  misc_feature (419)..(419): n is a, c, g, or t
  misc_feature (431)..(431): n is a, c, g, or t
gaaagcaaggtgtttaagtaattgccagcttttataccatcatgagtggtgacttaaggagaaatagctgtatagatgagtttttcattatttggaaatttaggggtagaaaatgttttcccctaattttccagagaagcctatttttatatttttaaaaaactgacagggcccagttaaatatgatttgcattttttaaatttgccagttttattttctaaattctttcatgagcttgcctaaaattcgggaatgggttttcgggttgtgggcaaaccccaaagagaggcactgtcccaagggatgtcggggagcatccctgctggcttaggggggaatgtttttccgccaantgttgctcttggtncagtccccagcttcatcttgcccaaaatgtagggggctacccntctttggntggcatggggcntattgcctaggggc

SEQ ID NO: 313703 - DNA, 732 bp, Homo Sapiens
gtcaaatcaggtactgctcaggggatccttctgtttctcacggggtgaaacatgtctttagttcctcatgttaacacgaagccagagcccacatgaactgttggatgtcttccttagaaagggtaggcatggttgtatttgtcacctggggtgacaagaccagacaggctttcccaggcctgggtatccagggaggctctgcagccctgctgaagggccctaactagagttctagagtttctgattctgtttctcagtagtccttttagaggcttgctatacttggtctgcttcaaggaggtcgaccttctaatgtatgaagaatgggatgcatttgatctcaagaccaaagacagatgtcagtgggctgctctggccctggtgtgcacggctgtggcagctgttgatgccagtgtcctctaactcatgctgtccttgtgattcacctctatctcccttgggaataagcacatacaggcttaagctctaagatagataggtgtttgtccttttaccatcgagctacttcccataataaccactttgcatccaacactcttcacccacctcccatacgcaaggtgatgtggatacttggcccaaagtaactggtggtaggaatcttagaaacatgaccacttatactgtctgtctgaggcagaagataacagcagcatctcgaccagcctctgccttaaggtctttataatcacgtatggttcacagtttctt

SEQ ID NO: 313704 - DNA, 3342 bp, Homo Sapiens
  misc_feature (3138)..(3214): n is a, c, g, or t
  misc_feature (3223)..(3245): n is a, c, g, or t
tgggccccagggccgttacgagtcgagagtgagatagacctcgtggtgtggtggttaatggtagaaaaacgtgctttcggtaaaaaagaattcgccgtctacggggcgctcgggtgcattacaggtgtgcggtattggattgaaagagcgatcgggtctggcccaagggggcctttgtttgttttgctgagcgatccccagaccctaatttaagcggccgggatgtccctgaggatagccacgctgggggcccatcgtgcgcttacccttatcgggcccggcgcaccccaacgagaggggctaggaaaaacttctttgaagggccgaaggccgccccacaagatgcgttaaaactcgggccctttgctctaggagagaaaaaagagagtttatttagaaagtatcatagtgtaaacaaacaaattgtaccactttgattttcttggaatacaagactcgtgatgcaaagctgaagttgtgtgtacaagactcttgacagttgtgcttctctaggaggttgggtttttttaaaaaaagaattatctgtgaaccatacgtgattaataaagatttcctttaaggcagaggctggtcgagatgctgctgttatcttctgcctcagacagacagtataagtggtcttgtttctaagattcctaccaccagttactttgggccaagtatccacatccccttgcgtatgggaggtgggtgaagagtgttggatgcaaagtggttattatgggaagtagctcgatggtaaaaggacaaacacctatctatcttagagcttaagcctgtatgtgcttattcccaagggagatagaggtgtttaatcacaaggacagcatgagttagaggacactggcatcaacagctgccacagccgtgcacaccagggccagagcagcccactgacatctgtctttggtcttgagatcaaatgcatcccattcttcatacattagaaggtcgacctccttgaagcagaccaagtatagcaagcctctaaaaggactactgagaaacagaatcagaaactctagaactctagttagggcccttcagcagggctgcagagcctccctggatacccaggcctgggaaagcctgtctggtcttgtcaccccaggtgacaaatacaactggaatctttcaatgagttaatgagatactgagaatgagcctcgtggaattttccatgcctaccctttctaaggaagacatccaacagttcatgtgggctctggcttcgtgttaacatgaggaactaaagacatgtttcaccccgtgagaaacagaaggatcccctgaacagtaactgatttgacaagtatcgacacataaagttatggcatcagcattctcttactcaggcacggtcagaagtaacgctgctttcatcacggctaacctctcacactgagagaagtattcacagcaacagaagctccagcagcggccgtgaaggtatcttccagaggtgtgggtttttgcatttcaatctgctccatgctacggaccaacacagtattgagtcaactgtgaccttaagatcagaggaacgtcaatactgccacaaggccacctttccagaactcgtgggcaggtaaactatgctttggatgtgctttctttcaccaaaatcactcaactcaggagccacaaatagtccagcaatttcatttccctcaacgctattttagtctcaaaggaaaccatgtaaatttcatcaagagaaggtcaaaggggatatatcgccactgaaaatgtttacacagtgaccatgagttacacatttacttagagaaacttaacttaataaagaatctgtagagtgtgttggcttggaaaacacacacacaaagaagatacctcacgcttagtatgttctgctttctgaacagccaccactgggaacccagtggcctctgtgggactgaactcctaaacgcagggtgcgggagctgggcaggagaggtgacctccaactgtgttcctaaagttcgtctttcgcttggctcaggacaaagcggtgtaacgagtcaaggtctctgcctccactgtgctcactgactttcttccctcctcggaaaagcaataacgtggggtagcctcgtaccgaatacttgctgcagatattccgttcagcagtgcagtctacttcggcgatcttgacccccgccagaccagggaattcctttttagagagttcctcccaagtaggagccagagtcttacaatgaccacaccatggagcataaaacttgatgaaggttattccttctgcaatggtgtcatcgaagttattttcagtgagtgccaacacagtgcccttgtcagcctcgggctcagctgccagcaccggggcctctgagggcgtgacggtctccgtcgctccagtctctgtgcgctgcagctgcgactccacgtactccctcagtgactccaaatcccgctttcccttgtactgatccacctttgttcccatctcggaaccagagaagagtgggatagccacgaacctggtttccggagcagagttcatagtgctgtgtacaatcaaccttgccaatcttgacagtttcggaatgttcaaggcccagagccagctgctccccaggttggagccagggctttgcagtgaccacaccacggagcgaagaacttgataaagtggtcgccttgtgcaacgtgcagctcaaagttgcttgctgagagctcatacagcccttgcttgagctcgggggcactgggcggttccacttccggctctggtgtcactggctcctcgttcagtgtctgcagcatccagttttccagtgtctggaagtcccgaggaccctggtacttcacagcttcttggcctggcttgaaaagctttaaggtggggtatcctcgcaccccctgggcggagcacacgtcggagtgggccgtgcagtccactttagccacatagactttggcatcttccatgctgttgtatttgtctcccaggtcattccaagtcggctgcagccgctggcagtgtccacaccagggcgcgaagaacatgacgaagtgcgcggcgctctggatcccgtgcgtgaacatgtcggccgtgtacaggtgcttgctgtgcgggtcctgtccgtcctnnnnnnnnnnnnnnnnnnnnnnnnnnnnnnnnnnnnnnnnnnnnnnnnnnnnnnnnnnnnnnnnnnnnnnnnnnnnnccatggccnnnnnnnnnnnnnnnnnnnnnnntcagggccgccggccgggccagcagcgggaggaggcgtcctgggcgcgcgggcatcgcggcctcgtgccgaattcgccacccaggcctcgctacctt

SEQ ID NO: 313705 - DNA, 1207 bp, Homo Sapiens
  misc_feature (240)..(240): n is a, c, g, or t
tgggccgggaagcagccagttcccagggacacccagatgcacgatgtgataagcagtgaagctttctgtcccagggcgtgggcaggcgtcctcccttagctgcctgagcatgtgcggctgaagacatggctttctagggttaggcactgtgcgtggtgccagccccagccctccctcacctggacgtgcccaggagggggcagcagagcaccttggcaaaagtctgtccacttgccgctnccccgtcccgtgcagaagactgcttttccgtggcggccagtgtgcggccacgggctctcagaagcctgcttgttgggactgttgctgggaggaggaagggacaaggcttgacctggggctcctgaaaacagacactcgggcgttggccactgggcaacaaagtcagaagggcctggagaccctctgtccagccttctagggactgggcggcttcctccagaggactgagctcagccaggttcaagggcggcagcaggaggcccctcgaccctccctcttaacgtaatcatgcagccggaagcgcggctcgctgggagccttcatggagcgctgcttcaactccctgcggagtgggggtacaaggggacacgatggcctggactctaatgaggattcaggccctgggctgggggagtcctggtgactggcaggacttactttgctatggctgtgaaggccaagtccacgttgaggcccgtcttggcgctggtctccatgaagggcagtccatactcctgtaaacagctgctgccagccaggtggtggcctggcggggacagcctaggctcgcagcctccaggggcaccccctcaccacccccctgccctgactcaccttggccagcttctcaccgtcctccctcttcaccacacgctcatgggcagagtccaccttgttccccagcagcatgagcgccacgtcgtgctgggcgtactcgtggatctcggtcagccaggcctggatgttgtcaaaggaggccttgttggtgacatcgtagagcagcagcagagcatgagcatcccggtagtaggcatgggtaacactgcggaaccgctcctgaccagctgtgtcccacatctgcagcttcaccttcacaccatccacgtccagaacgttccggaagtcaatgcctacggtggagatgaaggtccccgccaggaaagcaccatccttgaatcgcaccagc

SEQ ID NO: 313706 - DNA, 858 bp, Homo Sapiens
  misc_feature (807)..(807): n is a, c, g, or t
cataaacacattttattcacaaaaaacacttcgaatttcaagtgtctaccagtagcacccttgctctttctaaacataagcctaagtatatgaggttgcccgtggcaactttttggtaaaacagcttttcattagcactctccaggttctctgcaacacttcacagaggcgagactggctgtatcctttgctgtcggtctttagtacgatcaagttgcaatatacagtgggactgctagacttgaaggagagcagtgattgtgggattgtaaataagagcatcagaagccctccccagctactgctcttcgtggagacttagtaaggactgtgtctacttgagctgtggcaaggctgctgtctgggactgtcctctgccacaaggccatttctcccattatataccgtttgtaaagagaaactgtaaagtctcctcctgaccatatatttttaaatactggcaaagcttttaaaattggcacacaagtacagactgtgctcatttctgtttagtatctgaaaacctgatagatgctacccttaagagcttgctcttccggtgtgctacgtagcacccacctggttaaaatctgaaaacaagtacccctttgacctgtctcccactgaagcttctactgccctggcagctcgcctggggcccaactcagaaacaggagccagcagagcactctctcacgctgatccagccggggcaccctgctttaagtcagtaggaagctcgctgggcacttgcccgtttcctactttttccgaagttattgcgttcatttttgttcgttaagtaantggggccctgtggctttctttaatccaggcagttcaaggttttttggggga

SEQ ID NO: 313707 - DNA, 1604 bp, Homo Sapiens
tttttttaacaatttcaagaacctttattgaaaccaacattcaaataatatctcaagggtgaaatgtttcagcaaaaccaatttaacaattccaaatatatataaaaacatgtaattttcttgaaggtgataatttacccctcccccattttatctgctatacttcattgcaccaaatagggaagactgtttaatcatctgcaccaaaaaaaaccccctgcattttgacaagtgtaaatgtcaaaaatcccatcaaatcagagtataattataggcttaatatactataactaaggcttccaatactacagtccagaaacccagtgtgaattttcccattttcaggtctcccaaaagcttgactgctggattaagaaggcacaggggccattacttacgacaaagtgacgcagtacttcggaaaagtaggaacgggcagtgccagcgagcttctactgacttaagcagggtgcccggctggatcagcgtgagagagtgctctgctggctcctgtttctgagttgggcccaggcgagctgccagggcagtagaagcttcagtgggagacaggtcaaaggggtacttgttttcagattttaaccaggtgggtgctacgtagcacacggaagagcaagctcttaagggtagcatctatcaggttttcagatactaaacagaaatgagcacagtctgtacttgtgtgccaattttaaaagctttgccagtatttaaaaatatatggtcaggaggagactttacagtttctctttacaaacggtatataatgggagaaatggccttgtggcagaggacagtcccagacagcagccttgccacagctcaagtagacacagtccttactaagtctccacgaagagcagtagctggggagggcttctgatgctcttatttacaatcccacaatcactgctctccttcaagtctagcagtcccactgtatattgcaacttgatcgtactaaagaccgacagcaaaggatacagccagtctcgcctctgtgaagtgttgcagagaacctggagagtgctaatgaaaagctgttttaccaaaaaagttgccacgggcaacctcatatacttaggcttatgtttagaaagagcaagggtgctactggtagacacttgaaattcgaagtgttttttgtgaataaaatgtgtttatggtaacttagggaaaagtcgtagtaggacagcaaacatgtggttctacatgtacatgaagttagacaagctgactcccctcctagaaagcctacctttcaggcacatatttgtgccaaaatcccagtgaagcacaaacaacagtaatttatattagtatgtggcacagttcacatttccaatagaacttcatcttccctgaaacaatactcagtacagtctcaaaccacacaatgagtctcatcttaagctctccggtccttctacctgtgagtggtcatcttctgggtgtgggacccctttctggaaggcctcggtctggtcggtgtgctgagggctgggagcccctgggtgtccctcagtgctgctggcctcgagggtgatctgctccggcccactggataggcgctccaccttttctaa

SEQ ID NO: 313708 - DNA, 1011 bp, Homo Sapiens
  misc_feature (938)..(938): n is a, c, g, or t
ggcacgagaattggttgaatttgcccaggatgacgacaggcttcgtgaagagcgaaagaaagcaaagaagaacaaagacaagtatgttggggtttcctcagacagtgttggaggattcagatacagtgaaagatatgatcctgagcccaaatcaaaatgggatgaggagtgggataaaaacaagagtgcttttccattcagtgataaattaggtgagctgagtgataaaattggaagcacaattgatgacaccatcagcaagttccggaggaaagatagagaagactctccagaaagatgcagcgacagcgatgaggaaaagcgagaagaggcagatctcccaaaggtgaattcaaagatgccacagaggcgactacgacgacaaagcatattcatatcacacaggccacagagaccaccacaaccagacacaagcgcacagcaaatccttccgatcagaatgcttcaacccacacacctcagtcttcagttaagacttcagtgcctagcagcaagtcatctggtgaccttgttgatctgtttgatggcaccagccagtcaacaggaggatcagctgatttattcggaggatttgctgactttgggctcagctgctgcatcaggcagtttcccttcccaagtaacagcaacaagtgggaatggagactttggtgactggagtgccttcaaccaagccccatcaggccctgttgcttccagtggcgagttctttggcagtgcctcacagccagcggtagaacttgttagtggctcacaatcagctctaggcccacctcctggctgcctcacattctttagacctgtttgatcttatgggctcgtcccaggcaaccatgacatctttccagagtatgaatttctctatgatgagcactaacactgtgggacttggtttgcctatgtcaagatcacaggtnagttggctggttcccttggttgtatttataatctttgagatgctctaactcattgaatgatggattagtataa

SEQ ID NO: 313709 - DNA, 1082 bp, Homo Sapiens
accccaggtagctatgttgtaattttatttcatgacagcaccatcttctctttgcctgcgcctgggcctcctagtgtgctgcttacgtgatgcccacgtgccacagagttattgcccgaagtgccagtgggctgtgcaggggatgggctcttccttccagatggtctgcagcctctgggaccacgcagccaccatcccctttctttcttcttcggatgcaatttcaggagcaaagctgatctgaggggcaaggactttaaatccacagaagtgtaatgtgccatgctggagtggccacaggaagtatcgagaatctccattgactcctgtcttcgtgtacatctcggccgtgcctcccgtggttacggaaaggagcgctagtttaccctggagcaaaccggaatcgtagaatcctgggatgtcaaaggcaaagccctggcacagcaccctatccatccagcccttcaggatggccggcacgctgaaccagtacagcgggaactgaaatatcactaggtcagcctcccgaacctttttctgctcatcagtgatgtcgctagccagagacctttgcttgtaggcttcgtgggtttccactccataattgaaaacctcaggattagaaagagtaccagtgatatcgtctgtggccctcggctcaaagttcatggcatacaaatcagacactgtgacggtgcagccctgcctgctcagttcatctacagccacattcttcaaggatccgttgaaagacttgggttcctggtgtgcatagacaatgagtactttcttacctgccatagcgtaagaaggtggattccttctctctgatttgatgggtggctggggctttcctgcgtagtctctcttcagcgagtccagcaatcttccgaccagcgcactccccagtaggagccgcaggactgggacccgcgtctccccaaggaccgctctaggagttgcgccaggttccggccgcactggaccgcgcactcgctgacgcctggagggcgggagcgctgcgactgcgcccccggggaccacggaccggtgccaacctaagcagcccggaacctgccccg

SEQ ID NO: 313710 - DNA, 392 bp, Homo Sapiens
attattttgcaggagtctacacccaggcggtggctatacttattaaagttggcgggagctgagcgatcagtcggtcctgtgctgtctgtggtgtagggcgttgcaggcagcgctcacctcctcaggccggcagaatgcgggtggctgtggctggctgctgccacggcgagctggataagatctatgagacgctggcgctggcagagcggcgcgggccggggcctgtcgacactcttgctgtgctgcggcgacttccaggcggtgcgcaacgaggcggatctacgctgcatggccgtgccgcccaagtatcgtcacatgcaaaccttctacaggtattactctggagagaatttgcaagagataccctatggtggctgggtggaccaaacatt

SEQ ID NO: 313711 - DNA, 399 bp, Homo Sapiens
ctccatcttacagtaccctgtaaatacctgtcatgtccttcaggatctctgccctcaaaatttattcctgttcagcttctcaatcagtgactgtgtgctaaattttaggctactgtatcttcaggccacctgaggcacatcctctctgaaacggctatggaaggttagggccactctggactggcacacatcctaaagcaccaaaagaccttcaacattttctgagagcaacagagtatttgccaataaatgatctctcatttttccaccttgactgccaatctaacttaattaataagtttactttccagccagtcctggaagtctgggttttacctgccacagagaagctgatacacgcaggtgctgatttctttatggagggggagacgaggaggg

SEQ ID NO: 313712 - DNA, 611 bp, Homo Sapiens
cacaatgatggtattttgaaaagtgttctttccgtgtttgtggggaatcaggattattgagaggtgaaggagccaggtggcttcattctggcggtgagaggcccatgaccacgggagtgagagctgttgtggcagaggcccggctctcctgcggtgtggctggtggcctgccgtggccaagagcatcttctgggtggatggaaccctgcctggtcacatttggccagagacacacctggccctcagggggctgagctggagactgagctggggctggccgggacgtgacaaggcaggacagaggcggcccctccgctgctcctttttggaatgcgagctcccaccagaagaaggttccggcacgaatcccatccccacgtctgggccgagaaagcagcccgggtccggaaggtgtagagagtcccggcctcactcagctcacagggcgtgccaggcggcaacaccagaatcttccagaagcccagctccacccgcacacgcagcttcccatccagtccttcaactcaattcttaccccacgcgtttctgtttgttttgagactcaccacctgtctggagcccacccccatgggcaccgcgtgccgcctgcc

SEQ ID NO: 313713 - DNA, 287 bp, Homo Sapiens
aaaaaacccataaactcttaacagatcttccggctaatttaaaactcctagtcagattaatgattaatctctatccccgctgccatgaactgatcctgtctgtggtgcaacactgcactctgctcccaccagtccaggcataagttgtgtctgttcccaaaccagactgagatacacttactgcaattatctcacttaaacaattcacaaaataatgaagtacaagtgcaaaaacaatagcccatagttgtttatacactcatacttacatgagctttaggacattt

SEQ ID NO: 313714 - DNA, 1575 bp, Homo Sapiens
tttttgttgaatttgtattttatttcaagtgtcaaagaaatcatctttgtttatttagatgaaaccaaacactacacatttacactcacactgcttccaggacccaagggtttcacagaccatttgcctacctggttctttcctctcctctttccagtgatttctagaataccctttcaaaggaccacatgaatatacgaactgtaaaattcaactttaatcttttgcgaaatgttttatttactgcttaaaatctaggtgggtggatatattcatgtatgcatatattgatagattaatacaaacataagtatgtatttaaatttaaggataagtaaagtgagagtacaacagccccattcttagttaaaaagaaaagaaaaagacaagagcaagccactgccaccacaggtaccagcacttaaatttgtcagcaggctgaccaaagagtggcctgtctgttggcattcatcggacatggcagctcccttcagctctccagtgagtttcaagttcagagcactttcagtccttgtcttgtttatctattactgaagggtttctaggaaggtttagcagtgcttcaattttcttagcatcattctcaggttcatcttcctgtaaactactttcaattttctcagggaggtgctcagtaacttgtagtctgcctttccactcttccagttttagctcatggagtgcctttcgatccttctgttttctttcctgaacagtctcaccagagtacttctgaaatgccatcagcaggcctcctacaggagtgcccagcaaggctccaattatgccaccagccaccaggccacgcaggcctacgtttatcctaaaaggacttcccgtgacagctcctgcaattacaaaatggcttaaggcatctttatttcggtatacattcagactagtgttcactgtgttgaatatagtgacaaacactgcagttctccaaccccagcgccagccataacgaatgaagcctcgtgtggcagcacgatgtgcagattgcacagcatcaaaccggttatgataaatttctgcctggctctgctcaatgtattgttgtttagcatgaataaaagctggtattcccccatacacccagccaatgatgcctgctgtagctgccgtcttacagatattagcaaggtcctttgaaattctctgctgttcatctttgccaaacagctcccggaggcggtcccatccagattccgggtaatagggctctgggacgtagggaagccgcttctgacgctcctcaaggacttccgaatcggcagtcacagcttcggcagcaaagactcggggaaataggcacaatgctctacagagaaagctccgcggtgccggtggcggcacctccatggccttctctcgacctacggacaaacttgagcgctcaggacttcaagtcctcgcggacgtgccgcgggagagcgtaactgtacgaggtgagaatccgtgcatttgacccaggttaaccctctgccagagggctcgacacccacaccttcagtccccggcctcgctttggatcccgggaattccggaccggta

SEQ ID NO: 313715 - DNA, 358 bp, Homo Sapiens
  misc_feature (118)..(140): n is a, c, g, or t
ataatttataatttgcagacttaatgtataatctattttgtcctaacaattacaaatatattttttatttcagattgtatatattcctaccagatggagataattacagctttaaaannnnnnnnnnnnnnnnnnnnnnncacacattgacattaaatttttatggacacataataactgtacatatatatggggtagaatgtgatgttttaatacatgtactcaatgtgtaatgatcaaatcagggtaatttgcataatgatttttctgtagggagttcctcatcctactatgcaataggacaccagaacttattcctgggttctacatccgttaaggcaaccaaggattggtttgg

SEQ ID NO: 313716 - DNA, 346 bp, Homo Sapiens
  misc_feature (296)..(296): n is a, c, g, or t
  misc_feature (322)..(322): n is a, c, g, or t
  misc_feature (333)..(333): n is a, c, g, or t
tttatttcacacattgacattaaatttttatggacacataataactgtacatatatatggggtagaatgtgatgttttaatacatgtactcaatgtgtaatgatcaaatcagggtaatttgcataatgatttttctgtagggagaaaattcaaaatctactcttctggctattttcaaatatataatatgttattgttaactatactcatcctactatgcaatagggcacccgaacttattcctggggttctacatccgttaaggccaacccagggattgggaaatattggggaanaaaaattgcggtctggtactggaacnatggtaccggncttttttcttggt

SEQ ID NO: 313717 - DNA, 1555 bp, Homo Sapiens
  misc_feature (19)..(19): n is a, c, g, or t
  misc_feature (42)..(42): n is a, c, g, or t
tctccagtccctgactgtncccactggccagccccgaaagcncagcaacgagggagccaggctggggcaggaaacacacagcagcctcctctcgcgcccactttattagggggcaggtgtgggaggacctaggcctgctgtgcctgcagtagcgcccgcacctggcggatctgccagtcgacgctggagcgcgcagtgccgcccagggcaccatactgctccacactgtgcccgtagtcccacacgcagatcacgtcgcccgagaacagggggctgatggtctgcagctcctgcagtgacagctggttgagggcgacccccttggtctcggccatgaacacagctttcccggaggcctcgtgggcctggcggaatggcatccctttgcggaccaggtaataggcaaggtcagtggccagcatgtcggggctgagagcctgtcccatgttctcttggtgaatctgcagcgtagagatgacgccagtggccacctggagcacggcactcatagtgtctgacacttcaaacacagcttccttgtcctcctgtaagtctttgttgtaggtgctgggaagtcccttgagggtcatcaggagcccggcacacctcttctggggcatcaggctgcttcccgtgctgtaggcatctgagagctgcacgaagctgaaccttggtgcagtagaggatgaggtcctcggccatcctgctgagatgggtcatgcacagcgaagcccagaacaggaactcggccacaaagtcccgctcactagtggcatccatgctgttgagagtgatggccccaaagttgagttctgctcggagcagctctcggtccacacccaggggattgcctgcaatggccccactccccaggggcaggacattgatccgcttccgcacctccagcagccgctcagagtctcgggtcagtgccacggcgtggctcagaatccagtggctccagcggatgggctgggccctctgcaaatgggtgtaccccgggaagagaacatcacgttccgcctctgcccgatccaccatggtcctaatgagctcccagaggaggcccgagagcgtggagcaggtctgccgcatccacagcctgaggtctgtgaccacctggtcattccggctccgtcccgtgtgcagcttccctgccgttgcaccaatgagctccttcaggcggcgctcattggctgtgtggatgtcctcatcattggagttcaggaaggtgccctgggcccactcctcagccaccttgtctaggccatggagtatctggtccatctcggccttggtgaggagccctgccttctccaggcccctgctgtaggctttgctgccttgaacatccacctcccaaaggtgccggtcgtaggcaatggacgcgttgaacttctccatgatggggtccactgcacccacaaaccggccaccccaaagcttcccactctccgaggccatgttgggcggttcctcgtcgtccggaagcttcggtcctccgggtctccgcctggccgcacggatagtcctcgtgccgaattcgccacccagc

SEQ ID NO: 313718 - DNA, 787 bp, Homo Sapiens
cattcatgccatagtgtgtttatttatactttaaggtaacaagtccacttgtacacattgatttcacaacatcaataaatttgtacactttgagatttgtttctgggttataattcttcctctgggtctcgtgaccgtttccgggtgctcaaggaaccttctgtttgcaatgaacatgcagaagtaacaacagtatctctaaatccctgaggtttgatttgaaacagtactgtgcattccttctggctgggtgacttgtacaatgttgccaacctttgctttcggtcccaatgaaagattagccgtattgtagcagcatgtccccaactttcccctaatgcaggaacaagcaaggcctgatttctatcaatctttgttgtcatctgattggttaaaattacagctaatctgtgattatttgcaaggctgatcatttgctgggctaggccatttaataaccgagtacgaagagacaggtcatctaggtcatgacgaaatggaaaagcaataccatccactatcactagtcgaacctgatttcaaacgttcacagctggaagggaatttcacttcaggatgaattataactagagttgatgatggaaccggttaagacgtttggggctttgagtgttctgaaaggaaatctggaagaagataaacttgtgccagtaactctgtgtagtcacgacagcgaaaataataaatatgagaaagaatattatcaagagtgaaatcctccaaagccggtgttctgtatttgcagctcccagctactcaggaggct

SEQ ID NO: 313719 - DNA, 741 bp, Homo Sapiens
ggggacgtcacgccgcacgccccagcgagggcgtgcggagtttggctgctccggggttagcaggtgagcctgcgatgcgcgggaagacgttccgctttgaaatgcagcgggatttggtgagtttcccgctgtctccagcggtgcgggtgaagctggtgtctgcggggttccagactgctgaggaactcctagaggtgaaaccctccgagcttagcaaagaagttgggatatctaaagcagaagccttagaaactctgcaaattatcagaagagaatgtctcacaaataaaccaagatatgctggtacatctgagtcacacaagaagtgtacagcactggaacttcttgagcaggagcatacccagggcttcataatcaccttctgttcagcactagatgatattcttgggggtggagtgcccttaatgaaaacaacagaaatttgtggtgcaccaggtgttggaaaaacacaattatgtatgcagttggcagtagatgtgcagataccagaatgttttggaggagtggcaggtgaagcagtttttattgatacagagggaagttttatggttgatagagtggtagaccttgctactgcctgcattcagcaccttcagcttatagcagaaaaacacaagggagagggacaccgaaaagcttttggaggatttcactcttgataaatattctttctcatatttattattttcgctgcggataccatctgcagtcttactaggg

SEQ ID NO: 313720 - DNA, 848 bp, Homo Sapiens; identical to SEQ ID NO: 142207
  misc_feature (67)..(67): n is a, c, g, or t
  misc_feature (184)..(184): n is a, c, g, or t
  misc_feature (210)..(252): n is a, c, g, or t

SEQ ID NO: 313721 - DNA, 1464 bp, Homo Sapiens
cttgtttacagtctgctcaaaatatctttataccaacagggtaggcagaacatttaggtttaatatcagttacacaatattagcataaacttccacaactacatagggtattgttttcttttgagctggcaaagtgactatagaaacatcagatgatttctctgaattgagaattttatccaaataaatgccacataccttctagatatatgcatatctttctatattatgtaaatggctttacccatttaaataataaaccatacagcatttaagaatcattattatatgattaacaatgtcatgttccaggtttaacaattttcataggccaaaaaaaatttcttcttaaaaactagttttataaacgcagaatatattccatgagtaactgctggtattttttaagaaaatatattgtgcaattgtggctaccacgtactgctggcaaagcattattatttatgtaaaatgtgaaaaaaaaggtgtaaaatttttcaactgcctatgatcatgatgaaaggttactgccttcttacaaaaatttatattggcatcttcttaaaaataagttcgaaaaagggataaactccctagccaaaaataaataaataaaaaggtgcattttttaaaatgatgctactgcaatgcaatggtttaaataccaaaaaactgagaaaatgagctgtctgtgatccagcattaaagaacatactaaaaaagagcattaatgtaaattaagtagaaaggggatcaaaaattgaactaaccaagtttgtgcagtattgtagccaggcttctaaaattagatgtagaaaatataaatagactgctttaggtagtgagccaccagtgtccaaaaaaaggaatgaaattaagaaaaagctcagttaacttgatccaaagctctgagtaattcttcaccctgcagtaggtttctgctgccttgtataggagcattaacttcacaatcataactggtcagctgtggtaatccactttcatccattgattgccccagcagtctacatgctaaatcagagggtattaaaataattgtcttttgctccattccattctgttcactagatttgcatccttttacacgtttccaagaaagtgatgtagtagctgcatgatcgtctggctgctgtaataatgttccaattcctactgcttgaaaaagtgaaccatcatgttccatttttcgctttctgtgagcattctgcaaagctagtatctttggatttagttcttcctcaggaactgtagttctttgactcaaagcgacagataacacgttagggcttcttggatgagatttttctgtctgttctatgactccttttcctgctctgtttggtgaggctgtccgactttgagtatctctatatggtgatgatgtggcactagtagtttctttatgtatgtgggtaggagatggagatgcaatcaatattttaa

SEQ ID NO: 313722 - DNA, 945 bp, Homo Sapiens
  misc_feature (328)..(354): n is a, c, g, or t
atttgtgcgatatccggcccttgttatccatcctccacatagttttttgccagctacccccacttcttgaattctccaatacccaccctcaagaaccaacccttcaataagaagcctaccatttatataccatcctttaagacactaataatatgataacaagtcatttgtccaggtttacacattcaatagccaaaaaaaatttctttcgtaaaaactagttttataaacgcagaatatatttccatgagtaactgctggtattttttaagaaaatatattgtgcattgtgctaccacgtactgctgcaaacattattatttatgtnnnnnnnnnnnnnnnnnnnnnnnnnnnttttcaactgcctatgatcatgatgaaaggttactgccttcttacaaaattatattggcatcttcttaaaaataattcgaaaaagggataaactccctagccaaaataaataaataaaaaggtgcattttttaaaatgatgctactgcaatgcaatggtttaaataccaaaaactgagaaaatgagctgtctgtgatccagcattaaagaacatactaaaaaagagcattaatgtaaattaagtagaaaggggatcaaaaattgaactaaccaagtttgtgcagtattgtagccaggcttctaaaattagatgtagaaaatataaatagactgctttaggtagtgagccaccagtgtccaaaaaaaggaatgaaattaagaaaaagctcagttaacttgatccaaagctctgagtaattcttcaccctgcagtaggtttctgctgccttgtataggagcattaacttcacaatcataactggtcagctgtggtaatccactttcatccattgattgccccagcagttctacatgctaaatcagcggacgcgtgggtcgacgatatcccgggaattccggaccgtaccaccc

SEQ ID NO: 313723 - DNA, 598 bp, Homo Sapiens
  misc_feature (18)..(18): n is a, c, g, or t
ccggacagatatctatcnctgcgtatgttaaaagtctttcaaggtacaccagggtgacgatggcacattcagccgtcagctgagcagcactgaacagtgtccgaacgaaccggtaaatctgcttctgctctgggttgtgtttgtcataatctggtggcacttcggatttcgaaagagggtgaagattttcatcaaaaatatctaagagcatccttccatctgggtccctgtttttgatgtgataatatattgcaagagcgacacatttaattgtatacttgaggtttggttgactgactgtgctatcatctaggaaaatggtggagcaggaactgtatttccttgctatttgtcctggaggatgatggttaatgaagagactcttgcgtctctcacgtccgtctgagatttactgaggaatattgtgctggcccgaggatgatctgaaggattgaattccatgttcaaatcgtctatgttctcccggtcgctgatgtgctgcaggttgcagcccgtgtcctcgcggctcaggtccgtgtctggccggtaggactccagccgggagtgggcattcctccggagcttgggactggacgac

SEQ ID NO: 313724 - DNA, 427 bp, Homo Sapiens
ctccttacctttcattgtatttcccaacagttggtctgcctcagactcatatacagagacagaaacagtggtttctaagaaaaacagggcatcgttttccttggtggattccgtgaagtctcccgtactttggagcaagttcacaatggaaactttcatgtcttccatcagacttgtgggggtaaaggacctttgatcagtgaaagcaggtgatctctcattcccatgcgctattagcagggctgtgcccgtgtgtgtttccccttcaggcagccccagagccacctgtgcagcctctgtccaaggctggcctccttccataccctcatggcttacttgtgctgtctgagacatctccgttctcacctgagtctcttcattgtctccaagcttgggggtccttatccggcttacactctctaatttg

SEQ ID NO: 313725 - DNA, 1962 bp, Homo Sapiens
  misc_feature (1442)..(1442): n is a, c, g, or t
  misc_feature (1570)..(1688): n is a, c, g, or t
  misc_feature (1870)..(1870): n is a, c, g, or t
  misc_feature (1944)..(1944): n is a, c, g, or t
  misc_feature (1946)..(1947): n is a, c, g, or t
tgcctctgtcctccgcgcgctgctcagctgaaggcgcacaggattcaattactggacttgtcaactctgccagtgtacgtgccatttctcttccactatgagaggaccgattgtattgcacatttgtctggctttctgtagccttctgcttttcagcgttgccacacaatgtctggccttccccaaaatagaaaggaggagggagatagcacatgttcatgcggaaaaagggcagtccgataagatgaacaccgatgacctagaaaatagctctgttacctcaaagcagactccccaactggtggtctctgaagatccaatgatgatgtcagcagtaccatcggcaacatcattaaataaagcattctcgattaacaaagaaacccagcctggacaagctgggctcatgcaaacagaacgccctggtgtttccacacctactgagtcaggtgtcccctcagctgaagaagtatttggttccagccagccagagagaatatctcctgaaagtggacttgccaaggccatgttaaccattgctatcactgcgactccttctctgactgttgatgaaaaggaggaactccttacaagcactaactttcagcccattgtagaagagatcacagaaaccacaaaaggttttctgaagtatatggataatcaatcatttgcaactgaaagtcaggaaggagttggtttgggacattcaccttcatcctatgtgaatactaaggaaatgctaaccaccaatccaaagactgagaaatttgaagcagacacagaccacaggacaacttcttttcctggtgctgagtccacagcaggcagtgagcctggaagcctcacccctgataaggagaagccttcgcagatgacagctgataacacccaggctgctgccaccaagcaaccactcgaaacttccgagtacaccctgagtgttgagccagaaactgatagtctgctgggagccccagaagtcacagtgagtgtcagcacagctgttccagctgcctctgccttaagtgatgagtgggatgacaccaaattagagagtgtaagccggataaggacccccaagcttggagacaatgaagagactcagacatcatcactcaagagatgacaacagctgttcaagagccagatgccactttatccatggtgacacaagagcaggttgctaccctcgagcttatcagagacagtggcaagactgaggaagaaaaggaggacccctctcctgtgtctgacgttcctggtgttactcagctgtcaagaagatgggagcctctggccactacaatttcaactacagtcgtccctttgtcttttgaagttactcccactgtggaagaacaaatggagacagtcacagggccaaatgaggagttcacaccagttctgggatctccagtgacacctcctggaataatggntgggggaacccagcatttcccctgcactttctgctttggaggcatcctctgagagaagaactgttgttccatctattactcgtgttaatacagctgcctcatatggcctggaccaacttgaatctgannnnnnnnnnnnnnnnnnnnnnnnnnnnnnnnnnnnnnnnnnnnnnnnnnnnnnnnnnnnnnnnnnnnnnnnnnnnnnnnnnnnnnnnnnnnnnnnnnnnnnnnnnnnnnnnnnnnnnngaaaatatttaaacagctgcctgaaatggaaattgaatccaaaacattttgccactggtgtttgaagtggactatcttgtctcaagcctttttattttctcatgaatgtaccttctaaatattgttaaggctacaatggaggaaattttaaattattatatttactatttaacagtgagtgnaaaatttgaaatttagtaaaaagttttcaagaaatttttatagattaataatggagtttaaaaagtcatggcgncnngcatttaacaaggag

SEQ ID NO: 313726 - DNA, 991 bp, Homo Sapiens
cccggaagtgcgcccggagccggcgccgcgggccgagtgtcctggtgaagacctagttcttgccggagacaattccactgcagaagcactttacttaaaaggacttgccaggctggacaatgcccgttgacttggggcaggccctaggcctgctgccatcgctggcgaaggccgaggactcccagttctcagaatcagatgctgcccttcaagaggaactctccagccctgagaccgcacgccagcttttcaggcagttccgttaccaggtgatgtctgggcctcatgagaccttgaagcaacttcggaagctctgtttccagtggctacagccagaggttcacaccaaagagcagatcctagagatcctcatgttggagcagtttctgaccatactgcctggggagatccagatgtgggtgcggaaacagtgtccaggaagtggagaagaggcagtgacccttgtggaaagcttgaagggggacccccagagactgtggcaatggatcagtatccaggttctaggacaggacatcttatcagagaagatggaatctccaagctgccaagtgggggaagtggagccccatcttgaagtggtgcctcaggagttgggacttgagaattcatcctcagggcctggggagcttctgagccacattgtgaaagaggaatctgacacagaagcagaactagccctggctgtcttccagactgtccgactggaggggctgatcagagaccaggacctcggagcctcactgttcccagcagcacctcaggaacagtggagacaactggattccactcggagcaatactgtgatctcatgctggagacctatggggaatttgtggaagagctggcaggaatataccttcatgtcaatgagaagatcccaagacccacctgcataggagatagacacgagaatgacaaggagaacctatatttggagtcacagggaccacgagctcctgctgctttctgt

SEQ ID NO: 313727 - DNA, 739 bp, Homo Sapiens
  misc_feature (72)..(72): n is a, c, g, or t
tttggccaaggttaaacccagaaagggcctttaccggaaaagtgtagcctttttagtgaaaaggtttccccnttgccaaaaagttcaatggattcatcccatgatgatgctatagccaggtggtccactttctgaaatattaaccataggttgttcaaccttcaccgtaggttatgaatggggctccttatatggaaaagagaatggtggctgactgcaaaggcaaggagtccatcttccatagtttgtccccttttacttccatttggtaaaactgggttaggtaggagacaactttatgaccaagaggacaccaagagcttccttggataaaggttaagtggaggtatcttgctttgcccaaacagaggcatattcaagtgaatatggagccaactgacttagaaggaaagggaacgacttggcaagtgtaatctgccagctggttgagtcagacgacacattgagaacgatcttttttggaatcatgtcctcccttcaacccttctcctacaatcatgcactgtctacctcgtcctatttacatggaccctctcctattgccacctctgggtaagaatgcatcactctaggctatgctgctgctccatcaacagtattgacaggtcagtgatggaactatggaaacaaaagccatcaaataacatacactactatttttaggagtcaaagtaatgctctaaggatctggcaaggacatttggccccctgagcttcc

SEQ ID NO: 313728 - DNA, 762 bp, Homo Sapiens
  misc_feature (107)..(107): n is a, c, g, or t
caaaacagcccaaaaatgaggtgaacggtaccatgaaaaattcatgaaatatagtcctgttctatgctctcctgccaacagtcccaacagaaagtgtccagtctatntgctgtttcttggctgatcagacattcatcctttaattccctgatggtcttcctcaatgatttctgaaaacgtctcggtctaaaacattccgtagactttcctttgtatcctctagctcgccgatcacatgatctaatttatgcttaagtttctttggactgtccattacactgtagctatgttcaaaaatgaactgggattggaattcttcaatacatgaggaagcaccaacaagatggtgattgtagttagtggctggaacggttttgagggtgaagttttttctacaatgaagtttttctcttttcccctgtaggtgatatggagaatcaaagatagaaggtatgactccaggtttcagtttaatatttggagcacttctgtcaaaatctgtcttcttaaagtgcctcgaacacaacacatctccttttttaggctcccaaatgccggctgcattcacatcaagtcttttcattgctaatacccatttccttttgatgttttcatctgtggggaatacgtgaaatgtcagtccttttaacttcgaatttggcaagcagcgagaagcacatccaatggcggagcagcatttcaccattttagcaactcataacaaaacgttagcagcgaagactgcgactaacgtcaacgacg

SEQ ID NO: 313729 - DNA, 629 bp, Homo Sapiens
caaacagtacatatgacacaagagagaagagagtgacaaaaccaaaagagatgaatactgaataacttattcccacaacagaaggctacttatttctacaattatcaatcagagcctgacaattcagtgattagataatgtgaaagccatattccctttcacatgtggtactatttcaaaagaaccctggtgacaggatcctgatgggagaccagatctgcttctaaaacctgacagcgtttttgtgttttgtttttatcgcgaggcttggtagatggacagattgaaacatagatggaaacacctaggacttcacttttctggcatgtggggtattttctggggttggcgtggcagtctgacctagtcagaagctccaagaccacgtcatgaatgacaagcaacatagggcgcttggtgtccttctgcctgctcaggccacctccactgcctgcatctgcacctgcagagaactgcgcggctctctggccttcctttgtcttttctttccttgtcatggctgcattgagctgcaaaagcggacacaggcagggaggcagggggaggttcaaaggtaaaggtggcaaacacgagggctccttggactgatacggaagcaggcagtgcat

SEQ ID NO: 313730 - DNA, 1386 bp, Homo Sapiens
ccgttgtttaagattttaataaaggtggggcaaagggttgaattggtcgaaaagtcctcaacgtcctgacgggactcccctgaagccaaggcagtttgagtccattcattattctgtcttggatcttaggcaaagccccgggccccttggagcagcaccagggttcccgacacccccaccgacagggtcgaacgtgcacaggctgggaccacgccggagttcattgagccctcgtgggggagggcagttccagggaccaggaagggattcccgtccagtgtcaggttatccacctcgggcagctcgtcaggctgcggcgccctgttcagtctgttgcagctgagatcgagcactctgagcttggctggcagtcctttaggcacctgttccagcccagcgaacgacagattgagggagttcagggcgctggaccacatgcatctcggagcgctagggtttacggtggcgcgcagcgagttgtggctgaggtctaggctgtggggctgcacacctgccgccgccagtgcggcgcacacgcctgtgggcgtctccattcctgtgttgcgcagcgctagattctggatggccgggaacttgtggggacagagagccgccatcagtccgcgttcgcccagtccaggattgtcagacaggtctaggctggtaagggccgggaaggcgcgaacctgttcgcaggaaaaggcaggcgagtgtgcttgggcaatgctcagtaccttgaggcctggcttgagccactgctgcagctcggcgagccaagaacgccctgtcgcccacgacacgttgcgtaggcgcaagctggaaagtgcaagtcctgtggcttccagaggcagcggaggcatggtgccggttatctttaggtcctcgagcgtcagttccttgaggcgggagtacgctagcacacgcagggcgcctaccagtagctgagcaggaacctgtgcggctcccactgtgagccgccgcacgcggagagccttgaccgtgtcagcatactgccgcgggtcggcgtccgcatcgacgcgctttagaaacggctctaggttgagaccgccggcatggatctccacctctactgcagacacacactggaaggcttcggaccagtcgggctgaggttcggagaagttgcagacgcagcggaaatcttcatcgtccagctcacaaggttctggcgtggtcgcagagacgtgcaccagcggcagcagcagcagcaacaagcaggacgcgcgctccatggtcgataagtcttccgaacctctgagctccggacaggctctggaagtgctttagcttctttcctacacagcggcacccgccggcttccaggcttcacacttgtgaactcttcggctgcctctgacagttttt

SEQ ID NO: 313731 - DNA, 432 bp, Homo Sapiens
ctggtacctgtggattccaagtggctaggccacttctatgggggcgactgctacctgctgctctacacctacctcatcggcgagaagcagcattacctgctctacgtttggcagggcagccaggccagccaagatgttacagcatcagcttatcaagccgtcatcctggaccagaagtacaatggtgaaccagtccagatccgggtcccaatgggcaaggagccacctcatcttatgtccatcttcaagggacgcatggtggtctaccagggaggcacctcccgaactaacaacttggagaccgggccctccacacggctgttccaggtccagggaactggcgccaacaacaccaaggcctttgaggtcccagcgcgggccaatttcctcaattccaatgatgtctttgtcctcgacccagtcttgctgctt

SEQ ID NO: 313732 - DNA, 1591 bp, Homo Sapiens
ccgcagccgggattttgagatcatcagtgatactaaggtggatgccaaccagagaagctgctacccctacatcatctccaaccggtggctgagcatcggagtggagttcgtggggaactgcgtggtgctctttgctgcactatttgccgtcatcgggaggagcagcctgaacccggggctggtgggcctttctgtgtcctactccttgcaggtgacatttgctctgaactggatgatacgaatgatgtcagatttggaatctaacatcgtggctgtggagagggtcaaggagtactccaagacagagacagaggcgccctgggtggtggaaggcagccgccctcccgaaggttggcccccacgtggggaggtggagttccggaattattctgtgcgctaccggccgggcctagacctggtgctgagagacctgagtctgcatgtgcacggtggcgagaaggtggggatcgtgggccgcactggggctggcaagtcttccatgaccctttgcctgttccgcatcctggaggcggcaaagggtgaaatccgcattgatggcctcaatgtggcagacatcggcctccatgacctgcgctctcagctgaccatcatcccgcaggaccccatcctgttctcggggaccctgcgcatgaacctggaccccttcggcagctactcagaggaggacatttggtgggctttggagctgtcccacctgcacacgtttgtgagctcccagccggcaggcctggacttccagtgctcagagggcggggagaatctcagcgtgggccagaggcagctcgtgtgcctggcccgagccctgctccgcaagagccgcatcctggttttagacgaggccacagctgccatcgacctggagactgacaacctcatccaggctaccatccgcacccagtttgatacctgcactgtcctgaccatcgcacaccggcttaacactatcatggactacaccagggtcctggtcctggacaaaggagtagtagctgaatttgattctccagccaacctcattgcagctagaggcatcttctacgggatggccagagatgctggacttgcctaaaatatattcctgagatttcctcctggcctttcctggttttcatcaggaaggaaatgacaccaaatatgtccgcagaatggacttgatagcaaacactgggggcaccttaagattttgcacctgtaaagtgccttacagggtaactgtgctgaatgctttagatgaggaaatgatccccaagtggtgaatgacacgcctaaggtcacagctagtttgagccagttagactagtccccggtctcccgattcccaactgagtgttatttgcacactgcactgttttcaaataacgattttatgaaatgacctctgtcctccctctgatttttcatattttctaaagtttcgtttctgttttttaataaaaagctttttcctcctggaacagaagacagctgctgggtcaggccacccctaggaactcagtcctgtactctggggtgctgcctgaatccattaaaaatgggagtactgatgaaataaaactacatggtcaacagt

SEQ ID NO: 313733 - DNA, 2449 bp, Homo Sapiens
ttaacagctacgtcagggttacagcctcagatccattggacactttaagctctgagggggccttgtcaccaggaggcgtggcctccctcttgaggcttcctcgaggctgtggggagcaaaccatgatctacttggctccgacactggctgcttcccgctacctggacaagacagagcagtggagcacactgcctcccgagaccaaggaccacgccgtggatctgatccagaaaggctacatgcggatccagcagtttcggaaggcggatggttcctatgcggcttggttgtcacgggacagcagcacctggctcacagcctttgtgttgaaggtcctgagtttggcccaggagcaggtaggaggctcgcctgagaaactgcaggagacatctaactggcttctgtcccagcagcaggctgacggctcgttccaggacctctctccagtgatacataggagcatgcaggggggtttggtgggcaatgatgagactgtggcactcacagcctttgtgaccatcgcccttcatcatgggctggccgtcttccaggatgagggtgcagagccattgaagcagagagtggaagcctccatctcaaaggcaagctcatttttgggggagaaagcaagtgctgggctcctgggtgcccacgcagctgccatcacggcctatgccctgacactgaccaaggcgcctgtggacctgctcggtgttgcccacaacaacctcatggcaatggcccaggagactggagataacctgtactggggctcagtcactggttctcagagcaatgccgtgtcgcccaccccggctcctcgcaacccatccgaccccatgccccagggcccagccctgtggattgaaaccacagcctacgccctgctgcacctcctgcttcacgagggcaaagcagagatggcagaccaggctgcggcctgcctcacccgtcagggcagcttccaagggggattccgcagtacccaagacacggtgattgccctggatgccctgtctgcctactggattgcctcccacaccactgaggagaggggtctcaatgtgactctcagctccacaggccggaatgggttcaagtcccacgcgctgcagctgaacaaccgccagattcgcggcctggaggaggagctgcagttttccttgggcagcaagatcaatgtgaaggtgggaggaaacagcaaaggaaccctgaaggtccttcgtacctacaatgtcctggacatgaagaacacgacctgccaggacctacagatagaagtgacagtcaaaggccacgtcgagtacacgatggaagcaaacgaggactatgaggactatgagtacgatgagcttccagccaaggatgacccagatgcccctctgcagcccgtgacacccctgcagctgtttgagggtcggaggaaccgccgcaggagggaggcgcccaaggtggtggaggagcaggagtccagggtgcactacaccgtgtgcatctggcggaacggcaaggtggggctgtctggcatggccatcgcggacgtcaccctcctgagtggattccacgccctgcgtgctgacctggagaagctgacctccctctctgaccgttacgtgagtcactttgagaccgaggggccccacgtcctgctgtattttgactcggtccccacctcccgggagtgcgtgggctttgaggctgtgcaggaagtgccggtggggctggtgcagccggccagcgcaaccctgtacgactactacaaccccgagcgcagatgttctgtgttttacggggcaccaagtaagagcagactcttggccaccttgtgttctgctgaagtctgccagtgtgctgaggggaagtgccctcgccagcgtcgcgccctggagcggggtctgcaggacgaggatggctacaggatgaagtttgcctgctactacccccgtgtggagtacggcttccaggttaaggttctccgagaagacagcagagctgctttccgcctctttgagaccaagatcacccaagtcctgcacttcaccaaggatgtcaaggccgctgctaatcagatgcgcaacttcctggttcgagcctcctggccccttcgcttggaacctgggaaagaatatttgatcatgggtctggatggggccacctatgacctcgagggacacccccagtacctgctggactcgaatagctggatcgaggagatgccctctgaacgcctgtgccggagcacccgccagcgggcagcctgtgcccagctcaacgacttcctccaggagtatggcactcaggggtgccaggtgtgagggctgccctcccacctccgctgggaggaacctgaacctgggaaccatgaagctggaagcactgctgtgtccgctttcatgaacacagcctgggaccagggcatattaaaggcttttggcagcaaagtgtcgcc

SEQ ID NO: 313734 - DNA, 830 bp, Homo Sapiens
  misc_feature (13)..(13): n is a, c, g, or t
  misc_feature (24)..(24): n is a, c, g, or t
  misc_feature (33)..(33): n is a, c, g, or t
  misc_feature (42)..(42): n is a, c, g, or t
  misc_feature (70)..(70): n is a, c, g, or t
  misc_feature (87)..(87): n is a, c, g, or t
  misc_feature (99)..(99): n is a, c, g, or t
  misc_feature (113)..(113): n is a, c, g, or t
  misc_feature (134)..(134): n is a, c, g, or t
caggacttggttnatcttgttctnaaaaaaagncggaaaaanaactctgctgtcttctcggaaaaccttnaccctggaaaccctaanagggttaagaanaaggggaaaagttnagttaactttgaaggctgaanagggtaggaagttgttgtcaagagcaaacaggctgcgtgcatgacctgtaagaggagcaggctacacccagagagaccaaaacagccggtccccgagggagggtcaagccagggcctcggtgggaagactgaccgtactccacacgggggtagtagcaggcaaacttcatcctgtagccatcctcgtcctgcagaccccgctccagggcgcgacgctggcgagggcacttcccctcagcacactggcagacttcagcagaacacaaggtggccaagagtctgctcttacttggtgccccgtaaaacacagaacatctgcgctctggagaacagagaggagttagtgcacaggcccctccattctgcctcctcagtcccagggagccccagggctctctgccccctcactaccccggtgtccattgtcccataggagagaaggccaataggaagcaaacaaaaacaggccaaggaaacccagtacagggggctgcagggcccagggagtgggtccctcatctctcctccccacgcttggccaggtccccacctcccgggagtgcgtgggctttgaggctgtgcaggaagtgccggtggggctggtgcagccggccagcgcaaccctgtacgactactacaaccccggtgagcactgcaggacaccctgaaattcaggagaactttggcataggtgcc

SEQ ID NO: 313735 - DNA, 483 bp, Homo Sapiens
  misc_feature (16)..(16): n is a, c, g, or t
  misc_feature (65)..(65): n is a, c, g, or t
  misc_feature (112)..(112): n is a, c, g, or t
  misc_feature (131)..(131): n is a, c, g, or t
  misc_feature (441)..(441): n is a, c, g, or t
  misc_feature (456)..(456): n is a, c, g, or t
aaggcaacccctcaanaccctgcacccctgaatgcccataactcctggaggaaattcgtttgaanctgggcaacaggcctgccgctggcgggtgctccggccacaggcgttncagagggccatctcctcgnatccagctattcgagtccagcaggtactgggggtgtccctcgaggtcataggtggccccatccagacccatgatcaaatattctttcccaggttccaagcgaaggcggcaggaggctcgaaccaggaagttgcgcatctgattagcagcggccttgacatccttggctgcggggatgacgtgcgcaaaagtggtcagaggggaagagaaggtgcagggtgagcccaggctggggactctgtgtagatcctctcattccaccttcgccacccccatggagaggtgccactgcctccctatttaatgccaanccaaggcttctgacnagccaaggggattttcacacttccagt

SEQ ID NO: 313736 - DNA, 536 bp, Homo Sapiens
  misc_feature (313)..(313): n is a, c, g, or t
  misc_feature (356)..(356): n is a, c, g, or t
  misc_feature (402)..(402): n is a, c, g, or t
  misc_feature (409)..(409): n is a, c, g, or t
  misc_feature (417)..(417): n is a, c, g, or t
  misc_feature (438)..(438): n is a, c, g, or t
  misc_feature (461)..(461): n is a, c, g, or t
  misc_feature (471)..(471): n is a, c, g, or t
  misc_feature (506)..(506): n is a, c, g, or t
  misc_feature (524)..(524): n is a, c, g, or t
cacaacaacctcatggcaatggccacggagactggagataacctgtacttggggctcagtcactggttctcagagcaatgccgtgtcgcccaccccggctcctcgcaacccatccgaccccatgccccaggccccagccctgtggattgaaaccacagcctacgccctgctgcacctcctgcttcacgagggcaaagcagagatggcagaccaggctgcggctgccttcacccgtcagcaagcttccaagggggattccgcagttacccaagacacggtgatttgccctgggatgccctgtcttgccttactnggatttgccttcccacaccacttgagggagagggggtcttaantgttgattcttcagctttccacaggccgggattgggtttcaagttncccacgnggttgcancttgaacaaccgccagatttngcgggcttgggaggaaggagttncattttttcntttggggcagcaagttcaattttgaaaggttgggnaggaaaacagcaaaaggnaccttgaaaggt

SEQ ID NO: 313737 - DNA, 1072 bp, Homo Sapiens
  misc_feature (426)..(426): n is a, c, g, or t
  misc_feature (445)..(447): n is a, c, g, or t
  misc_feature (450)..(450): n is a, c, g, or t
  misc_feature (452)..(452): n is a, c, g, or t
  misc_feature (455)..(456): n is a, c, g, or t
  misc_feature (460)..(533): n is a, c, g, or t
accgcgggtgtattccactccgacggggtcgggggggtggtggtgttcgcaatgccgcgcgcgcaggggttgttgaaaatccctttattcgcccaagtgccctggtgtatagtcagtgtcgggtgtgggtgggaggggttatctccttgattggggccgaccaacgcgttaagggaatcttcgagatcaagttcccgggagtgggggtctccaggagggcgcaccttggattgattataggagcgtctcgtgtgatcccccgggggcgtttgttccctgggaggggaatccagaactcccattcccgaggtcgatgcggaccgtgcgggaagcccgccagggccgctttttctcttggtgtgaaggccgagcggtccgccagggacaggttttctaaggttttcgggggagggccgtggccgcccnacgtggttggggcggcgcnnnccntnttnntggnnnnnnnnnnnnnnnnnnnnnnnnnnnnnnnnnnnnnnnnnnnnnnnnnnnnnnnnnnnnnnnnnnnnnnnnnnagggctttcctttaatgtatcttcaaaatcattctggggccaagttacatcataaaacattttattacatataaggactgaaacaggatttttcttaactgtaacatggtccacaaatgtaaatgcaaaacccccatggtggttgcaggagcaagtctagttgagacaggtcaggacgaaagcataaaagatgagtaactgaatggcatcccgggtcctgtagccacgccctccagatcgccgccgcaaaggacctggaacctcaggggcccactgtatgccatgaagaaggcgcagtcgctgcctcaaccaagccaggctccgccgggcccgttcctatcctgagggtcgaagggggaagggactcagccaaagccgcggcctcccagggcttgggcctccgcgacagccgggacgctgtgggttcgccgtggatcgccgcgatgtggcgctccaggcccgggagttcctggccctgctggaccagctgcaggagctgcgccagggtaaccgaagctgaggcagaggccggggccgag

SEQ ID NO: 313738 - DNA, 521 bp, Homo Sapiens
tgtaggaatacggcacgaggtggttttcaacttgtactccgtggccagcccccagttgccagggctcgacggcagccaaggacaccatacctcagtatagttatatataaaagggacacggattgtgacagtttcaccccatttgtttctaaccccgctgcccaggattagggtctgtggtgtgttctgttttgtttttggtttctcccttgtgtcagttctcttctggcccagctgggtggctgtggaagtctgtgaggtggcccaaccacaagcatacctattaagaggcccagagcttccagcccccacttcgctctcctctggccccacatagcctccttctccgttattttccccaccccccagattttttttaaaaggcccacttgccgtaacctcttttggtctattttgcttcccattcagcccaaagtttatatgataaaggtgtttacttttacttcccagtctccaagtgctaacacataaacacatacatgtctgactgttgcagaact

SEQ ID NO: 313739 - DNA, 1506 bp, Homo Sapiens
acagcatggtggtgtagagcttcaggaactgcggaggttgaagctgggcctgctgctgtacttcatcagaaacaccttcagctgctgcaggaagggctctttgtggtagttggggtgcacattatcatagttgggcactacaggcgacaggaacttggggcaggagtaactgaaaagttcttcatagacttgtgggtcacctttctgcatgcgcaacatcttgtccccatatttctcccgcagctggaggtgaatgctctcatcaatacgcatggggtacatcgtgagggcaatggccagcagcgcatgcatctgctcattctgcttgttaatcatctcatacttgtacgtggtcctctggaacatgctcttggtcctctggatgtagaggaggatgttggcgaagacccggatggcatcctggtaacgacgcatcatcaaatatgcaaacccaacataatagtatgtggtgacctggcactctggcacacgggaatacatactcttcttgttcagttcgatgttctccagcaccttgatggcctggtagtaatctcctaacagggagtgcaggcggagaagcccgaccaggctgaagtaaccaagcattttgtagagggagtgccgcccatactccccagccacactctcagggtcacctccgcttgtgtatacctccaactgtcggttgatgttggatttgtctaccagggaatgaaggacattgaggacactatgaacattccagattttgggattggaacgaagaaagtcaatctcctcctctgacttcttggcagtcttacagcggtactgactgaatgactgaaactggtagatgaactcatcgataatatcccagagccactggttgggtagttcaaggggagcaggaccatcggcattaagaatgtagttgaagagattgcagtagttgtaataggattcaaacctctgctccaaggaaggtcccccactgactttggcatatatgtgcctgtagtataattctttgtataaaatcaggaagacagcatcattgccaacctgtggagcaatggcttcagcctcgggccaaggtgtattcttgaagaatctttcagtcagcttggtccagctgttctcatagatgtcctggatctcatacaccttctggtcaatgacatcactggagacacgactggcctgtagctcatacactttctggtcaatcaaatctgagacagttttgtggaaatactggatgaagtttttgatcacctcagggatcacctgataggtttgctgttcatactgacgttcataagcaaggtcctgctttggatctcctgtgtgcatatcatagtcgctgggataagcgtaggggtcataagccgcctcagactcataatcatcagcgggataagacatggctgcctcgcttgcgagcctcgtgccgaattcgccacccaggcccggtcgttaggccgtatagtgggggctgccgggcgggcgaaggaacgaaca

SEQ ID NO: 313740 - DNA, 907 bp, Homo Sapiens
gagtagaagtattgacttttctttcgttccaatcccaaaatctggatgttcatagtgtcctcaatgtccttcattccctggtagacaaatccaacatcaaccgacagttggaggtatacacaagcggaggtgaccctgagagtgtggctggggagtatgggcggcactccctctacaaaatgcttggttacttcagcctggtcgggcttctccgcctgcactccctgttaggagattactaccaggccatcaaggtgctggagaacatcgaactgaacaagaagagtatgtattcccgtgtgccagagtgccaggtcaccacatactattatgttgggtttgcatatttgatgatgcgtcgttaccaggatgccatccgggtcttcgccaacatcctcctctacatccagaggaccaagagcatgttccagaggaccacgtacaagtatgagatgattaacaagcagaatgagcagatgcatgcgctgctggccattgccctcacgatgtaccccatgcgtatttatgagagcattcacctccagctgcgggagaaatatggggacaagatgttgcgcatgcagataggtgacccacaagtctatgaagaacttttcagttactcctgccccaagttcctgtcgcctgtagtgccaactatgataatgtgcaccccactaccacaagagccttcctgcgcagctgaagtgttttctgatgaagacgcagcaggccagctttcaccaccgcaggttcctgagctctcaccacatgctgggccagctgctggcttctgacctacaaacagagtccgatcagcttttgtctcaaccagaagaaacctggtgaccaccggttcaacctgatgggattcaccagctcgagttgcttttcttgaaggcatgcc

SEQ ID NO: 313741 - DNA, 1594 bp, Homo Sapiens
  misc_feature (57)..(102): n is a, c, g, or t
  misc_feature (128)..(140): n is a, c, g, or t
  misc_feature (245)..(261): n is a, c, g, or t
  misc_feature (368)..(368): n is a, c, g, or t
  misc_feature (371)..(372): n is a, c, g, or t
  misc_feature (374)..(375): n is a, c, g, or t
  misc_feature (381)..(385): n is a, c, g, or t
gccccccaaaggtattatgttgtgcgagcgcgagggaattttctgtgggggtggatnnnnnnnnnnnnnnnnnnnnnnnnnnnnnnnnnnnnnnnnnnnnnnctttgggggggggcggggcggtcacnnnnnnnnnnnnnggtgttttgaaaaaaattcttttgctacggggcgccggggccgggccgcccccaccgagttacccccttttcggccggcccgggggagcggcgcggctgtggttnnnnnnnnnnnnnnnnntggtgtaggcgtgcaagcggtggttttatccatgttcggaggggattgttattatgtgagctgccgtcgtgttgggtttttgtgtgcttgtggtgtttttttatgtnttnntnngagttnnnnntttttttctggctccaaagatcctttactgagatccacttgaaacacttcggtccttaacttgttaactgagttgacaggctgatggctgatctaggtaaaggtttcacggtagcaaaaacacttcctgcctataatacatcaaaacaggttcctgaatgtgtgtgaatatcatcaaggtctctgtcccatcttcttcagggttcgattaagctcctcaaatttgtggatctgacggatgaagaaatccccataacgcctggcgaccttggtgtccgcgatgtggatcatgtccttatcaatgtagaagtcaacctctgaggctgactgaaattcaccatccagggctgagataccgctggtccacacgaggttcttcatcttgtgtttgaagacaagaagctggatccggaactcctgctctgtgaggtccaggaagccagccagcttggccacaggcatggtggtgtagagcttcaggaagctgcggatggttgaaagctgggcctgctgctgtacttcatcagaaaacaccttcagctgctgcaggaagggctctttgtggtagttggggtgcacattatcatagttgggcactacaggcgacaggaacttggggcaggagtaactgaaaagttcttcatagacttgtgggtcacctttctgcatgcgcaacatcttgtccccatatttctcccgcagctggaggtgaatgctctcatcaatacgcatggggtacatcgtgagggcaatggccagcagcgcatgcatctgctcattctgcttgttaatcatctcatacttgtacgtggtcctctggaacatgctcttggtcctctggatgtagaggaggatgttggcgaagacccggatggcatcctggtaacgacgcatcatcaaatatgcaaacccaacataatagtatgtggtgacctggcactctggcacacgggaatacatactcttcttgttcagttcgatgttctccagcaccttgatggcctggtagtaatctcctaacagggagtgcaggcggagaagcccgaccaggctgaagtaaccaagcattttgtagagggagtgccgcccatactccccagccacactctcagggtcacctccgcttgtgtatacctccaactgtcggttgatgttggatttgtctacccagggaatcctcgtgccgaattcgccacccaggcctcgctcc

SEQ ID NO: 313742 - DNA, 827 bp, Homo Sapiens
ggacagagtcttgttctgttgcccaggctggagtaactgaaaagttcttcatagacttgtgggtcacctttctgcatgcgcaacatcttgtccccatatttctcccgcagctggaggtgaatgctctcatcgatacgcatggggtacatcgtcgagggcaatggccagcagcgcatgcatctgctcattctgcttgttaatcatctcatacttgtacgtggtcctctggaacatgctcttggtcctctggatgtagaggaggatgttggcgaagacccggatggcatcctgggtaacgacgcatcatcaaatatgcaaacccaacataatagtatgtgggtgacctgggcactctgggcacacgggaatacatactctgtagaaggaggtagaacaaacattcatgagtcccaattcatcctagatagaaccagaggtagaaacaccaagagttttccctgcagaggccctcaactatccagaggaagctctggagtcccagagtttgagagcgggatcttcctattcatcaattaagttgtatgttttgaggaatccatttttttagctgtaaacaagaaggttctggatcaggtaatccctaaaatctccttcagctctaaaatgctatacatctcagttttgttatttttccttgctttttcaattaagtccttttggacagggaagacagaaacacatacatgcacatgagccaaacaccaaataaaaattatctgtaatatttttctgtggttaggaagaacacaacagctaaccatgtatcaatgaacataccatcttagaattacatctttacttaattc

SEQ ID NO: 313743 - DNA, 251 bp, Homo Sapiens
  misc_feature (17)..(17): n is a, c, g, or t
caaaacacaagatgaanaacctccgtgtgggaccagcggtatcctcaagcccctggatggtgaatttcagtcagcctcagaggttgacttctacattgataaggtatgcctgtcccctgggcttggggtcttgtattaagtgttcagtatctttcattcactattgtgggcacatgaagtatatcggggaacaaaaagattcctggccttgtggtgctgccacaaggtgccaggtgtggtggctcatgcca

SEQ ID NO: 313744 - DNA, 405 bp, Homo Sapiens
aaaatgctaagtggattttcccaacagatcataatgacattacagtacatcataaaaatatccttagccagttgtgttttggactggcctggtgcatttgctggttttgatgagcaggatggggcacaggtagtcccaggggtggctgatgtgtgcatctgcgtactggcttgaacagatggcagaaccacagatagatgtagaagtttctccattttgtgtgttctgggagctcatggatattccaggacacaaaaggtggagaagagctttgttcatcctcttagcagataaacgtcctcaaaactgggttggacttactaaagtaaaatgaaaatctaatatttgttatattattttcaaaggtctataataacacactccttagtaacttatgtaatgtta

SEQ ID NO: 313745 - DNA, 840 bp, Homo Sapiens
gagaactagtctcgagttctagccatgtggtcatgctgtgcatactgtttgggggccatacacacgaccaattatttattaaattttcctttcttagcaatagcctctaaatttgcaggcccaccccaaactgttcctcaaacagattttttcgctctaattacttccggtggcccttggatgaattgctttagccattcttgtgcctcttctagagatttagtttcatctgaagactgcaagacctcttcaaccattcctatgtttagagcattttttgaatccagtttaagggccccactcaacactttgagagcttgtctacttccgattatttcctgccgggtggtgccaccccagcttggtattatgcccatctctttgtggacgaatctgatcttactctctggagtcattaacctgaaatcacatgctgtagtaaattctgctcctccacccaatgcccaaccttgaaccagcgcaacacttattaaaggaagtcttgataggccaagaagaatttttcctctttgcttctttacctaggtgcaaagtcaattcatattcctcagaaagcagtaaaaactttccaatccatagttctttttctcatctcctagggatacagaccagttcaccacacattgtactcataaatcttgttaaggtgtttagcatgtacatgcatacggccattccatcctttggagttcttagtgtatttcacagcattcagatcagatcttgaagagaaagtatttttttgccccacggacaatgaggcctttctcctctgtccaattttccaattcaatttctttttccagaagttgtagcacc

SEQ ID NO: 313746 - DNA, 1775 bp, Homo Sapiens
  misc_feature (47)..(55): n is a, c, g, or t
aatcctttactttgaaaagatgttgttgaagtttagttgtttcaggnnnnnnnnnggaatcttatgtaaaaatgcaaatttagttgcaaggatgcttcatgagtccttccaagtgttttaaaactacatcaacagtagttgtttattactagttggaaattccagggcacacaaatgaatgtccaattgtagaatcagttgactttccatgtcatggctaccactgtttagtaggtaatttacaatagaaaactaattattgaaaagaacaaagttccaaatttgtagtgggtagtgaggtacatctttttttaaatgaagggccatttcccatgaattttactccagctgtttggagcagaagaaaatgattgatcataccctttcttgttttcttgttccctgatacctccccacttttgttctttagcagcaacactcagttattttggtaaattatttccaggtaaaacagaacaaaaattgtatgaaaagtaacgccaggaataggttttgtatagaagctctccttttaaacactgctctttggttataagctaagaattattattggaattgacagcaataatttttaagccaaaagtgtatattttagctaaatgttccagattacgcagtaaatacccaagtgagtaattggcaagaaatgaggtaaatgagttcagatattcaaatgattaaaagtaagtctgcatattaatagtagccttcaaagtaattctgatgttcatatttaatatcatttaacatttatacatattagtcactggagctttacttggagtacatccacacgaaaaaccaattatttattaaattttcctttcttagcaatagcctctaaatttgcaggcccaccccaaactgttcctaaaagatctctttcgttctgtaatgcttcctccaaatatagctctctgcctgaacaaacagattttttcaaagctctaattacttccggtggcccttggatgaattgctttagccattcttgtgcctcttctagagatttagtttcatctgaagactgcaagacctcttcaaccattcctatgtttagagcattttttgaatccagtttaagggccccactcaacactttgagagcttgtctacttccgattatttcaactagccgggtggtgccacccccagcttggtattatgcccatctctttgtggacgaatctgatcttactctctggagtcattaacctgaaatcacatgctgtagtaaattctgctcctccacccaatgcccaaccttgagccagcgcaacacttattaaaggaagtctcataaatcttgttaaggtgttttgcatgaacatgcatacggccattccatcctctgagagttcctagtgatttcacagcattcagatcagatcctgaagagaaagtattttttgccccacggacaatgaggcctttcccctctgtccaattttccaattcaattactttttccagaagttgtagcatcataacacctgaaaaggcattcattctacttggattgttcagagtaagaatgccaatgccattgtcttccttctgaaggtcaatggatccaccaggaaactgctgaagtgtttttttcacttcttcctcataaaatccatgggatgtactataaagtgacaatcctgtttgatgtagcaattttgtccttccagacagagaggctgtcttcaaaagacttttcgccatttcttctgcaaagctttcaggcaaaaagctggaaagggtcc

SEQ ID NO: 313747 - DNA, 935 bp, Homo Sapiens
  misc_feature (11)..(11): n is a, c, g, or t
  misc_feature (19)..(19): n is a, c, g, or t
  misc_feature (31)..(31): n is a, c, g, or t
  misc_feature (34)..(34): n is a, c, g, or t
  misc_feature (45)..(45): n is a, c, g, or t
  misc_feature (48)..(48): n is a, c, g, or t
  misc_feature (52)..(52): n is a, c, g, or t
  misc_feature (56)..(57): n is a, c, g, or t
  misc_feature (67)..(67): n is a, c, g, or t
  misc_feature (73)..(73): n is a, c, g, or t
  misc_feature (84)..(84): n is a, c, g, or t
  misc_feature (95)..(95): n is a, c, g, or t
  misc_feature (97)..(97): n is a, c, g, or t
  misc_feature (106)..(106): n is a, c, g, or t
  misc_feature (111)..(111): n is a, c, g, or t
  misc_feature (130)..(130): n is a, c, g, or t
  misc_feature (136)..(136): n is a, c, g, or t
  misc_feature (158)..(158): n is a, c, g, or t
  misc_feature (164)..(165): n is a, c, g, or t
  misc_feature (204)..(204): n is a, c, g, or t
  misc_feature (231)..(231): n is a, c, g, or t
  misc_feature (235)..(235): n is a, c, g, or t
  misc_feature (257)..(257): n is a, c, g, or t
  misc_feature (260)..(260): n is a, c, g, or t
tttggcttaanaattttantgtcaatcccanaantattaatagcnaanaacnaaanngcagtgtttnaaaggngagcttctatncaaaacctatncntggcgttanatatnaaacaattattgttctgtnttacanggaaatcaataaccaaaataantgagtnntgctgctaaagaacaaaaagtggggaggtatcagggaanaagaaaacaagaaagggtatgatcaancatnatcttctgctcaaaacagctgnagnaaaattcatgggaaatggcccttcatttaaaaaaagatgtacctcactacccactacaaatttggaactttgttcttttcaataattagttttctattgtaaatatacctactaaacagtaggtagccatgacatggaaagtcaactgattctacaattggacattcatttgtgtgccctggaatttccaaactagtaataaacaactactgttgatgtagttttaaaccacttgaagggactcatgaagcatcctgcaacataaatttgcatttttacatcagatttcttttttttcctgaaaaacaactaaccttctaacaactatctttcaaaagtaaatgtaataaaaatgcacaacataaaatgtttatgatcccagcaatacactttttaaaaaatgtgaaagtcaaagaattaagttctagttctgactcatcacaagaggtcaaaagtatttgctactgtaacattcaattcacatttgagaatcatggtaaaaataacttgcatttgccttaccatcatgatcctactgttgagttaggaaaatatggttagacagactcacattactttttttcagaggtaaactctagattactgtgtcaacccaatactatttggccatagatgtaaaaactaccaaataaaagtggattttgtggtctccca

SEQ ID NO: 313748 - DNA, 653 bp, Homo Sapiens
  misc_feature (46)..(73): n is a, c, g, or t
  misc_feature (147)..(210): n is a, c, g, or t
  misc_feature (271)..(375): n is a, c, g, or t
ataaaacagtggttccccgggctgcagaattcgggcccaactcccnnnnnnnnnnnnnnnnnnnnnnnnnnnnttcaattgagctgggtaggtggcgcacactgtaatcccagctacacgggagcttaggcagagaatcgcttaacnnnnnnnnnnnnnnnnnnnnnnnnnnnnnnnnnnnnnnnnnnnnnnnnnnnnnnnnnnnnnnnnaaaactgtctcaaaaaatagtaataaaaattttaaaaattagctaggtgtggtggcgcatnnnnnnnnnnnnnnnnnnnnnnnnnnnnnnnnnnnnnnnnnnnnnnnnnnnnnnnnnnnnnnnnnnnnnnnnnnnnnnnnnnnnnnnnnnnnnnnnnnnnnnnnntgataaagtgagaccctgtctctaagaagaacacagaaagagagagaacctagttctgactgcagaatccctggagcacagatgctcgctagcaggagcagcacagccacagaatctgccaagctccagacacaggcagggttatgtgggcagagccagcctcagaggagttagtgtgattttgtcctcctggccttgttctcctggccaccctgcgagacacatggggtcatcccagttcacagatgtgaaaactgtccaggtgcagtggctcacac

SEQ ID NO: 313749 - DNA, 413 bp, Homo Sapiens
tgcacggattgcacgggttgccacctcaagcgcaggcccctgtgcttggtcaggctctgacggccatcgtgggtgcctggcttgaccacattcttacccatgggattcggttcagcctgcagggagcgctgcagctcaaacaagactttggagtggtcagggagttgctggaagaggagcagtggagcctgtcccctgatctccgccagaccctgctcatgctcagcatcttccagcagctggatggggccctgctgtgtctgttgcagcagcccctgcccaagtctcaagtccacaggaggcccccctgttgctgtgcttgtcaggaggtccagaccacgttgcccagcagctgcctcaatagcctggagagcttggagcccccgctccagcctggcatctccagcccagac

SEQ ID NO: 313750 - DNA, 543 bp, Homo Sapiens
ccctagacatttgtgtatggcaccaagaagcaaatactttaatccaacaacagatgagtcatccacttcatggcaagcttgactcatcctctgcaggttggggaaggaacagtttggaagagctttccacaagtacaacacttcaatagacgtcaccgagaactgttcaatctgattgtttttccttttgaagagtttctgaacttctttaaagacaatctgtgccccatccacatcaccagtggctccctgacaaactgcagtcaagtaggcataatagcactgggaccacctggactcattttttagcctctcaaaggaatcaaatgcatccttgaaattgagctctatcatgctgcaccaaccaatttcatacagacagacatgttgaatttctctctggtctactgcaagttccaaagcagtgtggaaagatgtcaaggcactgttgatttgacactctccttgctcaggtggtaagggctcagctcgcacccgccttctcctccagcgttctctcctttgctcaggtgttaagggctc

SEQ ID NO: 313751 - DNA, 1163 bp, Homo Sapiens
  misc_feature (1110)..(1121): n is a, c, g, or t
gaggataaagtaaaacactagaaagcacttttattttttcaaaacacaaatataaatgctatgtcatgatattgttaataattttacaggtacctcatcatgttacccattcagatatgtgcttaaggtaggtgttcctacaggatcttgggttggatgttccgtttgattttattttaaaaataataaatcacaaaactaaaacgtttgagcaaggtcacttaaccctctccccaggtggttagttattattaccatcatcatcctcctcaacatcattattacttttcagctacatgtttaaaagaggagatctttaatatgtcagcttaactgggaaaatgtgtccctggcacaggtggttttcagaagaaaagcccatcttcacaagagctttgtcctctgcttttattttaaagtgcggaccctgggtggggagggacggagcgggtgttccgggtctgtcactgaggaaccaattccctcagagaggccagagcagcatggatgcggacatgcaatctgttttcaaagtcgtagccagagaaatcctcctttgcttgaagaagtagagctctgcctcttcctacagtctctggtttgtctaatagaagacagccaagttcataacaggcatacggctgaacatataaattattctgacgacacaattcatctttaacagctcgctggaagtactgaacagcatcttctgagtttcctagacatttgtgtatggcaccaagaagcaaatactttaatccaacaacagatgagtcatccacttcatggcaagcttgactcatcctctgcaggttggggaaggaacagtttggaagagctttccacaagtacaacacttcaatagacgccaacacacagagcgctttggttggggtttgcttccgaaatcgctctgcctttttcaccgagaactgttcaatctgattgtttttccttttgaagagtttctgaacttctttaaagacaatctgtgccccatccacatcaccagtggctccctgacaaactgtaagaaaccataattatatttcttaagtacaagtcagggaaaatgccataagggatacctgaagtgatgatacttgnnnnnnnnnnnngcaggagcaaatatgtttaaagactattccacaatgggctgg

SEQ ID NO: 313752 - DNA, 611 bp, Homo Sapiens
agcccacaaggaattcaccttgcctgggccctgtgcatccccaggactgggcaggggctggctggagttgttccttcgagctccagcctggcctcagtcccttcttccctcagggccacaccctacgcagccgcccctggggaacccctgggaaccctgaatcaggggccatgacctctccccctctctgctcactcctcaccttcagtgacttcaacgcaggagccatcaagaataaggcccagtcggtgcgagaagtgtttgcccggcagctgatgcaggtgcgcggagtgagtggggagaaggcagcagccctggtggatcgatacagcacccctgccagcctcctggccgcctatgatgcctgtgccacccccaaggaacaagagacactgctgagcaccattaagtgtgggcgtctacagaggtgagggcaagagacggaacctggagggagtggcagggactggggcttgcctaggcccagggcgtgaccctcgctgcctctcttcctgcaggaatctggggcctgctctgagcaggaccttatcccagctctactgcagctacggccccttgacctgagcttatgcccgtgaacagcccccgcc

SEQ ID NO: 313753 - DNA, 928 bp, Homo Sapiens
  misc_feature (880)..(880): n is a, c, g, or t
  misc_feature (882)..(882): n is a, c, g, or t
  misc_feature (886)..(887): n is a, c, g, or t
cccaatgagccctctgcactcctaaggaaattttatttgatgaggaccaactggtgacataaaatagattccaagctgcaatgccccactgactccatctccctgaccagggaattccaaggtgctaagcagctttgtttaaaaaccactggaccagatggtatccctggttcctgcgtatttcacaaggtccccagggctaggcatcttctacatgacacatatggctgcaaacacttagattctaattgtaccccaaaaagatgttgttaaaaggctggctagcctgggttgggggacagacgggggctgggggctgtttcacggcataagctcaggtcaaggggccgtagctgcagtagagctgggataaggtcctgctcagagcaggccccagattcctctgtagacgcccacacttaatggtgctcagcagtgtctcttgttccttgggggtggcacaggcatcataggcggccaggaggctggcaggggtgctgtatcgatccaccagggctgctgccttctccccactcactccgcgcacctgcatcagctgccgggcaaacacttctcgcaccgactgggccttattcttgatggctcctgcgttgaagtcactggtagagtctctgcaggccccgcgtcaagagggccaggtaggcggctgactccttaatgtctctgtgcgcttcacaaaaaagccatcaatgacctgagtgttggtgacagcctgcagcagtgtgctctcaggaaggctgaggttgtggacggaaccatgctcttccaccaggtatacccggcgctccagaccacagcgcttcagtcggaacttctgctcccggaagcggccgtcgatgatgctgctgcaaaggtcatncncaanntgcgctccacaatgtgatccagtaccaactccccagggttt

SEQ ID NO: 313754 - DNA, 346 bp, Homo Sapiens
accccggaaatcttctccaagcttctaaagtctccaatcctgaaaagcgttgttctactcttcacctctgctccagccccataggttatttgagagccatcattaagtttcaccatgttgtctctcacatccagctgtactaccttcttcccagtgaggacagccacaccaccattctcaatatgaggcaggtcctgagcagagacatagaaagaaggtggctggaaatatatgcttctctcccattccactgtttgaatcgcagtgtctttgtgacatttgggtcatctgaaaaccacagttcttttgaaagaggaggtcgcatgtacggcagctcaggatcttc

SEQ ID NO: 313755 - DNA, 1856 bp, Homo Sapiens
ttttttttagaagaatcagaatttatttcactatgtgaacattaagaatttacctacatagttgaaaatattcacaaaggacttgatcattcacactcatacacagagaaagtctgctgaataaaaaaatgctcctttacccattcgacctcctctcaggggctgcagtgggtttgccaattccactgtggggcttcagtcttcatgaatgttgaatagtttggctacttcattgagatcttcatgctgctcaccgtccttaatgatcttccttgctattggcattcggttaaagatgttccatagcacaatccccacgaccactttgtccctgaggtagaagatgacacctttgccgtagtcctccccctggacgggagcctgtggaactgccggggtgctgggaggaatagtaatttctgaggcctcggactctgtctcactctctgatcggataccagttcctgactgctctgtggcagatttggggttgtcttgtgcagttgcttttgcaaaaacaccaactgtgggcaaactactgtccacaagaccaatagcttcatagccaacatcggggcccaaatcactccagaacattgactgatgccagtacggcttagcagctccagtcatattttctccagccaatcttccactcacaacagcgtgatcatggtgctctacccgcctccttcccaactttatatcgtagaagcatgcagcatctcctgccacccagatgttagagcgtgcttgtagctctgcatttacccggaagccaccaaaatctgagtctatttccaggccaccagtcttggccaactcaacattgggctccaggcccacagctgccactatgtggtcagtttctaccttcctgccgtctttcagcttgataagtaacttgccactgctgactccaggattgcacaatagcattgggcatcacctaccccctctcgtctgactccatggtccagttgctgaggtattcggggaggatctttcccatatttcctttctcggggaagagttgaatcacttctgtgcccaaggctcgagcctttctgccaagagcacaggccagttcgctaccaaggaagcccccaccgataatcgtaattgatttgacttcccgtgaaatcttctccaagcttctaaagtctccaatctttctgaaaagcgttgttctactcttcacctctgctccagccctatcaatggcagacagacttcttggagtacctcctgttgcaatcaagcacttttcataggttatttgagagccatcattaagtttcaccatgttgtctctcacatccagctgtactaccttcttcccagtgaggacagccacaccaccattctcaatatgaggcaggtcctgagcagagacatagaaagaaggtggctggaaatatatgcttctctcttttccattccactgtttgaatcgcagtgtctttgtgacatttgggtcatctgaaaaccacagttcttttgaaagaggaggtcgcatgtacggcagctcaggatcttcagatacaatcagtaccctggccccaggatcccgagcccggatggatctggctgcagcaaaagcagctgtgcctccaccaattagcaggaaaggaacatgacttggcgccttgtcttgaggaacttcctctccttctgaagcagataacgcggcctttttctgtttctgttctggtgtcagccctaaccctgaaattctttcattgtatcttttttcgtcctctttcatagtcttgtaggcataggcaccagctcctactgttgcgacgcgtggttcgacgatatcccggaattccggaccgtacagcctgcttttt

SEQ ID NO: 313756 - DNA, 980 bp, Homo Sapiens
  misc_feature (20)..(20): n is a, c, g, or t
  misc_feature (68)..(68): n is a, c, g, or t
  misc_feature (75)..(75): n is a, c, g, or t
  misc_feature (87)..(87): n is a, c, g, or t
  misc_feature (89)..(89): n is a, c, g, or t
ccatgtgtttcaaagcattntgatctttctagcaaggttcataggcctgctgaaggcgtagcctgccntccgcancgaacgttctcnanaagcccattatcattcggtttgatacacctaatatagtttgggttcttggtctgtaggtttttcatcagagtggccacggatgccttgaactgtgagcctgctgtaggaggccttttcaggttgatcttggcgggattcccttcggggaacaaagacttgatgagggcatggctggccttccacatggcttgggacaggtctcgatagagaaggtcattgtttttgtcaacgaatccttccacctggtacagcacctttccagcataatgctggatcctgaagcagctgtgaggcagagacgtgtcattgaggaaccgagagcacttgctcatcctgctttcaaaatgctggtgggtggcacatacttggttcagcttttctaagaaggtctcatcagtgactgtgccaggtctgaggcactcttcatccagcatggccaggattccatttgtgttattttctattaggtcacaaatgatagcattattgaagtagtcaatgtgagtccattctatatcctcccgtatatactcctcctgctcttctttaagagtaagttcaatgaagatttgttgcagcttttcgttacaataattaataatgaactgctcaaagctgttgtcctcgaaaatctcaaagccataaatgtccagaacacccatgaccttctttctcacttttgtttgtgccttaatgctttcattgattcgatttaccaaccatgaaaacaacctgctgtagaggtttttagccagagcatcacgggcataataagcctgagccacattcagtgtagttgaaactttctcctgtttggcctcaactgttcggaaactgaatgctcgttctagaactgattgatccctcgtccgaatcccacccagcctggt

SEQ ID NO: 313757 - DNA, 688 bp, Homo Sapiens
  misc_feature (448)..(448): n is a, c, g, or t
  misc_feature (455)..(455): n is a, c, g, or t
  misc_feature (483)..(483): n is a, c, g, or t
  misc_feature (523)..(523): n is a, c, g, or t
  misc_feature (554)..(554): n is a, c, g, or t
  misc_feature (568)..(568): n is a, c, g, or t
  misc_feature (575)..(575): n is a, c, g, or t
  misc_feature (588)..(588): n is a, c, g, or t
  misc_feature (610)..(610): n is a, c, g, or t
  misc_feature (631)..(631): n is a, c, g, or t
ggcacgagcttactcttaaagaagagcaggaggagtatatacgggaggatatagaatggactcacattgactacttcaataatgctatcatttgtgacctaatagaaaataacacaaatggaatcctggccatgctggatgaagagtgcctcagacctggcacagtcactgatgagaccttcttagaaaagctgaaccaagtatgtgccacccaccagcattttgaaagcaggatgagcaagtgctctcggttcctcaatgacacgtctctgcctcacagctgcttcaggatccagcattatgctggaaaggtgctgtaccaggtggaaggattcgttgacacaatgaccttctctatcgagacctgtcccaagccatgtggaaggccagccatgccctcatcaagtctttgttccccgaagggaatcccgccaagatcaacctgaanaggcctnctacagcaggctcacagttcaaggcatncgtggccactctgatgcctgcagaccaagatctcaactangtctagtgtgcattcaggacctgatgctttngagaacgtcgatcngaggcangtacgcttcagcngctatgacctgctagaagtcanatgttgtaacaacatgctatngaagacagcagttgtgtgaggctttatgatagtcgtgagatctcttgagacagtatt

SEQ ID NO: 313758 - DNA, 659 bp, Homo Sapiens
  misc_feature (11)..(11): n is a, c, g, or t
  misc_feature (114)..(115): n is a, c, g, or t
cagaaaagatntgatcaaatgcaagatgagccagttctgctattaggcagagaccaatagcaaatatgaaagcaagcattgcttatcagaaaagatcttaagtaaaccttgaannttaagtgtgagactgctgactagaatgaatgaagagtagattcagtcatttgtagaagaacttggcaacctcaaagaaatgtgctggaaaacttcagccagccatcaacaacaaatttacaatgtgttcctaatactattcagaaggcagtcaaatcaacaagtataagcaaaaatttaatctcaactagtgagacactggccaacctaggactcattcgcctgcaaagatacacagaatagtatctcttcaatttaaaaatgcgttcagtatatacaataagagggctcagtaagtaagggctggggcacgagacggcttagaaaaaaaggtctcagattatgggttcaaaataacaagaactacaaaagcactttgttcaacgtaaagcacattacagagaatggagactaaaaaattacaatcaaacaaaaactaaaagttattcctgatgttgaaaggaatatgctcaaatctctcaacaaggatcatcacagaaagactaaggatattcataaatggtagtcctagaccaatgcatact

SEQ ID NO: 313759 - DNA, 737 bp, Homo Sapiens
  misc_feature (161)..(161): n is a, c, g, or t
  misc_feature (175)..(176): n is a, c, g, or t
  misc_feature (184)..(184): n is a, c, g, or t
  misc_feature (192)..(193): n is a, c, g, or t
  misc_feature (196)..(203): n is a, c, g, or t
  misc_feature (205)..(206): n is a, c, g, or t
  misc_feature (209)..(210): n is a, c, g, or t
ggggggggaatcccaaggccctagttcatgggccccgggatttccttagggaaacccgcttatggcccatgttcccctttcccttctgggggcccgcggcgccaaacggaatggttttagaaaagctttttggagggccgagggcggccgaccatgttttntttttcatcttttnntttttccntattcgtnncgnnnnnnnntnncanntgtggaagaatacagaaatatgtttaatacttagtatcaaactaaaaagtaatataaaattacaaaacttcttttttttcatgcacaggctttttctggtaaggaccgctgggattgaacagaagcttccggtaaataagggccccgtcggcaagacagcatactgctgtcacaagtgcaaacacccctccaccaactgtcaatgttgtggtttctggtatcagtgccaacacagatacgatgagcatgaatactgttgttaccagtgagttgataatatccagccgcagcatcttcacgtggcctttcacactgaagcagaaggggcgatgttttattttcggctgcacgttatccatcgcgtctgcagacccagcagcagcactttccctcaactcttctcagctggctgcctgagtaggttctgcgaagcgatagcaaccgccaccgcggcggagcaccgccctcccctacttctcgcccggacgcgtgggtcgacgatatcccgaaattccggaccgtaccag

SEQ ID NO: 313760 - DNA, 635 bp, Homo Sapiens
  misc_feature (606)..(606): n is a, c, g, or t
ttttatgtggaagaatacagaaatatgtttaatacttagtatcaaactaaaaagtaatataaaattacaaaacttcttttttttcatgcacaggctttttctggtaaggaccgctgggattgaacagaagcttccggtaaataagggccccgtcggcaagacagcatactgctgtcacaagtgcaaacacccctccaccaactgtcaatgttgtggtttctggtatcagtgccaacacagatacgatgagcatgaatactgttgttaccagtgagttgataatatcaagcaaaggccaaaataaccacttcattaatcgatcaagtctgagtacatataaaagtatgaaaaataagataacggtgacttcaaatccagtgataacaatatatggttcaggggcttgtgcgatgataaaaaaggtcatagatgtcacagttagtgccagccgcagcatcttcacgtggcctttcacactgaagcagaaggggcgatgttttattttcggctgcacgttatccatcgcgtctgcagacccagcagcagcactttccctcaactcttctcagctggctgcctgagtaggttctgcgaagcgatagcaanagccaacctgtcgggagcaccgccctccc

SEQ ID NO: 313761 - DNA, 260 bp, Homo Sapiens
  misc_feature (198)..(198): n is a, c, g, or t
ccaatgcctaaacacagtgccaaaggaaagtcttaagtgttgttccactgttttcaggccaaaatacttagtgttaaagtagaacagtgtattcagaagagctactggagagtgtgatcctagttgttttatcctccagagatagtcttcttcaactcgagagaatattgacccatctggaagtatgcttggttgacnccgtcgcagtattttattcaattcttgctcaaatgtttggtatccaggatcctgtgccgaat

SEQ ID NO: 313762 - DNA, 386 bp, Homo Sapiens
actatttggctctttataaagtttgccaaccctgaatcaagtctagaaggagtataaaggagaagaaacatagtttgttataaattgatagggatttgtacatatatgtgcttgggcctgaccgaatgtcatgaagttgtcagatagtttgcatctatgcttagaatcattgtgaatgggacaggcagaaattcagactgataaagctcaagtactacgaacagtgttgctcctcgtcatgtgatttttctggcatacgactctaggttctgaacaataagcagtgtagtctttgcgttttcacattagtgcattcctagtgaccaacaaggtggggttcttgacaggttctttttactcacatgtgtttgagtgggacattccct

SEQ ID NO: 313763 - DNA, 589 bp, Homo Sapiens
  misc_feature (59)..(59): n is a, c, g, or t
aaagcacaaatgcccacacaactttgacttacaaggtagttctatatagaataaattanaatgttagtaaaatctgtattaaaaactatgtacaattaaatgtggtttacagggtacataattatgcttctcacatcaattatagttgaggacaattatagttgaggttatctaaaagaaagtgtaatacggacatgaccattcataagtaaaaggctggaagtctccctggagtttatgcagatgatttttacttgttattgcacagtgtgaattggtaggggaaaaaataatacactaacccttgggtcccatacaggcaaattaagattgcattcttcaggctgtttcaatagcactggatttggccattccctgtttaaaaagattgtagcacttgataagactattggatattaccatctaaacgtattttgttaaacatacagcatttgtgaacgtgatccttcttcattctgccttcttggtacatacaacgttttaatcctttctgacgacattagactactcaaaatctttttctcctaactatgaaatgaacttaaaccatttggtagccttctcagac

SEQ ID NO: 313764 - DNA, 436 bp, Homo Sapiens
  misc_feature (216)..(316): n is a, c, g, or t
tgagccactgcacctggccctcatttttaaacatattgaatatttaatttagtcccctgaaaattattggttatgttctccaataccataagagtttcatagcatttaactcagaacccaaagaatgctaattgaacattatttatcagcaccctttaatataaagtaaattaaaaccattcattataactgaattggctctcaaaacctcgtgcnnnnnnnnnnnnnnnnnnnnnnnnnnnnnnnnnnnnnnnnnnnnnnnnnnnnnnnnnnnnnnnnnnnnnnnnnnnnnnnnnnnnnnnnnnnnnnnnnnnnnggtaaccatgtcatagctggttcctggtgaaaatggatccggttccaattcccaaacaatacagccggaagcaaaaggggaaagcctgggggcctaatgaggaggctaccccccataacg

SEQ ID NO: 313765 - DNA, 1159 bp, Homo Sapiens
gaaacttaaacatcagttccttgtttctttcctctgagagttggtttgtagtaactggcactcaggaacatgagggaaaaaaattacatattgtgaaatggttgagaagacatgaaaatccacttgattttggtgtttccgaatttcaggcaaagaactgttttttaggttgacagggtggaattcagatacttctatgcattaactgtataatcaaaaggaaattgcttgggataggataaagaactgtggtctctttctttaaaatgtgtagatggaacagtgactatgtttttagtgctagcacgtgcatgtcagctgttacaaatatgtctcaaagaatctctctttgcatatctaggcctgtctcctccctcctacacatttccagctcctgctgcagttattcctacagaagctgccatttaccagccctctgtgattttgaatccacgagcactgcagccctccacagcgtactacccagcaggcactcagctcttcatgaattacacagcgtactatcccagtatgcaaccgaggatggacttatacacacaaatgaccaggccaggactctacccaaagaatgggtttgtatttaagggccccagcagttagaacatcctcagaaaagaagtgtttgaaagatgtatggtgatcttgaaacctccagacacaagaaaacttctagcaaattcaggggaagtttgtctacactcaggctgcagtattttcagcaaacttgattggacaaacgggcctgtgccttatcttttggtggagtgaaaaaatttgagccagtgaagccaaatcgtaacttacagcaagcagcatgcagcatacctggctctttgctgattgcaaataggcatttaaaatgtgaatttggaatcagatgtctccattacttccagttaaagtggcatcataggcgtttcctaagttttaagtcttggataaaaactccaccagtgtctaccatctccaccatgaactctgttaaggaagcttcattttcgtatattcccgctcttttctcttcatttccctgtcttctgcataatcatgccttcttgctaagtaattcaagcataagatcttggaataataaaatcacaatcttaggagaaagaataaaattgttattttcccagtc

SEQ ID NO: 313766 - DNA, 652 bp, Homo Sapiens
  misc_feature (295)..(577): n is a, c, g, or t
  misc_feature (597)..(597): n is a, c, g, or t
aaaggaagggaaggagatgcacagtgagagaaaagagagcatcttagaaacaggaaggcacctggggccacagagcctcttagacctctttgcttctgtgaactcagaaaagtactgactcaaaggtttcaacccctgcctaatacctgctcctttgccttcctccttgcattgtaactgctttctccaggcctttgggctgcccatcaccgtggcccatgtggatggccaaacccacatgttatttggctctgaccggatggagctgctggcgcacctgctgggtaagtaagtnnnnnnnnnnnnnnnnnnnnnnnnnnnnnnnnnnnnnnnnnnnnnnnnnnnnnnnnnnnnnnnnnnnnnnnnnnnnnnnnnnnnnnnnnnnnnnnnnnnnnnnnnnnnnnnnnnnnnnnnnnnnnnnnnnnnnnnnnnnnnnnnnnnnnnnnnnnnnnnnnnnnnnnnnnnnnnnnnnnnnnnnnnnnnnnnnnnnnnnnnnnnnnnnnnnnnnnnnnnnnnnnnnnnnnnnnnnnnnnnnnnnnnnnnnnnnnnnnnnnnnnnnnnnnnnnnnnnnnnnnnntagattcaaccctgagctgnctttgacctcagcttcacacccactatatcagttgaccagggaggggcttagagc

SEQ ID NO: 313767 - DNA, 1117 bp, Homo Sapiens
  misc_feature (559)..(559): n is a, c, g, or t
  misc_feature (564)..(564): n is a, c, g, or t
  misc_feature (599)..(599): n is a, c, g, or t
  misc_feature (650)..(650): n is a, c, g, or t
  misc_feature (652)..(652): n is a, c, g, or t
attttaatgttttgcctgatggcattaggtttattttgtgggaaagcagaattggggctctctgaaaggcacttgtgaggcatagaagtaaaggttgccacatggctaatggtggacgtcttcctggcatccttgggggtaggggaaagacagacagctcccagggccacagaaaatacctctatcagatagagaaatccgagtcccagtgccttatggtggagccaagggttaagcagatggcctgctttttttatacgaagagtttgcttcctccgggcaatcttaaagtctggcattcacggctggaggtatagggcccatccacttctctcccagcaggtgcgccagcagcttccatccggtcagagccaaataacatgtgggtttgggccatccacatgggccacggtgattgggcagcccaaaggctccgtatctgcaggctgcctcagtggtctccttgagctggttcttcacctttggcgttgcgatcttttccagaagtccctgggcttgttctgcagacataccagccttctctgcagccgccaggatntctgnggctcggtgatgtcttcattctgggaagaagagangacagcaggaaggcggtgcggggagaggggtgtgactgggaggacagtagnantcgcgggcgggggcaggatcatgaccctgaaaacgtgcctggggaaggtcagaaagtcatccaaggtcctcccagaggattcccagagcccgacactcacccttgaccagacgcgcatccacagctcccgggacgcctccagcatctcttcaagcatcacagacaagaaatccttggggaagtggatgggaatctggagatggtgtctcaggagctttaagtcatttgccatgtatagtcctttgcggggaagcagacctggaggcttgtttccactgtctttcatgatccctgttatgaggctgggccgcaactgcaggttgatgttccagatattctgataccggcacaggatctcgaagcccagccaggagtagggggacagcacgtcatagaagagctccacggtgcgcggcaggggccccatgctgcaggctccggaagagcagtggcagcaggagctcc

SEQ ID NO: 313768 - DNA, 1225 bp, Homo Sapiens
  misc_feature (649)..(649): n is a, c, g, or t
tgtaaaccagaggaataatactgttttgaatttcctaatttaatcctgaagacaaacttacttttatacccccatccatggctcactggtcaatgttttgagctatttccatttgttctcactcaggctcctatataaccctggcattagttatctcttttcgtctttttaaagcctcttggaacaagtctcctgccttccactctggatgtgttggtgaggtttgtgttggagtttgtggagacttgtgaatactatatccctccccatccaggggttccaacactgagcatctttctctcactgacatctttcagcaaataaattcttcccatatattgtcccttttgcacttcccctttcaaccttgagatatccttttgaggatccttagttccaacttttcagtagtttgtgccctgaatcacagacatcctttcttccccagtaattataaccttttccatgcaataagagacctattgtcttctttacccccaaacgccaactgttctcagattctcttatgagtgcagttggggtggagccaggacactcaccgccaggatgctctgcggctcggtgatgtcttcattctgggaagaagagaagacagcaggaaggcggtgcggggagaggcggtgtgacntgggaggacagtaggatcgcccgggcgggggcaggatcatgaccctgaaaacgtgcctggggaaggtcagaaagtcatccaaggtcctcccagaggattcccagagccccacactcacccttgaccagacgcgcatccacagctcccgggacgctttctccagcatctctggatgctccaagttcacggcggtgaggaaacgcatggcagacaaacttcctttttcaagcatcacagacaagaaatccttggggaagtggatgggaatctggagatggtgtctcaggagctttaagtcatttgccatgtatagtcctttgcggggaagcagacctggaggcttgtttccactgtctttcatgatccctgttatgaggctgggccgcaactgcaggttgatgttccagatattctgataccggcacaggatctcgaagcccagccaggagtagggggacagcacgtcatagaagagctccacggtgcgcggcaggggccccatgctgcaggctccggaagagcagtggcagcaggagctccttttcccggaacccggcagaggctgccctcgtgccg

SEQ ID NO: 313769 - DNA, 809 bp, Homo Sapiens
  misc_feature (47)..(47): n is a, c, g, or t
aatacggaaggagtttgctttccttccggggccaattttaaaagttntgggcatttcccgggctggaggtaatagggcccattccactttttttcccaggcaggtgcgcccagcagctccatcccggtcagagcccaaataaccatgtgggtttggccatcccacatgggcccacggtgatgggcagcccaaaggctccgtatctgcaggctgcctcagtggtctccttgagctggttcttcacctttggcgttgcgatcttttccagaagtccctgggcttgttctgcagacataccagccttctctgcagccgccaggatgctctgcggctcggtgatgtcttcattccttgaccagacgcgcatccacagctcccgggacgctttctccagcatctctggatgctccaagttcacggcggtgaggaaacgcatggcagacaaacttcctttttcaagcatcacagacaagaaatccttggggaagtggatgggaatctggagatggtgtctcaggagctttaagtcatttgccatgtatagtcctttgcggggaagcagacctggaggcttgtttccactgtctttcatgatccctgttatgaggctgggccgcaactgcaggttgatgttccagatattctgataccggcacaggatctcgaagcccagccaggagtagggggacagcacgtcatagaagagctccacggtgcgcggcaggggccccatgctgcaggctccggaagagcagtggcagcaggagctccttttcccggaacccggcagaggctgcccagcttctccc

SEQ ID NO: 313770 - DNA, 570 bp, Homo Sapiens
  misc_feature (27)..(27): n is a, c, g, or t
gcgccgcttctaaacatagtggatccnccgggctgcaggaattcggcacaagcagagtttcagttttgcaaaaattttatatatcttaacacaatttaaaaacaaaaaccttctgaaatacagtaaaactgcaaactgtattgagtgctgtcacttaccacagggtgctatgagaaataaaacctaacaagtttaaagtggaaaaaataatttttaagttgctgaagtcatcccagtgaacactaatgaaggcttaaacgaatattggcagccagcaagaacaaacaagccagatttgagcgatagagtcagcagttcttataaaaagaagggatttaagaagagtcagaaatgtgttttgaggtttttttgcctgggggttggggagctgaagctggtactgaaaaagagaataagtgagttctgaaaagaattaaatttaatctttgacattctaagtataaatatgttagtagaacatcctcttaaaaatgtgaggccagcagtagaaatttggaatttgataacatttaagagttgcacaggccaggtatggtggttcctgcttat

SEQ ID NO: 313771 - DNA, 364 bp, Homo Sapiens
  misc_feature (168)..(190): n is a, c, g, or t
aagacagcgacagacaccactaacctgatcacctatcagagcttcaaagatccttaatttccccaaagacttcttgagcaaaaggactacatgtgttcctgtcattggggacggtcttctaaacattccttgagttcctccacatgagtttttaatatcaatctagcnnnnnnnnnnnnnnnnnnnnnnnggcctctgaaagtcaggatactgaccacctcggcatctctccccttccccactgcttgcgaatgccagtgctggcctgttccttaaacgcaccagctcatcccccagagcagcctgtgtgctctgccagcgactgctacttctcctccggcctcagctcaacatcccaccgcgg

SEQ ID NO: 313772 - DNA, 1189 bp, Homo Sapiens
  misc_feature (220)..(290): n is a, c, g, or t
  misc_feature (993)..(1015): n is a, c, g, or t
cgattttattaaattgatttggacatactgtaggtcaaataatattttctgaagataacaattatggactttaaagctcgacataaaattagtagcttcaaaagggttagtcatattccccagcaacagcatgataaaataattcaactatgtagaaatatagaactctaggactagctggaaactcggaaatcatttagcctaatgttctcattttgannnnnnnnnnnnnnnnnnnnnnnnnnnnnnnnnnnnnnnnnnnnnnnnnnnnnnnnnnnnnnnnnnnnnnnaaaccaatttttcctaaaactaaaattctatcaatgatatttcaactggctatcaactaaaagtctaggcttttctctaatgctccacgctattgtgacatgaaagagtgataagacactacagtaaatcgtacttgtggaattcaggcctggaaggggctttggcaaataactaagccagccctctctttgtaaaaaggaggaaaagtatctgaagtgacttaccaaaggcttgttagcagagatgtctggattaaaatccagatattacaaattcacccccaaatcccatctctagtttcatggcccacccactaaatcatgtgctccttttaaatctcctttatgcgctgaggttttaggttatacaaaaaccccttccagtcaaacagaaaaattaaattcaaatatggaaagaaaatcaaactttcagtattttcgtgactatcttgagtagttcattttccaacctcttagacagctgacagacaccactaacctgatcacctatttcagagcttcaaagatccttaatttccccaaagacttcctgagcaaaaggactacatgtgggaaatcaatgaaaacaggaatgagaagagaaagttaaaaattggttgcttttgttcctgtcattggggacttttggtcttctaaacattccttgagttcctccacatgagtttttaatatcaatctagcnnnnnnnnnnnnnnnnnnnnnnnggcctctgaaagtcaggatactgaccacctcggcatctctccccttccccactgcttgcgaatgccagtgctggcctgttccttaaacgcaccagctcatcccccagagcagcctgtgtgctctgccagcgactgctacttctcctccggcctcagctcaacatcccaccgcgg

SEQ ID NO: 313773 - DNA, 1007 bp, Homo Sapiens
  misc_feature (306)..(316): n is a, c, g, or t
  misc_feature (427)..(442): n is a, c, g, or t
  misc_feature (485)..(541): n is a, c, g, or t
cccccccgcgttttccccccgtggggggaatatattttatcccccagaggggccaagggtggtggaaaccccggcgaggaaattagggttatcccaagaccggtttggggaagggggtttccctgtgggggcggaaaaggtttatgtgatttcccacccattttttccataaaatttcacggggcggggggttaaatttaaatataagggtctcgttgggttccccgtttaaagaatccccataatagccccccaggaaccccttttggattttttctaaaaccccttggtttccccgccgggggnnnnnnnnnnnggtgggaattccaaccctattttttgcccgggttttcttgggaaaaggtttgtccccttctcttttccttttggggccccgcgcccaaagaaaggttttaaaaaatttttnnnnnnnnnnnnnnnncgcaaaagttttttcttaaccttatggggtcgtgtcggttcgnnnnnnnnnnnnnnnnnnnnnnnnnnnnnnnnnnnnnnnnnnnnnnnnnnnnnnnnnccctgttataaagcgattttattaaattgatttggacatactgtaggtcaaataatattttctgaagataacaattatggactttaaagctcgacataaaattagtagcttcaaaagggttagtcatattccccagcaacagcatgataaaataattcaactatgtagaaatatagaactctaggactagctggaaactcggaaatcatttagcctaatgttctcattttgagagaaaactagactcaaagattaagcgatttgcccaagctcacatacctaatagtaataaagctagaaatcaaaccaatttttcctaaaactaaaattctatcaatggatatttcaactggctatcaactaaaagtctaggcttttctctaatgctccacgctattgtgacatgaaagagtgataagacactacagtaaatcgtactatgtggaattcaggccggaaggggctt

SEQ ID NO: 313774 - DNA, 1029 bp, Homo Sapiens
  misc_feature (38)..(38): n is a, c, g, or t
  misc_feature (77)..(77): n is a, c, g, or t
  misc_feature (80)..(80): n is a, c, g, or t
  misc_feature (260)..(334): n is a, c, g, or t
taggttcatgaaaaactgaaggggacatttaggaaganggccgccatttgatgctgtcaaggtaactacacccagancanagggcatgataaaagtcctaatgcacatagagaacaaagccctgctcagaaatgctgtcctcaccagcagaaaaggactctgtggagaaagctgtcccttacataaaaaagaagaccatactgggttagcacttgatatccaagaagtgaaatggtcgttttcgaagattaacagtttgnnnnnnnnnnnnnnnnnnnnnnnnnnnnnnnnnnnnnnnnnnnnnnnnnnnnnnnnnnnnnnnnnnnnnnnnnnncccaggacctgttacatcacgaatatgcatcaacagccacaaacagcacgctctcagatcttccccttcacttagcttagaaccgtgtcagcaggtaattggaaaaacatggaccatttcgctgataattttaaacttggatgtactggcaagaaagggctctatattttgaaatcagccaaagccaggggaacctgggaacctgtgaaatgggggtaccccactccaattagtacatggttttctctggggtggtggtggttttgttttttctgcagtgcagcattttacagagtgtccagttgaattcaaataatagatgataaatcaacaagggtcctgaatgtgataactacatcacacctccccagggaaggaggcccatctctggccttttgccaaatcagcgtgaatggagaaaaagccaaagtgttatcagaggcccaggcctctggaaggaagcagaaaagtgccccagggctgggatgcgaactgggacaattgtatgtgaaacctgtcctgtcctgattagattagagaaccctctgccccgcttctcccccacaaggctgcattccctctccttttttctttgacctcagaatctaagttgtttacctaaggctgtggaccagagaccaccacagtgctaacacccacctggagtatttctaacttgacaatgtgcggcacct

SEQ ID NO: 313775 - DNA, 995 bp, Homo Sapiens
  misc_feature (850)..(946): n is a, c, g, or t
  misc_feature (973)..(973): n is a, c, g, or t
gctaaagtcacctgcctcttacctacctcagagggaatttggtgaaagccaaactgttaaatcttcgaaaaacgaccattttcacttcttggatatcaagtgctaacccagtatgttcttctttttttatgtaagggacagctttctccacagagtcctttctgctggtgaggacagcatttctgagcagggctttgttctctatgtgcattaggacttttatcatgcccttgttctgtgtgtagttacttgacagcatcaaatgccgcctcttcctaatgtccttcaagttttcatgaactagcaaccccaccttccaccatggttctgggcgcctgattttgctgtgactcccagacccagccactgtttctgccaccctgtaacaggccattaaagctccccagtgttcagcctccttcactcccttgttttccctgttgctatgtgtcacctgggccctacagacaggggcacacgcttatggatgtgtgtaccattgaggtgagaatgggtagatggaacggagaccatcaagccacacccccttcttaaaactggggacatgagcctgagcagaaagggtgaagaagagccatgggacacagagttgacccagccagggggaaagcccagctctctttaaaccagctaagccattccagtctcctgtgaagccaaaagggaccaggaaccgtgcaaaggaaactggaaacttttccccgctgggtagagcatgttgctgatactcttctgttttcaagggaaacaatcacattgtttgattccaaatggtaaatgaacactcactattcttcaggcttcagtaaatctttttttcttccttcannnnnnnnnnnnnnnnnnnnnnnnnnnnnnnnnnnnnnnnnnnnnnnnnnnnnnnnnnnnnnnnnnnnnnnnnnnnnnnnnnnnnnnnnnnnnnnnnataggtttagctccaagccaagcaagnttgtgttttggataggaggggg

SEQ ID NO: 313776 - DNA, 1440 bp, Homo Sapiens
cagttccagttccactttctttttatttaaataaccgaagcaacagccgtggcacagcagagggaagctgggttggggcgtgtgagaggtggcagcagtgtggcctgatggggggactaggtcacagtgaactccccacacgcctgtcaggttcagcagtcatggccataggattgggagcactacggaggagccatcagttagtgatgtctctccaagtcccagagaccttagggacgggagctaagtcagctccctcaagtagcagggccagggcatcccagtcaggggtcacggggcccggaaggcattttcagcagccccagcggctgcattggcagctgcggttcgccccgcagggttggagaagacaccagcagccaattcttgctgggccttctgaaagctggcacctgtgcggcggtataaggagtggatccgtttcagcatgacaattcctagcacagcaatgccagtgaagagcagggcgaccagcagcatgagcacggatactgctgtgttgcccttcggcaccaccagagcagagatccagccactgaatccccaacctgggataccaatggcctggaggacaaagagcacatcctggacgaagaaaatgaagaagaaaacgaagaaattgaatgaactgtcactccggaaagccttatacatggggcggtaccagcagacaaaggagcagggagtgaaaaggaggacccagaggatagaaagcccaaagcctgcgccattgttggtttccacacagaagctggccaggcaggcgaggaagttcaggagaagagccagcgtgctgcacatccagaggtagtacatggtggatacagtcttctgaaattcttgggggatctccatggagatgtcctggaaaaagcagggctgaactggacaaaaagaaggtagagggggccaattgttctgtcgagtagctgtgccccccagggcagcatgctgcagctctcgctcccttcggtccaactcctctgccttccggttgagctcctcctgtttcttcagcagctcagctgtggctgctgcagctgaggcctgagtgctgtatgagccatagttcttaggttctgtggggctgagctttctcgagggctgcaaggagggagctgagggtggaggcaatggggcaggggctggaggctcataggctggtggtggctgaaaggggttgtcaagctcgctgggctcggcgaacgggtttccgccgtctctgctctgagccatgtttgcaactgcggcctccgcggccctctgccctccacgcccctgccgcagcagtggcggtagcggtagccctcagagtccacttcactcgcctcagttcgccccgcttctctgtgcacggattggttccaccgaccggaagggccacaaggatccccgcagcagccgtgggttgcgcctgcg

SEQ ID NO: 313777 - DNA, 1229 bp, Homo Sapiens
  misc_feature (1050)..(1050): n is a, c, g, or t
  misc_feature (1071)..(1071): n is a, c, g, or t
  misc_feature (1089)..(1089): n is a, c, g, or t
  misc_feature (1135)..(1135): n is a, c, g, or t
  misc_feature (1144)..(1144): n is a, c, g, or t
  misc_feature (1148)..(1148): n is a, c, g, or t
  misc_feature (1150)..(1150): n is a, c, g, or t
  misc_feature (1155)..(1156): n is a, c, g, or t
  misc_feature (1169)..(1169): n is a, c, g, or t
  misc_feature (1179)..(1179): n is a, c, g, or t
  misc_feature (1197)..(1198): n is a, c, g, or t
  misc_feature (1220)..(1220): n is a, c, g, or t
gcaggcgcaacccactggctgctgcggggatccttgtggcccttccggtcggtggaaccaatccgtgcacagagaagcggggcgaactgaggcgagtgaagtggactctgagggctaccgctaccgccactgctgcggcaggggcgtggagggcagagggccgcggaggccgcagttgcaaacatggctcagagcagagacggcggaaacccgttcgccgagcccagcgagcttgacaacccctttcaggacccagctgtgatccagcaccgacccagccggcagtatgccacgcttgacgtctacaacccttttgagacccgggagccaccaccagcctatgagcctccagcccctgccccattgcctccaccctcagctccctccttgcagccctcgagaaagctcagccccacagaacctaagaactatggctcatacagcactcaggcctcagctgcagcagccacagctgagctgctgaagaaacaggaggagctcaaccggaaggcagaggagttggaccgaagggagcgagagctgcagcatgctgccctggggggcacagctactcgacagaacaattggccccctctaccttctttttgtccagttcagccctgctttttccaggacatctccatggagatcccccaagaatttcagaagactgtatccaccatgtactacctctggatgtgcagcacgctggctcttctcctgaacttcctcgcctgcctggccagcttctgtgtggaaaccaacaatggcgcaggctttgggctttctatcctctgggtcctccttttcactccctgctcctttgtctgctggtaccgccccatgttataaggctttccggagtgacagttcatttcaatttcttcggttttcttcttcattttcttcgtccaggatgtgctctttgtcctccaggccattggtatcccagtggctggatctctgctctggtggtgccgaaggcaacacagcagtatccgtgctcatgctgctggtcgcctgctcttcactggcattgctgtgctaggnattgtcatgctgaaacggatncactccttataccgcggncaggtgcagctttcagaaggccagcaagatttgctgctggtgtctntccaacctngcgngngaccnngctcgccaatcancgctgggctntgaaatgcttcgggcccnntaccctgattggatcctgcctnctcttaagg

SEQ ID NO: 313778 - DNA, 807 bp, Homo Sapiens
  misc_feature (548)..(763): n is a, c, g, or t
ttattttattatgcacaaaaggattaacaaataatatgtccactcatgtgcctaccacccagtttaagaagcataaccttatcatcccttatagtggtccctttgtgccctgaattgcagtctccccttcccccaccagaaataaccagcattttgaattttgaacttcttgcttttagcttttctctatacatttactacatatgtatgcacctccaccagcatactgtgtagttttacatggttttatattttatgtaaacagcgttacagcgtttgtattctgcagattcctttccttgttcaccaaatgtgagatttatccatgcggatggatgacatgccagttattaataatacactttcatcccacgatgtaaatatgccaccatttagttacacattcttctccaaatgggtatttggtgttcctaggtttttgctattaaaaacaacgagcctctgaacttttttgtacattttcacaagcaagattttctaggatttagcctagaaaatcctgctggggctgggtgtggtggctcatnnnnnnnnnnnnnnnnnnnnnnnnnnnnnnnnnnnnnnnnnnnnnnnnnnnnnnnnnnnnnnnnnnnnnnnnnnnnnnnnnnnnnnnnnnnnnnnnnnnnnnnnnnnnnnnnnnnnnnnnnnnnnnnnnnnnnnnnnnnnnnnnnnnnnnnnnnnnnnnnnnnnnnnnnnnnnnnnnnnnnnnnnnnnnnnnnnnnnnnnnnnnnnnnnnnnnnnnatcgcaccactgcactctagcctgggtgacagagcgagactcca

SEQ ID NO: 313779 - DNA, 225 bp, Homo Sapiens
gatatttaatattccaaggtataaacatgactgatttcgctgatacctacagaataaaaaaaataaagctgcctatgtaaaaaattaaagaatatcctcaattagatatttttgttccccaatctctttcagacagatctatgaaataatatagaatatactatcaatatgttctttcatatgaagtgaaaaaaatgggatttaagtagtgagataatttctatt

SEQ ID NO: 313780 - DNA, 573 bp, Homo Sapiens
  misc_feature (126)..(126): n is a, c, g, or t
  misc_feature (406)..(440): n is a, c, g, or t
gactgctaatgtttgtgaaaggcaaattgtaaacttctatggtttaacttcaccagaagggtaaagggctccccacctgccaccttgttctataaaaaaagtatactctgattactagaatggatnttttaaaattcaattcaaagattcaataactatcaacatttctaaacactgatttctccttttctctttttccaaatgttttttaatatcctgcaggtaataacactgatttttctaatactcagaaacatctacttagcagttgtgatactaatttgcaaaatgtaataatgttatacaaatataagatactactaaatacatagtagaaataattgcatgattcctgatatttatattcaaggtataaacatgactgatttcgctgatactacagaannnnnnnnnnnnnnnnnnnnnnnnnnnnnnnnnnnaatatctcaattagatatttttgttcccaatctctttcagacagatctatgaaataatatagaatatactatcaatatgttctttcatatgaagtgaaaaaaatgggatttaagtagtgagataatttctatt

SEQ ID NO: 313781 - DNA, 565 bp, Homo Sapiens
  misc_feature (19)..(19): n is a, c, g, or t
  misc_feature (25)..(25): n is a, c, g, or t
  misc_feature (46)..(46): n is a, c, g, or t
  misc_feature (58)..(58): n is a, c, g, or t
  misc_feature (70)..(70): n is a, c, g, or t
aaaatggttccaaaatgtnatgtgnccctatatttgggaccaatgnaaaaaatgccancctgttaaaaanccaggaccaatactgatgattccagatgatgtttactgatgaaaaattaataaacagatgacaatttattgaagcaattttatggcattcttacaggcattaccttatttaaagttcagaactaccaaggaaaagagtaacttgtggcaggcgtgagaggttccgaggcacaaaaggaagataggcattcaaggaacaccaggatagaagacccagagtaggagaagagagaggaagaggagtccgccagatgggatgctggaaaccgcgggatagctcggtggagagagggcgcttcctgctccgcaagcctccctacgacggcaggcctacccggtcctgctcctgccggctctgggcatctggtttctgccgctccatctccagggagatggtggccaggctgtgccgtgtacccatcaacttctctgacagcgccatcttctcagactccttctcgtgccgaattcctcagcccgggggatccactagttc

SEQ ID NO: 313782 - DNA, 1704 bp, Homo Sapiens
  misc_feature (408)..(419): n is a, c, g, or t
  misc_feature (539)..(554): n is a, c, g, or t
gggcccagccctaaagaggccttttcccccttcccggggggagcgggcttcaatagaggaattttgtctcatgttgggccacacttcccccctgtcgggttgttttgttttttatagagtgtattgccaagtggcccctttgggttaataatgcgcctgtgtatcagctatatcccggttttttcaaaaatataagcacgacaatatgttgtattgtccatgggcctgtgacatttgtgtggaagggcgaattggcggggtctcttcattattccccccacgcccaaacagggtttttttccacaccattatatttggggcagccgcggtttttccgtgctcatgttttttaaaacggggctcatctatatttaagggccccttcataaagggggcattgggtcccgnnnnnnnnnnnngagtgtcttgattgtacacatgctgcgcgtttccgctttttcgagattgatccctctccacaccacaggatgattaggacttcagtctcgaccctttgttaaaggagatcatgtttcagnnnnnnnnnnnnnnnncacgatggtatctcccctgccagggaagtataagcaggttttattaagatgccagggcgacagcaccaggtcagagctgcggcaggaacgccaggcagggggactgagtgtgcgggagagggcggggcacaggacagctgagggaggggtcagggtgggtgcgcggtgacggggagggcaaaggtggtgtcagtatcttcattttgaggattggggttcagagcacttctggggtgtcagctcctccttgtccccccgtggggctccgtaggactggaaagaggacatgaagagctctgacagagagcagcagaaactctggaactgtttccagagggcctgcactgcatggaccagggccaccaccttctccttcacccaggccagaaccccgtgccaccaggtctgcagccgctgcagcatggcctggaaccatctcatgaccttgtcacaaaagctctccccaggctcctcggttgcgggatcctcaacatccgggacaggggatctgttgcctcggcaccgtaatccatctctttctttttcaagtagaggagtgagctctgggtgctgctcctcataataagccgccactgtctccaggtagccctctttgaagtcgtcctccagctctgccaggctcgacatcacctgtccacgtcctgattctgcattttgcattttatcataaaatctttctatggcctggtgcattcgggccttcagcttcttcatgtcatcagagaggaccttcgggaagcacatggcggccaaaagttcaaggagccaaggcctgctggcgaggaacaggtgtgaggaaaagaaagtgtctcagagaagcaccctcctccccagagggtcctcaccttcggggaccccaactccccacctgagatgacccagctccactgagacagtcaccttctgcacgcagtcttcctggcacaaagactcagctggttttatggggaaagtggggggtagtgggcggagcctctctcagggcaggaggccttgctgagtgcgtcagtaacagacagatgcagagtcagagacagagacaggcagagatggagacttatccgagagagacagaggtctggggcccctgggaggaatgagggtccgtccctggctgggcacgtgctcc

SEQ ID NO: 313783 - DNA, 929 bp, Homo Sapiens
gcaaagacgagcgccaccaaccacaccacacaccatcacgaggcctgggtggcgaattcggcacgaggctcaggtggggagttggggtccccgaaggtgaggaccctctggggaggagggtgcttctctgagacactttcttttcctcacacctgttcctcgccagcaggccttggctccttgaacttttggccgccatgtgcttcccgaaggtcctctctgatgacatgaagaagctgaaggcccgaatggtaatgctcctccctacttctgctcaggggttgggggcctggggtctccgcgtgtgacactgaggacactgtgggacacctgggaccctggagggacaaggatccggccctttggtgccaactctgcctctcttcacagcaccaggccatagaaagattttatgataaaatgcaaaatgcagaatcaggacgtggacaggtgatgtcgagcctggcagagctggaggacgacttcaaagagggctacctggagacagtggcggcttattatgaggagcagcacccagagctcactcctctacttgaaaaagaaagagatggattacggtgccgaggcaacagatcccctgtcccggatgttgaggatcccgcaaccgaggagcctgggggagagcttttgtgacaaggtcatgagatggttccaggccatgctgcagcggctgcagacctggtggcacgggggtctggccctggtgaaagagaaggtgggggccctggtccatggcgtgccagccctctgggaacagttccagagtttctgctggtctctggcagagctcttcctggcctcctttccagtcctaacgagcccccccggggggggacaaggagggagctgaaccccccgaaagtggtccgtgacccccaatccccccaaaatggaagaatacttggacc

SEQ ID NO: 313784 - DNA, 817 bp, Homo Sapiens
gttttattagaatgccagggggccagccacagttcaagagctgcggcaggaacgccaaggcagggggactgagttttcgggaagagggcggggcacaggaccagctgagggagggggttaggggtgggttccgcggtgacggggagggcaaaggtgggtgttcagtatcttcattttgaggattgggtttcagagcacttctggggtgtcagctcctcccttgtcccccccgtggggctccgtaggactggaaagaggacatgaagagctctgacagagagcagcagaaactctggaactgtttccagagggcctgcactgcatggaccagggccaccaccttctccttcacccaggccagaaccccgtgccaccaggtctgcagccgctgcagcatggcctggaaccatctcatgaccttgtcacaaaagctctccccaggctcctcggttgcgggatcctcaacatccgggacaggggatctgttgcctcggcaccgtaatccatctctttctttttcaagtagaggagtgagctctgggtgctgctcctcataataagccgccactgtctccaggtagccctctttgaagtcgtcctccagctctgccaggctcgacatcacctgtccacgtcctgattctgcattttgcattttatcataaaatctttctatggcctggtgcattcgggccttcagcttcttcatgtcatcagagaggaccttcgggaagcacatggcggccaaaagttcaaggagccaaggcctgagatgacccagctccactgagacagtcaccttctgcacgcagtcccc

SEQ ID NO: 313785 - DNA, 923 bp, Homo Sapiens
  misc_feature (443)..(452): n is a, c, g, or t
ggcatttttcttgcgttgcttttatttaatcacttccccagcccttccatcgccttttttgaggataagaaacccaaagttcccagagattaacttgcccaagatcacttggcctggatttgagcctgaggctcagactccaaaacccacactcaatttgctacatctcccaggggtggggccaaggcagctgtgagcaaaaggagaagtatcagcttctcaagggcctagggtttgttggaagggcaaggcaagggcaaagggggatacagaacaagggggcaagtaccagtgcctgggatggacccatccattcaggcagggggtgtggggtgtcccctgtgcttagaaaccacctagcatcatagctgcaacagcactttattgggatctgagtctacagttcacatagggaggtgaaagccgtgggagaagcaggggtnnnnnnnnnnaaaggggggggacttcaccccctagggacagctgcttccaaacctaacaaaaccccagggtaagtcctcgtgctgggcctcgagccagcaactctagtcaaatcccaaggcaccggtcagcatgtgggtcaaggggcccactatggggacatacactcaagaggatgaaagctctttagcttcagaatcagattgccttccccagaccccaccccaaaacaggctcctctcccatctcccccttcacagtgacaaaacacaagcccacatcccagggcctgtctacataaagtgacatcagtgcagggctggtgattttgctctactgtgtgaaagatatctgaggacaccaaacaagccaggacagagtccaccctccaggagttagataacgctgggatcttgggctgggccaggccaaggccattccctgtggggcagggtgtcagccccggtggtggtggtggtggc

SEQ ID NO: 313786 - DNA, 1004 bp, Homo Sapiens
  misc_feature (23)..(24): n is a, c, g, or t
  misc_feature (36)..(36): n is a, c, g, or t
  misc_feature (52)..(52): n is a, c, g, or t
  misc_feature (61)..(61): n is a, c, g, or t
  misc_feature (85)..(85): n is a, c, g, or t
  misc_feature (95)..(95): n is a, c, g, or t
  misc_feature (953)..(953): n is a, c, g, or t
ggaggaagggactaagacaccannaccccctccatnctgggcaggctgtgangcccaagtnccggcaccccaggctgctcagtgngacgagtgtncccgcaggaggcctgactttctttggcacagagctagccccagtgcggcaacaggagctggcctctctgctaagaacatacttggcacggctgccctgggctgggcagctgaccaaggagctacccctctcacctgctttctttggtgaggatggcatcttccgtcatgaccgcctccgcttccgggattttgtggatgccctggaggacagcttggaggaggtggctgtgcaacagacaggtgatgatgatgaagtagatgactttgaggacttcatcttcagccacttctttggagacaaagcactgaagaagaggtcagggaagaaggacaagcactcacagagcccaagagctgcggggcccagggaggggcacagccatagccaccaccaccaccaccggggctgacaccctgccccacagggaatggccttggcctggcccagcccaagatcccagcgttatctaactcctggagggtggactctgtcctggcttgtttggtgtcctcagatatctttcacacagtagagcaaaatcaccagccctgcactgatgtcactttatgtagaaaaaggccttagctggacctgtgttgccgtctatgcaaatgcatgcaaatactccaggccctgggatgtgggcttgtgttttgtcactgtgaagggggagatgggagaggagcctgttttggggtggggtctggggaaggcaatctgattctgaagctaaagagctttcatcctcttgagtgtatgtccccatagtgggccccttgacccacatgctgaccggtgccttgggatttgactagagttgctggctcgaggcccagcacgaggacttacccctggnggttttgttaggtttggaagcagctgtccctagggggtgaagtcccccccc

SEQ ID NO: 313787 - DNA, 415 bp, Homo Sapiens
tcggcacgaggtaatgtgcttactgtagtgctaaggatataataagtcttcattattgctatattaagacctgttttagctgactccccagtggttggcaaattttgtattgtgccagttagagaggaagaataagttcatgatccctttatttaactcagagattgtgagaggattctccttttgggtcttattgttttcaaaggtgataaagatagactgccctttaaatttaagacctatactctacttctttttatattagagggcttgttctattctagcctttggctatatttttctcttcttactcagagttattcaatgggctttttctttttagtcttctcaggtctgaagatccatatagtcattcatgtggtaggtaatgtgtttttaataattaagctttttc

SEQ ID NO: 313788 - DNA, 878 bp, Homo Sapiens
  misc_feature (20)..(20): n is a, c, g, or t
  misc_feature (78)..(78): n is a, c, g, or t
ccatggtataaatatggaanttcttggccattccaatatggccattggtttagggaaaaaatatgtaggtccactggngaaaaatgttaatttttttccccactgtgaattgccttctgtttgccttatcttttccagatagtctttaaagttgggccaatattcaggcagctatttagaacagtttctcagagtggatttgggtctctcatttgagaaagatttgtagtttcaatgaagtttgtatattatatgaatttaagtaaaatcgatctgagttaagttttgggcaaatgttaatcagaaagataatctacatccctactttatgtagtcattttggagaaatggaggaaaaggaaaataacaggactttttatagctgtgataaaatgggtaaagaaaaacctccatttaaataaggaaggggagacaaaatggaaggtcctggccttaagtcaaattccagatagtgctttcaatatccaaagcttaggccttgtttacttatagtaatgctatatttttctttatctgccctgtgatttcgcttcgtgtccttcaaagtttttttattgtaattttaaaggaaaaaaacaatgtatttttatttgataactaggcaaaatcatttgccattttttatttcataaatatttatttttctatctcatacaatgatcagttttactttaaaaattctgcatttctcttgcctctcatgtacttcatccagttatttattattgtaaaatgttaactggagatactgcattcagtcggaccacttaacacttaccaggaatgttagtgtttcatctgttttagtaagtgaccatgtaagctatcaccttgtgatagctaattccatctttttg

SEQ ID NO: 313789 - DNA, 369 bp, Homo Sapiens
tgactcttggttgacttgcattttccctgaaattttcctgtgtcaaattttctttctgaatcaatgataggtttcctagtcccttcattccctttacttttcaggtaacattacttggttaatattcagttacttctcttcaagaagtactggctacttccattactattcagagcacagctgatgtgacgcccaggggcttccgtggggcagggatcggggtaggagggatcctgcatgagaggctgtgggtcagacaccagtcagcagggggcgcggtggagcacccattgatttctaggccctcttgggctagcatcgtttcttcccgagtgggagctcaggcccagtgtggatctgaccgtcttc

SEQ ID NO: 313790 - DNA, 637 bp, Homo Sapiens
cccccgggctgcaggaattcggcacgagtgagcttaggccgctggttttggtgatttttgtctgattgcaatgtctggacgtggtaagcaaggaggcaaagctcgcgccaaagcgaaatcccgctcttctcgcgctggtctccagttcccggtgggccgagtgcaccgcctgcttcgtaaaggcaactacgcagagcgggttggggcaggcgcgccggtgtacctggcggcggtgttagagtacctgaccgccgagatcctggagctggccgggaacgcggctcgcgacaacaagaagactcgcatcatcccgcgccacttgcagctggccattcgcaacgacgaggagctcaacctgctatgccgggtgaccattgctcagggcggcgtgctttctaacatccaggccgtgcttctgcctaagaagaccgagagtcaccacaaggccaagggcaagtgatttgacaggttgcaaaagcttctcatttcagagagatgccaggatcctaagtgcctgccaaacttaccaattctaaggaataagtggatggatggcattactgattcctacattactgattgattctgcatccgcttgttttattacattctacatcatgtgtggggagatggaggt

SEQ ID NO: 313791 - DNA, 570 bp, Homo Sapiens
tggccagcattaacaactcttttatttgaaaacgtgggtggctctgaaaagagccttttgagttcacaggtgccccttcgagacgcgggccgggctgggcccacttgggccggacgtcagcctcacttgccctttgccttgtggtgactctccgtcttcttagggagcagtacggcctggatgttaggcaagacgccgccctgggcgatggtgactttgcccagcagcttgttcagttcctcgtcgttgcggatggccagctggaggtgacgagggatgatgcgcgtcttcttgttgtcccgagccgcgttgcccgccagctccaggatctcggcggtcagatactcgaggaccgcagccatgtagacgggcgcgccggcccccactcgctccgcgtagttgcctttgcgcagcaagcgatgcactcgccctaccgggaactgaaggccagcgcgggacgagcgcgacttggccttggcgcgggccttgcctccttgcttgccacgaccagacatgacagcgatagtagtcaccgagagaaactcctgcctggcgatcgggaaagtcccc

SEQ ID NO: 313792 - DNA, 817 bp, Homo Sapiens
  misc_feature (601)..(655): n is a, c, g, or t
  misc_feature (741)..(741): n is a, c, g, or t
  misc_feature (781)..(781): n is a, c, g, or t
  misc_feature (789)..(789): n is a, c, g, or t
  misc_feature (794)..(794): n is a, c, g, or t
gattttgtttgttttctcgtgagcttaggccgctggttttggtgatttttgtctgattgcaatgtctggacgtggtaagcaaggaggcaaagctcgcgccaaagcgaaatcccgctcttctcgcgctggtctccagttcccggtgggccgagtgcaccgcctgctccgtaaaggcaactacgcagagcgggttggggcaggcgcgccggtgtacctggcggcggtgttagagtacctgaccgccgagatcctggagctggccggcaacgcggctcgcgacaacaagaagactcgcatcatcccgcgccacttgcagctggccatccgcaacgacgaggagctcaacaaactgctaggccgggtgaccattgctcagggcggcgtccttcctaacatccaggccgtgcttctgcctaagaagaccgagagtcaccacaaggccaagggcaagtgatttgacaggtatctgagctcccggaaacgctatcaaacccaaaggctcttttcagagcccccctaccgtttcaaaggaagagctaacctcactgcttgtaggtagaaggaaaaaaggcactaagaaaatgtcttctgaggctgatcnnnnnnnnnnnnnnnnnnnnnnnnnnnnnnnnnnnnnnnnnnnnnnnnnnnnnnnctcatttcagagagatgccaggatcctaagtgcctgccaaacttaccaatttctaaggaataacgtggatggatggcattactganttcctacattactgattgattctgcaatccgcaaatttgntttatttnaaaancaattctacatccatgttgtggg

SEQ ID NO: 313793 - DNA, 1704 bp, Homo Sapiens
  misc_feature (473)..(653): n is a, c, g, or t
  misc_feature (675)..(723): n is a, c, g, or t
tcacccccccgttcgtctgtcttcgccttcggcggcgccaccccgtagttcctccgtctccgccagtcccccggcccgggcggcggcgcgccctctcccgccattcggcgcccgcttcgccccgcctcagccgcgggtggcggcacggcggtgagagttccctcatagccgccctccgtcggcggtcggcccccgcccgggaccgcttaggtggctcgcagtttcccataggctcgctcgtctcatcgtcaccggcgcgcccgagcctccgtagccgccgctcacgcgggtcgcccgagggggccgcgcgcgctctaagtagctctcgtgatggaatgacgtggtcaccggctcgccggtgccgttcttattagactccctctactccctatcccgccgggcgtcccggggctgggcgctggggggcgcgtgccacgctgggggcgcaggacgcgccgcggccttcccccgtnnnnnnnnnnnnnnnnnnnnnnnnnnnnnnnnnnnnnnnnnnnnnnnnnnnnnnnnnnnnnnnnnnnnnnnnnnnnnnnnnnnnnnnnnnnnnnnnnnnnnnnnnnnnnnnnnnnnnnnnnnnnnnnnnnnnnnnnnnnnnnnnnnnnnnnnnnnnnnnnnnnnnnnnnnnnnnnnnnnnnagggcgcacttgtcgagggccnnnnnnnnnnnnnnnnnnnnnnnnnnnnnnnnnnnnnnnnnnnnnnnnngccccgggtcagagcggaaggccaagtcttccagaaggtggtgcgccctccccccacccctttagcgactcgggatggggcggctgagtcacgaccgccgaggcgggcaggtgcggcgccgccggcctccccccggcaggctcgggtcttccgcgccccggaggtccccgaagagcgcccaagccgcatccggaaggcccgacccctaccggagggcggacggcggccaggccagggcccgaggccgacgcgccaggcggtgcgggacgggagcgggggcgggcggggactcgagcccggccggcgaagccgggcgaggggaggggaggggaagggagccgcggcccgcttgccccgcagtctgaagcggctcagctctttccatgagggcggtggtggcccttaaaagggcctttgtggtggcatggggaggcctggcggccggccgcgtcgcgggccttcttagtactcgtgggaggcgtgggtggccttcttgccgcccgagggcgccttcggccccgcggtggcgctggtcttcttgggcagcagcacggcctggatgttgggcaggacgcctccctgggcgatcgtcacgccgcccagcagcttgttgagctcctcgtcgttgcggatggccagctgcaggtggcgggggatgattcgcgtcttcttgttgtcgcgggccgcattgcccgccagctccaggatctcagcggtgaggtactccagcactgccgccaggtacactggcgcgccggcgccaacgcgctcggcgtagtggcccttccgcagcagccggtgtacacggcccactgggaactggaggccggcgcgcgacgagcgcgacttggccttggcgcgggccttgccgccagtcttgccgcggcccgacatgctagcgaggtagaccggtgaagcacgacggctcgaacactagaacagacgcccgccgatccctgagttccggaccggtaccagcct

SEQ ID NO: 313794 - DNA, 1161 bp, Homo Sapiens
  misc_feature (65)..(154): n is a, c, g, or t
  misc_feature (1027)..(1036): n is a, c, g, or t
tcggacgaggccgccctcatggaaagagctgagccgcttcagactgcggggcaagcgggccgcgnnnnnnnnnnnnnnnnnnnnnnnnnnnnnnnnnnnnnnnnnnnnnnnnnnnnnnnnnnnnnnnnnnnnnnnnnnnnnnnnnnnnnnnnnngtcggcctcgggccctgccctgtccgccgtccgccctccggtagggttcgggccttccggatgcggcttgggcgctcttcggggacctccgtggcgcggaagacccgagcctgccggggggaggccggcggcgccgcacctgcccgcctcggcgttcgtgactcagccgccccatcccgagtcgctaaggggctgcggggaggccgcagcaccttctggaagacttggccttccgctctgacgcagggccgaggtgggcagtccaggccgagaggccggcggccctgaaggtgagtgaggccctcggcagctgcagccgggggtgtctggtacccccccggcgtggtgcttagcccaggactttcagacgcggccgctggccgggaggctttggtgggagagacgcgatcgccgatttcggtctggcgccccttctgcggccgggacccaggcctttcacatcagctctccctccatcttcattcataggtctgcgctggggccgggacgaagcacttggtaacaggcacatcttcctcccgagtgactgcctcctaggaggacatttaggggagggcagaggcctgcagtttggcttcacggctggctatgtggacagcaagagtcgttttcgcggaagccgactggcagcccggcctgtcgggccccccgacgccgccccatttcccttccaggaaactcaactcggcaatccaagcacctagataccagcacaagtcggttaatccctggtctggactgagccctccgttggctttctgaactgggaattctgcagcttacccttccacgactagaaccttaggcattgggggagttttacaatggaataatctttattaaaggaatggnnnnnnnnnncctggccaaagccgaaaactcacggctccaaggcatcctattttagggggcctgccaagaggggccgctaccggccccaatgctgcttgaactgcgcccctgatccgcgctttgttctgaggaga

SEQ ID NO: 313795 - DNA, 1076 bp, Homo Sapiens
  misc_feature (64)..(127): n is a, c, g, or t
  misc_feature (159)..(168): n is a, c, g, or t
  misc_feature (223)..(407): n is a, c, g, or t
ttcccttttgggatggacgcataaacccttccacaccccctttctatttttttgaaagaggggnnnnnnnnnnnnnnnnnnnnnnnnnnnnnnnnnnnnnnnnnnnnnnnnnnnnnnnnnnnnnnnnaaaaagagtgggtcccaaattcttttcttccnnnnnnnnnnccccaaaagagagtttttaaaaatttttttggggcgggggggcccacaaaaaaannnnnnnnnnnnnnnnnnnnnnnnnnnnnnnnnnnnnnnnnnnnnnnnnnnnnnnnnnnnnnnnnnnnnnnnnnnnnnnnnnnnnnnnnnnnnnnnnnnnnnnnnnnnnnnnnnnnnnnnnnnnnnnnnnnnnnnnnnnnnnnnnnnnnnnnnnnnnnnnnnnnnnnnnnnnnnnnnnnnnnnnnaacgattttcaccaactttattggctcccgccgggaccctcgccgcccacctccccgctagatgtcaccggccctccatgacatccagcacattcaaaagcattgcgggacgaccatgaaaagggcctttgctgggggagccagctccctgagggcggcgtcagggtcatttgctcttcgtcttctgactctccgtcttcttgggcagcagcacggcctggatgttgggcaggacgccgccctgagcgatggtcactttgcccagcagcttgtttaactcctcgtcgttgcggatggcgagctgcaggtggcggggaattatcctggtcttcttgttgtcacgcgcggcgttgccagccagctccaggatctccgccgtaaggtactccaacaccgccgccaggtacaccggcgccccggcgcacactcgctccgcgtagttccctttgcgcagcagtctgtgcactcggcccaccgggaactgcaggcccgcgcgggaggagcgggatttggcctttgctcgcactttgccgccctgtttcccgcgaccggacatgatcacctctcgcctacaactccagagacggagacaaaccgctctcggcgtccggtaccggaatgcaacgtaccgcacccgaactgcctctacaaactctttacggccgcccc

SEQ ID NO: 313796 - DNA, 1591 bp, Homo Sapiens
  misc_feature (772)..(772): n is a, c, g, or t
  misc_feature (904)..(904): n is a, c, g, or t
  misc_feature (918)..(927): n is a, c, g, or t
  misc_feature (1166)..(1177): n is a, c, g, or t
gggcttgtttttagtctcgcttttcggttgccgttgtcttttttccttgactcggaaatgtccggtcgtggtaagcagggtggcaaggcgcgcgccaaggctaagtcgcgctcgtcgcgcgcggggctgcagttccccgtgggccgcgtgcaccggttgctccgcaagggcaactattcggagcgcgtgggggccggcgctccggtgtatctggccgcggtgctggagtatttgactgccgagatcttggagcttgctggcaacgcggctcgcgacaataagaagacgcgcatcatcccgcgccacctgcagctggccatccgcaacgacgaggagctcaataagcttctgggtcgcgtgaccatcgcgcagggtggtgtcctgcccaacatccaggccgtattgctgcctaagaagacggagagccaccataaggccaagggcaagtgaggccgcccgccgcccccggggcccctttgatggacataaaggctcttttcagagccacctaccatctcgagaaaagagccgcactgttcctgcagttctttatagggcggaggcctgatcaccctatgctcatgaatgagcgcagtggccatggggaagggcgcaacgggaaccgagaccctggggactgattgggctgcatacttgcgaggtgggcaacgtgttgtgttaacaacagggaacccctcgtccacaggtgggccaccccttgctcttgagtcccacccaaaacctctagtagggttttaataacgctcaccgntaaaggtgtcttcataattactagtgacaagttctcttgactctagcaaggctcccgtgtggtcatcaagtacagaaggcaatttcttaaggatttatctgatattaaaagtatttatgatctccaaacgtngaaccctagaaggnnnnnnnnnncccttggtcgggccgccctcggcccctcgaagaagcttttctaaaacccattcctttttgggcgccgccggggcccccgttaagggaaaaggggaaaccatgggacccattaacctggtttttccccctaagagaaaaaaacccctgggggttcacttgagaccgtaaaggggggctcttggggaaattttcctctcccaccccgaaaatatagcgaaaaaaaagccgggccccccgcnnnnnnnnnnnncaaaaaccccgggaaaaccgggttttttcttgggaaaaccaaaaattcccccgacaaaagggggggagaattttccgtggggaggggggctccaattttaaaccgggggggaatcctctttaattccaagaccagggggggaacgccctcaaaaggggcgaagaagcctctcccgaataatactcgggagaattttaaagggggcccccccgggtcccgccctgggggcaccaacttttaaaatttcggacaacaaaaaagaccgtgggttctggcaaaaaaatttccccattataaaaagaggggtttttttcttggggcccgcaagaactattgggggaaagaggccccctttttctcccccaaaaaaagggggggcctgtgtgggattgcgaaaaccccccgcggaaataa

SEQ ID NO: 313797 - DNA, 1132 bp, Homo Sapiens
  misc_feature (22)..(22): n is a, c, g, or t
cggcaaaaacccgaaacaactnaaaaatcggaaagctccctcccaagcccccccctgcccgtgtcttaaacaatcgtcttctttcccaggaaatctgttgtgttgtgtttgtttgcttcgaaattcgtgttgcaagaatctctggctttttgcctccctggacaaaagacttctgccggggcgaaggctgccaggtcctgagggactctggctgccatctgaccaagggctaggaggagcagacagacagcaggtgggccagcccttgggacactcctgccccctgaaccaggactctgtccacttacactctccccagaaggacctcgaggctgggctgagtgcttgccagactggcttgagcagcagaacgttttgttcttactcagaacccctctatgtgtgacacggtgaacgaagggtctgcagtgaactcgagggggtgccgtttggctaaactacccagctcttgttttgccaggggagagacatgtacaagctgcgggcagagctgaatcgctcagagcgggaagagggatttttattttgagagatgttggaagtgaaggagcaaaggccggcagcagggggaaggcacctgggggagaagttgccagctgcattttgatgaggctgcgctgtggtgggttaagtgcccctgtagctccccaggaagtgttcagtcacttgtgtgtcacaccccacagttttggagtcagatttggtattagggatgcagggcggtgccatgcctcaagcggatggatggggcaagggcctgtccccaggggcccgtcgcatccaggtacatggcaaacagatgccgtcattcgggctggagcaggggtcccagggcccggccctccgctggttctcagatcctcggtgctagaaacacaatgcaaaacccacggtctaggccacagtggggaacgcaggggacaaagacatcttgggaaagaagtctccaactcacaggagagatgcagtgtgctcgtgctgaagggtgggctccctccagtcccatcagcgtgtaaaggcatctgagaaaatccaacagccgcttcccctaaccagattgtcgacttcaagtttcttcccagttgttgttctggagtcattaccaggcaga

SEQ ID NO: 313798 - DNA, 629 bp, Homo Sapiens
  misc_feature (464)..(506): n is a, c, g, or t
  misc_feature (550)..(550): n is a, c, g, or t
  misc_feature (565)..(565): n is a, c, g, or t
gttttgcttacttcaggctttaagcagtgcccccaagtaggtaaggtaggtagtgagtaattgcctggtaagtgaggcaccctgagtgaggaatgccaaatacagttgggttctcagcagggagatcatgggcattttgtctgagcaagcttgggttcacattgaggctctgggtactatttgtgtaagttggcaacttcctcctttgctgactcagttttcacatatgaaaaatggaacagtcatacctttcttgtaaaaatgctctaaggcttcagtgaaagactgagagataaaatatttaatgcagtgcctgcatcttataggcatttgagaaatattacctcccagcctcccttgctgcctttcatcttgcttttagaattactggctcttgtgtttgctgaggctttgctgccggatctaacccatagccttagctttgtgattgagcatacaagacnnnnnnnnnnnnnnnnnnnnnnnnnnnnnnnnnnnnnnnnnnnccctccctcacatgtgtttgtttgctggggactacacagtgggnttcttcagcattaanggagggtaagatggttatagacacttctctggttttctttcaatgcctggcagtatgttggctt

SEQ ID NO: 313799 - DNA, 931 bp, Homo Sapiens
aacacaaagggcgaagcctgcagctgagcctggcaaggggcttgcatcccaccttcctgcatccaaaccttccagctgccaagaactgctggtaatcccacaggaaacatcattcgccaagatgctatcccactcatcccccagaatcaaagtggccacttcctccaggcagccttcctcacattccagctgggacagaagtcacagggagcagagagggtggggctagggggacagacacagaaaccccatacaggaacgaggtcccaacagggcagacgatgggggtggaggtgacaaagatgatgcaactatctgctgagagttgatctacaaaacgaccccctcgtgggagcaggcctgggtgagacggcactcccagaagacgggcagggatgcagcagagagccagcagcagggaaagggcacagggcggaggtcaagctctgctggagttgggggagctggttctgctcagcgcagagtccaaaacaagcgcatcttgcccagctatggggtctgaagtcatctggggacaccactctgctctgactggggactatggggcgctcaagccacacaggccacttcatcatgaggggcagcattgttcccacctgggctgtgttcagaacccaggagaaagtggtggctctcctggggtctccggggcctccaccacctcctgtggggtacctaaggacacctcctggtctccctctgtctccaaaacctcctcctctgttttctggggttttggacctcctggatgagctgggtctggtctctgggcaggaggattagctgactccgacagtctagggacaggtgtgggggctgcctcctctggctgggaagaggctggttcacaccctcgtgccgaattcgccacccagcctcgctaccttaaaccgtagtagtactgcacaga

SEQ ID NO: 313800 - DNA, 1127 bp, Homo Sapiens
  misc_feature (1016)..(1016): n is a, c, g, or t
  misc_feature (1018)..(1018): n is a, c, g, or t
  misc_feature (1073)..(1073): n is a, c, g, or t
  misc_feature (1079)..(1079): n is a, c, g, or t
  misc_feature (1081)..(1081): n is a, c, g, or t
  misc_feature (1084)..(1086): n is a, c, g, or t
  misc_feature (1119)..(1119): n is a, c, g, or t
agtgggttaacttggcccaccccagggggaaacctggcgcaacaggggaaacaaccgcgcccgggggggaggcccaatccccaacgaagcggaggaaatctccacaaaaaaaacaagcttgccaaaggtggtctacggggaggaaaaacctttccccaaaaaaggccccccgcggaagttacggtccgggaggggggaggttgcggccaaataaggcaattcttttttccttttctttagaggcgccaaggggggaggggagtccccctacctcggggttgcaaaaactctgggcatggaggggctggggggaattggaggagccttcccccaggagaggcgatccccaaagaaaggcggtccgcaccccctctgggaaggccatccggaagcagtccccgggactgctttggcgttgccgcccacaagtgtctgtcagccattcccggaagaggtcttcatctgtctttagccccagaaactgcccaaggacaacatagcccttgtcaaaacccctttcctccagcttcttgcccaggacttcaccaatcccagccaggctccccactggcttctcccccatgggctctgccacgaagtctcggtgcttttgggaggttgtcatcttgatcagggttaattatttttaagaggagtttcttcctgcaggacctggattttgatcttgccccagaggaaaaacgatcctgcctaacaggtggcgcaagcggggcagtggaaagatgcccagagtccgtagccagggtgcgcggaagctatcactccctctgtgaccttggctgaaccaagacgacactgcctgcctggaacggccacttggcgtggaaagctaaccaaagggtctctctacctacagggcgaagcgcacacctagcgtgcgcacacccgctccccgcccgcggggttcacgccgcgccccagtccgccctcaccgcgcgccgctgcggcccgccccttcccgcggcccggctcccacgcgctgcaccccgcccccncnccgcagcgcggccaagctctcccccagggcccgccacagcgcctgcgacccctcncctccncntcnnncggcaacccctctggcctccaatcagggccctntccgcggc

SEQ ID NO: 313801 - DNA, 938 bp, Homo Sapiens
  misc_feature (28)..(28): n is a, c, g, or t
  misc_feature (56)..(56): n is a, c, g, or t
  misc_feature (166)..(166): n is a, c, g, or t
gaggggggcgcgggccgaaaaaagaganattatagcttgtgtggcacacggtcggntcagctcttttccccgcggtggtcgatggcaatgcaccggtactgggcgccattggtgggtgggcggattatagaccaattttggcgggaatcgggcttgcctttgtttntttttgaaaggccactggcctttattgatctaaaaaactttaccaagggacagtgactgttctgccaaaaaaaggagccaaatggtatcaaccggattgaaagtgagggtgggggtgagggatggggcccgggaatccattcaggaaagctggtaactgtcaccagggaactggcaagggaaaaaggacgggggaggcatgcaagagcgagaatccaaaaaaaagttgaaatggttaggggagaaaactcccaaaagaccccggagtacgtcggaggtgagtacgacaatagcaatcttttccttcgtagaggacaggggaggagtccctactcggctgcaaactctggatgagggctggggattgagagcttcccagagagcatcacaagaaggcgtcgcaccactctcgaaggcatccgaagcagtcccgggactgcttggcgttggcgccacaagtgtctttcagccattcccggaagaggtcttcatctttctttagcaccagaaactggccaaggacaacataggccttgtcaaaacccctttcctccagcttcttgcccaggacttcaccaatcccagccaggctccccactggcttctcccccatgggctctgccacgaagtctcggtgcttttgggaggttgtcatcttgatcaggcttaatccgcaacttcagttcccgtaacggttcctcccgccacccggccgctcctgcggatacctcaagccactagaactttcttccacttccgcttccgggtccccc

SEQ ID NO: 313802 - DNA, 950 bp, Homo Sapiens
  misc_feature (49)..(49): n is a, c, g, or t
  misc_feature (109)..(109): n is a, c, g, or t
  misc_feature (117)..(117): n is a, c, g, or t
  misc_feature (122)..(122): n is a, c, g, or t
  misc_feature (149)..(149): n is a, c, g, or t
aaaagggccacctgggactttttaattgatttctaaaaaaaaccttttnccaaggggccaggtgacctggttttgcccaaaaaaaaggagcccaaaatgggtatccaancgggattnaaaantgagggtggggggtgagggaatggggnccggggaatccatttcaggaaaggttggtaactgtccaccaggggaactggcaagggaaaaaggacgggggaggccatgcaagagcgagaatccaaaaaaaagttgaaatggttaggggagaaaactcccaaaagacccccggagtacgtcggaggtgagtacgacaatagcaatcttttccttcgtagaggacaggggaggagtccctactcggctgcaaactctggatgagggctggggattgagagcttcccagagagcatcacaagaaggcgtcgcaccactctcgaaggcatccgaagcagtcccgggactgcttggcgttggcgccacaagtgtctttcagccattcccggaagaggtcttcatctttctttagcaccagaaactggccaaggacaacataggccttgtcaaaacccctttcctccagcttcttgcccaggacttcaccaatcccagccaggctccccactggcttctcccccatgggctctgccacgaagtctcggtgcttttgggaggttgtcatcttgatcaggcttaatctcaagccactagaactttcttccacttccgcttccgggtcgcttcaagagccgcctttaaaaaagaaacattccacgttgggcacttctagccagttagagctatagagttgaggcgccccggacctcgacggcgtccttagtaggcgctcctttccggtccttcgcgggaagcgctgcgttctaaggtctcgcttctcgcgccgttctgagggagataggcctccagggagaggacttcctttctctccc

SEQ ID NO: 313803 - DNA, 377 bp, Homo Sapiens
  misc_feature (91)..(91): n is a, c, g, or t
  misc_feature (210)..(210): n is a, c, g, or t
caacaaagaaggcgtcgcaaccactctcgaaaggcattccggaaaaaattccgggaactgcctttgcgttgggcggccacaagtgtctttncagccattcccggaaagaggtcttcatctttctttagccaccagaaactggccaaggacaacataggccttgtcaaaacccctttcctccagcttcttgccccaggacttcaccaatcnccagccaggctccccactggcttctcccccattggctctgccacgaagtctcggtgcttttgggaggttgtcatcttgatcaggcttaatccgcaacttcagttcccgtaacggttcctcccccaccctgcgcgctctgcggatacctcaagccactagaactttcc

SEQ ID NO: 313804 - DNA, 366 bp, Homo Sapiens
ctcggtcatcctgaacttggagcagcaagtgcgagagcggaacctgaatcccaaagcagcctgtttgaaacggcgagaagaggcaggcctgagcgaagcccacaaccccgccgggcacatgtgggtatgcctccgtgggacgagccacccgctttcagccctgtgctctggccccagaacggccactcgagaccccgggcttcatccacatccacacctcacacacctgttgtcagcatcgagccaacaccaacctgacaaggttcggagtgatgggggcggccaaggtgacactgggtccaggagctccctggggccctggcctaccactcactggcctcgctccccctgtccccgtctcagccc

SEQ ID NO: 313805 - DNA, 1128 bp, Homo Sapiens
  misc_feature (48)..(48): n is a, c, g, or t
  misc_feature (60)..(60): n is a, c, g, or t
  misc_feature (95)..(95): n is a, c, g, or t
  misc_feature (99)..(99): n is a, c, g, or t
  misc_feature (102)..(102): n is a, c, g, or t
aggccaagcggggctagaagaatatagttaaggcattctctctgacanaagtgtatgttntgttgcttgctttcaggttttgtttactggaaaanaaanaantgctcctgtcagcccaggcaacagggcccagatgcagtttcaggatccatgggacaagttcacagagtgacacggtggttgagattcggggacagggggatcgaggccagtgagtggtaggccagggccccagggagctcctggacccagtgtcaccttggccgcccccatcactccgaaccttgtcaggttggtgttggctcgatgctgacaacaggtgtgtgaggtgtggatgtggatgaagcccggggtctcgagtggccgttctggggccagagcacagggctgaaagcgggtggctcgtcccacggaggcatacctttcacatgtgcccggcggggttgtgggcttcgctcaggcctgggtggggagctgaaagcaccatctgggggtctccaaccacacctgacaccttttcctcttctcgccgtttcaaacaggctgctttgggattcaggttccgctctcgcacttgctgctccaagttcaggatgaccgagacagcctggtgcaggatgagcagtttggtctggggcttctcggtgttgaggtgcagttggcacatgcgccccagctcccggaaggcctcgttaatatcccgcacgcgcacccgctcccgggcgttattggccatgcgcctctcccggtccctcaggtctttctcctccagggacagcacctcgtccgtactgctggtccgggcccggggggccttcagctccttcttctcctcctccgagtggtcagccgctgacgtgttctcctcgtcctccttctcctcccgcttgatctcgctggcggccgccgtggcacctgctcgccctagcccactgtaggagtcgggaggccgagacaggtcagggagggtgcctggctggctggggagggccgcgtggttgtgcatgaggctggtgctgcctgcgaggccgtcctcggggtggctgcctccaaccaggcctgcgtgccgcccacccaggccacacggtttgtgtggcttttttgtaggcgcatggtttattgttgtaa

SEQ ID NO: 313806 - DNA, 984 bp, Homo Sapiens
  misc_feature (30)..(30): n is a, c, g, or t
  misc_feature (134)..(134): n is a, c, g, or t
ttatggtgaaggtgggaactaaataaaggnaaccagaaaccagacctaaatcgctttgattggcctgttccatcgaaagggcggggaaagacttaacaactgctagctgctttgattggctgctttgcttaaanacacagtgcagcaaaaataatcacctgtcaagttattggaagttggagtgaaaagtataataaccgtaattgacagcctgtcgtgaaggagccggggcttagttcctagcctgctgactgggcagggaggtaggttctactcaggagatgttactgctgggcgtggcttgcgggggctcggaagtgatcggagccactgggtctagtttggggaaacccgggggtgggtacaatcccatgctgggggtcagggcctgcagatgcgccagggcccgagttccgttgaaggtcacctcacagcctgacttggctaggagccagttctccacctccgacctgagccacctggaggtctcttcgggcgagccttgagtgccccctggccgccgggccaggaagctgtgagccagcagcgcctccttggtgtgctcgtcctgcgcgcgcagggccagggcgctgagcagctccgagttgttggacgtactgcgatagtacagcatgtgcgccagctccaacgcctgcgcgctgcgccgctgcccgaacatcttggaggcccgcaggcccatgaagatggcgaagagcagcagcagcagggaggtggccaccttgaggtcggttagcaccaccatgcccacgttgacgaagatcgccacgccggagactaccagcatgaggttgagcagggcgcgctgcagggtgggcgtgcgcaccttcagctccggcagcagctgctccaggccttccagcggcgtgtccttgaaactcttcagtaccaggtgtccccgtttggtccgggctgccaggaccacccgcttaaagtatctcctctccgcagggggcagcttggtga

SEQ ID NO: 313807 - DNA, 740 bp, Homo Sapiens; identical to SEQ ID NO: 134674
  misc_feature (83)..(83): n is a, c, g, or t
  misc_feature (184)..(191): n is a, c, g, or t
  misc_feature (194)..(228): n is a, c, g, or t

SEQ ID NO: 313808 - DNA, 1008 bp, Homo Sapiens; identical to SEQ ID NO: 134675
  misc_feature (23)..(23): n is a, c, g, or t

SEQ ID NO: 313809 - DNA, 805 bp, Homo Sapiens
cccttggacctataacccccttaggcgtggggaaagtggtttaaagaccctttggggccaggggtcttttccccccaagcggggggcccatagggggtttcccccagggcccaaagaccagggaggttatttaagaaagggaatttactgggcttagaaaggccaaaagttggacggtaattatttcccaattctgggttcctgttttggaaaaccagaattcctttggaagttaatggaaacctcaaaataggcagattctgcctttggggtgtttgcagagggctttgaagtggtctcaaattactgacaagtgaagatcaggtagagttaacaaagcaaccaatgtagaagcaggtctcaagggcaattcacatttatttcctgagcatgctgactaaacatacttcaaacacagcagaaggtaaagagtctgttttgtaagtaaagccgtttcttgccaacagcgaatggtggtccatgaagagtaccttgagcatcatcttcaagctgaggctccagctctgggcaaacagctgctgggtggacctggtccttctggcctggatgggggcctccaaggaactacttgttctcatacttgtgcttgatgtgtttccacagcttcccctcgttgatgtggtcgtagatagcgtccgcgccttgatcgaaggcgcgctcgaagaacatgacgcccacgatgatggtgagggcgaaggtggaggtcctgcggaacagcagggagtacaatttcgaagtcaacgtcgcggccgccatgtttcttcacagtccaactcgcgccccc

SEQ ID NO: 313810 - DNA, 890 bp, Homo Sapiens
  misc_feature (250)..(266): n is a, c, g, or t
  misc_feature (310)..(327): n is a, c, g, or t
gtatataaactcgacagagaaatagctcgctgcaaaggacccccacatttggaggtgatgttataagcaagcaaacctgttgtgttccccccgcgcgggttgtttgtttattttgggggaaagagcaaaagccgctgttttagtatcctcaggggtgttttgtgggggagcatgaaaatggcaccctcatgtcctttcctagggtggggcccgcgcgcccccaacaagatggtttgtaaaaaagtttctnnnnnnnnnnnnnnnnnccgaacaacaacttgtcggtgtggcggtggggatatggaaggannnnnnnnnnnnnnnnnncgcgcaccatgtaagggcgttcgttcttcattttgatttatgtggggtggggggatgttttatggtgttgggggtattttgggttgtttgagttgtgtggtttcaagggcaattcacatttatttcctgagcatgctgactaaacatacttcaaacacagcagaaggtaaagagtctgttttgtaagtaaagccgtttcttgccaacagcgaatggtggtccatgaagagtaccttgagcatcatcttcaagctgaggctccagctctgggcaaacagctgctgggtggacctggtccttctggcctggatgggggcctccaaggaactacttgttctcatacttgtgcttgatgtgtttccacagcttcccctcgttgatgtggtcgtagatagcgtccgcgccttgatcgaaggcgcgctcgaagaacatgacgcccacgatgatggtgagggcgaaggtggaggtcctgcggaacagcagggagtacaatttcgaagtcaacgtcgcggccgccatgtttcttcacagtccaactcgcgccaccgcgcctgcgctggccc

SEQ ID NO: 313811 - DNA, 618 bp, Homo Sapiens
aggaacaaaaaattatatactagagtaatgaattggctgggctttgaaaaatggatatgattatgagttaaaataaagggagagaggacattttaggttcttgaacccctatgatgaaagatacagaggtcttccaagacagtgggaggacattgagtaaacctgcctggttagagtagaaatacaggagtgatgaggttggaaagatccgaaaggggtggagtatggaataaatgctaaatttaaagtatttagtggaaagtatattttaagcagggagataatgtgtaaagatgggttttaggaagattaatatgaaggaagtgatgattcccagagatttaaataataaagatgtcttaggagtatcctgtctcacaaatatctttatagtttaattaagaagtactttaggtagaacatttcaagtacttatgcgagggaaatgaggtgaccagattccaagaagccaagagagattagtttataatatactgaattagccagaacagatcatttataatgtttgagtctaggatcccattttgcactcagatggacatgtgcttttctaggattgtttgaacttgtcggtagtataatactttcctctttttc

SEQ ID NO: 313812 - DNA, 367 bp, Homo Sapiens
gaaatgctacctaaagtacttcttaattaaactataaagatagtgagacaggatactcctaagacatctttattatttaaatctctgggaatcatcacttccttcatattaatcttcctaaaacccatctttacacattatctccctgcttaaaatatactttccactaaatactttaaatttagcatttattccatactccacccctttcggatctttccaacctcatcactcctgtattacctctgtatctttcatcataggggttcaagaacctaaaatgtcctctctccctttaaactcataatcatatccatttttcaaagcccagccaattcattactctagtatataattttttgttcct

SEQ ID NO: 313813 - DNA, 975 bp, Homo Sapiens
ccgtcgacctcaagttatgtatttgtgctctttcagcaaataagagctgctattattactactcttcatagcataatgtaagggtttccttcctctcatcccagctcggaagcaccttatcaaggtgaactgagccccttctgtttcttctcttccctctagccaccacgccccttcctttcccgcatcttccccccattcttatacccgcctcttccgcgaaccccgccctgaccccgcctttccctggccccgcccaccagacctgcaccggcacagccctcgctcagcggggcaggaagctcatggtgtagtttcgtgggatcgtggcaaagcccacgtgtttgggggacacgtcaatgtccttaggtgactgggaggacttgaggcggaagttctgcatgacggtggtgaagaagagaaagagctccattctggccaggccttctccgaaacagttccgctttccgatggaaaagggcacaaaagcatcactcttcttaaactgccccttgtcattcaggaaatgctggggattgaagtcctgagggttggagaagaagctggggtctctcagcacggagcccagcatagggaacacttcggtgccctggtagggaggaggaagttgtgtgtgatgaggagggtcgggggattggtgaaagtacacaggggctggagagggaactggggtgccccagataaggggaagtggcaggcatggaggagttggggtcctgtgaaggaggagctttggggaatagaaggttcacatctctgacacaggaagtttgggagacatggggtccatgtcttgctacgcaggttgtttgggggacctgaaatttgtgtccctggaacttgagtttgattctcccgacacaaagagtctggggagatgcaggactcagtagtgtctaagtggaaaggtggaatggatgtggtggttggggaagtcctgactgattgagggag

SEQ ID NO: 313814 - DNA, 1187 bp, Homo Sapiens
  misc_feature (859)..(859): n is a, c, g, or t
  misc_feature (892)..(892): n is a, c, g, or t
  misc_feature (927)..(927): n is a, c, g, or t
  misc_feature (941)..(941): n is a, c, g, or t
  misc_feature (963)..(963): n is a, c, g, or t
  misc_feature (1146)..(1146): n is a, c, g, or t
ctacatggaggcagtgatccacgagatccaaagatttggagacgtgatccccatgagtttggcccgcagagtcaggacaccaagtttcgggatttcttcctccctaaggtgctatccgcccccaccccccagactacggggacttccagcccctctctgtgtccccagcatcccacccacattagaagctttctagaccctgtcccactccctcaatcagtcaaagtcctgcatctctccagactctttgtgtcaggagaatcaaacacatgttcccaaacttcctatcttaagaaacagaagccccctttccattcggccttttgtcatagggacagaaatctcaggtcccccaaactcctgcctagaaggacatggaccccatgtctcccaaacttcctgtttcagagatgtgaaccttctatcccccaaagctcctccatcagaggaccccaactcctccatgcctgccacttccccttacctggggcacactagttccccctccagcccctgtgtactttcaccaatcccccgaccctgctcatcacacacaacttcctcctccctaccagggcaccgaagtgtaccctatgctgggctctgtgctgagagaccccagtttcttctccaacccccaggacttcaatccccagcacttcctgaatgagaaggggcagtttaagaagagtgatgcttttgtgcgcttttccatcggaaagcggaactgtttcggagaaggcctggccagaatggagctctttctcttcttcacgaccgtcatgaagaacttccgcctcaagtcctgccagtcagctaaggacattgacgtgtccccaaacacgtgggctttgaacgnatccacgaaactacaccatgagcttcgtgcccngctgacgaaggctgtgcggtgcaagtctggtggcnggccaggaaagganggcaagactggctttgagaggncataagaattggcaagatgcgaaagaaaggcgtgtctagagaagaagacgtaggctcatcatgtaaggctcagtgataggagacatcatttcttgggggtttaagcctctttaaaaaaagatattgcgccctcttggtattcccggtaaggggatgccatgtgccttgtgagagctctattgngccgcagagttggacagcctcccaaggctagggctttgcta

SEQ ID NO: 313815 - DNA, 1253 bp, Homo Sapiens
  misc_feature (17)..(17): n is a, c, g, or t
  misc_feature (23)..(23): n is a, c, g, or t
  misc_feature (200)..(200): n is a, c, g, or t
agaaaactggggttctnctcaancacaagagccccagcatagggtaaaacttcggtgcccttaagggaggaagaaatcccgaaaattggtgtccctttttgaactctgcgggcccaaactcatggggatcaacgtctccaaaatctttggatctcgtggatcactgcctcccatgtagggcatcttggcccggtccctcnaaacttgggctgccggttcttgccgatcactctgtcaaatctcctcatggaccttggcctcccacctctgggtgcttcatgagcagcaagaagccatagcgcagggtggtgctgacggtctcggtgcccccaatgaagaggttcaacgtggtcatcaccaggtttttcaagtagaactccgtgttggggttcttctcctcctcctgcatgcggatgagaaaggagtcaatgaaagtcccgtggggaattgggatccagcgtgcgctggttgtgctccaccttcttggctatgaagtcctccagcccttgcagcaactgaaaggcctgttgctgtggtcctggcaggtgtttcatcaccgaagagaacatctcatagagctgccccgtggaggttgacgtgaactggaagattcctagcatcatgcgcaacagtgacaggaactctttgtccttatagtcaaagcggtccccaaagacaatggagctgatgacattggagactgtgcggctcaggaagaaggtgggatcgatattggcgccgccagtgccccggagggcgtcgatgaggaagcccgcctcctcctggatgcgctcctcgatgcctcgcttgcccaccccgaagtcccgcagggtggcgatggagaagcgccggagctgcttggcgcgctccccgttgctgaataccacgccatagcctttgaagacccagtcgaaggtggcttgctcgcctcgcccgctgaactcctcagcctggtccaccagagcctccctgacggcatcatgtccacacagcaccacgacccgccggggccccaagtgaatggtgaacacggggccatagcgctcactgatcttcatgagggagttgtacatctgctctgtgttcagctgcaggtagtttccaatgaagggcaatggggtgggtcccggaggcagcttccccttgctcttcctctgctgccaaacagacatcaagaccatcacagtcaggcagaccagcaaggccaccaaaagcatccctgaggccagcatggtggtagtgggatgatagat

SEQ ID NO: 313816 - DNA, 500 bp, Homo Sapiens
  misc_feature (54)..(54): n is a, c, g, or t
  misc_feature (82)..(82): n is a, c, g, or t
  misc_feature (110)..(110): n is a, c, g, or t
tttttaagaaagagtgatgcttttgtgcccccttttcccattcggaaagcgganctgtttccggagaaagcccctggcccanaatggagctcctttcctccttccttcancccacccgtcatgccaagaacttcccgccctcaaagtccctcccccagtcaccctaaggaccattgaccgtgtcccccccaaacaccgtgggctttgcccacgatccccacgaaactacacccatgagcttccctgcccccgctgagcgagggctgtgccggtgcaggtctggtgggcggggcccagggaaaggcggggtcagggcggggttcgcggaagaggcgggtataagaatggggggaagatgcgggaaaggaaggggcgtggtggctagagggaagagaagaaacagaaggggctcagttcaccttgataaggtgcttccgagctgggatgagaggaaggaaacccttacattatgctatgaagagtagtaataatagcagctc

SEQ ID NO: 313817 - DNA, 355 bp, Homo Sapiens
ccccctcacaagacatgcagaatctcaagatatgtcaagatatgcagcaagtaatacctgaaggttaacataaatgacaacaggacacagatgcaatgctacagtcaaatgtggttggggatggaagggggcagagggacactggatatcatcacagcaaccagtgagtgagtcctctggtgccctgaggaggttgtgagccacttgactcgtgtcacaaagaatggagtaaactaacaactctgaaagacaagagggtggcagcattgctgagatgagactcaaggcaggggtctgcagctctgtcacaacatcagaagaagggcttcttcaggacacactcccttctcttaac

SEQ ID NO: 313818 - DNA, 1133 bp, Homo Sapiens
  misc_feature (951)..(951): n is a, c, g, or t
  misc_feature (1051)..(1051): n is a, c, g, or t
  misc_feature (1071)..(1071): n is a, c, g, or t
  misc_feature (1076)..(1076): n is a, c, g, or t
  misc_feature (1086)..(1086): n is a, c, g, or t
  misc_feature (1093)..(1093): n is a, c, g, or t
  misc_feature (1098)..(1098): n is a, c, g, or t
  misc_feature (1105)..(1105): n is a, c, g, or t
  misc_feature (1107)..(1107): n is a, c, g, or t
  misc_feature (1114)..(1114): n is a, c, g, or t
  misc_feature (1116)..(1117): n is a, c, g, or t
  misc_feature (1127)..(1127): n is a, c, g, or t
  misc_feature (1130)..(1130): n is a, c, g, or t
ggggagtcgacggctggagagaagccgggagcgagcccaggcggcagtcttgattcccttttggccagcagtttttaggtctgtcagtactgcactgcaagaatggcagattttgggatctctgctggccagtttgtggcagtggtctgggataagtcatccccagtggaggctctgaaaggtctggtggataagcttcaagcgttaaccggcaatgagggccgcgtgtctgtggaaaacatcaagcagctgttgcaatctgcccacaaagaatccagctttgacattattttgtcaggtttagtcccaggaagcaccactctgcacagtgctgagattttggctgaaatcgcccggatccttcggcctggtggatgtctttttctgaaggagccagtagagacagctgtagataacaatagcaaagtgaagacagcatctaagctgtgttcagccctgactctttctggtcttgtggaagtgaaagagctgcagcgggagcccctaacccctgaggaagtacagtctgttcgagaacaccttggtcatgaaagtgacaacctgctgtttgttcagatcacaggcaaaaaaccaaactttgaagtgggttcttctaggcagcttaagctttccatcaccaagaagtcttctccttcagtgaaacctgctgtggaccctgctgctgccaagctgtggaccctctcagccaacgatatggaggacgacagcatggatctcattgactcagatgagctgctggatccagaagatttgaagaagccagatccagcttccctgcgggctgcttcttgtggggaaggggaaaaagaggaaggcctgtaagaactgcacctgtggcctttgccgaagaactggaaaaagagaagtcaagggaacagatgagctcccaacccaagtcagcttgtgggaactgctacctggggcgatgcnttccgctgtgccagctgcccctaccttgggatgccagccttcaaacctgggggaaaaggtgcttctgagtgatagcaatcttcatgatgcctaggaggtnctgacatgggaccatctgcnctccngccactcctntcctcanatccnacatggngntcctccncnnctctggattnttnact

SEQ ID NO: 313819 - DNA, 1336 bp, Homo Sapiens
  misc_feature (1244)..(1244): n is a, c, g, or t
atatttggcaagattgattccaagtccatatgggtggataacaagaacaaaggggtctctgctcagagagacgtattgtcgttcagagttctgccctgcttccctctaaatgctcaccaacctggactcttctaaagtgggcagacaagccctattctaagcgtaggaatagccccatttgtgcgtgacactaagttcctccaatggtccaaactgagcgtggatgactatccaacatcacacacaaatgcacatcccctctctttacaagacatgcagaatctcaagatatgtcaagatatgcagcaagtttaatacctgaaggttaacataaatgacaacaggacacagatgcaatgctacagtcaaatgtggttggggatggaagggggcagagggacactggatatcatcacagcaaccagtgagtgagtcctctggtgccctgaggaggttgtgagccacttgactcgtgtcacaaagaatggagtaaactaacaactctgaaagacaagagggtggcagcattgctgagatgagactcaaggcaggggtctgcagctctgtcacagagtgttaatgctcaacgatgcctgggctcaagagcgttctggtcagcattttaacatcagaagaagggcttcttcaggacacactcccttctcttaacatgaggtgaagaaacccatcccattctgaaaccaggtcccataataccttggtcttttgatacacagcagcactacacaccactgtgccccccagccagcttcactctgtctgctaagcacccactctgcaaacagatctcagagtgaacaaatccagaggaggtgggaggagccaccatggtgggatgtgagggacaggagttggctggaggagcagatgggtcccatgtcaggaacctcctaggcatcatgaagattgctatcactcagaagcaccttttccccaggtttgaaggctggcatcccaaggtaggggcagctggcacagcggaaggcatcgcccaggtagcagtttccacaagctgacttgggttgggagctcatctgttcccttgacttctctttttccagttcttcggcaaggccacaggtgcagttcttacaggccttcctctttttcccttccccacaagaagcagcccgcagggaagctggatctggcttcttcaaatcttctggatccagcagctcatctgagtcatggagatccatgctgtcgcccctccttatccnttggcttaaaaggtccacagcttgggaccaacagggtcccaaaagggttttcctggagggaaaaacttctttggggagggaagctttaactt

SEQ ID NO: 313820 - DNA, 468 bp, Homo Sapiens
  misc_feature (18)..(18): n is a, c, g, or t
  misc_feature (26)..(26): n is a, c, g, or t
  misc_feature (35)..(35): n is a, c, g, or t
  misc_feature (46)..(46): n is a, c, g, or t
  misc_feature (86)..(86): n is a, c, g, or t
  misc_feature (102)..(102): n is a, c, g, or t
  misc_feature (121)..(121): n is a, c, g, or t
ctgtggaatgtaagtttnaaaccttnaccgttggnccctcttgagnatgtggtccaggttgaaacatgatggatcaacccaaaagnaggacaagggtggganacccttctttaccccctgnactcccaagtttccctctcgaagcctgcagtcactttagcttttcattagcagagaccacgactgtatcactcattgctttgaacactctccaggatctcattgactcagatgagctgctggatccagaagatttgaagaagccagatccagctttctgcgggctgcttcttgtggggaagggaaaaagaggaaggcctgtaagaactggtgagtgctggggtgactggagcctgccatgctgcctccagtggcttcatgctgaagacatcgcggtgctgtactatttttagaacatacattttccaggctgggcaacacagggagaccatctctgcaaataattaa

SEQ ID NO: 313821 - DNA, 368 bp, Homo Sapiens
cctcatgcccggtccccaccacatttccctgaggcacccaggttccagagttcctctccttaatttacccagtcagcacacttcgactcaggctttttttccaaaatggaaaatttgtgttttgttcccaagtataaagcttgactctccttactggcattttccaccactgtgctcttctgcccgcgcctttttcatcatagcacttatctcagttttaataatatatgtgtgattgttaatgtctgtctccctaactagataggtgttaaccttcagaagggcgggaaccacatctattttgttcatatctttattctcattatttgcaggtggtcatgtggaatccctgaatgttatctctcgtg

SEQ ID NO: 313822 - DNA, 2188 bp, Homo Sapiens
  misc_feature (370)..(383): n is a, c, g, or t
taattatgtcagatgttttatttatagataattaaaatttaggcatatacatgacacaaacattatatatagtacactttccatgatagaagttatgatgctgttcacagaaaggcctcaattcagatgacataatgcatatgctacaaggggacacctgggagaggggacaccaaatggccttctggtttttcattttggtttaaatatcctctggatgcattcaagtaatactaatcatttcatgttcaaaagtcttttaataaacaaattcagagtaaaattaattgaaatatttataatacgatttgttacacagttatttccaatatacaatcaagacgactcacgacacttgaaagaaaggagnnnnnnnnnnnnnntcgattgcacccacaagtaaaaaggctttattcattttggggatgctgcaatttggtatttatataaacatttacacactttagtaaacacagtcctacatgtaatgcagcattacgggtgagaagacccttggaagtcgagcgtccacagtgttccacgcgcacaggcggaccttctcactgtcattcccatcacggccagtcagtctctccactccctcctcccgcctggctcgaggacggacgcttctcatcagacacaccaggcagcctacagtctacacagcagcgagtgctctgctgcctggctcaggctctcatctcacgaggacgtttccccatcttagtgtcctgttaaataatcttgtgtagagtccgaagcaaaggagtcgacatcctcgttatctgaatcgtcgctgctgtcgtcggcggctggctctcctgtaagtgcgatgcgagcgtagtcatctgtgtctatggacttgcagaagtggatggcgtacttgagcttctcctccagcacctgcttgcaggaatacctgggcagcttcagcaagaagaaacaggtgtaggactcagggaggaagtggtctggagggttgtatttatccaacacctggatgacgaagtctcggccccggaagtcggcgatggtcctgggcagcctcgtccggccccagacgaagcgaaggaaaagagagcgctctgtgttggagaaggactccatcacctcccagaaccactggatcagcgatgcggaaggctcgatgcctttataggtggccaccgacttgagaaggtgcagcgggatgtcagggctgccacacaccatcgtctccagttcgtagccggtgaacagagagaggaggggaacaggcacaacgcgggccattccttcccgaacagcagccacctgctcatcaaattcatggagtctatagtttatcgccagccgcacgtactccgcgcggttgtccagggtgatgtgtgtgtgcttggagctcaactgaatgtcctggccactggcacttggcactgtgaagggcaggctcatggcttcaaactcctctgaggtggcttcattgtcttcggatgtacctgagttccaggaataaaatccttatccaccctcactgaggtccgcgatggtgaggctcatcccagccagctgcttccagacaggctcggcaaggttgaggctcaggggactcccgtttcggatggcaatgcccagcaacacccccaggaagcggaacatgctgctgtgcacgggtgctctggcggccgggctgagcaggtagcagtctcggttggccccagactcatccctcccgttgggtgtcacgatcagcaggggcgtgagtccgttctgcagctcctcacagatctcagctatggactcgctgtagccgcccccacagtcatccacagattcacccacaaacttgactttccagacacggtgaggaaggaggaggctgtcgggaccaaacgagctcatcttagcacacatctgcccaaagacagacttggtgccgtcggggccggccagcccgcctttgctccttgatcgtttgacctggatgcggttcagctccacgacggggccatgctgacgatcgcgtaccatagttgcttgtactactttccggaaagccgcctcctttccctgggatatcagaattcctcggagagtgtcgaacccaacagaaggcccgagtccagtttcgtcgagcgagccttccaggtcgaacatggggatgcaggggcagaagagctcggagaggtggtgcagcagcagcaga

SEQ ID NO: 313823 - DNA, 627 bp, Homo Sapiens
  misc_feature (555)..(555): n is a, c, g, or t
ggccgtatgagcagtgtggagctcttaccttgctatagaatttctctcattctggaaagtaagttttcaatttaactgcttttccctgaaatcttctgaaccaccccagtgatgatatgaatgtagctccctctggtgttgacaaggacttgctatatcagtaatacccttattaattcaagcccaatcacttttagagctggacctagctaggttcttggagaccatttagtccaattccccactttaatctctgacatgaaatctactaaggtaaagtgacttgccagaggtaccgctagttagtagcagaatctgaatcagaaaagaaagactcaaaactcacaaattgagcattattttctgctgcctcccgtaaagatgcccagtgtttaggtagagaccattagatatttgaagttgggcatatctgcctgatctgggataatggccaattaaagcttgtttcattaatggtggggcagtgagtgtgccaattagtctaacagaaatacttattgactatataccatctgccagactatgtgcccttanagatgaaacagtcattatgatacaatccctgccttctaggagcttccagtccgtgaggggtacagatagttt

SEQ ID NO: 313824 - DNA, 651 bp, Homo Sapiens
agacaatgctatttttaaatgttgacaatgtttatcttcataggacaaagaatgtgaaggaaaaggtctttttggcagtgtttcatcttcttggttcatttttgggctttcttgatagctgaaaaaaaatctaactcaccttactattttgtttggggatgatggtttcagcctctctgcttgaacttgttctcagttttttgtctactgttagctcatattcttccaatgcacatttttgggcattattggttatagaaatggcagtctttggagatttttaaatcaagactcttgcttctggtcttattagcaagatcattggggtcacttcatctctgtctgtctttcctgattgattatcctattttcaaagaatgagactcaaaatgtcctgttctgctttgcaaaatatagtttcacataagaaattaccttgggcaaggttgtgagaggatttggaatctaaatggagtgttggattgctaagattatgtatctattgctggcagaaatatcatatcctaaattcttggagaatgatattggttgcccaagattgtatagaagataaagagctaggactctgaagagctgggttttagaatcataaacttttaggtttggaaaggatgtttggtctggttcttc

SEQ ID NO: 313825 - DNA, 980 bp, Homo Sapiens
  misc_feature (488)..(488): n is a, c, g, or t
gtataatctcaccaggagacaacctcaatattctgcatcgaagggatagtcttccaaatgagaggattgcaacacgttacaggccctccagctgttgaagctgagtatggttgccatctcctcatcactcaatttaaagtcaaagacctgaatgttctcaacaatgcgtgctggtgtcacagacttggggagtgctttgcagcaatctccttaatcttgggatcctccagcagggaagggtcttctggcttggcccaaggtctatccggagagcccagggggctgtaggccgtaacggtgatgcccttggagtggcagtactggatcagtttctcctgcgtgaggtatgggtgacactcaacctggttagtcactggttatatttcagtccaggtttgttcaagagcttctcgatctggaagtggctgaaattggagaccccaagggctttcaccagcccctcatccaccagctcctccatggcctcncaggcatccaagaacgttgcttttcccaccgatggcattacctttatcattctttggggaaaaaggtcatccccagacttgaatcccctgtggccagtgaataagatagacgtccagatagctcagcttcaggtccttgagggtcttctcaaaggctttcctcacaaggggtctctcaaagaaagtgggccacaacttgctgacgatgaacaggtcctcccgcttcacagccttctcttggatcttctcttggatggcttcccccacttcatgttcattctgatagacataggcacagtcaatgtgccgatatcctgcatcaatggccaccttcactgcttctttcactttgccaagaggagacttccaagtgcccaggcccacaatgggcatcttggctttggtactgagctccacaaacgtggccatggttggtgcagaaatgattctgagtgagcaggtagaagtctcacgtcctgctctctgttgctg

SEQ ID NO: 313826 - DNA, 1107 bp, Homo Sapiens
attgatctttacatcctcagtgttggcagagtttctgatgcttaataaacatttgttctgatcagataagtggaaaaaattgtcatttccttattcaagccatgcttttctgtgatattctgatcctagttgaacatacagaaataaatgtctaaaacagcacctcgattctcgtctataacaggactaagttcactgtgatcttaaataagcttggctaaaatgggacatgagtggaggtagtcacacttcagcgaagaaagagaatctcctgtataatctcaccaggagattcaacctcaatattctgcatcgaagggatagtcttccaaatgagaggattgcaacacgttacaggccctccagtttctgttgaagctgagtatggttgccatctcctcatcactcaatttaaagtcaaagacctgaatgttctcaacaatgcgtgctggtgtcacagacttggggatgacaatcacattcttctggatatggaaacggatcagaacctgggctgcggtttttttgtgctttgcagcaatctccttaatcttgggatcctccagcagggaagggtcttctggcttggcccaaggtctatccggagagctcagggggctgtaggccgtaacggtgatgcccttggagtggcagtactggatcagtttctcctgtgtgaggtatgggtgacactcaacctggttagtcactggtttatatttcagtccaggtttgttcaagagcttctcgatctggaagtggctgaaattggagaccccaagggctttcaccagcccctcatccaccagctcctccatggcctcccaggcatccaagaacgttgcttttccaccgatggcattacctttatcatctttggggaaaaggtcatccccagacttgaatccctgtggccagtgaataagatagacgtccagatagctcagcttcaggtccttgagggtcttctcaaaggctttcctcacaaggggtctctcaaagaaagtgggccacaacttgctgacgatgaacaggtcctcccgcttcacagccttctcttggatcttctcttggatggcttcccccacttcatgttcattctgatag

SEQ ID NO: 313827 - DNA, 737 bp, Homo Sapiens
gcggccgaggtggcggacactcagctgatgcttggagtcgggctgatcgtgaccatctttccaccgtagaaaaggacacaaatggagaagttctgtgggtgtggtgttatccttccacgacagccacattaaggaacctgctgctgagaaaatgctgccttacagatgaaaacaaacttctccatccctttgtctttggtcagtacagaagaacatggttttatatcacaacaattgaagttccagattcttccattttgaaaaaggtgactcatttttctattgtcctgaccgccaaagattttaacccagagaagtatgctgccttcactaggatattgtgtagaatgtacctgaaacatgggagcccagttaaaatgatggagagttatattgcagttctcacaaaggggatatgccagagtgaagcggctctttccttagtaaggattttgatgcccgaaaggcctacctggctggctccatcaaagacattgtatctcagtttggaatggaaactgttatcttacacacagcactgatgctggactctgcctgccctggtgtggcaccgacaggactggaccatccttcattcttacgtgcacctcaacgccgatgagctggaagccctgcagatgtgcacaggttacgtcgctggatttgtagacttggaggtgaccagaccgaccttatgatgtgtttgggatctggcaggagtgagattacttgctccc

SEQ ID NO: 313828 - DNA, 315 bp, Homo Sapiens
tgtgtagaaactcctgctttatttatgcacaagctcgatcacatgatgcaggagctctccactggtgggggttgggggctctgggctacactgcgagggtcccactcccggctctgtacggcctatggtgtgtccgtgcacaatgacggcctgggcctccatttgctcctccgtgaagtgggcgtcagacgtttcccacggcccctcggtccttggtgagagcgatcagcccgactccaagcatcagctgagtgtccgccacctcggccgcagccatcttccgccgccctcgtgccaaattcgtacagcccgggg

SEQ ID NO: 313829 - DNA, 1371 bp, Homo Sapiens
agctgttctgtaatgttacataaagtagttatagcacttcgtccagcactgacagcaggcaggaagctaatcagcgaggagaaaatcggaagtgtgttcatgtgtttcattgtttttcaggtcaaatttcaatacttgcaaaataaatccttaaaaaagatataccagtttctttgttattttcaggacttcatgtagtgagtgggtaatcagagtgaaagagggctttttatcagtcatcagtgatacgttctgtcacccagtcagattttcagcatttgttcggctgctgctagatgataaaggaagttttctgttgctggtggaaatcgtttttgctttagcgcctccaaattaaggactctcttttctccatcagccgaaacttctgaaaatggtgctaggttggtaaagatttctcttgtttttagagcaatatcctgtataacgtggctctctgatttctctggatcttctgcagactgaacaattagctgacccatttctttgtgcagtttgcccattgccatggcctcttttgcaaggggagcaatggtaatctcactctctgccagattcacaaacacatcatagaggtctggtctgttgctcacctccaagtctacaaatccagcgacgtaacctgtgcacatctgcagggtttccagttcatcggcgttgaggtgccacgtaagagtgaaggatggtccagtcctgtcggtgccacaccagggcaggcagagtcctggtgaactcctggaccgcttctatcttggggtgatacaccacaattcttttctttagcatcagtgctgtgtgtaagataacagtttccattccaaactgagatacaatgtctttgatggagccagccaggtaggcctttcgggcatcaaaatccttactaaggaaagagccgttttcttcactctggcatatcccctttgtgagaactgcaatataactctccatcattttaactgggctcccatgtttcaggtacattctacacaatatcctagtgaaggcagcatacttctctgggttaaaatctttggcggtcaggacaatagaaaaatgagtcacctttttcaaaatggaagaatctggaacttcaattgttgtgatataaaaccatgttcttctgtactgaccaaagacaaagggatggagaagtttgttttcatctgtaaggcagcattttctcagcagcaggttccttaatgtggctgtcgtggaaggataacaccacacccacagaacttctccatttgtgtccttttcgatcagcccgactccaagcatcagctgagtgtccgccacctcggccgcagccatcttccgccgccgcggcgcgcagctctggctccc

SEQ ID NO: 313830 - DNA, 970 bp, Homo Sapiens
  misc_feature (873)..(873): n is a, c, g, or t
  misc_feature (930)..(930): n is a, c, g, or t
accttgcgctgctgtccacaggtccatggtgtggtgaatgatacaatagcatttgtgaagaacatcattaccacagaactgaacagcgcaacagataatcctatggtctttgccaataggggagagacaatttctggaggaaacttccatggtgaatacccagccaaagccctagactacttggccattggcatccatgaacttgctgcaatcagtgagagaagaatcgagcggctctgcaatccctccctcagtgagctgcctgccttcctggtggctgaaggtggtctgaactctgggttcatgatagctcactgcacggcagcagcccttgtttctgagaacaaggctctgtgccatccctcgtctgttgactccctctccaccagcgcagccacggaggaccacgtctccatgggaggatgggcagcaaggaaagccctcagggtcatcgagcatgtggagcaagtgctggccatcgagctccttgcagcctgccagggcatagagtttctacgtcccctgacaaccactccgctggagaaggtctatgacctggtgcgctctgttgtaaggccctggatgatcgcttcatggccccggacatcgaggcagcccacaggctgctcctggagcagaaggcaagctggctccttggcttgtttcttaatttttaattgttacaggaaagcaaagtcggggatggagaaacattgccttattctattgttttctggccattccttgggaatgagcaaaaaggtatttgagcaacaacttgcagcaccactaagaagccatataataaacactaagtgcaccagggtgcagccaacggttgaatatctaaggattagaaacagaaatggattnttggagttttgggacaatattcatgggggaataagatggcagggtcattgatgcctncccacccctgcaagatgttctctttgttcgtgcgagcctg

SEQ ID NO: 313831 - DNA, 409 bp, Homo Sapiens
  misc_feature (337)..(345): n is a, c, g, or t
  misc_feature (348)..(348): n is a, c, g, or t
  misc_feature (364)..(364): n is a, c, g, or t
  misc_feature (392)..(392): n is a, c, g, or t
gaatctccaactttattttgaatgtacctctattagtttcaattgagtaattctagacataactggtttgactctgtccaactctgtatttaggccatttgttacagtttcttcatgcattacttactgttaaaactgtaccttttgcgatttcacagttggcacttctgccatgagcagagaactgatgcgacttgttttgctgcttggtagcactttaaaaaattttttgattaatgaaggaaagtaaaaccataaacatttgccaaaaattcatgccccagtattaggcaatggaattaggttgccttgggttttgaggaaagggcacctattnnnnnnnnnaantcttggggtgttaacntttaaattattttgggaaaatttacccntttaatggccatggcct

SEQ ID NO: 313832 - DNA, 788 bp, Homo Sapiens
  misc_feature (484)..(492): n is a, c, g, or t
aaggaagtcttcaaatttgattctaaatagcgattataatctccaactttattttgaatgtacctctattagtttcaattgagtaattctagacataactggtttgactctgtccaactctgtatttaggccatttgttacagtttcttcatgcattacttactgttaaaactgtaccttttgcgatttcacagttggcacttctgccatgagcagagaactgatgcgacttgttttgctgcttggtagcactttaaaaaattttttgattaatgaagaaagtaaaaccataaacatttgccaaaaattcatgccccagtattagcaatgaattagttgcattggtttgagaaaggcacatattggagggaaatcttggtgtaacttaaatatttgaaaattacctttaatgcaatgcatatctgtttattctgggaaatgttttaatgccagtgcctgctgagttgcttcttcttgtggagannnnnnnnnaatctcctgagttgtataaaagttgtactgcatcttagtttactggataaatttaaaacacagtattgtagaaagctaatacaaaactatcctatgccttcaaatagtatagaaaatggaaaatatacaagtaaattctgttgaaccacctgtgtagtctctctagtagttaaaacagctattttagtaaccccaagagtttcttctcatatccataaaattggattgcagtatggcaatatctacagcttctattcattatgcaacgtttaacattgattggataaatgcttata

SEQ ID NO: 313833 - DNA, 414 bp, Homo Sapiens
tgtaggatacggcacgagaggagctttcacaagagattttatgagaaaaaacagcttttctcatattatgagcacaaagcatgatactttaagtcagcaaatgatgctcatacttcgggttatatttatgacacggtagggtcaaaagagaaaaggtgggaaatgaaaagtggaggagaaaaacaagaaacagtgagaataaaggaaaaaggcagcacttaaagtagagaagttcaaaggaggcgaaagagagccgaaacgttccatggtgaaagctgagctgtgttcttcacatttagcattctgttgagcagtggatatgcccagaaattttcatgtgttcaaaggtctctgaaatttaaattagcagtcttgaaccagtcctgcttttattttttcggtgggttttttctg

SEQ ID NO: 313834 - DNA, 356 bp, Homo Sapiens
aataaggttgttgttaatgttttggacatcatcagttatgagtagggattggggagtgaaaataattctgtcaagccaatgataataagagaaacatttaattgtttggaaaatagttttattcctcaggatcatgattcttattttactcatacatgaagacaaaatcagaaaatatacataaacttattttttgattgattgtaaatgcatttatatgtcttcaatcaagaaaataatcatattttaaacttattatacctataatcaattgttgacaatatgcttggtgaaattagttttgctgtatcttttagcagttctctgagtttctttcgctgggttctcctctggtg

SEQ ID NO: 313835 - DNA, 1135 bp, Homo Sapiens
  misc_feature (727)..(727): n is a, c, g, or t
  misc_feature (947)..(1009): n is a, c, g, or t
  misc_feature (1012)..(1012): n is a, c, g, or t
  misc_feature (1014)..(1014): n is a, c, g, or t
  misc_feature (1050)..(1050): n is a, c, g, or t
  misc_feature (1058)..(1058): n is a, c, g, or t
  misc_feature (1062)..(1062): n is a, c, g, or t
  misc_feature (1064)..(1064): n is a, c, g, or t
  misc_feature (1072)..(1072): n is a, c, g, or t
  misc_feature (1091)..(1091): n is a, c, g, or t
  misc_feature (1096)..(1096): n is a, c, g, or t
  misc_feature (1102)..(1102): n is a, c, g, or t
  misc_feature (1108)..(1108): n is a, c, g, or t
  misc_feature (1110)..(1110): n is a, c, g, or t
  misc_feature (1113)..(1113): n is a, c, g, or t
  misc_feature (1116)..(1116): n is a, c, g, or t
  misc_feature (1119)..(1119): n is a, c, g, or t
  misc_feature (1123)..(1123): n is a, c, g, or t
  misc_feature (1125)..(1125): n is a, c, g, or t
ttttgggcaaaaaagctttttattttcccccacattccagctcttcactttttctaaaaccttttccaactcagagccaaggcccaagaagttgattcacacctggggagaaagaaaataaaacaacaaaacaggtcgaagagctgctagaggaagctctgagatgtgtgcagaaattgaggaaggagcagagggagtgacagctagagaccaatacgggcatttaatcccaactaaggtagcctcaggaccccagggtctgtcaggggccaggaagccctcctttcccagtccaaggttgacagggtcctgtcatttcctgtcccaagtaggtggttggggcatttaggcccagccatcagcaaaataagcacagttgatcttgagcttccacttcctctggcctgatcagttccctgggcctcaactatttccacttttcccatagtaacttccctagggcactgcagcccgctgaagctgagaccagttcaagagctggatgcataacacatggctctcaaatttcatgcacccccctctgacaagtgaagattttttgcagaaatattttttcctttagtgagctgatgtgtgaactggttaaccaacatgacccccacccactgctacgtttgtgaagctgattccctccaaagatcttgttaacggaatcagctttttctaaaggtaacgatgactaaatggaagacagaaggtgcatgtnaagttcttgggcacatactatgtccccagtaaatgagtatcatcagttagactcttctgagcggttcaagttgaattttacaaaatttccatcataaaactgggtattggaatttcaggacaaaagcaagacaaacatggttcatattcaggacaaatcatcaaatgtgaaccctcttaactcaccattgttacccaaatgcttggatgtgaactagttnnnnnnnnnnnnnnnnnnnnnnnnnnnnnnnnnnnnnnnnnnnnnnnnnnnnnnnnnnnnnnngtntncatagtttcaaatataagttaaacaaactatattanttaggaancatncntgggaatncatataaagcaggcagtanttctngggggnaagggntntcnggnggngggncnaggggggttt

SEQ ID NO: 313836 - DNA, 1883 bp, Homo Sapiens
  misc_feature (1516)..(1516): n is a, c, g, or t
ttttttttgggcaaaaaagctttttattttcccccacattccagctcttcactttttctaaaaccttttccaactcagagccaaggcccaagaagttgattcacacctgagaaacaagtcgggaactaggccagtgccctcagagccgggttctagaccagtgggactcccggcgcgggtggaagcacatagcagtgacacagcagagaaggccacagaagagaagcaggaaggagcccaagaccagcagcctggagccacacagagccagctcctccgaggtgagcagcttggtcagcacaaggccttcatggctccagacactaacacattcctcacccattctagggctcagggtggcatttccagccccctcctctgagcaggatatgggtggctggctggagggtaggattcctggaacagcactaaaatataggcaggttcctgcagtcctttctgtggtcaccctggctgtgataaggaccagttgtcctgcagaagatcctttcaatcccatctgacttcccaggactgtggcctggaatgtccgggtcttgttcctgtctggaccgtctccgaagttcaaggtggtcagcaagcccacgacgtgagaccctcgccacttccctgtgactgtcccattcctgggacacagggtcagctggccaaaagatctcaaaaaagagacccagtcctgggggatgtcagggctgcgcaggccagtcctgtgggtgaggaggaagctgccaaggcccaggccagagaggccaaggagcagcaggatcaaagtggcacagaccagaggtgggtggtgggccagacacaggtgcaggttgtgccctgcctggcagttgcccatggggagcagagggggctgagcctccggggagagcctgctggaagacagggagggagaatgggacaagagcaccgcttttacgcaaagagaaaagaaagctcagagaagacaaaggacttcccaaggccacacagtaagtggcagagccagaacaagaatccaaggttcccgactccaaaagttcaactccctgcactgctggataaatatttgctgcatttcatttctgaagtaatctaagtggaggcagagcagtgtactccgtgctggaagaaggaaactgaaagggagacttcttagctggagaaacaggaaagcactgttctggggcgaggattttgctgaggaatagttccagccagagcccagacaagggaagactctggagaagaactccactgtgcagctaaacggctagatctgaatccctttctgttattcactgactctgtgagcttaagaatccatgaaatgggagttctgagaacaccaagtaataaggattaaacgtggcggatgaagcagtctgcgtggtatttggccatgcaggaattcaacatatgtccacttcctttctctttctcgtacagatcctcaaaaccgggtaaggcgaggcaaaaaatactgtgagggaaactgaggctcgcggacttntaacacaggagggggtagggcccaagatctgaaaccccgcctcctgctttcaagtggggtgctccttcccacgcaaggtgcgacgggctgatggaacaagaacttctggaaggcgaagagataaccaggggtcggggggaaagaagggagccacggaaatgtaggtgtcacaaatgctcagccctgccccgcctcccgtccggctggaagggggttaaagggaggggagggcagagtctgagggtccgccgccgctggtgcacctgagcaccccctccccggaaagcccccgccccgaaccgattgcaacgccctccggacgcgtgggtcgacgatatcccggaattccggagccggtaccagcctg

SEQ ID NO: 313837 - DNA, 879 bp, Homo Sapiens
  misc_feature (73)..(210): n is a, c, g, or t
  misc_feature (224)..(233): n is a, c, g, or t
  misc_feature (499)..(499): n is a, c, g, or t
  misc_feature (517)..(517): n is a, c, g, or t
  misc_feature (863)..(863): n is a, c, g, or t
gggggttaagggggcccccctttttggggcgtaatcaaatataacggtttaaattcccccgccccgaagagannnnnnnnnnnnnnnnnnnnnnnnnnnnnnnnnnnnnnnnnnnnnnnnnnnnnnnnnnnnnnnnnnnnnnnnnnnnnnnnnnnnnnnnnnnnnnnnnnnnnnnnnnnnnnnnnnnnnnnnnnnnnnnnnnnnnnnnnnaataaagaaccaannnnnnnnnnacttaaatagattcaataaaaagaacaaacacacacaaacacaaacacgtcttaaaataaactctttagagactaagtgcgtgtttcttttccacagtacggtgcagagaggggagggcagggggcgggggtccccttcccaatgtccccgcgggcttgagtaccaggcggcggggccagctccgccgcgatcgccccctcttcccctccctgttaaatacacaaatatattatattcaatatgaatcgagtctgtttccagcagnaaaaaaacatacaaaaanaagtggaagggggggcttgtaaacgtcgaggtggaaggactgggcgcagggtaggagggccggagtccagtgtggtttgcggcgcccctaggtcccagggtgggtgcccaccgcctgctccctggaccccagtgggaggcgtgtgcccagccgtccaagcgagggggtgtccgtaaaggggcaggggacgttcagaaggcgtgtcccttgaccccaagcagcagctgacagccgttgctgacgtgggtcatgaccttctgtttgagctgggccacctgctcccggaggaggccggcggtactcgacagccccgcgttctcggccttgagcgtcttcaccttgtccnccaggcgcgcgatgcg

SEQ ID NO: 313838 - DNA, 620 bp, Homo Sapiens
  misc_feature (39)..(39): n is a, c, g, or t
caaggaaacaccattgcatttgaaccagcgggtttctantctatcccgagtgccttccactcctttgatagaaacttgatggactacaatgatgtgttgataaccttcatatgtctgattttttagtttttactagtttaaaaatccacttatctgcaccaaaaacaccatggtatctcactttcctgaatgagcttagggtcttaatttaaaaaaatatatatacatttttaaataaagttggactaaacaatttaaaaggggttaaaacttcacttgtataattatttatgaaattcatgttgacattatcaaattatatgtaaagtataaagaagaaaaacctcctataatcctaccatatacttggaggaaatatgccacaattattttccatggatctgtattttccatgcaaaagtaatgttttttcttattacaaaagagttaattttgttgaaatccttaataatatatatcaaataaatggtcctgattaaagcaaacacctaattaataaaactttttaatcttccatttttgagagagaaagaatagagtaggctcaccctgtaagtgtcctcttggaagtattttctagtccctggattggtttgaat

SEQ ID NO: 313839 - DNA, 638 bp, Homo Sapiens
  misc_feature (14)..(14): n is a, c, g, or t
  misc_feature (80)..(88): n is a, c, g, or t
  misc_feature (103)..(103): n is a, c, g, or t
aatagtcacagagngcaaatttcaacatcaacttcaaatatctctccatcagactctgcaactttatttgaaggcatctnnnnnnnnnggacattaaatgtanatttaagagagtgagttctacatgacatttcatcaactacagtccatcagaaggctctaacttattgaccacaaagttctaagaacctacaatacataaccctgtaaagcattcaaagtataactactaggaacagaagcaaggcctgccctactgaactcactattggtataaatttaataaaacatacatatttgtatttgctttctgcctgcctttcgtctcccactgaatactggactccatctgaacagttaactgccacaattaactacatgcgaacctgaggaaggtcagtccaaaacaaacaacgctaccaaataagatagaaattttccccacagtgagtcctacctgtgaagatgagttcagatccaaagagtacatcagaatatgctcatttatgtctgaggcaatgcaagaccatatacaagagaataaaatgatttaaagataagcagatgtgagtacaattccctaaatctacttaaaagcttcatttcagagccctttttatctttcagtactgactgtc

SEQ ID NO: 313840 - DNA, 1280 bp, Homo Sapiens
  misc_feature (145)..(196): n is a, c, g, or t
  misc_feature (251)..(287): n is a, c, g, or t
  misc_feature (296)..(313): n is a, c, g, or t
gccaaccaggccagttttctttgcgcggaaaaaaaatgtttcctccacagaagcccccttgcgaatccccaaaaaacgaagcccggctcatttaggcgggggttaaattcccggggttactgcagccggatttcattaaggccgnnnnnnnnnnnnnnnnnnnnnnnnnnnnnnnnnnnnnnnnnnnnnnnnnnnnttttcgcgctttgtacaagaaaggtgggtcaggaaacaggctatggcccatgtcnnnnnnnnnnnnnnnnnnnnnnnnnnnnnnnnnnnnngcctcgagnnnnnnnnnnnnnnnnnnaatgaaaccgtgaactttattgagaactttcaagcatcataacttgaagaagtatttctcaattcagtttatcgaaatacttcagctttccagctggatctgggattattgtttcactaccaggtttccagccagcagggcagacttctccgtgtttgtcagtgtactggaatgcttgaaccaaacgtagtgtctcatccactgatctacccacaggaagatcattcagagtaatttgtcttaggattcctttgtcatcaataatgaagagacctctaagagtgtggcctgagtcctctaggtatacaccatagtcctttgagatctgatgggtcaaatctgaaagaagtggaatccttattggcccaagtcctccttgtcttcgaggggtattaatccaggccaaatgggtaaactgtgaatcaacagagcatgctaccacttcagtatttatagatctgaattcttcaagtctgtcgccaaaagcgataatttcagttggacacacaaatgtgaaatcaagtgggtagaagaagaaaaccaagtatttcccacgataatcagttaacttcagctccttaaattctccatcgatcacagctgttccttcccagtagggcgctggcttggaaatcttcgctttgcttaggtgcagggagtggtcggcgaccgatacccgggatgcctctcccgggtacacttgtccacccgcgtagaagtggcactcctcttcgcgagtccggggcctctcctctgtctcccagccctgcacagctccagccggcagcaggaacagcagtagcggcagcagaagcagccttcggtggcggccgtggtccggagttgtcgcggctagcagcggcagcgcctccatgaccacgcgagcgcagaaacacgtcccttggcgcgagcgccgcttctgccgccgccgggcagctacaaccgcgtgcacgacgcccgcgcgaac

SEQ ID NO: 313841 - DNA, 1010 bp, Homo Sapiens
cagttccctcctggctttaggggctaacaacacggaagattttccttgaaggggggccgagccaatccttttgaaggatttcccccagatttgtggttgggttccttaacttcggggctggggccatgggtcccagggtgtgagtgaaagccctccctcatctggagcttttgcccatggaccacaccttcagtgaggctgccgtgagctccaggagaactgacttctgctttcaaacaatctaccttgttcatgaccaggacactagggatctgggagtacttggtcaagcacctgagcaactgggggctgagctggttccgtgtccacttgtctgagacatccacaaggaaccacaacaagaatcagcagattccatgctcttccatggatcttccaacaaagagagctccaggtgatgcctcttctgtttaccaggactgataatgccaggtgtgtcaagtagaatcacctgggtctccttctctgtgatgacccccagagcttggcagcgagtagtatgcaccttcctggaaacagggaacacctttcggcccagtagctggttggagagtgttgacttccctgcattcggggctcccaggaggaccactcgtaggacccgggaattctcaggcatatcagggtgatggaccaagaggacatcctgctcatctctgttcatggacaccgcggggacgcaaggagtcaccgaactgtcgggctgagagaatccgaggaagtggtccagggcagagccctggccattactgcgagaagccgaggccaagcggggaccagagaaagcggaccccgcgacgcaggacacgcacctccgttggaagcctaagagtgaggaaaaagggatcacccgctccctcgcgacatgagggcccacctgccagactcttaacaccgattgaacaagcctagccccgcgccagctgggggcacctcgtgccgaattcgccacccaggcctcgctacctataccctgagtagtactgccg

SEQ ID NO: 313842 - DNA, 1857 bp, Homo Sapiens
ttttaaagatgagaaccagaatgcttatattttattagtatccaagactggggagagggatggggtgggagagatcaagaattggggagcagatgggaggcgctacctcactcaggagacacgagttcttatccaagttcaaggtgaaagaagtgagggcaggaagagaaatctccctgctagcaacagcgactcagggagaaactctgggcccatagctagctggaggcagggtgacattgctcccaccaatgggccatcttcttagctacacctttgtagctgtggtgccaggcagaagaaccacctggaaactgagctaaggcaggttccttcttccaacagaagacacagctgggcagggactgtgcagactcaacagggccaggccagctagtggccagtcagtgttcatgtctctcaccagtgcctggagggtccccagccaaggaaagaactggtcagttcctgccagcagcttgagctggaatgccctgggagggtcagtagagggtggtcacttgaggagcttcacagagaggcggatgtcaacatcgcagaggaagatgtccatgaggtcatggcctgcctcctgtgctatctgggagatcacgtggcccttcggaccaatcaggagtttcacataagattctttgggcaccagaagcttctgttggataaccagctccccacctggtccttcctcccacactgctgtcttctgctgtacattgtaaggcacctcctggggcaggtgttctaggagcttctctcggataatgttggcacagatctcttctggtgtctggctagtgaggactgcactgtggtactcccagggccctggctgggcctgtgtcagaaggtattgctttagtgtttcacgtcctcctggcttagggctgacaacatgaagatctccttgaagtggggccagccaatcctctgaggatttcccacagattgtgtgtttgggtccttaactgctgggctggggcaatgggtgccagggtgtgagtggaaggcctgcctcatcttgagctttttgccattgaccacaccttcagtgagggctgccgtgagctccaggagaactgacttctgcttcaaacaatctacctttgttcatgaccaggacactagggatctgggagtacttggtcaagcacctgagcaactgggggctgagctggttccgtgtccacttgtctgagacatccacaagaaccacaacaagatcagcagattccatgctcttccatggatcttccaacaaagagagctccaggtgatgcctcttctgtttaccaggactgataatgccaggtgtgtcaagtagaatcacctgggtctccttctctgtgatgacccccagagcttggcagcgagtagtatgcaccttcctggaaacagggaacacctttcggcccagtagctggttggagagtgttgacttccctgcattcggggctcccaggaggaccactcgtaggacccgggaattctcaggcatatcagggtgatggaccaagaggacatcctgctcatctctgttcatggacaccgcggggacgcaaggagtcaccgaactgtcgggctgagagaatccgaggaagtggtccagggcagagccctggccattactgcgagaagccgaggccaagcggggaccagagaaagcggaccccgcgacgcaggacacgcacctccgttggaagcctaagagtgaggaaaaaggaatcacccgctccctcgcgacatgagggcccacctgccagactcttaacaccgattgaacaagcctagccccgcgccagctgggggcagccattacagccgcaaggcactgcgggaccc

SEQ ID NO: 313843 - DNA, 602 bp, Homo Sapiens
gatgaagtgggggcgctcgcctttcctgcctcactcgcagctgccgggtgttggggaaagagtcgcctgcctccggaccggagtgcagacctctgaccctggagtcgctcggccgctgggaaccgtccccttgggtcgtcgcctgggccgcccgtcgttccccggccccgaggggtccggctggccgcggtgtgggtagaggtcagcatgagccaaggggtccgccgggcaggcgctgggcagggggtagcggccgcggtgcagctgctggtcaccctgagcttcctgcggagcgtcgtcgaggcgcaggtcactggagttctggatgattgcttgtgtgatattgacagcatcgataacttcaatacctacaaaatcttccacatactgaaactattgcaagatacgagactatgcttcgagattacaaggataatctgaagcgaccttgtcctttctgcgcagaagatggccactgttcaatgactggcatgtggagccctgtacagagagtcaaagtccggctggaatcaaagctgcgcattctaagaagtactcggagctattgacagcacagtattggtccaggggagctttctttt

SEQ ID NO: 313844 - DNA, 1907 bp, Homo Sapiens
agggtagattttaataagattttaataatattggtaaggagccaaattacagaataccctagaatgtggaatacaaaatctcagagacaaaataaaaactcatgaaaatataagagcactttaaaaaggtaataatctttaggataaagaaagccttttctcaacacaggtactgagcatgtttaataaaaattaaatgagattaaagagaaggggcacagccacacgctccccgccccgggtgaattaggaaggtgatgcttgtgtaggtgaaagcatggagccagggcacagaagagctccgaacaccaacagtgctgcagtaagctgtctccacgtgggtggaatttctcacaatccactcacgggataggaattaattttctctccagttgcagaggggccttgtacatgaactgcgttggcatgcggaggaggggcaacacatccatgttggggacccctcccatccacagccccagctgccaccacggcagggcatgggctttgggggcaacaaggagagacaggctgtctcctctaggaacaactcattattcagctaaacgaaatggaagagctccatgtgaccaacaaacccaaattgagccaaaacaacaggcgtccccaccccccagagggataatgtgccaccaccctgtgtgcagtgggagagcaggaatggaggaaatattcctggttcagttacactcctcgtctgtcaggacagatgtgccaccctatctcggattccgggagggtggctgggggtttccctcaactctgcagcaaacacttcaatgctactgtcatttgaggcctaattttcttccaagggcactatatgccatgcttcacttgggccagatgttcagatcagtgtgtctgctcgtccccattaagaacacaaccacaattatttatttgtccttccagcacatgtagcagtgaagagaggctgccggatcgcagcagatgacagacagctgatgctcctctgaagagccaccagcatcccagccagccaggacacaagaaggggaggcactctcgttctagccctgtgcaccaggccaccacaggctcccctattttaaaccctaaagcaatagttcaaacacatgtagattccatgtgacaagagagacagtaaggaagatttgaggctttatattctttagatgcctacttttgccatactggctagtaagaagttatgtgtaacttcaagatgaaaggcattagcaacctcttagaagacgataatcccaatcttctggagattgaatgagatgtaactcactgaagcttttgactcggtctgctgttaattgaatcaaagtcaatgacaatcttgctgcacttcggtatgaatttccggaatgtcaccccggccatattaaacaggagcctcgcagcagttgcctcgtcactatcatggtatttatcagacatgaaaatcacttcttttatacctgcctggatgatgagcttagcgcattcattacaagggaacaaggcaacatacatactacagcctttcacatcggtcgaatttttgttcatgatggcattcagctccgcatggcacacgtacgggtatttggtgtccagcttattctctgctgtccttctccaaggcaacacgtcatcactgcacccatttggcatcccattgtacccaatcccgacaatcttgttttctgaattcacgatgcaggcgccgacctgggaatttggatctttgcttctctgtgctgataagaaggccacagccataaaatactctggccattccaaatagtcgtcccgtttcttgcaggaaacttcactcatgttgggtccgcacggctggcccccgcccaccatccggtgccggctccgcgcgcaggccggtgctcgtcccc

SEQ ID NO: 313845 - DNA, 346 bp, Homo Sapiens
gttttatttaacaaaattctagtcaagggataagggcataatgaagacaagcttcagttatgaaagtacaaactatttgtgtgattaatttttaaaaatgacattaagaagcccattgttaatatttgcagtcaaatggtttttcttgctgtaagtcctgttgtagctatgtttagggtagtggttctcatctaccttggagtgcataagacttacctagcaggcttgtttagtggtcctggagtcatcacttttataaatagtggttcagagaccacagagagagactgcttcatcgaatgggaagtaccaaggaggtacaattcagtattgtctggaggcgtgg

SEQ ID NO: 313846 - DNA, 1281 bp, Homo Sapiens
agcctgacaaagagcgtgggctttattgttcattcatgattagaaaagtgggtgctgggacccccgtgaagggggttgggctctgcccggtcactgctggtgcagggtatatacaaggtctacggccctcacaggcctgactggctccctcttgatggccaccaagcccaggcactttagaccagagccagtggccatccgtagggccaaaggcagttctggctgtgcagggtccctgggttaggaagtggacagaggctggggtcaccagggcaacccggacagggcccacgggaggcagggacgctggtgctttgggagagggagagacatctccttgtccttctggaatgtcctgagacagaggctggccctggtcactcatccagcccatccacggacctgctgtgtgtccttgagtgggtcgagacccttctctgggcacaggtctctgcagctgtccagttctgaccctctgggctattgtggccagcccccatgtgccaggagggagctgcctcctgggaacagctgctgagagacaagagtggcctcctgcgtggtgcttggccgcagtcagagcaagggctggtccggggacatggtgcagatgaggccagcctgggctctggcagtctgggtagtgccatgtgcagggaggtggacacctcacaggtatggcgactcctggggtcgggcagctgagttgcagggcaggcagcatccagggtcctgggtgtcctactgctggggtgccatgtccatcaagggcttctggaccccgaaggccgtgatgaagatgttgactaccacgatgatgaacaccaggcccgtggccaggttgttgaggaagtccagcttggcgtgcttgtccgggttgttaaggtcgtacttgacaaggaagatgagcagcacccccacgccgatctgcagcacaagggagatggagatgaggaccaccaggggcacatagaaggcgaagctggggccctgttccacgacggccttcagctgggacgcgttggccatcagcagcgcgatgtccagcatgctctcggctgcgctcttcttgctggcgtaatggttcacgttgatgggcccgtgcctccagccccagcgggccggcgaggcgtccggggagccgggtgtgcccggaggcaggccgccgttgagctcgtactcctcggttcccgagtccatggtgcggccgcccaggccgccaggatccgggcctgagcgcgcccgcctcgtgccgaattcgccacccaggcctcgctacca

SEQ ID NO: 313847 - DNA, 1131 bp, Homo Sapiens
cttttgggggccaaaggcgcagtttttggggtttcgcccaggggctccccggggtttggggaaaggggccccagagggtcgggggtctccccaggggccaacccgggacaagggggccccccggggaggcgcaggggaaccgttggttcttttggggaagaaggggagaaaaacattccccttgctccctttgggagaaattttcctgaacccaagaggcttggcccctgggtcaattcattcccaagccctttcacgggaccttgcgggggtgttccttgagggggttggagacccctttttctggggcacaggttttctgcaagctgtcccagttctggcccctctgggctttttgtggcccagccccccatgttcccgggagggagctgcctccttgggaacagctgctgagagacaagagtggcctccctgcgtggtgcttggccgcagtcagagcaagggctggtccggggacatggtgcagatgaggccagcctgggctctggcagtctgggtagtgccatgtgcagggaggtggacacctcacaggtatggcgactcctggggtcgggcagctgagttgcagggcaggcagcatccagggtcctgggtgtcctactgctggggtgccatgtccatcaagggcttctggaccccgaaggccgtgatgaagatgttgactaccacgatgatgaacaccaggcccgtggccaggttgttgaggaagtccagcttggcgtgcttgtccgggttgttaaggtcgtacttgacaaggaagatgagcagcacccccacgccgatctgcagcacaagggagatggagatgaggaccaccaggggcacatagaaggcgaagctggggccctgttccacgacggccttcagctgggacgcgttggccatcagcagcgcgatgtccagcatgctctcggctgcgctcttcttgctggcgtaatggttcacgttgatgggcccgtgcctccagccccagcgggccggcgaggcgtccggggagccgggtgtgcccggaggcaggccgccgttgagctcgtactcctcggttcccgagtccatggtgcggccgcccaggccgccaggatccgggcctgagcgcgcccgcctcgtccg

SEQ ID NO: 313848 - DNA, 641 bp, Homo Sapiens
ggcacgagaagctttttacttaacgttgtcttatttccagtctaattttacgctgtagcagaaccagatggctgagaaaattctggaactatggatcttgaccccaaggatatattattttattccaagaaagatcaggtaggcgaaaagatgacaggatacagagtcaatccataaactaaatatttataactgttctgaattatacagagtctatatgtgtcagctacttcattcctgtaaatactcttgctgtgttataaatatggcaagaaataaacatgaccaatatcaatagacttcttgaggctactataagttttgagtaaggttcaataaataagaatgctaacccttaagcacagactagagcttgcttgggtttcttcctgcattacaaggtaaaaatttgttaatgtttgtttttattcagcttgggaaagctttgtgccatgaatacgtcgcatttaataccaagcaacccccggcatatagaaatacctttaattaaaaaccttacatagaagattataatatcagacgtgacaaagatttgagtttatttgcctggacaacttgggtttgtctggcttttgttttctttttccttaaagataaatgggcagtacacctacaagcca

SEQ ID NO: 313849 - DNA, 1116 bp, Homo Sapiens
gtaagtccatggtggtataaatatatatatgcataattacacaatttacactgcacacatcgtttacaggggacaattaactgagagggttaatttaaatgaccatacaaaatacttcagtaaacaaagtatgacaggcagtaaagaaaacattcatagactcctagaaataatctgaattcctttcattctgaagaaatatcatttaaggacacagtattgaatataatgttttttgtattaaaacaagaattgctattttacagtttaagaaactttacatatatacaaaatttacacattgggaatggtaatcaagcaaataggtttttcagtctcatagatctattttccttcgatcaaagacttaaattctttcacattgtggtcacttgcaacagacatagcatgatccaaagctcgaacacttgcaaggagttttactatctgttttatgttttcccttgcatttcttttttccacatcagaacacccgatactatttctataaattgtatccgctaagtgtacaaggtatcggcaaaagttttctaactgagaaatagtcctttctcctttcagattcatgaaccattgtttggggaaacaattgattacattttgggcttttttgatgctgtcatctccatattctgaattctgaaaagccatgagaatatatcgatttaataaaccatctattgataactcttgcagagttttatttgagaaaatgccataccactgaagaaaattgcctaacagcttaactgaagaccaaaactgtcgttgaaaaaacaagtaaggcccagaatttttattttctaagacatttttgggatataagggcataaatacatcatcatctaaagttcttctcattctcaataaaagtgcctttaggtatacctgtgtatttttattttctgcattcactactgaaggatatccattgattaattttagtgtaattcccaccattcttgaagtctgtgttgtagaaaaagggtcccacatattttcagctatcactgttagtttaggaagaatcaccttttccacaatggtaggtagtagggcaacatctacatcatctttttcttgctctcgttcttc

SEQ ID NO: 313850 - DNA, 384 bp, Homo Sapiens
ggcacgagtgaaaatatgtgggaccctttttctacaacacagacttcaagaatggtgggaattacactaaaattaatcaatggatatccttcagtagtgaatgcagaaaataaaaatacacaggtatacctaaaggcacttttattgagaatgagaagaactttagatgatgatgtatttatgcccttatatcccaaaaatgtcttagaaaataaaaattctgggccttacttgttttttcaacgacagttttggtcttcagttaaggtcataaaacccccattccagagggggtcctgccccatacccaggaagggaaaggattgctgctcagggggggccaaggaggattctgggacgggacagggccttgtgtttgtcttc

SEQ ID NO: 313851 - DNA, 877 bp, Homo Sapiens
  misc_feature (22)..(22): n is a, c, g, or t
  misc_feature (24)..(24): n is a, c, g, or t
ctctctggtggtttgtgtgcgnanatctaattttcaagtcccagaagacgttcctgtaagagcaactcattcctcgtggtgttgtgtacatgaattgcctggagtgcctgaccatgatacggcttcttaaagcgattgttcacctgtagtattgagtctgagattggatacccccaaccagaggctcctgataccttggaagatggaaaaggtgatggaattatttaatgcagggtcagaacatccactaagaacatagcacctcagtagagcttacattatagtgccagggtagagttattactgaatagcttaggatgatgaacattaaccttcctacaggagtagtagcagctgatttggtgaccatgattggtcaccttttagtgtaactgcaaactaagaacaattatggcttgacatatactccatgtagggaagtgatgggagaggcagcctctgtgtggtccatccttggaagcactgcatcgattttgctcccctctggttttaaggagatcttttagacctttccttgctaactgctttcagtaaattcttgatggccttcgattctggattcagacatctcttctcacccttctttttcattgtagcaatgatctcaacacgtggacaaaattggcttgcaggaataatttcaagtttttctaaagaccttggattaacaggttgattactaatgctgatgcaggtacagcgtacagttctagagagaggtactccttgaatgccacttagagtcagaaagataaggcagcaaatcagaatggcagtttgattcatggtgctgagactggaggttcctctgctgtaggctcagaatatgtctaagcaattgaggaatgtctcaccc

SEQ ID NO: 313852 - DNA, 605 bp, Homo Sapiens
  misc_feature (421)..(421): n is a, c, g, or t
  misc_feature (471)..(471): n is a, c, g, or t
  misc_feature (542)..(542): n is a, c, g, or t
tgtatggctacttcccaccaaacggccaaagctggtttaccatttctggagacaaggcaatggggaaactgggtacttccctttccagtggccatgtactgatgaatgggactctgaaacaagtgctgctggttggagcccctacgtacgatgacgtgtctaaggtggcattcctgaccgtgaccctacaccaaggcggagccactcgcatgtacgcactcatatctgacgcgcagcctctgctgctcagcaccttcagcggagaccgccgcttctcccgatttggtggcgttctgcacttgagtgacctggatgatgatggcttagatgaaatcatcatggcagcccccctgaggatagcagatgtaacctctggactgattgggggagaagacggccgagtatatgtatataatggcanagagaccaccccttgtgacatgacttggcaatgcaaatcatggataactncatgtccagaagactatcaccgggaggtccaagcaaagaaccaagtcgtcatgctgctggaggagtccttnggaagccgacttttcgggcacttacgttatagccttgctttgagttactacatttccccttgc

SEQ ID NO: 313853 - DNA, 710 bp, Homo Sapiens
  misc_feature (696)..(696): n is a, c, g, or t
cccctgtcctgcaagaggatttggagtttcttctcgggaaggtggacaataccctgtctgtcattccaaggccagaagtgactgggtaggcaagacatccctggggtgagaggaaccttgctttctatggccctcctggtggggaggcctggcctcaagtcaaggagatgcggaaagtcagtcctagagggatgtttgaggcataccaggcgctcgaagaatggtaggaggtgcacctggaagagatgctgagcagcagtctacacttggacttgacaagacgccactgagagcagtctgcactttacacctggactgcacatgacaccactggtagcagcctacactctacacttggactttacgagacgccactgatagcaggttacacttggactttacaagacgccgctattgcgcgcatttgcttagctactcagacttacatacagactgtgactaacccttgacgacttggctcaacagctaactcctctatgaagtgcttgcatgccacggaccatcagcaagactccagctactgcgccctcacagtcttgatgagaactcctcgagccaggcactatactctgatcctatgaatcgatcatcagtctaattctaagcatgagatgagtttcatatacagcacggatatagacgttgtcattgagtaggagctcagacagcatgacntataggcaagactg

SEQ ID NO: 313854 - DNA, 643 bp, Homo Sapiens
  misc_feature (432)..(547): n is a, c, g, or t
gaagaattaacgatatgttaacacaagttgactgtgatagaataattacaataaatatgcctattttcctttggggagaaaagtctaaaattctgctttatagaagctattctcagctctaaaagagcatatatgtagatcttcatttcttttcttctaacaattttaggggaaaatacaaaccttaagttatttcctgaaatatttcccaggatgattactaccttggattttaaggcttctttcttcacaagttctgactcttctataagcacaatcagaatggtcagaatgctgactctcctttaggtagtcagaatgggtcttccaaacctttgtatgagcccattagctgcctcagctttccctcaactttcaggaaaacacaggttacatattctttacgttactatgagaaactacctacattannnnnnnnnnnnnnnnnnnnnnnnnnnnnnnnnnnnnnnnnnnnnnnnnnnnnnnnnnnnnnnnnnnnnnnnnnnnnnnnnnnnnnnnnnnnnnnnnnnnnnnnnnnnnnnnnnnngtgacaaagtgagaccttgactataaaaaaagataaccctttccgacgtgatgacctacccacacgagcatgcctcttgcggggtctctcattcct

SEQ ID NO: 313855 - DNA, 602 bp, Homo Sapiens
  misc_feature (75)..(75): n is a, c, g, or t
  misc_feature (523)..(561): n is a, c, g, or t
caaactgattggttcccacccagtgaaactgggccattctcatcgttcttcaactcttaaaatatgctcccctgnggtcagctgtagctccaagggattccatctctgtatagcagcaacccctgaggaacccttccccactccgtaagtagttgtctctaagtgcagcgtagtcttcctgcccagctgtatctaggacatcgatctggacatcctccccatctagcactaccttcttccgatagctgtctgcggtaggctcatagtcctccacaaactcatcgtacatgaactgtagagtcagagctgacgcccacgccaccactgccctccatgatgtgtctcagcaccaaaggattaagaagaatctgcaccgcgagccagtccgccgccccgagggctccggaagccgcggctgcgtggctccggccggagggtactcggtccttgtcgcctggaaggccccgcgccgggagcggtcgaaggaggagtctgacgggtggcgggggagcctgggcggctnnnnnnnnnnnnnnnnnnnnnnnnnnnnnnnnnnnnnnnctccgacgctttgctctggggagatccaccctcctcctggc

SEQ ID NO: 313856 - DNA, 618 bp, Homo Sapiens
  misc_feature (310)..(310): n is a, c, g, or t
  misc_feature (355)..(355): n is a, c, g, or t
  misc_feature (361)..(361): n is a, c, g, or t
  misc_feature (367)..(367): n is a, c, g, or t
gctgtcttccatctttctcgctcgaatttctctcattaaatcaaaaaataccttgtcaacattagctcgtgttttagcagatgtttccacgtagttaacattccactgctcagctctgttttttgcctcttctacagaaacctgtcttttatcttctaaatctgatttgttaccaaccagtagaaatggaacattctcatcttcttttactcttaaaatctgctccctgaagtcagctgtagctgcaaaggattccatttctgtaatagagaaaacacagaggaacccctccccacttcggaagtagttngtctctaattgcagcgtaagtcctcctggcccagctgtatctaanatatcnatctgnacttcctccccatctagcactaccttcttccgatagctgtctgctttggtaggctcatagtcctccacaaactcatcgtacatgaactgtagagtcagagctgacttgcccacgccaccactgcccaccatgatgactttgtgtaaagccaaagaattctgacccttgggcttatttgcagccattttgtgtctcagttttcaccaaaggattaagaagaatctgcaccgcgagccagtccgccgccccga

SEQ ID NO: 313857 - DNA, 853 bp, Homo Sapiens
  misc_feature (720)..(758): n is a, c, g, or t
aaaccagagagggttgtgcccaggggtaggtattagccatttccccggtggctgcaggcttggggtttttttgagcccttgtttctaacaggaagggccggtgcgtgttatacttctggaattcggatttgtgtcacccaccccgtgaggaaatgggaaccattcgtcattcttctttgacttcttaaaaatgggcttccatggaattcaggctgtagcgccaaagggattgcattttctgtaatagagaaaaccccggaggaccccgtgcccatttgggaagtagttgtctttaatttcagggtagtcctcctgcccagctgtatttaagatatcgatttggctttcctccccatgtagcagtaccttcttccgatagctgtcttctttggtaggctcatagtcctccacaaactcatcgtacatgaactgtagagtcagagctgacttgcccacgccaccactgcccaccatgatgactttgtgtaaagccaaagaattctgacccttgggcttatttgcagccattttgtgtctcagttttcaccaaaggattaagaagaatctgcaccgcgagccagtccgccgccccgagggctccggaagccgcggctgcgtggctccggccggagggtactcggtccttgtcgcctggaaggccccgcgccgggagcggtcgaaggaggagtctgacgggtggcgggggagcctggtcggctnnnnnnnnnnnnnnnnnnnnnnnnnnnnnnnnnnnnnnnctccgacgctttgctctggggagatccaccctcctcctggcggctctgcagcagccgccacagatcacttccggggcgctggggagcggggcccc

SEQ ID NO: 313858 - DNA, 609 bp, Homo Sapiens
  misc_feature (575)..(575): n is a, c, g, or t
aatatttttttccatgaattctggttgtgtttcatagcagctgtctcttgtttcaatgtgatttactttaaagcaactctgaggatctgaactatgtttaatttcaagtttttatctgtttctattgactattctttttaagtgggctagttctatttgttaaatttggtgctctctttagtgctcttggtttctccaaatgtttgttggttcttttgttgttgttgttccatttgtaggaacagaatttcagtctagactgaaattcatagctggacgcatttcctcacttcaatgagaactcatgtttacctggcagtgaatgcaggttttgattacaagaatctgcctcatgggatctggtagggataggcagactctgtaggtaacgtctcttcttagaatagtttcctgaccctccagggtattgtccttttcctctgaccttagcttactctggaacagtaatatgttggtaaatgtttgacagccagctctgggtggagtgggggaagtcctagtttgcagcatttcctgatttccatgcaatgtgggagctgagaagagatgtgcanactagattcttgagactgacttcatttagcatcc

SEQ ID NO: 313859 - DNA, 789 bp, Homo Sapiens
taagtccacaccgggtccttttccctaccgcaggtgtccagtcattgcccaggcactgggccccgctcttctccacacatctcaccattacactgagccaggaggaggcggatcctagcatctcgacatcggctggccagctgcaccacttctctggccccagcagcatctgcaaaggtgacaccactgaagtctaggaccaccaccctgacaggctcagcaactgcaaccattgggccatctggctttgaagtctccttttctccttctccgagccccaggtgccactccaggttgcagcgaaactgcccacgggtcccaaagtacagtggtgttggatagctcaggatgcagagccccgggacctggaggagctccgggtgcggcagaccacagtcatcatggagaagaccacacccacagccaggcccaaatccacactcagggtcactactgccacccaggtgaccatccacacagcctgcaggatagggataggggtggattgcccaaaagaaaagccaggccatcactgctgggtaaagagatccagggcagtgactaccaaggcaagtgatggggagagatgatccaggaagaagtggaaagcatgacagaaggaaacaacagggttgattcaatgggacacacaccaaatgtaatgacccgcaccagttgggaagttacaaatattcaggccaaaggggttcaaaccccatcctttcccttgcctgtgagtaaagcatactaggagttatgtttgctgggggagtgggtgggttgcagaac

SEQ ID NO: 313860 - DNA, 1411 bp, Homo Sapiens
  misc_feature (31)..(31): n is a, c, g, or t
  misc_feature (60)..(60): n is a, c, g, or t
  misc_feature (672)..(737): n is a, c, g, or t
  misc_feature (813)..(928): n is a, c, g, or t
ccagagaaagatttatttcccggcctttatnccttccaaaaacctgggaaagggaagggnccaaaagaaaagacagtagccttatggttccatgggcaaagcaccctctcatccacagtcccagttcccaaggaaaaattcccagcattttcctacatttgctgctgcccttgtctgaaatcagcactttccatggaggaaggaaacctgctttgttgcatcttctattctcgggtttaatgttggtaaatgagtaactctagcatttgtacaaggctccctaagactcctgcagctgtcgacaaagcccagggacataattgaatctggagattcctcaggccttgttttgaaaaagacttgaaatacacataggaagaaaggcataaaaataaatgttcacttgtctctgctgtgagtatgtgttccaacttttcagtgatggctttgagaattctcaaacttgactggctctaagtgtatctggtggcttttgtatcgtaacctgaaactggcttagtactttttcctaaaagctcaggatttgagaatgaggaccccttcgccaggaaaacatgtatacactcaaaattttgcttgcagttctagggtgtttagacccttctcagatacctgtgcatcttatgggttttgtttttctctttgagacannnnnnnnnnnnnnnnnnnnnnnnnnnnnnnnnnnnnnnnnnnnnnnnnnnnnnnnnnnnnnnnnntgggttcaagtgattctgcctcggccccttgatcagctgggattgcatgcatgtaccaccgcgcccggctaattcnnnnnnnnnnnnnnnnnnnnnnnnnnnnnnnnnnnnnnnnnnnnnnnnnnnnnnnnnnnnnnnnnnnnnnnnnnnnnnnnnnnnnnnnnnnnnnnnnnnnnnnnnnnnnnnnnnnnatgagcaactgcgcccagctcttgtgtaccttatgtgaggaagtcctgctcaatcaggatcggtcacgcaggccctgatcttgctactctggttccatgtcctatggaagaccaaagtttaccaagatagatttttcccttcatagtggcagatggtgttaacccctgcaccatctgtaactcagaaatccccaccatttcttcccctgggcttcagaatagaattgcctggtttctctgatgatcagcatggttccttcccaaatcagcaaggaatgaacaattttgtttggcatggatgttagcactgtttggctcgttaggccccaggcaggcaggcaccttaattttttccttgcatattctagtcttcagaagcattgccttttgtcctactggtagtgacatagaccaataacagggcatctggggattttaatcctggtcttcctgctattctcttcacttagttgcccctccttg

SEQ ID NO: 313861 - DNA, 1229 bp, Homo Sapiens
  misc_feature (528)..(831): n is a, c, g, or t
ccatttcttcccctgggcttcagaatagaattgcctggtttctctgatgatcagcatggttccttaaaacccaaatcagcaaggaatgaacaattttgtttggcatggatgaaattagcactgtttggctcgttaggccccaggcaggcaggcaccttaattttttccttgcatattctagtcttcagaagcattgccttttgtcctactggtagtgacatagaccaataacagggcatctggggattttaatcctgaaaacagtgagtctgatactgcttgtgtttttcatcagtgtccaccccaagtgggtcttcctgctattctcttcacttagttgcccctcacttgccatctgagcaattggcaaggatgtgccaggcctaggttaaacttggaaacatgcttgaccattctattccctggtcctttaagatcagtttggctgcaattttggctccttggaccctcaagcatagctggtaaatcaagttagagatgtaactgccttaaaacatgccagcttannnnnnnnnnnnnnnnnnnnnnnnnnnnnnnnnnnnnnnnnnnnnnnnnnnnnnnnnnnnnnnnnnnnnnnnnnnnnnnnnnnnnnnnnnnnnnnnnnnnnnnnnnnnnnnnnnnnnnnnnnnnnnnnnnnnnnnnnnnnnnnnnnnnnnnnnnnnnnnnnnnnnnnnnnnnnnnnnnnnnnnnnnnnnnnnnnnnnnnnnnnnnnnnnnnnnnnnnnnnnnnnnnnnnnnnnnnnnnnnnnnnnnnnnnnnnnnnnnnnnnnnnnnnnnnnnnnnnnnnnnnnnnnnnnnnnnnnnnnnnnnngtgccagtggatgagggaagtacactggttctcccccgagggtacctgcccagaaaagatgctatagatgctactcccatgtgccaaaagccggtgggcccactggtggccacagcttatatccgcccggtgctgtgcccgcactaagggagaggcgggggcttccccgccgaccacaaagaaggaacgtcacactcccccaaccagtggcgcaccgattcgatggtaccagcgcgcgtcagcacacccactcgcccggaacgcttctccgcgccgccgccacccgtgcggtcgcagagcgccgatgcctagccgtgcgaccacgcatcccatcttaggcagtcggcgcagacaccacgtcaaagatttgcatggaacctgcagccagctaacagcag

SEQ ID NO: 313862 - DNA, 743 bp, Homo Sapiens
ttcacagcagcataagtggggtcagaaggaccagagggtgggtggggccgagggagggcagtgaggttggtgcagcagcacaggtggacaggccaagggtggccagggagacgagggcaggagcgtgggcagccgcatgtcactcaaggcgggcactccttgtgctaggaggggatggtgtccaaggcagaggagcgctcttcaggtcatccacgctggcctgtagccctctagtctcccccactctgggcctcctctgccacttcctcctctttggatgcctcaccctcctgttggggggcagatggcctcaagtcctccttgcgcaccaccccggaggtgaccgcgatgttctccgcctcctccacggtcttggtggccacagtgttgacgctgctcaccacagcctcgctcacggcgttggcctgctccttggtcttctcggccactgaggtcacgctctgtacaacattctccttggtcttggctcccacatacatgaccccctccttggtcttctcagctgcttccgtcaccccctgcttggtcttttccaccgcacccaccacgccctccttggcgatggagaagcccttcttgaagacatccatggtgggtgtgcagggttgtgctgctgcaggcaggacggagctggatctccctgcgagctgcgggcttgagctggctcgagtgctgccgcagcggctgtccccgatgcctcctattgacgccgatgaaatatt

SEQ ID NO: 313863 - DNA, 542 bp, Homo Sapiens
tgaatatgtatggcatagtttactatgttatgcatattcctattgcaatgctctgttctgaaataaacatcttttctttgtgatcctctctctgttatgtaggttgacagtaaaaattcaaagtggtttagtgatttgaactttgctttatataaacatttcctttttatatgctttgtgaaactagaaggtgtaataattaatggcatacttagttaaaaaaatttatatgatatgcacatactgcatttggtcctaataatgatctcaacatttcatttacaattagcttattccacagtattaagaaaacataggtttcttcctattttatataaatcagcctttaaaataaaacaaaccagcttttgcaaaattatttacaaagatacctggccttgtcatttgtcatttgaaaataattatgggacctgctttttaaatttactgagggggatctctttctgctgtaaaattttacttctttctgaaagtaaaatgtattttaatgatataatgaaaggccaggtgcagtggttcat

SEQ ID NO: 313864 - DNA, 915 bp, Homo Sapiens
gcaatggcccccgtgtcagtatcagctctggccttggccctacagagcttcccaatgaaagagactgtaatagaagaagcccagaaggaaaaaacaaacaaggcaacatgggggtatttcaagactgtcggaggtgttcctgaatcggtggcattaatctagaggccatgttctgcagtgggagagcaatgggcttgacatcacagggaccaagattcagttgccggctctgagggttcctttctaggtgatctcaggcaaggaagcttcttgcactctgagcatgtttcctcaagtttcaaatgcagagataattctgacctcacaggaattgagacaatgtgtatgaaagcacctattttactacctggcacacaatgtaggtgctcaatagatggtgtttgaatcttaaacttacctggggaaatttttaaaacttcaccattcaatagataggagttagcaaattagcaatatgactgcttacttcctttggtttatttatacataaggctttaaaatcatcaaacgctaggctgtcaaggaaaatatactatttaataatcttagagttcatttaatctcagcacaggggaagggtttcacaatgaagatgtgtagcaggcgttatcccattgttatcactgggcagaacaaagaccaatgagtagacactataagaaggcacattggctggtcacggtggctcacacttgtaatcccaccagtttggaagtctaaggtggaagttcgagcacagcctgtcgacacatgagagaaccctggtctctcctaaaaatccaaaattagctgggtgtgttagcgcatgcctgtatatcacagctactcgagagtctgagacaggagtctcacttgaatctgaggcacagtgtctacagtgatctgagatcgcgc

SEQ ID NO: 313865 - DNA, 500 bp, Homo Sapiens
  misc_feature (391)..(410): n is a, c, g, or t
agacatacaacacatatttatagatctacatgagcagcaaccacctcttcttctatctgcaacagtgctttcgtatggaggcttacatcacatggcggttggccgtccagctgatcgggcaaggagaaaagaaagaaaagtgcttagattcagaaacgtgaatattgccatctgggatacatagcagtcatcactcagaaagtggcccaatgaggtagaaagagtaacctgtcactcactcttaggatatagctaggcaagtctcagtgtctcgtctctggaattcatttgtaaaaatggagtaaaggaggagagaaaaggcatgggcaaacaatggtgattccagaaatcatttctatttggctttggaatttgatgagagagagaagannnnnnnnnnnnnnnnnnnncccccaccagtacatgcccagccttgactttctccaacctcagtgtcagcatccaggaaaggactggacagctgcagcaggaaggctcag

SEQ ID NO: 313866 - DNA, 624 bp, Homo Sapiens
gacatacaacacatatttatagatctacatgagcagcaaccacctcttcttctatctgcaacagtgctttcgtatggaggcttacatcacatggcggttggccgtccagatttgaatctgagatagcagtcgttgcagtacagttggtggtttctgatcctgacttcagctcctgaggaagagcctccgaggtcacactcacaggcaacacacttaaaaacaatgccaaatgataacaaagacccagggactcgatgatcatggcggctcctttgcccagaatgttattgcagtaggagcatatgcgcttcccactgactgacctgttacgcagctgagagcctgactgtgaagctgaaggggaatggcttctcggggtgggggactgtgtggtggcccacacctgtggtggaggtcttcacggagccagctgaaggtgggggcacgctggaggaggggttccgcatgtaggcacggtttgatgtggacaccagctgaggtggtgggcgactaaagtcttgcacagaggaagaagcatagaatcctgtgggctgattgagccaaggaggctgtctccaagaattggatcggggggagtccaggttatctaaagattcgcctctt

SEQ ID NO: 313867 - DNA, 642 bp, Homo Sapiens
gagactgcatagggctcggcgtgggggactgtgtggtggccaacctgtggtggaggtcttcacggagccagctgaaggtgggggcacgctggaggaggggttccgcatgtaggcacggtttgatgtggacaccagctgaggtggtgggcgactaaagtcttgcacagaggaagaagcatagaatcctgtgggctgattgagccaaggaggctgtctccaagaattggatcggggggagtccaggttatctaaagattcgcctcttctcatgatcccaggaagactaacaggctctttgttgacactggcactgcgctgtcggatccagctgttgtcattgtgaaggggtgttctcttcctcaatttcctgaaggatttgttgcctctccaattctgctcctgatggtacttgttctttcttggatctcctctgtgaagaggtcgtgttcccaatttggtctaaatatttattgtttccatttttatttgtggagtaatcatccagttcagtagtagatctggatttattcctgtcaccaggaagaaaacctgaagatgcttcttctgtctttggtatatcataggaatcaacaggcctcctgtactggtatattctgactgatgtttcccgctctatctctg

SEQ ID NO: 313868 - DNA, 755 bp, Homo Sapiens
  misc_feature (340)..(340): n is a, c, g, or t
tgccaaacagtttaggccagctggtaagttgggaagtcatgggccacctcttaggtgaaactgggtgtcatcatattagaattacacatgtgtgcccagattcttctgaggaactttctctcccagatatctgcccatgtcataaaacccatgacacagatatcggtatagccttatctacagtaaaaattgctgaacaactaatgggttcccaaaaagggaatgggtattcaaacacggctaccacacagatgttaaaaggccaaggcagacatgaatacagatatgcggtgcttacctagatgtactagtaactcaacagtccacagtgcaagacagnctgtgtggtgtacccacgcctgtacagctttacacatacacaggttctctggaaagaaactgcagcaactggccatgacggtggcctctgtgggaagggaggctgggggttagagaaagatgccactgaacacacatctattcataggtgaaattaactggaaggaaactagcaaagcatttgcctttggggtcagcacaggagcagaggcccaggcagggccttgctttgacacacagatgatgggtcacacagttgtcaccttgacagaagagtaacagggacagcacaccagtcactctaggagctgaggccagaggaactcaggtatttccttctagaggtagtaagtccaccgaggcagatgccaagccgggtggtgcctcgctgtgtacaatgttctgctccctgtgcc

SEQ ID NO: 313869 - DNA, 2279 bp, Homo Sapiens
  misc_feature (813)..(822): n is a, c, g, or t
  misc_feature (1868)..(1868): n is a, c, g, or t
  misc_feature (1985)..(1985): n is a, c, g, or t
ccccaagaaaaaaacagaaacaagacgaaagcaaatggaaacgtagtttgtgtgccaagtatatattctccccagtaaagtgcacctgtcaagatcataatgtgattagggtaacagccaaagtagacaaatccactctaccctataaaacacagatcatcacattgacagatgaaaaacaaaaacaaacagcacaagcaaacagaaattataatcatactctatcacttcatgcaacagcctggaaaatgatcagaattttggtctacgtgagactgtgtagactgtttattgtgacacctaggttttcagttccttttagtggcttacactgattctttgaagcctacagggctgctttgcctcagccccaccatatgtaagtgcacctgaggtgcagtggttgtctattaggttttgcccacttttacaatggttccaactcaacactccacccaggaagcattctttgtaattgtgggagcactccacactctttcagacttattattctcccagtttactttgtaggaatgatctggaaaacttggtgaggactgactcaccactgaagactgtgatcatcaatcaggttcccattgagaggactctatgacctgccatggctcccattccaccctttatatgcatctaccacggtgcctatcttatactagtggcctgtaaaactcttaatactaagatgtgttattacctattgtcactgtttcctcaaacaatggcttagaaaatgctgacttaagataactgattgataaactgggctaagatattagacaaaaattaaatagnnnnnnnnnntccaggttaaacagtaaggtgggtggcagggggaggggggctctaagatcaggatatgaaggtgaagggaacacaagatgaaagttggaacttgtccaatgacctccccaccaacaaaaataaaaaggcacataaaaatatttttattttctataaatacattaggaaatgtatttcttcccaacccagtccaccccattaactcaattttttctacataaaaaagatgctaataccaccctcacctgtgactgctaaacagagaaagattgcctggactaggcattatcctcctagttggaaataaaggccctttctgggggcaggaagtgggattttcaggggaccctacagacgtaggcagccaagagtcaaacaaaacaagcatatgcaatagtcataattatgctagtatgacagtatgaattaggtgactcagccaggcacatacaggagttcggagtggggacagtggaagcccacaaaactccatgtttgggccatcagtagacacttggtctgagaaacacagtaaaatgtctgcccgggtagtcacgatcattctagtatgaggtagacaggaagcagagcagggccaggaaattggaaggggccacccaggccctcaggagtccctgacaagggaaggtccctccatgctctctgagggtggcggggctccaaagatcctggccaggagccctttgttggagcgggccttgtcctgggcagttgccaggcgagcccgttcacgtccccctggccgtgctgctttacgggcgcctcagttcctgctcagtaggaacgctgggcaaatgtccaggagccatctgggcgagcagggtccccatcggccgcaagaaagcgttgtccccgttccacactttgaagatagaagtcggtctcacgcttggcttgagcaacctccgctctcaagcgctgcctgcgcacctggcgctcaaaggcgaggtgctcgctgaggtgggaccaggtgaaacggtgcaagtacttgaggttccaaagatcataacggaaggggctgcgcntgcgggcacccataggcgtgttgtgtagactggccgccacgcgcttggctatgcgcttgtcacggaactccacccatccctcggtgtagtccttggtgtaggaccgcttttttcctnccggcagctgctgctgccttcttcttgcgtctcacgaaccggtcctcagcctgaaagaagacgcgtccgacctcgccataggcgctgagaaggttgcggacgtgcaggggccggaagcgcggcgggatatggcccaggtacacaatacctggcactacccgtttcttgctgccacaggccgcttcttcggattcctcctgctcctcctccgcatctagtgtctgttctgtcccttccagcggctcttgctccgttgcggccttctccgattcctctgcctccatgttgactccc

SEQ ID NO: 313870 - DNA, 388 bp, Homo Sapiens
ggggaagatatatcgcatcaacaaagaagaaaaaagagaaactcacaactgaagaaagtgaaatccacacttaatgcggacctctgtctctggtgtgcaggtcctctgtgtccaaagataattagcactttataatgctaattatcaactgccccctctatttaaaaataaggtcatctatgaaatagctttaggagctcaaagcagaaagagggttatagaaaatcctgtgtaggtataagcctgagtttttaatattcttataattctgtgatgtgtctggaaactgaaccgggaggaaaacagtgaacctatttagtccaggagactagaaatcaggactcagaagagtaaacatttctgtaatagttagtcctcaacctgcagc

SEQ ID NO: 313871 - DNA, 2118 bp, Homo Sapiens
  misc_feature (285)..(285): n is a, c, g, or t
ggaacatgaacaagaccatgtccagcgtttttactgtgaatgtaaatggaacagcagcccaaagctgttgtctgtgccccagaggtgctacctgtagacagggaccaactccatgtgtgtgtgttaagtgtttgactccaattaagactcccaagcaaatcctgcatattccaaatgtaaagagtactcagtgggaaaaaggttgttacctcaaagtcattgcttctttcctggctgggtcacagggtgaagagatgaaggtgtctgatgtatatagacaattanggaaaaatgagcggcaaaggagctttccccttcagctgcactctaaaggggaacattttaaggaagtactagcagctttgactcttctatgctcctgttggtttacaagccaccaagaatgtcagtgttgaggaatacggcctggtaaaatgggagatgtacaatgactaaatgaaaggcagggtagtttttaatgttggaagcacccgtgctgggcactgggagctacccagaaggaatgcacaacgctcccctcaaggagctcacagtctagcctactccctggctggaagcctcaggaagacgtgctaatttattgtggaataggtagtttgcttattcatgcccctgtcttccttctcatgaccatttccccctttctgtctggcttgcattattgatttccaggaccaagtcctggcttcctcctgccttcctgagatgatgttctgctcagggagaagtggaggggtgagctgtgtgtgtccactgaggcacggccaggaagaggcagcctttacctgtgaggggctccatgctccagcagcagagcaggttctagtgacaattcaactttttatgctatgaccaggggtggatctaaattttatggggctgaaacttgaattatttagaaagacttctttaagaaaaacaatgttaatataaaattaggtacagggtcttggaaggggccctgaagattaagcttccttagcgtcacaataagtccgtatctggttgcaattgaaaactgatgcttcagtgagggtatctaaaaaggtaaactggcatatccagggcaaatgtgggctgccaatggctcatctctagggtaattttatgtctgaaagtgtatgcagttgggtcagagcatgacctttaagatagcctctctcagctaacatatttatgaagatgaggcctggtgacccagcaggttcattggatacataagaaatgagaattcctggttcatgggccaacctaggactctggagtatgcagacttggccattcgtccattgtggcctgcgggtcgcaccccaggcatactgaaaggccatactcgtggctggctgcctgcgggcctaagccttcccaggatcttcaggacacttgacagacttgtgttttctggtctgagctgcctccacaggtccctccagcaagcctcactgcacctctccccttgctgtttgtgtttggaattttgtcttctttagctgagaccaaattaaaccttggtgcataaagtgagcttaaaacttgccactgtttagtaagttagcccccatagaatgtgaccctgtctgcagagtctcatttacccctctttttctcattgtcatttgttggctttcattagggctgtcttacaggatcatgttggcatttactatcatgtctttatcataaaccatgtttgtttgaggtagaagaatcaccatataattcgttgcccaaattgggactattgagagagaaaggggatgctattaattacaccagatcaaaaggcataaaccagacctgtcccaggccgatgtggaaatatgttctttcctagttgtgggtaccctgatctaggtggtttgtaattgtgcattactgactgcatatgtttgtgtatgtgtaaatgtgggctccctgttaagtggggctcatggatacgaggcctgaggaagtgtggcttgctagtctgttacgttaacatgcttttctaaaattgcttcacgtgttaattcatttactcctgcattcattgactgtttttgttcttttccattcactttgtacttatttttttcattaaattttgcatttattttg

SEQ ID NO: 313872 - DNA, 997 bp, Homo Sapiens
  misc_feature (975)..(975): n is a, c, g, or t
  misc_feature (978)..(978): n is a, c, g, or t
ggggggcgcttccggggaccaggcccgcttttggctgcatcagccggggattgccggcgccaggcatctgcatctgggaccgacctcctgggctggctgatcaaagaggaagcagcagcaatgtctgctgtgggggctgcaactccatacctgcatcatcctggtgatagtcacagtggccgagtgagtttcttgggggcccagcttcctccagaggtggcagcaatggcccggctactaggggacctagacaggagcacgttcagaaagttgctgaagtttgtggtcagcagcctgcagggggaggactgccgagaggctgtgcagcgtcttggggtcagcgccaacctgccggaggagcagctgggtgccctgctggcaggcatgcacacactgctccagcaggccctccgtctgccccccaccagcctgaagcctgacaccttcagggaccagctccaggagctctgcatcccccaagacctggtcggggacttggccagcgtggtatttgggagccagcggcccctccttgattctgtggcccagcagcagggggcctggctgccgcatgttgctgactttcggtggcgggtggatgtagcaatctccaccagtgccctggctcgctccctgcagccgagcgtcctgatgcagctgaagctttcagatgggtcagcataccgctttgaggtccccacagccaagttccaggagctgcggtacagcgtggccctggtcctaaaggagatggcagatctggagaagaggtgtgagcgcagactgcaggactgacccctcacttgaccagtcccattcagatccggcttggacaggcacctgagatggtgccaaagtgcagctgactcttcccacgacagccctgcccttcccatgaggcaggctcttcagtgagtgtttgaacgtaattatgtagttttctgtttaattgaaaaagagagctatgcctttttntcnttttggaagtaaagcagct

SEQ ID NO: 313873 - DNA, 895 bp, Homo Sapiens
acaaaaaggggcgggttaatttggtttttgaccccccctttttggaaaaaaaggttttcaaaagggggccattccaaggaacccttttcggttctcccaggggaagccgaaccccaagggccacctggggggaaagatttggtatccatcccaccccgccccccggaaatgtcaagccaccatgggggcaggcccaggcccccctgttggctgggcccccaggaatcaagggaggggccggcgggctccccaaataccccgctggccaagtccccgacccaggtcttgggggatgcagagctcctggagctggtccctgaaggtgtcaggcttcaggctggtggggggcagacggagggcctgctggagcagtgtgtgcatgcctgccagcagggcacccagctgctcctccggcaggttggcgctgaccccaagacgctgcacagcctctcggcagtcctccccctgcaggctgctgaccacaaacttcagcaactttctgaacgtgctcctgtctaggtcccctagtagccgggccattgctgccacctctggaggaagctgggcccccaagaaactcactcggccactgtgactatcaccaggatgatgcaggtatggagttgcagtccccacagcagacattgctgctgcttcctctttgatcagccagcccaggaggtcggtcccagatgcagatgcctgaggctgaggagctcgctggctttcgtcggcgtccgggtgggcggcggggaaaccgcgagaccttgaggatcagcgcggagcggagccgagcgggcgtccctgtctcgtgtggacggtctgcgcctccagggttttgagagctgccccgtttcccctcctgtcgggtggcgtccggcgcgcgtgactcccc

SEQ ID NO: 313874 - DNA, 657 bp, Homo Sapiens
aattcggcacgagcttacatgtctgccagtacagccagttgaatccgtttatttctatatttactttaggcttgactttcagggatcttagtaatttttgcctgttttgtcactacatatgtcatcagatcagactagaacaaagaaaagcttactgttttcaaacagggaaatgtgcatagtaatgctttactctgaattagaaacatgtttatgataatcctattagaaaatttgattgattgattaaagtgtctttttgggtcgacatccctagcgtttctgatcctgagtaatcaaatttaaagactacccagcagcaaaacttttattaaataattatctacttttattaaggctgtatgcctaggatttccatctgtttgttataattagaaataccagtgtgagtaaaaatcttaggaagttatttggccttggattccagttctactcctggctccttggctcttgattttcgcatattcccatgttggaaataacattagagcttaatagtagtaatggggtgggagagggtacaaacttcttgtgcttcagatctttggatagtacaggttacctatagaacataagcatttttttaatatgcaagaaggatggaacttaagttttaattgtgtgtacagtggtttt

SEQ ID NO: 313875 - DNA, 366 bp, Homo Sapiens
ccacatcagttgactcttcctttcacaagagatttctctgtagcatgcaatcctgtttgatagcatttacccacagtagaacttctttcataatattctgaatcccgtgttgtgatttcaacaatattcatggcatcttcaccagaaatagattccatcccaagccactttctttgcttatccgtaagaaccagctcctcagccatctacattttgtcgtgagattgcagcaattcagtcccatcttccagctccacttctagttctcttgctatttccaccacatctgcagttccttcctctgatgcagtcttgaacccttccacgtcatccatgagagttggaatccttcttccagctcctgtt

SEQ ID NO: 313876 - DNA, 621 bp, Homo Sapiens
  misc_feature (585)..(585): n is a, c, g, or t
  misc_feature (604)..(604): n is a, c, g, or t
ccacatcagttgactcttcctttcacaagagatttctctgtagcatgcaatcctgtttgatagcatttacccacagtagaacttctttcaaaattggagtcaatcctatcaaactctaccactgcttactctactaagtacctataatattctgaatcccgtgttgtgatttcaacaatattcatggcatcttcaccagaaatagattccatcccaagaaaccactttctttgcttatccgtaagaaccagctcctcagccatctacattttgtcgtgagattgcagcaattcagtcccatcttccagctccacttctagttctcttgctatttccaccacatctgcagttccttcctctgatgcagtcttgaacccttccacgtcatccatgagagttggaatcaacttcttccagactcctgttaatgtagatattttgacctcctcccatgaatcacaaatattcttaatggcatctaaaatggtgcatcctttacagaaggttttcagttaactttgccgagatccatcagaggaatcactatccatggcagctatagccttacgggctgcagaatggatngtgtgttagcaagcatganccacatttctcttgtac

SEQ ID NO: 313877 - DNA, 929 bp, Homo Sapiens
cacaaggggaggcgagggaatgagagtatggatgaaccactctctgcagccaaaacagaacgaagcggggagcaagagagaggaaagcccctctcggtgcaggctgccggcctctcccacttctgcgaggagttggaagaagttattgccattgatgtgtgtcacacaggcagacaacagagggaggaagcaaggggtgccggcgaccattggcttcccagaacggaattccgcggactgctgtgtccacagcgcaccctcgtcctcctgccccggcatccccagagccacaatgaccttgaggtattaaatacagctatatacacacgtccagaactgagggtcaacctggactgactggagacctgaggggacatgctgcgtgccttggttggccgagtttagctcaaggaaggctctgagtccacctcttggccacacggtactgctctcggcggactgaagcatttgtcctgcaacctgctgcttcagatggctcttagctacaataagaaatcctaagtccaaaggccaactttctcatacaactggtgcccttgcaggaagcagtgggaggtggggagggatgaggaccactgttgagtaaggacagcagaggtcccttgccatgcctcccttctgcccttgtccgggaacaacatggggagaagccagggatctcatgacatcctttagtctcaaactcgatcccaaggttgccacgacagccttgtccccaccatgcaagtcacctccccaacaagacacataaaaagccacgtctgctctccactaggctcccacaagaaaaacagaccaagatcccccatggggcgtgagtactgcagctgggcagactggcgggaatccataggtgagctggggacccatgtacccatggctgctggggctggggcagggaaggtggc

SEQ ID NO: 313878 - DNA, 996 bp, Homo Sapiens
  misc_feature (233)..(278): n is a, c, g, or t
  misc_feature (541)..(541): n is a, c, g, or t
cacgtatcgcgcacggggggcgcgtttttctggggggaaggccccgcctgcatttaggagtggcggggggccccccccagaatgggcggcagagcccatccgggccggtcttcggtggattcacccggacatgggaattgtttcccgctcgatgggggcggccttccagtttccatggaggattgccctttgccccccccaggcgaagggttcgcggtggctccgttctggcnnnnnnnnnnnnnnnnnnnnnnnnnnnnnnnnnnnnnnnnnnnnnnttggccagccccgatagattccgtccaaattcctctgctgcttcagttccctcatcccgggatgatggttgggatgattccccagctccttttccaactttgttaatctcctcgaggaaggtgtcggtgttcatctcattgcagggtgtgtcacacgatgcgggctgctagccgcacgccgtctgtggcattcgctaagcactgcaatgtggacacctcccacccggcccgttgtcttgtcccaccaggaaaaactccacggntgaccgtcttcttctccaagcgccgagaggcacctgagcggtgggtgaacagcgggaaggcccgggccagggcacaggcggaagcaaagacctccggctgctcgcagaccatcacaatgcagcgatgcgctccgggcggcaggcaggtccgcaccagccgcgtgatgaagtgggcggccgaggggctgttgtgccggctcaccctgcagggcagggcagccacggtggcgtagttcaggtagaggggacagctgtccgtggggttggggttgagcgtgctcagggcagcctgccagagctcctcggtgacccggggctgcagcttcccgcggacgtggctccagggcacgcggtgcaggtggtgcagctgcccgagcagcagcaggggccggctctgtgggtccgagtcccccgcgctcgcctggcctcgtgccgaattcgccacccaggcctcg

SEQ ID NO: 313879 - DNA, 539 bp, Homo Sapiens
gttttagaggatttgaaaggaagaatagtagaatgttttcaaaattaggaagtcagttgggaaagaaccagttttgttcattaggaatggaagtgatactttttttctggtatcaaaacaatcttgactttttctccttctcttagggtatatttccttttttccgatcctgcaacagcctctttaaactgtttaaatgagaatgtccttggctcagagagtactactcacctggcttttcacactactcttcttgatcatgttggtgttgaaactggatgagaaagcaccttggaactggttcctcatattcattccagtctggatatttgatactatccttcttgtcctgctgattgtgaaaatggctgggcggtgtaagtctggctttgaccctcgacatggatcacacaatattactgtgctctggaacagtttactaccatgaatctatcctatgtcttcattcctttatgggccttgctggctggggctttaacagaactcggatattgtcttttttgtgagagactgcttct

SEQ ID NO: 313880 - DNA, 884 bp, Homo Sapiens
  misc_feature (416)..(424): n is a, c, g, or t
tgaggtccaaaacaaactttatttacatagagataataaggatctcaataactcaaatgctgaataattaagctgtaggttgactagaagtccgtgattcaccaatcctgttttatggaagtagtataaaactacatttggtattttccctcagttctctggtattcttgaagcttgacagattcagaacactttaatggtaacttgttgaacagcaatagaaaggagatgatgtacttagaagtcagtctctcacaaaagagacattatatccgagttctgttaaagccccagccagcaaggcccataaaggaatgaagacataggatagattcatggtagtaaactgttccagtttagcacagagtgcgaggcagaaggctaatttaagtaacattgcaatgaggtaccaggcnnnnnnnnnaatattgtgtgatccatgtcgagggtcaaagccagacttacaccgcccagccattttcacaatcagcaggacaagaaggatagtatcaaatatccagactggaatgaatatgaggaaccagttccaaggtgctttctcatccagtttcaacaccaacatgatcaagaagagtagtgtgaaaagccaggtgagtagtactctctgagccaaggacattctcatttaaacagtttaaagaggctgttgcaggatcggaaaaaaggaaatataccctggcagcgctgccggccggaaagcggagagggacgcgaagatcagcaaattcgccagtttggatccttgtccttttccgcccttttccccccattaaatccagaacccgtcacatgataattaagaaaaaacttcagttccgcctcctcaaacgactgcggtagaggatctctcagttctacctccc

SEQ ID NO: 313881 - DNA, 446 bp, Homo Sapiens
  misc_feature (387)..(387): n is a, c, g, or t
  misc_feature (393)..(393): n is a, c, g, or t
  misc_feature (417)..(417): n is a, c, g, or t
ttttgaggtccaaaacaaactttatttacatagagataataaggatctcaataactcaaatgctgaataattaagctgtaggttgactagaagtccgtgattcaccaatcctgttttatggaagtagtataaaactacatttggtattttccctcagttctctggtattcttgaagcttgacagattcagaacactttaatgggtaacttgttgaacagcaatagaaaggagatgatgtacttaggaagtcagtctctcacaaataagacattatatccgagttctgttaaagccccagccaggcaaggccccataaagggattgaggacatagggataggattcatgggtaggtaaactggttcccggttttggcacagagcgggnggggcnggaagggctaattttaaggtaacntttgccattgagggtacccgggttttttt

SEQ ID NO: 313882 - DNA, 1392 bp, Homo Sapiens
cacagtgaccagttggcatttattagtgtagttacaatttgtcactgtagtaaaagtagtagaggaaccaagactctttgttatcacaaagaaataaataaagcttatttttagaaaaattctaactgagtaagtgatatctagcagtagcactagaggtgcccagccttgtgtgacagataaagctggggcagaagtcatgttaaattctacctaaaaggagctcccacccactgcctgctcctccagctcctggccagaactggtcatggctgcaaggtacagaataaaaggaaacctaatgaaaaaaacagctaaaacactgagaagatgtggacttattagggtgtgagctgaccatgatcaggtaatctattcccctcactccagagaggtttagacggcagcttccccggaccgcttccgggtgatgtgctccaggtgggcatggtctgaagtgtccaagtcaatctcgtacttggctaggattttgaggatgggcctcagtttcagccaccactgttccttggggattcgatgctcaaaatctgtctggtccttcagctcagccactggttggaagaccagagccctcttacgcatccccagaacacagcccgaatctggagtattggcaaagatccgcccattacggtaactctctttgattttcccagacatccagttcatagccttggcgcccatcttagtggcaaaattcctatcaaatggggttgggctcccaccctgctgcatgtgaccaagcacattcttcctgctgtcgaagatgcccttcccctcctcagagtacaggttgaaaatgaagtcagtggtatagttctcattgcacttttcattccttaacaccaagccccttttcacagttgttttcatcttttgcaccagatgttcaacatttgcctgcaggtctcgaatggtgaagggctcctcaaaaatgtaggcagcatcggccccagctgccagtccagccatggtagccaggtagccacagtagccacccatagtctcaatgataaacacccgacgcttggtgccagctgctgactgcttgatgcggtcacaggttgtgcagatagtattgagtgctgtgtcagccccaacgctgaagtctgagccagggacattgttggagactgtagcaggaatgaccacaaatgggatgcagagctcatcaaactgcttcctgccctccatcagttccaggccccctgtgtaagcctcaaagcccccaatgatgacaaggccctgaatgttaaacttagttatattggcactgatctgttcaaagctcttcttgggtagagtcctagttgatcagtgatggcggggaggggaaggggaattggaaggggaagagacatgaaaattgag

SEQ ID NO: 313883 - DNA, 581 bp, Homo Sapiens
agatttcccttgctgtcattctgctttgagagagatactctcaaaacagagatataaagtgtcaacactgacactgtgaccacaagtcagccctctgaggcaaggggaaccagaaaggcttggaaagggagattggagagggtgaggggctgaacactgacagttactgcagctgtctgtagtgctccctcttccagttctgtctcatttggagtcattgtttaaatttcagtccacactgagcttcttacaggaattaggcacagttcaggcccaggattgtaaacaactctcttccatgtgtctcttccttcctggagaggtgtggtgtggaagatgatttatacccaaccttatccattcccagttaggcttaggatttactctttcattttcaggcaaatgttgaacatctggtgcaaaagatgaaaacaactgtgaaaaggggcttggtgttaaggtacctcatccatggtttgttcctaagtgaagaagaaaaataagctttggctcaaacccatagaatggccattgttgggacaccctgaggaatctgtagatataaagggagggggccagcc

SEQ ID NO: 313884 - DNA, 398 bp, Homo Sapiens
  misc_feature (16)..(16): n is a, c, g, or t
ttaccctgatcagggncaggctcaacaccccctaataaagtcccacatccttcctcaagtgttttaagctgttttttttcattagggtttcccttttaaatcctgtacccttgcagcccatgacccagttctggcccaggagctggaggagcaggcagtgggtgggagctccttttaggtagaatttaacatgacttctgccccagctttatctgtcacacaaggctgggacctctagtgctactgctagatatcacttactcagttagaatttttctaaaaataagctttatttatttctttgtgataacaaagagtcttggttcctctactacttttactacagtgacaaattgtaactacacctaataaatgccaactggtcactgtgaaaaaaa

SEQ ID NO: 313885 - DNA, 597 bp, Homo Sapiens
ggcaggccacaggcagccccctgtctgtggccagacaggccgtcctggtgactcgggcatagactgtggagaactgcagaaggagagaggagagtgggccagggaacacccaccaggcgctgctctgaccagtcagagaacgtgaggcagctcccccatagggatctgcaccgagaaggtgtggaaggcacaagcaagagtgacggtaccagagatcccagagggcgtggctcgcggcggccacagcaggcgcagcgctgacctggtgtggttccccccttgatggtttaaaaagaagccactcaagggttaaaatagttaaagttaacaaagaaaattaatcttcaaataagctgacactatctggaaaactcatctgtccctaaagcccacaatgcgtccactgcttcgtcctcccatggaacctgagcctgacgtgaaggagtcagacgtgtgacagaggaagagtctgagaagagaagacacctttacagaatgtacagcgagagagccggcctggcccccgggttacagtaagatgcacgggtcctttcagtctcacggactccagacggccacgcaggctgctcagatgga

SEQ ID NO: 313886 - DNA, 687 bp, Homo Sapiens
  misc_feature (587)..(587): n is a, c, g, or t
tccatctgagcagcctgcgtggccgtctggagtccgtgagactgaaaggacccgtgcatcttactgtaacccgggggccaggccggctctctcgctgtacattctgtaaaggtgtcttctcttctcagactcttcctctgtcacacgtctgactccttcacgtcaggctcaggttccatgggaggacgaagcagtggacgcattgtgggctttagggacagatgagttttccagatagtgtcagcttatttgaagattaattttctttgttaacttaaaataactattttaacccttgagtggcttctttttaaaccaaaaaccgtctttctttgcttttttatcacagcagaatcaggatctctttctcattcaaggggggaaccaccccaggtcagcgctgcgcctgctgtggccgccgcgagccacgccctctgggatctctggtaccgtcactcttgcttgtgccttccacaccttctcggtgcagatccctatgggggagctgcctcacgttctctgactggtcagagcagcgcctggtgggtgttccctggcccactctcctctctccttctgcagttctnaaaccacagtctatgaagcccgagtcaccaggacggcctgtctggccacagacaggggctgcctgtggagcctgcccaccggcccccggcagtgcagtcc

SEQ ID NO: 313887 - DNA, 745 bp, Homo Sapiens
taattctcccaatgtttaaacattgctaactaatataaaacatttttaacccaagtagacaaatagtgaatggtgtacacaaaacactactgcacactggatccagcctgtggctggccagtttgccatggatatggaggttctgtggttttctcttagaaacacaaatattgagttatgctcattggctaccctgaccctttaagacttggccccagatttcattcaccatccagagtttaagttatgtggaggccatgataagaagccataatttatggcctccattgtgcttctctgtctggggatccttggcagggccaatggtaagggtttgacctttccatagcaaggttgggctctaggaatggtgagaaggtatgttggcacatcttctccaatggactagagctggcagaacagttgttgtaagtgtccttggggtgcttctgtctaggcccccattacaccatgaagcaagcagattggaagtcaggtaggcttctgtcatttcttcctgggtggtctagctgttcccttagctgctccaggaaacctcctgatagggccttgcactgagatttccaggaaggcatgaatacagggaccctttattctctgtcctgaaaaggaggaaactatcaaacgcagagaaaggggaaaacagttggctctggaaggtggcagaattctctgggatagtggctaaatggagaagtagccgtgcagttgctggcatgtcttg

SEQ ID NO: 313888 - DNA, 232 bp, Homo Sapiens
aaatagaccacactgcactgtctacattacttacctaggtcctcccagcctcctcctcctctgatttgtgggtgccactggggcagctgctgagtctcagtggttcctagtcatcaccaagttctgcccacctagatggtttgcacctgtccttaccagaaccctgcactgtctagatgactgaggctgcttctgcctctgatctgctatctgtgttctgggggcaccccgg

SEQ ID NO: 313889 - DNA, 493 bp, Homo Sapiens
agcaacatactaaggggaaactgttctgtaaacctagaacctaaaaaataacatctattactttttaattaggatgcagcagccccataccaaggttttggtggcatcctgttattgtgtggttagtacttggcattgaagtgcaccaacctggagtcagagcagttggagatttcaatgcctgtgccatttacctctaaccctggggtgcccccagaacacagatagcagatcagttaggcagaagcagcctcagtcatctagacagtgcagggttctggtaaggacaggtgcaaaccatctaggtgggcagaacttggtgatgactaggaaccactgagactcagcagctgccccagtggcacccacaaatcagaggaggaggaggctgggaggacctaagggctacaggacgagctccctgcctacaagacagaagcagctccagaggttttggtaagtaatgtagatttcagtgcagtgtggtctattt

SEQ ID NO: 313890 - DNA, 1170 bp, Homo Sapiens
  misc_feature (1049)..(1049): n is a, c, g, or t
  misc_feature (1072)..(1072): n is a, c, g, or t
  misc_feature (1087)..(1088): n is a, c, g, or t
  misc_feature (1107)..(1107): n is a, c, g, or t
  misc_feature (1115)..(1118): n is a, c, g, or t
  misc_feature (1126)..(1126): n is a, c, g, or t
  misc_feature (1150)..(1150): n is a, c, g, or t
  misc_feature (1158)..(1158): n is a, c, g, or t
ccagtttttttcaagctgctgcagaaaggcttttactgggcagacggggtgagtctcaagccagtggaccagtgaggggtgagggcacgtcctccgaaggagcaggggtggcatccctgcccaggggccttagcctgaatgcactaagggctggcccctcagacaggctcaggggaggtccgcccacaagggctttgggcccctccctcatgaagacgccacccctgccatggggtccgtggcccttgctgtcacatctgccttggttgatctcagggaggttgatctctctcagggagaactgtggggtggggatgtagccttgggagggcccttcaggaagtaggagtggggggttggggagtgtggtagacccagaaacttctggggacgtcagtcatagttactaatatttggaggcagtgggagatgctggccccaaggttgaggtatcagttagagcagaacaattggacctagagctggtttttcctttgggtttaggtgtaagtgaactattatcattggagtggagaactggagagaaagggttgtcactgtccagcactacacagctgcaggcacacagatggtacacattcccagaaagacacataggtagacacgtggctgtacacccatgcacacacacacaatcacgcatacctgtaggcatgtgtgttaacacccacatgcacccacacccacatgcctggcagtacacagaactgtatgcatccatttgtgccaggctggggccttgagtgataggaaaggggtctgtgatgggtagatagtgtggttggagacacggatttcttcctgaacaaagtccctcccctacatggtggacatgggatgagacggccttcagttacttcctcttgaccccagggctgcctgccgcctcatgtaggacaggatgtcatcttgacgttgctgaccgtggtccggtggtgccagcgcatgatgggtatacatctggcccaccaggaacttctcaaagttccagcggatgtcgtgaacttcatgggttccagaagaggcgncagatgtaccaggagctcgatgntggaggacaggagtnnttaggaaatgtaaatgttntgctcttnnnncatgacancccttctcaaaagtggaataaggnaaagctcnctggtcgaaaat

SEQ ID NO: 313891 - DNA, 1591 bp, Homo Sapiens
  misc_feature (9)..(9): n is a, c, g, or t
  misc_feature (11)..(11): n is a, c, g, or t
  misc_feature (13)..(13): n is a, c, g, or t
  misc_feature (25)..(25): n is a, c, g, or t
ggggtgagntnangcagtggacagngaggggtgaaggacgtcctccgaaggcaggggtggcatccctgcccaggggccttagcctgaatgcactaagggctggcccctcagacaggctcaggggaggtccgcccacaagggctttgggcccctccctcatgaagacgccacccctgccatggggtccgtggcccttgctgtcacatctgccttggttgatctcagggaggttgatctctctcagggagaactgtggggtggggatgtagccttgggagggcccttcaggaagtaggagtggggggttggggagtgtggtagacccagaaacttctggggacgtcagtcatagttactaatatttggaggcagtgggagatgctggccccaaggttgaggtatcagttagagcagaacaattggacctagagctggtttttcctttgggtttaggtgtaagtgaactattatcattggagtggagaactggagagaaagggttgtcactgtccagcactacacagctgcaggcacacagatggtacacattcccagaaagacacataggtagacacgtggctgtacacccatgcacacacacacaatcacgcatacctgtaggcatgtgtgtaaacacccacatgcacccacacccacatgcctggcagtacacagaactgtatgcatccatttgtgccaggctggggccttgagtgataggaaaggggtctgtgatgggtagatagtgtggttggagacacggatttcttcctgaacaaagtccctcccctacatggtggacatgggatgagacggccttcagttacttcctcttgacccccagggctgcctgccgcctcatgtaggacaggatgtccatcttgacgttgctgaccgtggtccggtggtgccagcgcatgatgggtataccatctggccccaccaggaacttctcaaagttccagcggatgtcgtgaaccttcatgggttcccagaagaggcggtcagatgtacccaggagctccgaggtgggaggacaggagttctttaggaaagtgtagaatttctgctctttctctccattgacatcccctttctcaaagagctggaaattagggacaaagcctccacctggtcggacatacttgagggtaggaaggatctctgagttctctcctggttcctgttttccaaattggttgcagggaaagcccagaatgaccagaccgaatggtgcaagctcttcctgtagtgcattcagttcaatgtactggcccgtcaggcctcagtagctggccacgttgacaaagaggacgtatttgccagcatactgcttgaaggggatgtactcctccccatcaatggtgagggctccgtactcgtaaatggtgccacttatgccaccatggcagtccatcttcgacttctcttgtccccggctctgcgagacgaagccggccaggagcagggaaagcaggcaggacgcctgcagcagccgggccatggcggggtgggggcacactcagggtcgcctgagccgctgcctgatccctggcatcccgggaattccggaccggtaccagcctgcttt

SEQ ID NO: 313892 - DNA, 992 bp, Homo Sapiens
  misc_feature (313)..(313): n is a, c, g, or t
  misc_feature (344)..(344): n is a, c, g, or t
gagcctagcagcctaactggcttgggccagtaccccgagaacctgtaatgccatccctttttcgcccggcctggggcccttggagtgatcgggaagagggtttggtggacgggtaggattagtgggggttggagaccccgggatttcttccttgaccaaagttccctcccccctccatggtggacacggggaggagccggcctttcagttctttcctctggaccccccaggggttgcttgccgcctcatttaggacaggatgtccatcttgacgtttgctgaccgtggtccgggtggtgccagcgccatgatngggtatacccatctggccccccaccaggganacttctcaaagtttccagcggatgtcgtgaaccttcatgggttcccagaagaggcggtcagatgtacccaggagctccgaggtgggaggacaggagttctttaggaaagtgtagaatttctgctctttctctccattgacatcccctttctcaaagagctggaaattagggacaaagcctccacctggtcggacatacttgagggtaggaaggatctctgagttctctcctggttcctgttttccaaattggttgcagggaaagcccagaatgaccagaccgaatggtgcaagctcttcctgtagtgcattcagttcaatgtactggcccgtcaggcctcagtagctggccacgttgacaaagaggacgtatttgccagcatactgcttgaaggggatgtactcctccccatcaatggtgagggctccgtactcgtaaatggtgccacttatgccaccatggcagtccatcttcgacttctcttgtccccggctctgcgagacgaagccggccaggagcagggaaagcaggcaggacgcctgcagcagccgggccatggcggggtgggggcacactcagggtcgcctgagccgctgcctgatccctggccaccctcgtgccgaattcgccacccaggcctcgctccgt

SEQ ID NO: 313893 - DNA, 807 bp, Homo Sapiens
  misc_feature (307)..(316): n is a, c, g, or t
aaaatagctaagacaatagacaataatgcacagtaatcactaaaaatccttaattttatctagggataaccactcacatcatggctaagttgcaaggatcttcaaacctttgaaaaagaatttcatccttgagaagtgagagatagaaaaatatctaaaaaaagagaagcaacagtcttgcacccttttaacaatctcaccacagcatgaactactattaacattgagcaatcagatattccagtcctggagagttactgcctttcatgatctgatcttttgtaatgaaactacaagtgcaccattnnnnnnnnnnccagataaatagaaaccctggttttattttcagctttacatttttgacaagtgcaaggtcagccagctaagatataaatattccaataatgaccaaagtaataacttctactggcatgtcctcttctgagtctccattttctccactgatattcatccaaataataaaagtaacacaattgcaattgagtttactattatcaatggcactctcatcacggttcttacagatcgaataaggttcattagctgtgatttaattcccggctcttctccaaatccaccaattccctggtctgttccccagccaatgttcttgaggaatcgctcctcgtgcagcactgcgatggcgttgacgcagagcagggctgcctgcagcagtgagtacagggtaaaggccatggccgtccgaggccgccccgaagtccaagcgatttctctcccgccgccgcaagggacgtggcgcctccacggccggcgccttcctacccc

SEQ ID NO: 313894 - DNA, 543 bp, Homo Sapiens
ttaaaacgtttatttctggtagaaatgataaatactttgcattaaaaatctggaattaagttttcctcgtacttcatgctccctccctgccccagaaccttacaaaaatatttctgtctagagagggaaagagctggtgccttctctggaggcaacgtccaggtccgggaaaggcactcgtggtctgtgatctgtctcagtgatgggaggtctccactcgccccacaggcagcctcggggccagagatgagaatatgctgtaatccagtacaggggctgcgtcgtgggtcgccaacagctcccttggggatagtgagccccttgttggggagtaggaagggactgaggggccagctccttccagatgtgtgcatggggaagggagttgtgtctggggaggtgggtgtccaggtatagactcctttggcagcttgcaagtgaacactccaggggagatgcaggagggaggggtgtagatctggggagcccttctctccctctctgcccgcaaggaaggcacagggtgggaatgggggtgccttc

SEQ ID NO: 313895 - DNA, 580 bp, Homo Sapiens
tccctgccccagaaccttacaaatatatttctgtgtagagagggacagagctggtgcgtgctctggaggcaacgtccaggtccggtaaaggcactcgtggtctgtgatctgtctcagtgatgggaggtctccactcgccccacaggcagcctcggggccagagatgagaatatgctgtaatccagtacaggggctgcgtcgtgggtccccaacagctcccggggatagtgagccccttgttggggagtaggaagggactgaggggccagctccttccagatgtgtgcagggtctaaacgttcaaggagttcaacagaacaaccagaggccatcatgggcagcttgcaagtgaacactccaggggagatgcaggagggaggggtgtagatctggggagcccttctctccctctctgcccgcaaggaaggcacagggtgggaatgggggtgccttcatgagaccccgtgccatgccacacccccttcacagtcatgtgagatggggccagaggggcacaggctctagggccaggggagtggagagggagggatataaggccacaggtgggggttgccacccc

SEQ ID NO: 313896 - DNA, 360 bp, Homo Sapiens
tcaagtaaaaacttaaaacgtttatttctggtagaaatgataaatactttgcattaaaaatctggaattcaagttttcctcgtacttcatgctccctccctgccccagaaccttcatttcaccttcagggttctctggaagtaataaaatggctctcagtagaccaccgcttgatttctgcttacaggagagagctgtgttaccttcccacaccacacgctacttctcacttaagggttaagcatgagatctctcagatccaacatcctccgctcctatcgtagcaacaggggcacaatgtgcatcagtcactagggatctttaaataaaatctcgtgccgaattcttgggcctcgaggg

SEQ ID NO: 313897 - DNA, 381 bp, Homo Sapiens
aaacacccctcttagttcaaggagttgatcctgaaataagtggtatgtggagataaagagtgtaacagagaacacatgaagcccacgggaaaaacagaccaaatgtcacaaggatcagagaaatccctgaaactcgagggaggtgtcaaagttggaaatcctgaatgggaagggcactgtcaaatctctcccctacagacagaaacctctagaaagttgggggattgaggagggagaaagagaagctaaagaaagttatagggatcataatgcatcccagagaagagtgaggactaggttcaaagtaagaatgtaaatggtacggattgatgacaagggcccgagatcccttaaggagctcgtcccgaattcgctacagcc

SEQ ID NO: 313898 - DNA, 352 bp, Homo Sapiens
aacaaatcctgattttggaaagaattcagtaagtcttctctaatgagcctcctcaaaacacttctccttcaggcaaggagcctttttttcccctttagaacaaccatttacagcatctgaggccttttttaagggccaggtctcttccctgctgttaggtttttaattttaaggtcaagtttctaacaaaatttgttttgttgttgtgagattaaactggccatatgagcattccatctgcttctgaaatagcaagctgaaactcaaccggggaccgggaattcatttgcaggaaggtgcatttccagtcacccagccgggcgctgcagctgctttatgatctgcgttacct

SEQ ID NO: 313899 - DNA, 670 bp, Homo Sapiens
aacaaatcctgattttggaaagaattcagtaagtcttctctaatgagcctcctcaaaacacttctccttcaggcaaggagcctttttttcccctttagaacaaccatttacagcatctgaggccttttttaagggccaggtctcttccctgctgttaggtttttaattttaaggtcaagtttctaacaaaatttgttttgttgttgtgagattaaactggccatatgagcattaaaaccatctgcttctgaaatagcaagctgaaactcaacccttgaagctgtttattacgctcacataccaagtcctctctcttcatgggtggggaccgggaattcatttgcagaaagaaggtgcatttccagtcacccagaaccgggcgctgcagctgctttatgatctgcgttacctcaacattgttctgacagccaagggtgacgaggtgaagagtggccggagcatgccagactccaggtgtcgtatcctctagggagctatgtcaaggcggtctcttccacattcattgtgtttgttttgaacagtaagtgctcatattaccagcaagttaaataatgggccgcttgctggataaatgcaatggtcgtgtaggtggactcttattcccctctcttctgagtcagcctagcagctgctgagtatcatttggccc

SEQ ID NO: 313900 - DNA, 1171 bp, Homo Sapiens
agctggttctttgttcccatgcccccaatcccaaccagaacagaagttcctccccccagggcgatgaaggttgctgttgagtttgggcgggaaaacgtccaggtcaaatggatcaagagggcttcccaggtggtcagtccctttctcaattctgagttttggctggtccggccactcttcacctcgtcacccttggctgtcagaacaatgttgaggtaacgcagatcataaagcagctgcagcgcccggttctgggtgactggaaatgcaccttctttcttaatctgtttttcttcggagagtttctcataggcagctactacttgaaccatacagcttttcagcatctcctgtaatgtcacctttggcaaggcatggcctccaaccccgattaatttcctggcataaactaaacaggaaggactgtacataccaggacggctgtgcagggagtcggatcttggatgtgacactgctgccagactctgcctcctcctgaatttctagctcatcccagctggtggctgtggccagaactgagccagcatcatctagaagtaatgactgggtgaatccatgaatcaaaactttcacaactgcactgctccagacctggtagcccatcacgctctgctggaggagtacttctttaacctcttgccacttggcctgtgtaggaatgatttcctgagttttcacctttccctgttttctcagagccctaaactcccttgctggtttctctgagctctctgattttcccaggatgcactgcttcagatgggggcacagctctcccagggactggcagagtctggccatgaaaagaactgagtgcagcttggcactgttgagggcatcctgttgcccttgcacaccttcttcaatgctctgtagctctgcccggatgcagtccacgatgtgcttgatgcatgccacggactgagtccgcagcatctcctgcacggtccccgcatctgcgtatctgtcaaaggcagaactcttggcctgtgtgggagaaacgtccttgggcagtgatgagtcatcagaggggaggtaagccaggaggtcatctagtttaaccttcagcttagaatccagggcagaacagaagttctgtacacaagggctgatggcttgtgctttcatggagaggccgctactggcaaac

SEQ ID NO: 313901 - DNA, 1713 bp, Homo Sapiens
tttttttaaatcaaaaccatctttattatttaaagagcatcccatcatcaggggcacctagacaggagtcccagacagcagaacaatatttacatgggggtcaggagggtgaggttgggtggtctcggggctgagtgggcccgccactgtggaagagaggaccctggagggagggtgtccttggacctgtggaccgggcccaagaagaaaaacgtcccatcctaggcccagcgtggatcccaccaccgggatcacctcgggccctggaggctgcgcagcgagaagccaccggtcagagctgggtcaccatgccgctggcttcggagtgagtctttatggcctggaagatccactcccggaagtcactgactttggtgtagacgcctggcttctgggccagggcacagccagtgccccaactcacaatgccacacagccgccaacgtggcgtccgagagatgctgtcctcacacacaaagggaccaccgctgtcgccctggcaggcatcaatgccaccctcggggtagccagcacagaacatcttgggcttgatctggtttccatagaagtcagcgccattgcagacatcattgctgattatggggactcgagcctcctggagtaccccggcctgttggccatagtactgcgtgttgccccagcccgtcacggtacagatcttgccatccaccagggcctggccggcagctgggaggcacacaggctggatgtattctgtgaggggcaggggactggagaggtggaccagggcaatatcgttgctgttctcctcgctgttggggtcccgaaagggaagatagcccccgtggtagaccacagcctgcacccccagctgcagaccgtggggagaggcctgggccacggcaccggcaaacactcgccatcgggacaggacccggttccgctccgggaagcagtgggcggctgtcagcacccagtccccggagagcagggatcccccacagaggtgtgctccatcatagcgaaggctgacttgccacggccaccggcccaagctggtgtcccggcctcccacgatgcggtccacgggcagcttcctgcggccacagtcttggcagatggcggccaagaaacggcctctggggcaatcacacacggagatgacctccagcagcctctgggtgtggggcagcctcccctcgtccacacagaagaagcccgacgtgccattggcgcccgccgttcgcacgtccagctcggagtgggtcagtgccctgaggaagcccatctcctcgcagctgagtccggctaccctggcgttggagcgcgaggagcacagcagccgccacgtcccttccgtcttgtcaaagaccatgagccgagcgtccgcagagctgacctgcactgggtacagcggctcctggtcactcctgaggagaacagccacaatggcccaggatgccgccccgatggctgtcagaagtagcagggtccccgcagtgagagctgccaccttgggtctggagcagcatggcacagtccggccaccctccttctgcgccatgtcactgcctcttgttaatgattccctggctgacctcctgggccagggtgggaccctggggtccagcaggtgggggcggagcctcgaggtagtgccggggtcgggtcagtctccaggcctgggcaggagcatggtggcccgcagcagcgggcggcctggaggcagag

SEQ ID NO: 313902 - DNA, 411 bp, Homo Sapiens
  misc_feature (332)..(332): n is a, c, g, or t
  misc_feature (350)..(350): n is a, c, g, or t
aagatctgtaccgtgacgggctggggcaacacgcagtactatggccaacaggcgggggtactccaggaggctcgagtccccataatcagcaatgatgtctgcaatggcgctgacttctatggaaaccagatcaagcccaagatgttctgtgctggctaccccgagggtggcattgatgcctgccagggcgaacacggttggtccctttgtgtgtgaggacagcatctctcggacgccacgttggcgctgtgtggcattgtgagttggggcactggctgtgcctgggcccagaagccaggcgtctacaccaaagtcagtgacttccgggagtnggatcttccagggccatnaaagattcacttcgaaggccagcgcattggttgacccagcttttgaccggttggtttcttg

SEQ ID NO: 313903 - DNA, 530 bp, Homo Sapiens
ccccgccaccctcaccctccccgagatcgccgccagcggcctcacgcggatgttcgcccctgccctgccgtccgacctgctggtcaacgtctacatcaacctcaacaagctctgcctcacggtgtaccagctgcatgccctgcagcccaactccaccaagaacttccgcccagctgggggcgcggtgctgcatagccctggggccatgttcgagtggggctctcagcgcctggaggtgagccacgtgcacgtggagtgcgtgatcccctggctcaacgacgccctggtctacttcaccgtctccctgcagctctgccagcagctcaaggacaagatctccgtgttctccagctactggagctacagacccttctgatcacagcacccaggagcttgtctccaggaaggcggccccgtcccctactcatacccaccacagagcaccagccagtgccaacgccaggctgctatttatctccctatcccaccccctaccccacctaacacatttgcactgccgggaatggaca

SEQ ID NO: 313904 - DNA, 354 bp, Homo Sapiens
tgagggggtccgtttaaggctactcaagttcttctgactctccagtcagaattactcaatcatttagggtagggccatacatacacatgggggaaatgtcagggtttggcgttaagaaagctaggaaagaaataggtatgggaaagtatttcatgggtgcaatggttgatgatccagcatctactttcctagtgctctacagctggggcagaggcaatggctttaattttatttgcaaagctagttaagagtcgatggaagaactgacactatttgataaactgtgcccaaactctagatgaacactatttcgagcattaagcacagatatgagcagactctccagacactttt

SEQ ID NO: 313905 - DNA, 410 bp, Homo Sapiens
ccaagatctcctgggcatctgggtggacaaggtccgcacaggtctcccacaatgggtgcacaatgtagtcaataaaacccacctgagacctccacggaggcagtgtgcttgtcacacatggggctgaccatgccacgctcgcgctctcggtcaccctgctggaagaactcggccatgatgcggtctgtccactggcggtacagctccagcggcttggtggggttgctgaggtcggcacagtgcaccatgttccggaggacctggatgcggtcggagtagttatctagcaggaggacccctgagctggtcactttcttggtctccaccatggtcttcaggtcagccaggagggtcatgtgcttggacatgtccgtggccagcacctgcgggcaagggggcgtcactggggc

SEQ ID NO: 313906 - DNA, 408 bp, Homo Sapiens
cttggccaaggtaacacaacctgcctgaccctctggccatgcacacgtgtggagtttgttcccgggccctgtgcctgttcaaagaatggctggacgtcggtattgcccttggtttctgccctgaagtccagtcagtcagcagttctgcttattctgaccctctctgtgcagtattacccaacacacatgcatttcctccttgccttctcagtattgccatcgtgaaccagaattgtcacctccaatttaaacagtgaaggcctttgttaggaagaggggcagggtgcagagggggatggttgctttttctaaatcacagctctgatctccctcctaagcagaagccttccaggctcccctccatggctccaggtgtttacttaccttgcctgtcaggggcttctgcgc

SEQ ID NO: 313907 - DNA, 992 bp, Homo Sapiens
tgcagttgggaagaatttattatcactaagtggccctgacagatcagggaggagggggtgacactaacgaggctgctacaatcagctcccctagaggcagcgattaagggctcattacccgctggggtgaggggagcctgggaaaggcagcggggcggggggattaggttaggaggtggggcagtttagagggaagaagagtgggacacccccaggggagtccaaggaggcctggcctggagaagagtgaggttaccctcccaccccccactgggggaatatgactaaggaagcccccagaagggctgaaaggagaatgtcccagggaagtgagctgagacactggagctgggtgcacagcaggcgggggcagcctggcaggagtaggggtgtcacggcttctccagctggacatctcctatgttgaggctgcccacatcctggtaggtgccctggaggccccgggagatgtcctcatacatggagcagtcgtccaggttcaggccttcataaaggttttcatcttcatattcatccccggcatccaacccgagcttctcgttctgccatcgtttcctgaacagcagcagcgtcccaggcactaccgcgcagaacaggaggatgatccccccggctgtgatgattcggttcttggtgccctcccccatgtccaggaagggcctggggggcggctcattggggtcctcgcccgggcccaagaactcagggggccacgtgtagttgccatggaggacgcgccaccaggtgacgttggcgttgttgctgctattgtgcgggcattggaagtgggcgtcttcccccaggctcaccatcaatgatgctgggaccttgtgcatccacagggcctggcacccagggcccaggtagacagcagacagcaggaagaggaggaagatggtggcaggcagagcttggaggactcctggacccccaggcatcttctcccagtgggttggttagtttgagttccc

SEQ ID NO: 313908 - DNA, 886 bp, Homo Sapiens
attggggggggaattatatgtctataagggaagggcccccccaaggaacgggggtgaaaaagggaaggaattgtccccagggaaagtgaaagttggagaaccacttggaagctggggttccccaacccaggcgggggggcaggcctggccaggaggtagggggtgtcacggcttctcccaggctggacattctcctatgttgaggctgcccacatcttgttaggtgccctggaggccccgggagatgtcctcatacatggagcagtcgtccaggttcagggccttcataaaggtttttcatcttcatattcatccccggcatccaacccgagcttctcgttctgccatcgtttcctgaacagcagcagcgtcccaggcaccaccgcgcagaacaggaggatgatcccctcggctgtgatgattcggttcttggtgccctcccccatgtccaggaagggcctggggggcggctggcgcacgcggaggtaggtgccgcaggactgctggtatgactcgttgccctcctggacccggcacacgtatatgcccccatggctcttgttcacattctggatgatcagcgtaccattggggtcctcgcccgggcccaagaactcagggggccacgtgtagttgccatggaggacgcgccaccaggtgacgttggcgttgttgctgctattgtgcgggcattggaagtgggcgtcttcccccaggctcaccatcaatgatgctgggaccttgtgcatccacagggcctggcacccagggcccaggtagacagcagacagcaggaagaggaggaagatggtggcaggcagagcttggaggactcctggacccccaggcatcttctcccagtgggttggttagtttgagttgcccc

SEQ ID NO: 313909 - DNA, 359 bp, Homo Sapiens
gcgggtcggaacggcgctgctctgcggtgccggtccaggctgtcagctgccggctcttggcggtgagggcgggctcccgagtggccccgcaccgaaggcggtgggaccagcggctgaggccaggatgccgtccaggcggcgcggtggctcctcactcatcccagatgttggttatctttctgcagtagactgtccatgggctgaacattttccgtcattttgagccagaacttactattggcatgtctggtgattagttgtgtgactgtgttttacctgtgccagcatgccatggaatgtcatcaccggatagaggaacgtagtcagtcagtcttggagagcacaatgactactgtggc

SEQ ID NO: 313910 - DNA, 1394 bp, Homo Sapiens
  misc_feature (33)..(33): n is a, c, g, or t
  misc_feature (74)..(74): n is a, c, g, or t
  misc_feature (737)..(737): n is a, c, g, or t
  misc_feature (1249)..(1249): n is a, c, g, or t
  misc_feature (1315)..(1315): n is a, c, g, or t
  misc_feature (1355)..(1355): n is a, c, g, or t
  misc_feature (1374)..(1374): n is a, c, g, or t
gcttcggttgcgggtcggaacggcgctgctctncggggccggtccaggctggcagctgccggcgcttggcggtnagggcgggctcccgagtggccccccaccgaagcggtgggaccagcggctgaggccaggatgccgtccaggcggcgcggcggctcctcactcatcccagatgttggttatctttctgaagtagactgtccatggcctgaacattttccgaaaatcattttgagcaaaatatctgtttaataacaagataaccacatcaagatggttggaaagctgaagcagaacttactattggcatgtctggtgattagttctgtgactgtgttttacctgggccagcatgccatggaatgccatcaccggatagaggaacgtagccagccagtcaaattggagagcacaaggaccactgtgagaactggcctggacctcaaagccaacaaaacctttgcctatcacaaagatatgcctttaatatttattgggaggtgtgcctcggagtggaaccacactcatgagggccatgctggacgcacatcctgacattcgctgtggagaggaaaccagggtcattccccgaatcctggccctgaagcagatgtggtcacggtcaaggtaaagagaagatccgcctggatgaggctggtgttactgatgaagtgctggattctgccatgcaagccttcttactagaaattatcgttaagcatggggagccagccccnttatttatgtaataaagatccttttgccctgaaatctttaacttacctttctaggttattccccaatgccaaatttctcctgatggtccgagatggccgggcatcagtacattcaatgatttctcgaaaagttactatagctggatttgatctgaacagctatagggactgtttgacaaagtggaatcgtgctatagagaccatgtataaccagtgtatggaggttggttataaaaagtgcatgttggttcactatgaacaacttgtcttacatcctgaacggtggatgagaacactcttaaagttcctccagattccatggaaccactcagtattgcaccatgaagagatgattgggaaagctgggggagtgtctctgtcaaagtctataagggagaattccaactacctgactttcttaaagaaaaaccacagactgagcaagtggagtagcagaaccaggagcctcttccatacatgaggaagattgctgccttttcagcagaaggganattcctaggattggctgtcccctgccaagcttggtggagcgtctgcaccttggctgcgcgcctgtngcatttgccagtttcctcccacttgagaggatgggaggtntccgcacagcttttggggnctcgtgaggggatctgcctt

SEQ ID NO: 313911 - DNA, 1696 bp, Homo Sapiens
  misc_feature (68)..(68): n is a, c, g, or t
  misc_feature (147)..(147): n is a, c, g, or t
  misc_feature (162)..(162): n is a, c, g, or t
  misc_feature (186)..(199): n is a, c, g, or t
  misc_feature (476)..(476): n is a, c, g, or t
  misc_feature (702)..(758): n is a, c, g, or t
  misc_feature (943)..(974): n is a, c, g, or t
gatctatatgctacatctgggagtggttatctctcccccccacccgcgctacgtccttaggaacgggngacgggcgcccaatggcgacgagagggaagtcggtctgttccgcgcgctcgcctgtgcgttgcggcccacggcagaggnctctgtaacattgantctactcgtgcggatcggttccannnnnnnnnnnnnntacatggtgctcggcacggctgcatgcgcgtgctcagtcctattccatctaccagcccctgcacgtaggtgcggcgcacttgttacactcgctctgtggggcgacgagtaactgtttttatgtatgttagagagcatagtacccaacgccccttagtcgctggtcatatccgtactagtgtgcccagctaagcagtagggagagaccccacacccttgaggcggctaaacatccgccacgcactctccgctcgtgaggacactagcatctctcgagngcagcagcgggatcgtctccttcttttgtgcttctctctctgcctgccgagagagcacccggcgatgcggcgagtgtagtgttgctatacgctagcagcggcccggtcgtgctccctccaccgcgcgcggcctgcttcttgtgtcgggcgcgggaaagaatatcagcgtcctcttcgtggtcttagaccacggcgtcttcttttctggcagcgcgagcatgttcgnnnnnnnnnnnnnnnnnnnnnnnnnnnnnnnnnnnnnnnnnnnnnnnnnnnnnnnnnttggttttgctaaattattctaatgtcggagagggagggcgcggcgccacctctctgaatacctgcttttcctcggggttgagttgggcgcggtcgcttcgaatctgcctctgcccctctccttccaggtgcttcgccgtcgttgggtatggtgccgttgtggatctttctgatctttgatgacnnnnnnnnnnnnnnnnnnnnnnnnnnnnnnnncacattgaaagcttttattttgaaaaataaaatacaaaagtcattaggttgtaaatgtataatggtaatttcccaacttctcagaaacaatacaatgaattaaataattaggatatttaatattattcacatcaatacacttaaacaggcacacgtgttctacaaaacattagaacatgtacagacaacctatttcaaaaggagactgcccaagtctgcttacaggatcccatttttaaaccctctccttgaaaacaaacgtcataatgtaagaaaagagaacaagaggagttttaacaggaaacacatgttccttctgggctccttactgcagggctgtgcatgaaatcgggatcaagagctctttgctcaggaggcagatccctcacgaggcccaaagctgtgcggacacctccatcctctcagtgggaggaaactggcaaatgcacaggcggcgcagccaaggtgcagacgctccaccaagcttggcaggggacagccaatcctaggaatttcccttctgctgaaaaggcagcaatctttcctcatgtatggaagaggctcctggttctgctactccacttgctcagtctgttgaaggaaagaaaagatgttttaatgtccttgaagttggtcagcatgagaagtgaccgtccccactgaaacatgaggggtggcccgcaggctctgttcactttcagatgaactcagtgcactactgt

SEQ ID NO: 313912 - DNA, 573 bp, Homo Sapiens
  misc_feature (427)..(427): n is a, c, g, or t
  misc_feature (548)..(548): n is a, c, g, or t
caaattgctgcaaacctcagcatggaacgctatgccctagtatttggtgtaaataccttcattgccctggcactgcagacgctgctcactctaactgtggtagatgccagtggccttggattagaaattaccactcaggtaagatctctcctttggcatcgaaggtagtatgtgtgacttgatcagggtgacagaagtatatgtatgcttaatgaaaacaaatccaaacaatagggaacagatgtaaagtgcataccctccttccttcattcaacatcttctcccctatccttagttcttttctcctgggagggtgttgggattgtcaggtcttagaacattcccgagtgtaactcatcagcccaatggggctgttttcagctgagaggtaatattgattccttacagaccaagaaccttctgcttnctcatccattattttcctctatacttaaatctatgcttggaatactgtatcccatgtttgagattccctgcttcatctcacaaactctttaagtctcctccctttctttattatatgattngtactatgactattgagctttcccc

SEQ ID NO: 313913 - DNA, 356 bp, Homo Sapiens
tccagaagtaattcttatttattcactcttttattgttttttaagttttcaaattgctgcaaacctcagcatggaacgctatgccctagtatttggtgtaaataccttcattgccctggcactgcagacgctgctcactctaactgtggtagatgccagtggccttggattagaaattaccactcaggtaagatctctcctttggcatcgaaggtagtatgtgtgacttgatcagggtgacagaagtatatgtatgcttaatgcaaatccaaacaatagggaacagatgtgtttctcctgggagggtgttgggattgtcaggtcttagaacattcccgagtgtctcatcagcccct

SEQ ID NO: 313914 - DNA, 1082 bp, Homo Sapiens
  misc_feature (30)..(30): n is a, c, g, or t
  misc_feature (42)..(42): n is a, c, g, or t
aaacactgtgaaggtcctttttaaatgtgnattgaacactgnaggaactgccaaacaagaatgaaattttgccactgaaacctgaaattccttgtgaaggggccagttgtgcccatgaagggggtggtcctaatagcaggggtttccattttaggagtaggctgggggcatcccattggtgtctgaggcatagggtaagtcactggggcagtagaaagcaccgccactggagcagaacttgttgctaaaggaggaacagtcattctaacttccggggggaggaacctgagactgctgaagaggtggtcttggttcctgagaaacagatcccggaggttgttgctgattagaatgagctgatgaactccccagaagaactgctgctgtttggaggtctagtgtttgttgtttctactactggtggactacctgcttcctgttcggaggaagatgccactttatttggagatgctgatccacaatccaaagggctgtttctagaaacccctcctggctgggctggtggtgatggggaagatggggatgatactggatagtgttctttggcagtaggcataggatatgtggcatttgtgggtgcagtgttgttgttgcttgccgtggttgtgactgttgttgtggtggcattggatgtcttcacaactgtgacaaaaagctgccttcggacagaaggtgaacttggactgccatttgtagatgtaccaggcaccgttgaagctgatgaactggttgtagttgttgggcttgaagttaaagaacctgctgaattcacctgagaaccactgctattctgattgctatggcgaggcaccatgtgaggcttaggcgagttagtagctctggcagggctcaaaggcctgacaggaaacggaccccaagtggattgagctggtggaaaagtacctccaaagtgggtcatgggcaaccttggtggacggatctgctggaaagtctgagcagcaagcaaagcatgtgcaaactgtggaggaggatatgctaatggaagagaaactggaaaaccaggcctcacattattcactgggttcttaatggttttgtga

SEQ ID NO: 313915 - DNA, 575 bp, Homo Sapiens
  misc_feature (81)..(81): n is a, c, g, or t
cagagggacaaaggaagtctggtctctgttagtccatcttagccagaagcagaagtctacacagttacaatgtcccaaatntgcctttcttaagcctgtatggtgaaggtaacatttgttccttcctggatctgtagactttgaggaaatccttttccactgaggagagtcctggcacatttagcctgtccagcagcagactctctacacccttgatcactttggtgatgctggcccgaaggtgtgttcaccacaataggacctagcactcacaatgtgaaggtagcctcgaccaaggttacacaggacaatatgacaatctctactttaagaggcaggtgtgatgggtaaaatgaacactgaagtcagaagactcacattcaagtcctggtacttgggtaactttggcaaactcactcaacttctgagccctatcaataggctctcacagttagtgatgaggaggaaatgagataatggatccaaaaactttgtaatctgtaaggtactatacaaaggtaaaaggataacgaagaataattccaatattcccaacagtcctcaagctttctttc

SEQ ID NO: 313916 - DNA, 664 bp, Homo Sapiens
  misc_feature (486)..(486): n is a, c, g, or t
  misc_feature (566)..(566): n is a, c, g, or t
  misc_feature (600)..(600): n is a, c, g, or t
gtcaagggtgtgtgtggccaaaggagtggttctgtgaatgtatgggagaaagggagaccgaccaccaggaagcactggtgaggcaggacccgggaggatgggaggctgcagcccgaatggtgcctgaaatagtttcaggggtgcttggttcccgaatcggatcgccgtattcgctggatcccctgatccgctggtctctaggtcccggatgctgcaattcttacaacaggacttggcatagggttgcctgcggacacgctgggcctctgtcctgatgctgctgagctccctggtgtctctcgctggttctgtctacctggcctggatcctgttcttcgtgctctatgatttctgcattgtttgtatcaccacctatgctatcaacgtgagcctgatgtggctcagtttccggaaggtccaagaaccccagggcaaggctaagaggcactgagccctcaacccaagccaggctgacctcatctgctntgctttggcatgtgagctttgcctaggtggcatatctgggtccctagaaggccctagatgtggggcttctagaatacccnctgctgctgccatacccggacatgactggaccanatgtgccacacgctcgctctttttacacccagtgcctctgactctgtcccctgggctggtctcc

SEQ ID NO: 313917 - DNA, 896 bp, Homo Sapiens
tggttgatctaagaaactttattgctcagaaccttccctccctgggcaatggaaagagctttggagaccagcccatggggacagagtcagaggcactgggtgtaaaaaagagcgagcgtgtggcacatttggtccattgtcatgtgcgggtatggcaggaggagggggtaatctagaagccccacatctagggccttctagggacccagatatgcccccttaggcaaggctcacatgccaaagcaaagcagatgaggtcagcctggcttgggttgagggctcagtgcctcttagccttgccctggggttcttggaccttccggaaactgagccacatcaggctcacgttgatagcataggtggtgatacaaacaatgcagaaatcatagagcacgaagaacaggatccaggccaggtagacagaaccagcgagagacaccagggagctcagcagcatcaggacagaggcccagcgtgtccgcaggcaacctaacaatagctgtagtgtgtagaagatgcaaccgaatatgctgttggattgattgaggatgctgtcctgtcccagcacatgctccaccagcccgaaacccctgccccacctggaggagaagacgcgcgaacagctgatggcggtgcccacgtcgcagagcgcgcggtaatcccggtcccgggcgcgcgccgccttcacgtgcagcgcgtagagcgagagcactaagcccgtcaggcaaagagcgagccgcacccagccagggctcccccaggtgctgcccattatctccaggttccgcccgaggcgcccgcggagaaaaccagccacggagcaggggccgggcggcgaatggccgcgcccctcctggccctctgactcggcgattggccggccgtgctcgcactcc

SEQ ID NO: 313918 - DNA, 716 bp, Homo Sapiens
  misc_feature (465)..(556): n is a, c, g, or t
atttcttcgctgttttcctaactcgcccgcttgactagcgccctggaacagccatttgggtcgtggagtgcgagcacggccggccaatcgccgagtcagagggccaggaggggcgcggccattcgccgcccggcccctgctccgtggctggttttctccgcgggcgcctcgggcggaacctggagataatgggcagcacctgggggagccctggctgggtgcggctcgctctttgcctgacgggcttagtgctctcgctctacgcgctgcacgtgaaggcggcgcgcgcccgggaccgggattaccgcgcgctctgcgacgtgggcaccgccatcagctgttcgcgcgtcttctcctccaggtggggcaggggtttcgggctggtggagcatgtgctgggacaggatagcatcctcaatcaatccaacagcatattcggttgcatcttctacacactacagctannnnnnnnnnnnnnnnnnnnnnnnnnnnnnnnnnnnnnnnnnnnnnnnnnnnnnnnnnnnnnnnnnnnnnnnnnnnnnnnnnnnnnnnnnnnttgcctgcggacacgctgggcctctgtcctgatgctgctgagctccctggtgtctctcgctggttctgtctacctggcctggatcctgttcttcgtgctttatgatttctgcattgtttgtatcaccacctatgctatcaacgtgagcctgatgtggctc

SEQ ID NO: 313919 - DNA, 1020 bp, Homo Sapiens
  misc_feature (22)..(22): n is a, c, g, or t
  misc_feature (32)..(32): n is a, c, g, or t
  misc_feature (106)..(106): n is a, c, g, or t
  misc_feature (121)..(121): n is a, c, g, or t
  misc_feature (146)..(146): n is a, c, g, or t
  misc_feature (158)..(158): n is a, c, g, or t
  misc_feature (329)..(392): n is a, c, g, or t
cacaccgtgctatgcaagtgcntgctacctcnccatgtagcaagaaagctcggtctgctggctctctctcccgacgtcctggtgagtcacgtcgacaaaaggcaanagggtggggtcctancagctggttgggagctgagccttgnaaagccttcganaagtaccttctgatcaaagccacgaaaatccagctgatgtgtatcgaagggggctattctctgggtggggaaaagcccagacgtctgctacaatcccccccaagtctcctgatgtcaagcaatccttcgtgacttccctatgccaaaaggagctttaaagtcctataccannnnnnnnnnnnnnnnnnnnnnnnnnnnnnnnnnnnnnnnnnnnnnnnnnnnnnnnnnnnnnnncctgaatctgctctccatgcctcagattatctcagtatacacaatgcaacaatcttgcatctgttctccatgcctcttgttgctttttaggaagtagcgaggaaggaaagcaaagcagcaggatcccctagagagtttagtctttggtttctaagtttaaaggggggattggcttcagagcttggagcaagacagaagagtcgacggacggatgagctggcaagggagaagggagtctctggggcatgagcaagggagccgagatcttgtctgggttcatgaagctagagagggctgcggcagaggcgttgaggcctgggtatagcactggcactgaggtgggataccagcacttctccagcatgggcaggtaggcagtcgctgaaggtgggatcaggtagaagggcaggcagaaaggaggctggtgtgggtgtgggcccaggaacggggagctgatcaggtcactgctagtgaaatggccttcatcatccgaaagctgcatccggttcttttttgtggggggttcttcaggactctgtgcttaattgcgccgatcctttctcccatcgtgaacctgcgtccgtggtcacttttgaagctcggctgctcactggcaagtcgcccttct

SEQ ID NO: 313920 - DNA, 229 bp, Homo Sapiens
ataaatatgggtcatactggctactttgtagaaaatggattgtaggggcaaggtatgagagcaggattgtagcacaaaatctcacacatggataaacatgtagaattgatcacacatggttggcagctgaggatgagctgtgctgagtcattgactttacctctcaagagtaaaagagccaagaaaatggtgtgaactttctttagactatttccccctggatttgtgt

SEQ ID NO: 313921 - DNA, 693 bp, Homo Sapiens
  misc_feature (51)..(51): n is a, c, g, or t
  misc_feature (176)..(176): n is a, c, g, or t
aaaagtaacttttctaattagactatttcaaaccccttggattatgtatanaatatattgtttatgtattttcagaaaggggaaatgaaaagagaagtaagttgtttcttagattaaaagatagaacagccagcagattccattcattcgcttcagctggagactaagagaacagnaggagagggcaagtatttcctgccatatatcagacagtgagaaagtgttgccatgatttagtttagatgaattataatggcacacacaaagcacaagctgccttgattcaacaaagaagatggaaaacagaagccgctctgatcagtgaggaagaaaagaaaattacgaagacaagttatgtatttgctctgatttcagacactccgaatgtatttgttctgtggtgcagaatattaagaaaataacagacacgctcatgcattaaaagaataaccgcaatgtactcatgcataatctacaacatgtttttaaaggatggaaatcaaatctatctgtcatactttgccctcaagtattctgtgggctgttgacatcattttgaattacaaatgatgtatacagcttgtgctacaaagattttggaactagaaacagaatcagactcatgcattacttttattgtttttttaaaaatgcctgggacaccagagaacaattccatttataaattttagt

SEQ ID NO: 313922 - DNA, 768 bp, Homo Sapiens
  misc_feature (19)..(19): n is a, c, g, or t
  misc_feature (32)..(32): n is a, c, g, or t
  misc_feature (41)..(41): n is a, c, g, or t
  misc_feature (49)..(49): n is a, c, g, or t
  misc_feature (69)..(69): n is a, c, g, or t
  misc_feature (98)..(98): n is a, c, g, or t
  misc_feature (110)..(110): n is a, c, g, or t
gtggcctgaactcaggaanaaggaaccaaagnataaacgcntccatcgncctctgctgtgccataatangggtaggcctaatgtgaacattgagggantcgttgtgctgncacaagggaggtgtgttggtaatgtagcacccagttctttccagagagctgtaacaaagttaatagggctcggcaaagccatagccagttgctgttttgtttaatgacacaatgctttacttcgccgtccaccactacagagcaggcatagcagccctgtttactgctctcccggacaagaaaagtgccatctcgcttccctcgcaacaggttttcagctttgtttcggttgctgcttccaacattccatgtcttctcatcatgatggggcaaatcttcatcatcttccaccagtgaatattggtcttcagtcattgcccaaccactcgttcaacttctttgccgaacacctttttgagtcaaccacatcaagtattggtctctcgtctttctcagctggataaggtctggtttaatgctgttcatacgtttgtcaatttctcgatactcagctgcctgcttcttcaagtcttcttccaatcttcttctactgtcaataatttcactgattcgagacttcaacttatcataattatgcataatcctttgtatttctttctcattgccttcacgtttaaacttttctatgtattctttgctgtaccgctcttgggtctggcactgttcttcaaatatttttatggtttcattaaatgct

SEQ ID NO: 313923 - DNA, 325 bp, Homo Sapiens
ctctttaagagtttttaatttataatttgttattcataattagtcccatgtagaatctgagaaatttcaaatgaagccacatttgaacaaaaggtactggctttttagccgcgatcacatgaatataactgatgagtttttttcatttaagaaataagaaactttgagcagcaaatagttggcccgatgagttgtttctaattagagcatcacagttctgattagtgtgtttttttagaagtgatttcccttaaatataaggaatgaccttttatttcccagcctatagttgttggattggatttatcactaccagggccggtgc

SEQ ID NO: 313924 - DNA, 402 bp, Homo Sapiens
ccccaatggcctcccaacatcataagatttcctctcgcagaatgtaattggaaggaagaatcaaagttctccttcctcatctggacacaggaaaggagggaacacattatggttaattctgaagatgttgctcacagcaggttctagatgcaatccgatagctcccctctgttcctagtgctttcagtcctccctgcttccactctggtaggaaactctcctcaggatcagagaaaagccgtggccttgaccagggaaacagaggctgattctcaggggagatgaggtcagggagacaatgcaactaggacgaagaagccaaatagtttggcacaaattaatttcccaaaagatattaacctcgtttctttccacattcccgcgtgccgtattcctacagcc

SEQ ID NO: 313925 - DNA, 683 bp, Homo Sapiens
  misc_feature (34)..(34): n is a, c, g, or t
  misc_feature (42)..(42): n is a, c, g, or t
  misc_feature (78)..(78): n is a, c, g, or t
  misc_feature (85)..(86): n is a, c, g, or t
  misc_feature (120)..(120): n is a, c, g, or t
  misc_feature (140)..(140): n is a, c, g, or t
ttaatttgtgccaaactatttggcttcctcgtcntagtgcanttgtctccctgacctcatctccctgagaatcagctnctgttcnnctgtcaaggccacggcttttctctgatcctgagnagagtttcctaccagagtgnaagcaaggaggactgaaagcactaggaacagaggggagctatcggattgcatctagaacctgctgtgagcaacatcttcagaattaaccataatgtgttccctcttttcctgtgtccagatgaggaaggagacctttgtttcttccttccaattacatccaaaatatccacacacctcctaatatttggaagctttgatcctttggggtgaggatgcgagaggaattcttatgaaatggttgggaggccattaagggaggcccatgcaagggttggtggtagcattgggcacaacttggattaccagcttgtgttttccagggataacttgaagcagagatgagtgaaggggaagaagtagaagccgcatatgcttatagggcatgctccaatagtgctcatgacctcaggtggcctctccacagtctaaactggagctgggatctccaaagggcctcttcgttcccaagactttaattataatctgtatatgcaggtgactccctaatccatattccagcccagtctttcttggaattaaaa

SEQ ID NO: 313926 - DNA, 715 bp, Homo Sapiens
  misc_feature (267)..(267): n is a, c, g, or t
  misc_feature (551)..(551): n is a, c, g, or t
  misc_feature (584)..(584): n is a, c, g, or t
  misc_feature (635)..(635): n is a, c, g, or t
  misc_feature (686)..(686): n is a, c, g, or t
  misc_feature (691)..(691): n is a, c, g, or t
atgagccactgcagccagcttatttctttctatgcttttctgctttagcgactgcatgtcccttaactacttgctaccatcttgctgtgtcattttgtctctgttccctcctacctttcatctgcaacctctttcttgactggctgaaaaacagaaccaactatatttttggcaatctattatatttactgtctagaattctatgttccttttcttaatttaaaacactgaaaaatagaatggtttctatttctctggttaagcctncaagctaagtttgattttacctgtagctggcactgggctttttaaggtggtcactagtcgttataggtggaatggcaaggagtcattcctgcccttcctgaggcccccttttctgacacaatccttacccaccactttgccagtggagcagccactgtagatgaactgctggccagtgctatgaatgggggagaaccggcagcggatgagggtgtgcagcactccgtgggccccggtagtcatcaaggagctgtcccctggggagcttcagttccgccaggctnggtagggatgcagagtaaaccctaggttagganatctactttgggattgtttcgtaccaccagtccttgagcaaggttcgattncccagagacaaatgcctttcccaatgtttcaagttggtgggctctttcttncaccnaattagtcagtgagacagttttcc

SEQ ID NO: 313927 - DNA, 711 bp, Homo Sapiens
  misc_feature (681)..(681): n is a, c, g, or t
ctgggatatccgacgcttttccagccgggaaggcatggaagcttcacgccaggctgccacacagcaaaactgggactatcggtggcagcaagtgcccaagggccacggagtgctgcacaccctcatccggtgccggttctcccccattcatagcactggccagcagttcatctacagaggctgctccactggcaaagtggttgtgtacgaccttctaagtggccacattgtgaagaagctgaccaaccacatggcctgtgtgcgtgacgtcagttggcacccctttgaagagaagattgtcagcagttcgtgggacgggaacctgcgtctgtggcagtaccgccaggctgagtacttccaggatgacatgccagaatctgaggaatgtgccagcgcccctgccccagtgccccaatcctctacacccttttcctcaccccagtagatccaacctccagccccatatagggtgaacctcttgataagctctctgcctcctcctccctttcttcccttgtggggaatgtttggaggaatcactgggcatttgatgggggattaacattaagcctggggcttttgaggcttcagcttgagccctggggaaggatttctccccatgggggcaggagtgggtcttcctttacgttggttcacacccagttcaggtttggggttccntatcttttgggccagagttttgggcaggga

SEQ ID NO: 313928 - DNA, 2044 bp, Homo Sapiens
cttcgataggattggagaaggtttgtgttcccgacgccttggtagttggcataggctaaagaaaagggatctcagccccgaggaagggtcaccctcctagagatagctactaccccgtctcaggagaccctggtatttctagagcacgctttgctttcaccaaacccaaggaggtgacaggaggagcccccgcacaggacctaagaatgctgtgaccagaagatgggatcgcggaacagcagcagtgcaggatccgggtccggagacccctccgagggcttgccccgaagaggggctggcctgcgtcggagtgaggaagaggaagaagaggatgaagatgtggatctggcccaggtactggcctatctcctccgcagaggccaagtgaggttggtgcagggaggaggtgcagcaaatttacaattcattcaggccctcttggactcagaggaagagaatgacagagcttgggatggtcgtcttggggatcgatacaacccacctgtggatgctacccctgacacccgggagctggaattcaatgagatcaagacacaagtggaactggccacagggcagctggggcttaggcgggccgcccagaagcacagctttcctcgaatgttgcaccagagagaacggggcctctgccatcggggaagcttctcccttggagaacagtctcgagtgatatctcacttcttgcccaatgatctgggcttcactgatagctactctcagaaggctttctgtggcatctacagcaaagatggtcaaatattcatgtctgcttgccaagaccagacaatccgactctatgactgccgatatggccgtttccgtaaattcaagagcatcaaggcccgcgacgtaggctggagcgtcttggatgtggccttcacccctgatgggaacacttcctctactctagctggtctgattacattcatatctgcaatatctatggtgagggagatacacacactgccctggatctcaggccagatgagcgtcgctttgctgtcttctccattgctgtctcctcagatggacgagaagtactaggaggggccaatgatggctgcctgtatgtctttgaccgagaacagaaccggcgcacccttcagattgagtcccatgaggatgatgtgaatgcagtggcctttgctgatataagctcccaaatcctgttctctgggggagatgatgccatctgcaaagtgtgggatcgacgcaccatgcgggaggatgaccccaagcctgtgggtgcactggctggacaccaggatggcatcaccttcattgacagcaagggtgatgcccggtatctgatctccaactctaaagaccagaccatcctctgggatatccgacgcttttccagccgggaaggcatggaagcttcacgccaggctgccacacagcaaaactgggactatcggtggcagcaagtgcccaaaaaagcctggcggaagctgaagctcccaggggacagctccttgatgacctaccggggccacggagtgctgcacaccctcatccgctgccggttgtcccccattcatagcactggccagcagttcatctacagtggctgctccactggcaaagtggttgtgtacgaccttctaagtggccacattgtggagaagctgatcaaccacaaggcttgtgtgtgtgacgtcatttggcacccctttcgaagagaaggttgtcagcagttcgtgggacgggaacgtgcgtctgtggcagtacggtcaggctgagttcttaggctcttgagggcctaccggggctggtgaccctgcagatcggtggcaatccctgggtgtgtggctgcaccatggaacccctgctgaagtggctgcgaaaccggatccagcgctgtacagcagattctcagctggctgagtgccggggccctcctgaagtcgagggcgccccgctcttctcactcactgaggagagcttcaaggcctgccacctgaccctgaccctggatgattacctattcattgcgttcgtgggcttcgtggtctccatt

SEQ ID NO: 313929 - DNA, 1429 bp, Homo Sapiens
  misc_feature (181)..(181): n is a, c, g, or t
  misc_feature (584)..(584): n is a, c, g, or t
  misc_feature (589)..(589): n is a, c, g, or t
  misc_feature (645)..(645): n is a, c, g, or t
  misc_feature (677)..(677): n is a, c, g, or t
  misc_feature (862)..(862): n is a, c, g, or t
  misc_feature (960)..(960): n is a, c, g, or t
  misc_feature (966)..(966): n is a, c, g, or t
  misc_feature (1100)..(1100): n is a, c, g, or t
  misc_feature (1152)..(1152): n is a, c, g, or t
  misc_feature (1267)..(1267): n is a, c, g, or t
gctaattacagctttaatgtgttacaggttgaaaaccctgaattaaaaactaaactgaggtgggagctgcaaccctcctccacctcccattcactgtgtcaccacacttccaccccccagtgcctggcactggtccctgcagagctcagcgtgctagtcatgtgggctgggtttctgtgtncgtaaggggaggggacccctctccagaaaatgaccagcatctaaattcgggcatgacttgaggacccaaaagctttggggatatttgcgcggtcatacagggcgtggctaggaccagaaggcgctctggtaacgatgcagaaaaccgtgcagccgcctcctgggcggagcaccccacccagcccccactacaccacaaggtgctctgaacggctcagaggaagaggtgggaggggtccccggacccggggccgctcgaggttagccggtcacagcgagccttgtagagatcgcgctcccgggccaggcgggccacctcggcccgcagcgcgttcagctgggcggccaggcgggcgcgctcggcctccagcccgcgccgctgctgcagccgcttggagcgacangcctncgcgtagcgcggttcttcagcgtgcggcgcttctgctttagccgcagcgcctcgtnggcgcccgcagccccgcagctgccggtttagntcccgcacagacatcggagaccagcgccgcgtcggaaaaccgctctgccagctggacgtgctgggctcctgtctcctctgggctccctgggtagtagccatggggcccatcaacagggactgggccctgaccctgcagcagctccatggcctcttcaggactcagccccaatgcctccccagccncccagctgctgctgcagggtagccagccagtacagctcctccaggcctggccgggtgccctcggttgcccccaccatgcctggttcactgaaggtggntgaagnaggcactgagctgtaaggtgtggagcccagtgaggctgtaggggggccaggtcggccctcagagggttcccgctttacctcaaacttcatcaagtcaaagtcattgacatattccatggccagggggctggggngcagggccattctggagctgggctgggaggagtgcacctatcaatcatcgtntccgctgtccagttggctggccaagggggcggggccgtcgtgtgacgtttgcagcccgccggccaggaagccgcgagatgcgtgacgagcgaagcgcgtgacggaggagcggttngcagacgcagtggcggcagtcggtgtaaacaaggcctcgcgccgctgcgggtcctgcgaccgctcctggctggtgggtggtctcgcgtggggcggttaccgccggcttcagtgggaggtgcttctcggcttcctccccctcatggcgtacacacccccggcg

SEQ ID NO: 313930 - DNA, 1364 bp, Homo Sapiens
cagggccccacacagtttattgagggagccaaagccagtgagaggacgaaggagtcctacttcaacctacttccttaaagctgtgtgcctccagcatgaagggaccttcccagagggcagggcctgccctataaggggccacatgaagccttgtggagactcctgcctctcataccacagcctgtcctaccctaaagacccagacatgacagcagacataatccccaccccaggagggtgctgaggaaacacccttacccatgcccctcccctagagacctcaggaagaaaggccaggacacctgtcctgtgattggccagttgaatcctcaacgtgaagacctggcaggcctggctgacaggtctgttcagatgtggcctcaggcatctactctaggatccaacccctaacattcaaacatgattaaaaacacccaggacacttctcttgctggcagaggccacaccccagataatggcagtcctgccaaactctggccagagatagggacccaagctgactgggtgtgagcacgtaaggagaccactctgccccatggggagaatcttccagggctcagctgaggctcagagcccaggcttatgttattccccatcaaatgccagtgattcctccaaacattccccacaagggagaaagggaggaggaggcagagagcttatcaagaggttcaccctatatggggctggaggttggatctactggggtgaggaaaagggtgtagaggattggggcactggggcaggggcgctggcacattcctcagattctggcatgtcatcctggaagtactcagcctggcggtactgccacagacgcaggttcccgtcccacgaactgctgacaatcttctcttcaaaggggtgccaactgacgtcacgcacacaggccttgtggttggtcagcttcttcacaatgtggccacttagaaggtcgtacacaaccactttgccagtggagcagccactgtagatgaactgctggccagtgctatgaatgggggagaaccggcagcggatgagggtgtgcagcactccgtggccccggtaggtcatcaaggagctgtcccctgggagcttcagcttccgccaggcttttttgggcacttgctgccaccgatagtcccagttttgctgtgtggcagcctggcgtgaagcttccatgccttcccggctggaaaagcgtcggatatcccagagtttgatggtctggtctttagagttggagatcagataccgggcatcacccttgctgtcaatgaaggtgatgccatcctggtgtccagccagtgcacccacaggcttgggcctcgtgccgaattcgccacccaggcctcgctacc

SEQ ID NO: 313931 - DNA, 1122 bp, Homo Sapiens
  misc_feature (23)..(23): n is a, c, g, or t
  misc_feature (30)..(30): n is a, c, g, or t
  misc_feature (66)..(66): n is a, c, g, or t
  misc_feature (84)..(84): n is a, c, g, or t
  misc_feature (620)..(638): n is a, c, g, or t
  misc_feature (1084)..(1084): n is a, c, g, or t
  misc_feature (1088)..(1088): n is a, c, g, or t
  misc_feature (1093)..(1093): n is a, c, g, or t
cttccccaaaatgcctaggaatnaaccagncatgagccaccacacctagcttgtttaatccttttnaaaactgccctattttgnccatgaaataggtacccttgctgtgaaagcctgtgaaacacccctggatgtgtgtaccttcatttaaaaactgccttagagggcatgaaatgtcatcagggaagatctattccgagctgggtgtgagctctagccctctccctgaccatcggtttgctctggggtatgaggttctgagtgtgaggcgcccactggggcctggcgtcagggccgacttgcttctcttaggctctgcgttcaggggctacctcttccaaagactacacagctgcaggcccagcctcagagcagaggtgatatgggtattaccaggctctaatggaaagtgtgctctctcgatatctacttgcagggaagcttctgaaattggtaagggagcacctattgcaaggctcagtgaacaaatggttttggtatttccctttttcatggggcaccagaagggtattttctcctacacaggatcgcatctgaagactttgctgaactgtgttttcctgaagtgaggagatgaaagacctcagataggaaaaacnnnnnnnnnnnnnnnnnnncagacactgagccaggttcccacacagtttattgagggagccaaagccagtgagaggacgaaggagtcctacttcaacctacttccttaaagctgtgtgcctccagcatgaagggaccttcccagagggcagggcctgcctattaaggggccacatgaagccttgtggagactcctgcctctcataccacagcctgtcctaccctaaagacccagacatgacagcagacataatccccaccccagggagggtgctgaggaaacacccttacccatgcccctcccctaggagacctcagggaaggaaaggccggggacacctgtcctgtgattgggccagtttgaatcctcaacgtgaaggactgggaaggcctggggtgaacaggttttgtttcagatgtgggccttcagggattcttacttttaggggttcccaaccctttaacntttnaaacntggtttaaaaacacccgggggattttttt

SEQ ID NO: 313932 - DNA, 385 bp, Homo Sapiens
cccgagctgtgggaacttgggtacattgcttgccctcctcgtaaaatggagatgataatactgcccctgcctcccaaagttactcagccagaaaggagcagggccaggaggtccagagaggagcaggaactagtccagggtcacggagcaggtttcagatgagggctgagactggcgcccttcactgtcccgagcaggtccgcagtggctcctcgcctcccccattaagccacgaagctctggtggcgccgggggccctcaggttccaccagccgtgggtggggaggcagactatacccctctcagccccaatcccttccccctcacccaagctgccttttctcaaataaccacactggggagggcagggagtcggctcgtgccg

SEQ ID NO: 313933 - DNA, 343 bp, Homo Sapiens
  misc_feature (48)..(56): n is a, c, g, or t
acaccggtaacgcagaagaggaaaaaaatagaatccgtaacaataatnnnnnnnnnctggtttaaaaatgatctggttccctccagggcgagcaattgcacaaatgtccactgagtctggtccagggatcaaggaagggaaggtcttaaaagataaaagggggggttagaaaacactcctcatcctcttggaatcggtggtttaaaaaatgtccatgcacgggaggggagccccttgagggaaggaaggtggccacctggggccctttggtgtaggcgcagaggcgttggggaggggaggtgccgaaggctcacaccgaaatctcataggtggtaccaccaac

SEQ ID NO: 313934 - DNA, 1541 bp, Homo Sapiens
  misc_feature (1122)..(1122): n is a, c, g, or t
  misc_feature (1155)..(1155): n is a, c, g, or t
  misc_feature (1159)..(1159): n is a, c, g, or t
ggcatggtcctatttattttcagacattctcgcttcacagaaagaaacagggtgaggggctcaagagagaggctgcccaagggagaagcacgggaacgctgaactggccgaggggcttgtcctcatcctcaggggtagggggaagcccccatctgccagtctggctggaagggaatagatatagagcagaggccctgagtggaaggtgacagtataaccaaacagccaaggccaagaagaggaggggccctaaggcttagagaggccctgaggaccaaccttgctctgccatctgaccttgcccttgtaggcctcctctgaactcccaaaatgtgacctatgccatcaccgaggccgcaggaacaagaggtgggtgtccatgacattggtacctgtcatccctgtgtgcagcaggtgtgccccaccctggaggcagcagaagaaggtatgtgagtcattgtgggctaggaaggtggctatgtccaggccctcagctgcagcctggctggcaagctcaggtgtgacccaggccccagcagcctctgtgggcccatcctgcccatcggtgccaccgctcaaaaacagcacatctatcggccccagcggccaccttctcaactctgctccaacacgcagggccagttcctggttccggccacccctgcccgagccctgcagctgtactgtgggctcgccaccagccagcaggcagactgggccccttccccatgccatggtctccagagcctcctccagctgcaggtctgggatctgaagctcagctgccagctcatggagctgtgcatcttcctccacagaagccccagccatggatggggtgaggcgggttctagccacatgggccagcagcccgtagaactgggccatactttttacatcaccttgcatggctgcactcagcaccacagcctgttagcccagtgcctcggcctgccgctgggcctcagctagcgccagcacattagagccaatgatcacattcaggacatggccacaggtgtgtggcccatgggggtcagagtcggcccgagacagcacagtcttcacagaacgtggcagggctgcacggaggccgtagcgattgaggatatgcagggaatnttgcacattgtgggaactggccacggtggggcnactngcaatcacctccacagggtcccccaccacatctgacaggatgaggctcaccacctgggcagggtaggcggcctgagccagccccccacccttgagctgggacagggccttccgaatggtgttcaactcctggatggtggctccacgggctgccagcagtctagtgagtgtctgcttctcctccagtgtgacaggtgggatgggggcaggcagcagagctgaacccccacctgagatcagcacgagcagcaggtcatcagctgtgagtccctcagccagttgctggatggccagtgcagcccgcagcgcatcgcggtccgggaggttgtcctccgcaccctcgaatacctggacacggctatgtggcttcagcagcatctccc

SEQ ID NO: 313935 - DNA, 1052 bp, Homo Sapiens
gttttaaatgtgctttatttgtgcttttcagagagttgtcataattgtggcagttgtgtttgtggcactgtaaatgctgaaattcatgggaaacttaccaaatgactgcttgagtgttatttcccattaaattgggtagctgtcacaataaccagaagaaatcttgtggcccttttgaagaaagccatgtatgttttgttacctaggttcatagtattttaatttaaaggcaaagagaagcattctacttatttgtcttataaaccattaatcgttttttgtgcagaagagagcttattttgttatactgctttgtataatggaaataagtcacattctgggggaaaaaaactggaattgtttgtattttgtttttttggggggggatctttatgtgaaaaatcagagctacttgttaccataagcccttactatcaacaagataattatttgtaatcacttttttatcccaggttggaattgctttccccttctaagttatcttcccttaataatatttatgataccaggacagtgagggtataagagcaaatgtagtgaggtattcaaaaatcctgcatatatggactcaaaagttctttagttatttgaattatatatagctatattattttattagcttgggttgtcagaagattgccaattttaagagtaaagaggagagagataagtaataaaaatagaggaggggaagaaatggctcccttactggtcttagtaatcttctatatagttaatgagctaaaaaatgatacttaaagttccaggtttggtaccgctagcatagaaacattgcctttcctacacattcctcatcattgtttcctcagaaaattattttaagagtttgtgaaaccagattaaatatctatattcagtttggcctaatttttaaaaataaatatttatactccagcttttgtgtatttggtgtacatcaccacttatgcaaatcaaggatcaggtggcattagtatgcactagctgcaaagtcacagcaccctatggaaataagtatgttaatataataa

SEQ ID NO: 313936 - DNA, 359 bp, Homo Sapiens
aagataattatttgtaatcacttttttatcccaggttggaattgctttccccttctaagttatcttcccttaataatatttatgataccaggacagtgagggtataagagcaaatgtagtgaggtattcaaaaatcctgcatatatggactcaaaagttctttagttatttgaattatatatagctatattattttattagcttgggttgtcagaagattgccaattttaagagtaaagaggagagagataagtaataaaaatagaggaggggaagaaaatggctcccttactggtcttagtaatcttctatatagttaatgagctaatcctacacattcctcatcattgtttcctcag

SEQ ID NO: 313937 - DNA, 666 bp, Homo Sapiens
ctcgtccccatctccctgagtccatctcattgtctcagaattgtttttctcatagattatctcataaataaatatagcaaattcaattcctatcagccatttaatgcaattaataatagctattatggatacaaataattaacacaaaattggcaacacaaaaatcacacgtagtaaaatttgtgactaaaaaattgacagaggaatcaaatctcaacaaatttccttctgcaaaattgataggaaaacatttatagtgggagaggctattcttaataacatttgatatatgaacatgtcgtatctttagaataaattgtcaatagaaaacaattctaataaatagttttgctaaaatgcataatatgtaaaattgggaagtttagctgtgatgtatcagttaatcaggtaattaaattgaccaaatggaatcactccaggtaagtcttttcttgatgaaattgatcaatattgcaataattctgattaagctgttaatatttaaagttatcttggggtgcgagtatcagggaccagatattcttgaggttcataacaacatttaaaatattctgtaaaccttatcaggcctacaaagtaagaatctagctttttttatgttgggctactaattatgtgggggcactttactctcatgggcctacg

SEQ ID NO: 313938 - DNA, 568 bp, Homo Sapiens
  misc_feature (510)..(511): n is a, c, g, or t
  misc_feature (513)..(514): n is a, c, g, or t
gctgggtgagatcaaagggagagcttctgccaccacctcctacttggtgtgtgcgggggccggcacaaagaccatctctgcctctgccttcccctgctcctagccagggtcagctcttctctctgacgcggaatacagagctggacaacctctgcctcggccctctccatccgtaaataaagactagaaccacccccactctgcactctccccctctatggatcaggaatatttgttttttctgctcctctcaatatggactgggcccgctcctgattcctcccacccttacctctcaacacccagtacctcctcttcttttgcatctcatcctcaagggacactactgaaaacctgtgtggaatcaaagctcaccggagacagctgtggccattgtgcctataacgccaacaccaggcatatcctggagcctcagctggagaatttacctgtcttggacaacctgccacaaaactgtgcccacatctagttccatctggtcaaaaaaannanncctatagtgagtcggattacaattcactggcccgtcgtttaccgtcgtgctggg

SEQ ID NO: 313939 - DNA, 615 bp, Homo Sapiens
  misc_feature (588)..(588): n is a, c, g, or t
cacaggggcgaggaggcggctttggttctcccggtgggcttgccggagtgcgttctgcagaccagaagggctttgtctggcgattgctgaatgctcaatagcagcctgctgggagggaagtcgaagggagaaataggacagaaagagagacctgacctctccctggaggctctcagtgtcggccgaggcccttggtcttgctctagggctctgcattcccgagagctgctgtatgccggggattggcttccaagcctgcctgagcttctccagtctcccgggcatcgccatgcggtgggagggtgagccttcctctcctgctgaaattccggcggcttggcaaccggccggggggtcttggattcctcggggagacaccactgatgctttgtggtttcacgtaatttggatttgttgaaggcgtcagaaatggttgtcgctacggtcttttgtatgttcttgtgttgcgaactaataaaggaaagtccaaattagttgtggccgttgcggttaatgcttcttgtagctcttaacccagccctttctaaacctttggatatacttactaggtcagttccgggtactcantacctttgcgttggcgcacccaggcgc

SEQ ID NO: 313940 - DNA, 1242 bp, Homo Sapiens
  misc_feature (163)..(163): n is a, c, g, or t
acgtccgtttaaggagtcggccgcgggcaattcctgggtttgtcgacggggcccaatctgtgggacaacccgccttttgcctgttccgggtacctttctctcgttctggcccttcgcatagtcgtcacttttaggtttatctggcttcttggtctacattccntacctatctctgcttgcttttccatctgttcctcgatcaccatgtgataacccgtgccctctcgtttatctttggtgcccttcctccctggcttgtttctgtctctgtccttgtcttggcttctgtctctgcgtctatgcctttcagattcttgctcccattccttttcatgtcgctctcttttcaaatggtgtgaatcactataaaatctctggcggtcccctttacccctattaaatggcctatccagttgctgttggtcttgcctaccccaagggtcactatggcgcctttctggcctccgaatgtctttaacctggtaaaaattctgcgggcctatataccttgatgcttgtgagagaggacccatcatacgctgtggctgacctgggagatgaacaacaggtggccagggaaccatgggattttgagcaaagccaaagcctggagggggaagtaatggaggtggcaaatgtggtggaaatccaaacatgctttgtgggggaaaattaggaggccctggaaatggaaatccaggtgggctagacttgagatgctgaaggttgggctgctgtggcctcatgggtgaaaagtttgtacttgttctggggctggtgcttctggaagtaaaggtgatgcttttagaaggaaattctgatggacatgtgtttccaacttcaaaatgagatgtcgctactgctgatcctcttcgaaatgggtgcacagtttcaatattttgcattaaaatatcctcctgtaagggttttgcttgttctgcttgagaagtctgtatgttttctactgatggtgagttttgtgcaacttttaaattgtcactctgctgaacacacgagtttttctctgcagaacacaacttttcctctacattgatttgttctgttaagtgctccttgttgtgtgacaggccaggcagcatgtgtttttctccattccggcaactatctccatctttgctttctgaagtagttacaggctgacttcgtcctgctgcttgcctaggatcccttttcaggttgataaactgtggagacctcgctgtattagcaacacggttttca

SEQ ID NO: 313941 - DNA, 578 bp, Homo Sapiens
  misc_feature (498)..(498): n is a, c, g, or t
  misc_feature (525)..(525): n is a, c, g, or t
accacacgaagctgcccctgatcttccacctgggacgggacccaggggagaggttccccctcagctttgccagcgccgagtaccaggaggccctcagcaggatcacctcggtcgtccagcagcaccaggaagccttggtccccgcgcagccccagctcaacgtgtgcaactgggcggtcatgaactgggcacctccgggctgtgggtcccactagcacctgcgcagactcaggccaggcctagaatctccagttggccctgcaagtgcctggaggaaggatggctctggcctcggtcctcccccaaccctgcccaagccagacagacagcacctgcagacgcagggggactgcacaattccacctgcccaggacctgaccctggcgtgtgcttggccctcctcctcgcccacggcgcctcagatttcaggacccttctcctcgcccacggcgcctcagacctcaggaccctgccgtctcacgcctttgtgaaccccanatatctgagaccagtctcagtttattntgccaaggttaaggatgcacctgtgacagcctcaagaggtcctgaccggtgcc

SEQ ID NO: 313942 - DNA, 1223 bp, Homo Sapiens
gcaacagcttcataggcagattggggaccgggccgcccatggtgtcagtacgacaccagggttaacaccagtacacctttattaagcgtgaaatcttcacagtgcatctgtacctggtagcagtgactacatgtaaatcgggcagtatgctgtgaataggccgggtaggagtgaagactgtttcctaaatctgacggaacagtataggagcgaatggttcacatggtacgtagggtcagaatgggactaacggtgagtaggacccaggagggctgcctggggtgggggaataaattaaacaaaggaacgagttaacaacagcaccaggaaagttacttcagtcaaaagacgcgaaaagaatatttctccgtgcaaaatgagaaattaaacgaacgtaaagtcccccaaaccaaagtttgtgatgtgggatggttggctcggatcccgaggtgggtgggcctatgaggtggttggctaagtcgacgcaagggcggcgggggtggttctcagggatggacaaggggatggagtagagtatgtacagcccccggggctcacaggggagggggacggcggagtcggtgggggctgtgccacacgagcccccctctctgggtagcccctgcctcctttcccatcaggacctctgacgcccaggtttgcccacccactgcccctcaactctattcccaccacatcctgaatcctgctccaccgccctgccttcggaagacccctgcagccctggggagaatgtgtggcggaaattctacccaagactccccaaataattggtcacctgctctcctggcccctaaaaccggggctctggtgttggcctgagctccacgggctgagtgctcggccaggcagttgttgaacctagtgacttacttacagggaccattcttcatcagctccctctgatgggactccgtccacatcagggcctgcttggtgcccggacctacccaggagctgcccagctcaccgcacaagaactcccaggagctcaagcctgggaggctcagacccagctccattctatcaatcaatcaatcatcaagaccaaggtgctcctgacccccaggtaggaccctgccctggggccacgatgccctctgagccctgctttccctcctgacctgcggggccaccaggactccctccgctcgccctaggctcacgtgctcgccacccaggcctcgctacctaggaccgta

SEQ ID NO: 313943 - DNA, 633 bp, Homo Sapiens
acccagcggaagtatgtattctttttggatccatgcaacctggacttgataaaccggaagattaagtctgtagcactgtgtgtagcagcgtgtccaaggcaagaactgaaaactctgagtgatgttcagaagtttgcagagataaatggttcagccctatgtagctacaacctaaagccttctgaatacactacatctgcaaaatcttctgttctctgccccaaactaccagttccagcgagtgcacctattccattcttccatcgctgtgctcctgtgaacatttcctgctatgccaagtttgcagaggccctgatcacctttgtcagtgacaatagtgtcttacacaggctgattagtggagtaatgaccagcaaagaaattatattgggactttgcttgttatcactagttctatccatgattttgatggtgataatcaggtatatatcaagagtacttgtgtggatcttaacgattctggtcatactcgggtcacttggaggcacaggtgtactatggtggctggattgcgtcttcgggcccttctcatttatggcatattaacttcagaggtcacaaggatcctatttctgattggggggtatgcgcacacgtgttgttcttacctct

SEQ ID NO: 313944 - DNA, 1012 bp, Homo Sapiens
tgaggaattcggcacgagggttttggatgattaggctgtgtgtgcgtgtgagaatgatcacatgtggcgtcatgctttgtacagagcctcagaccactgggccttgtccagtgagagtcctctctggcgacatcacacgcggagcagccaggggccaccttagatctcagatctctcagagcaatacttttctgaactgccactgtgcctgggtggttgggtttggtgtcatgcttctgactagagtagatcgcgcatgtccaccagtgatacgttgagtccttacagttccccccatggagtcccataagcagctccatcgagatctgtcagcaagttgcaggaccccacaatgttctgacatgttaagacccccttacatgacgagtagagaggcagctgaggccacaaccgtgtcttcctcttgaatggagctaactcggaaccccccgttttctcttcctttctgcccaccactgaacattgccttttagataactcagtgtttcttctagatgtcatagcaatagactttcactttcatgaagtttgggtacgatttggattctcgcttaagtacatatatttatcaatatttttataaggcaaagttcacttaaatctttccaagtagcagtgtgcctaagatggcaaaatactaaaaactggtgtttcctgctcctgttgtgtgtcacttttcaagccgattgaaatatttctggcttttagggcattactttttaactatctcctttaaaaacgatgttctgtaggtttagtgtctttgttcatttccaaaagagtccagacaactgtgtctgcccctgcagaggctgtttgtccaaaggcagcatgccgctttccacccggaacgcagacaagcaggggagcggaattctaaagcagcgacttaaaatgaggaatcccccaattgcactaaatggtttcagggattgactaatcattggtctttaacattaactcagattttcgatgtgtaaagagctgtgtg

SEQ ID NO: 313945 - DNA, 840 bp, Homo Sapiens
  misc_feature (20)..(20): n is a, c, g, or t
  misc_feature (33)..(33): n is a, c, g, or t
  misc_feature (57)..(57): n is a, c, g, or t
  misc_feature (70)..(70): n is a, c, g, or t
  misc_feature (130)..(130): n is a, c, g, or t
  misc_feature (312)..(312): n is a, c, g, or t
agaacttttgtgccagtccnaaagccattgacnaccagctccaattctggatgtcgnacctgccagaagnaataccaatggaagggtcgctctttgcagcttctttgaattcatcccagtgtaatctggncatctttgttcttatccatcttgctgaaaatcttgtctactcgctgctcaggcgtcaggccatcctcattcattttcatcatgatcacagtgcctaccattttgtagatagcctcgatgatctccagcatctccactcgggtgatcttgccatcaccatccaggtcatacatattgaaggcnccagttcagcttctgctcaaagctgcccctggaggtgatggacagagcgcagatgaactctcggaagtcaatggtgccgtccccattcttgtcgaaggttcggaaggcatgctgggcaaacttggaggcgtctccataaggaaagaacttcacatagagctgctgaaattcctcgagaagcctcccacttggacagtccttgagaaatcctttgtaccactgcttgagttcatgctcattaaactctgtgctcttcaccaggtcctccatcacttcaggggccagtttgctattctgcttccccatcctgcagttaacagcctgcgcacggtcacttaacgaaaatgataaaactcaacagttctttttaaaaatatatatttaattcgggtaaacgcttaagccgtctctgtgtgtggttctctctcgctctctttttctctggagctctgggctgcttaaatccctcttggatcgcgccttgcaagcccagccgctgccgcaacacgctcgggtaaatctctgctg

SEQ ID NO: 313946 - DNA, 355 bp, Homo Sapiens
  misc_feature (252)..(270): n is a, c, g, or t
cgggcaaacggaggcgctccataaggaaagaacttcacatagagctgctgaaattcctcgagaagcctcccacttggacagtccttgagaaatcctttgtaccactgcttgagttcatgctcattaaactctgtgctcttcaccaggtcctccatcacttcaggggccagtttgctattctgcttccccatcctgcagttaaaaatatatatttaattcgggtaaacgcttaagccgtctctgtgtgtggtnnnnnnnnnnnnnnnnnnnggagctctgggctgcttaaatccctcttggatcgcgccttgcaagcccagccgctgccgcaacacgctcgggtaaatctctgctg

SEQ ID NO: 313947 - DNA, 592 bp, Homo Sapiens
  misc_feature (31)..(31): n is a, c, g, or t
  misc_feature (54)..(54): n is a, c, g, or t
  misc_feature (59)..(59): n is a, c, g, or t
  misc_feature (74)..(74): n is a, c, g, or t
  misc_feature (86)..(86): n is a, c, g, or t
  misc_feature (93)..(93): n is a, c, g, or t
  misc_feature (155)..(155): n is a, c, g, or t
  misc_feature (199)..(199): n is a, c, g, or t
atccctaaattccattttccaatcatgaatnacaagtgccctaaccattttgtnagaanaccctcgatgatctnccagcatctccnactcggntgatcttgcccatcacaatcccaggtcatacatattgaaggcccaagttcaagcttctgctnaaagctgcccctggaggtgatggacagagcgcagatgaactctnggaagtcaatggtgccgtccccattcttgtcgaaggttcggaaggcatgctgggcaaacttggaggcgtctccataaggaaagaacttcacatagagctgctgaaattcctcgagatttagcctcccacttggacagtccttgagaaatcctttgtaccactgcttgagttcatgctcattaaactctgtgctcttcaccaggtcctccatcacttcaggggccagtttgctattctgcttccccatcctgcagttaaaaatatatatttaattcgggtaaacgcttaagccgtctctgtgtgtggttctctctcgctctctttttctctggagctctgggctgcttaaatccctcttggatcgcgccttgcaagcccagccgctgccgcaac

SEQ ID NO: 313948 - DNA, 659 bp, Homo Sapiens
agaacagcccaaaaaaatcactgaaaagaaaatatggaataatttaatatattcaatgtctgtgaaccacaaagtagaaagtattctttaaaaacatggaatacatatttatttctactttaaaatctccatttatatcttataagctttgaaatgcaagtacagctttaaagcatcataatgactaattataggtgaataataatacagacagtctatattctaggaggcagctgtaggcgttttaattggaaataagcattctgagataatgataatagcagtgtagaaaaatgaagttaaaaaaattcaaagtgttgagaatcctcctgtccttctgggatttttattttaatcatctcctccacagagaacaagcagtactttcctgtagtctccagatgtgtcacccttgatgaacgagtacagagactttccatagagtctcttgaagtgtgcccggatatccaacatgtcaatttctgctcgagaaaccatcactctgatgagggtgttatcatcggtgcccaagcccttcatcgatttatagagcttttcagcaaaatatgcagatttgttcctcatgcactttactatagccagcagagcatcttcaaagctaccagatgtttcagatttaatactctgttcaatatcct

SEQ ID NO: 313949 - DNA, 746 bp, Homo Sapiens
ttgtattcatcaaacacatgcaacaggtgatttcggttccgggaacagagaacagttagaaatttcacctcatctgtcccccatttcttctctccagcctcatacaggtcctgggcatcctgtctcacgagagcatcgtccagataatttccttcatccctcccaccagctgacagagacaccagcactcgctggaacatgaacgatgtgtcagagcgaatgtcatcttcaaggctccgtccatattgctgctggtaggtttggcttatgcgccggatctcctcaggggtccgggaggccaggatctcaattaggcagccctcatcagtgccggctcccttcatggcccttcgcagctcttgcacgtcatacagcaccgtgggcgtcatcatccccacaatcacctgctcgaagttgccactcagttctgacttcaggtcgtctatcaagtccctgccgatggtgctcttgtaggctgtcctgatctcctggcgctgggcggtgttgcggtaggcaaggacgctaataatggcgtcttcatcggtgccgagccctttcatggccttcctcagggtctgggcatcttccatggcattgaatcctgaagcagctttgacagtacctcctttggttgccatggccatgactctaggtcaagatcagagttcagccacccaagcagaagttcttcgaggccgggctgcgctcctcctctgcctcgtgccgaattcgccacccagcctcga

SEQ ID NO: 313950 - DNA, 1404 bp, Homo Sapiens
caggaaccggcccggagccgtggacgcgctacagctgagaaggggacccaaggggtcggccgcggccaaggcccctaggaccgccgccccagctcacgctgccgacggcagctatagacattctgcgtgaggtccgggctcctggacttcgcctttcccgagccctggaggtggggagaaaaggttcaccaatttttaaaatccaaatatatctcatggtacagtggaagaactggccagagagtctggaagtttgggttctggtcctggctgtgccactgactcactgtgaccttgggatcttgtgctgtgaagacatttcccaagtgcttcatgttagccagcaaatctgacccacaaggcctggaaagaggtgattgttaggttgcgcagaggtggtcttatccagctcagcttcccctgggacccaccgtgggacctgaggcagaactggggtggacttggcctcctccatggcacaccggctgcagatacgactgctgacgtgggatgtgaaggacacgctgctcaggctccgccaccccttaggggaggcctatgccaccaaggcccgggcccatgggctggaggtggagccctcagccctggaacaaggcttcaggcaggcatacagggctcagagccacagcttccccaactacggcctgagccacggcctaacctcccgccagtggtggctggatgtggtcctgcagaccttccacctggcgggtgtccaggatgctcaggctgtagcccccatcgctgaacagctttataaagacttcagccacccctgcacctggcaggtgttggatggggctgaggacaccctgagggagtgccgcacacggggtctgagactggcagtgatctccaactttgaccgacggctagagggcatcctggagggccttggcctgcgtgaacacttcgactttgtgctgacctccgaggctgctggctggcccaagccggacccccgcattttccaggaggccttgcggcttgctcatatggaaccagtagtggcagcccatgttggggataattacctctgcgattaccaggggcctcgggctgtgggcatgcacagcttcctggtggttggcccacaggcactggaccccgtggtcagggattctgtacctaaagaacacatcctcccctctctggcccatctcctgcctgcccttgactgcctagagggctcaactccagggctttgaggccagtgagggaagtggctgggccctaggccatggagaaaaccttaaacaaaccctggagacagggagccccttctttctccacagctctggacctttccccctctcctgcggcctttgtcacctactgtgataataaagcagtgagtgctgagctctcacccttcccccacta

SEQ ID NO: 313951 - DNA, 974 bp, Homo Sapiens
  misc_feature (638)..(665): n is a, c, g, or t
ggcattcagctggtggaaatgtcttttttgtcgcccgagcaattcagagggggggtttcaggttgatgtggccggaggggggcctgggcccaaacccggatttttatttgggtggtttcaagacccggaggtgggaccatgtcttcaaagggagccctgcctccatcaccagagctcactcagaaaaaaaccgccattttcccaacaaactgaccctgaaaaaggaacggaccatggtgcttccgccgtgaacaaaatcagcaagtgaatccgttttcctttcccgggctgttcgaaaaagattcggctagagaaaagggggcactgtgggcagcccgtaggggatggcctggagctgtggggcccgggctgagccctccctgccttttaactgcaggatgtaaactctatggaaatgtatagaacttcagtttctcccaaccctccacaacctcaactcttgagaccaccaaataactgttaggaaacgcagaagagagtccttcaaatgagctacacccaggttcagagcgcagaaccaacagtgtgactggggcatggaggtaaattctgacacgattggaggggaatttcacaaaacaaaattccatgaagtaaacacgcacacgcgcgcgtgnnnnnnnnnnnnnnnnnnnnnnnnnnnnaagtcaacattcaacgtgaagagttcccttttctttctcgaaggttggtttttgcaagccctgacaagcaaagagtcccttgcggtggccaggggggccaagacctcagaatgaaaagcccacagctgctctgtcctcacccgctctggaggccagccctggtacaggcatgggggtgggggtcctaaaacccttcgtcagcgttcctggagcccttgccaagcttaccatgtgccccatgcatgtccttcacatcacaaaaacctgtccagccgcccaaggcctcgtgccgaattcgccacccaggcc

SEQ ID NO: 313952 - DNA, 996 bp, Homo Sapiens
  misc_feature (594)..(594): n is a, c, g, or t
aggactcctagtctttataattcttccctcgaactctcttaactttccaatgttttctagctccttgtttctcctcactgctcactgggtaatttctttagatccagcttatagtttagttcacttgtctcttcagctgagtctaataaaatattcaacatgtctgagggcttttttcttatttcaataaatatttctcatttttaggagctctatttggttctttttcagatctgcctgtggttccaacttcattccttatgttggtgatgaaaccttgaagaactgagttcaatgtttattttttctatagctttcttgtcatgttagtttgtttcaacttgtgcctgtgatctctagtcataaaatactactacttgataataatctgtaggaatcttggaactaaattaagaatgtttccctcttgcttctgccaggagctagagcactgcaaattgaggaccactgaaccttctttacctgtcctctctagggcagcatctcagattccgatgtcttcttgtttctgatttgaggcaaactgcatatgacaatgtggctattggtatctgccatccagacaaccatatnccttgtggcagaggaaatgtcgaagtatggttcttgaaaattctcctacttccagtgaacctattaaaagcagaattcaggatctagttgttttataatatctagtctaacatacttgctggaagcaaaagtcttaattttatatattaaatatattataacagttatacagtaacctgagaaagcacgtattttatgtcatttcttactaatgggacttctctggaaaggttccctaccccttgatcagaacaaaacacacagtatacaggaactgagtgcacattagaaagctcctagaggatgaacttatcctaaagttgttgtctcatttggtagaaatttttctggtgctctattattaagatgttacatcaacattcactgttcaaattattattc

SEQ ID NO: 313953 - DNA, 747 bp, Homo Sapiens
  misc_feature (580)..(589): n is a, c, g, or t
  misc_feature (605)..(701): n is a, c, g, or t
gaccttctttaactggtcctctctagggcagcatctcagaccgatgtcttcttgctgatttgaggcaaactgcatatgacaatgttgctattggtatctgccatccagacaaccataatccacttgtatggtcaatacagtattcatgactcctaacttaaaatgcgttcattttttgtggcagaggaaatgtcgaagtatggttcttgaaaattctcctacttccagtgaacctattaaaagcagattttattcaggatctagttgttttataatatctagtctaacatacttgctggaagcaaaagtcttaattttatatattaaatatattataacagttatacagtaacctgagaaagcacgtattttatgtcatttcttactaatgggacttctctggaaaggttccctaccccttgatcagaacaaaacacacagtatacaggaactgagtgcacattagaaagctcctagaggatgaacttatcctaaagttgttgtctcatttggtagaaatttttctggtgctctattattaagatgttacatcaacattcactgttcaaattattattcnnnnnnnnnnaaatttacttatgtannnnnnnnnnnnnnnnnnnnnnnnnnnnnnnnnnnnnnnnnnnnnnnnnnnnnnnnnnnnnnnnnnnnnnnnnnnnnnnnnnnnnnnnnnnnnnnnnggccgtaatggccgaattcccgggcatatgtccggtaccgtcgact

SEQ ID NO: 313954 - DNA, 373 bp, Homo Sapiens
cttcctcttgttacttttcaaggttattctaaagagatggagatcttcattagaggctatttctcataatagtctgccttgcttattttcatactccccctgaaataagcctacttttgcaaacaggccatatgaatcaaattttatgtttgttcctcactattgtaaatctgtgttttaaatattttataatagagcactaatggaaacctaataaatacaaacaagataactattacccaagataacatggaaatacttctgtttttgaagttaacaacaccgtctgccctcgcacatttaggagtatcaaccaagaccagccagttgacatgtttttctgtgtggcaacctgcccttttgtcagtcttct

SEQ ID NO: 313955 - DNA, 614 bp, Homo Sapiens
ttttttttggcatgttcccgtatgctttattggaatgctgtcaggtccgcgccttccacctgggccctcacacacagcagggagaggccccagcaccggtcccaggcccacctgcccgcacctgcagaagggaaaggccatcaccctccgtggacggggtctcggccaccacatccaccttttgaagggggcccagacacctccacgctgctgactgcacttcccatcaaaagggactccctggggcagagtgggccgtccccctacccccgaggaaggcaccctcctgggcggggacagaccttggctccatgctgccaagtcaaggtgctggcgtggaaacaggcacatgtggaacaccacatcccactgtccaaggtggagtccacccctcctcggagcactcagcccaccagggtccaagcagccctcgggagataccacgcggccgcccacgtctcagcttggagaaagacactcaaagacccccacgctcagctctcgggggctggcttcctgggcccttgtgctggctgctttccgggtggcttctcagcaccttgagcctctgatgccccgcctctgacctcaggtccaactacagcaggtggctg

SEQ ID NO: 313956 - DNA, 892 bp, Homo Sapiens
ttttgcccacgcccgacaggggagtgataattcaccgttcaagggcggttttaatttgccggagggccaggtgccaagatggtataggtttttgtcagcaagatccagtaccagaccggtgattttccaggttcaggcaccaaaacttggaaccccagccaagaggcccccctgataaccctgtagagtttcccacggtgggtgccactggggttttggcattgtaggggcttttttagccatcagtgcagagttcttggtattgccagtctccatgacaattgaattcatcgctgtaggctgtggacggtcagaagcccccaggatgtcggtattcacttccactagggggcagtacgatttgcatcagccttggtctgcaaaggtaatgccaccgctaaggactgtgcagctgattcacttggcattctctggatcttagtatctgctgtcaaagcaaccccaggtcctggtgggtatggatgtgtacctgccacaaagtattcaacttcttgtccttgattggcagggtactgtttatgaacatatgaatccgttgcattctgaggacccttctctttaagattttcttttgaagtaggcatatgcaacacaggaccatactcattacgaagcttgattgccatttttcgtttgtgactctcttcatctaaaggcacaggttttccattatcagctacaaacatgtcatgggtcctcttcaacgacctgaacacaagggtgtgtacagaatgtttctgtacctcctcgaccatgatgctaccgtgtatcccacctccggcagggaagaaactctaatcactaacgcagtacccgccgccacagctgtgcagcaccttccggaattgggcgcccaggcggcggatgtccc

SEQ ID NO: 313957 - DNA, 965 bp, Homo Sapiens
  misc_feature (811)..(820): n is a, c, g, or t
gcaattgtacttcactatgccatatgtatgtattcactgaccaaaaattcactgaccaaccaaccaaactccacacttcatctgatcccccatagacttggggatggacagctgttctttggccatatggtataagaggatcattcttgtcactacttaagttagcctcatcattttgtgctgctccaacaccagcagggtatctcccaataaagtgttcctaagcagcctgtatactgagtgcaagcaggctatcaattttaataatagtccataccatgtatgtgtttctgtcagcagaatgtacatgttgtacaaaacctccaggttccttaagctttttgctgtccatgaatcctctgtggcaactgtaatcacagagccagaagccagagggccagggatatgagaggctgacaaacatcaggggacatctggggaggagatccctgtcatgtctcttgtgccatggagctattatggctggtcttccatttgctttttctttaagtgaaaaccatttttctactttgcttttctctccatacttaaatggtcagtagctactgagtggtgctttatctgaataggcctggatcgaagtaaaatagaaatgggactggctttccacaggaagtaaactgcttcagagcccacagtcccctgctcagtgtccggaaagaagtcagtcatccctgttggcagtaaatcttcccacaggccgtccattagagatttaactagatatgttcaatagaaagagtctgaggcaagtggaaatgaggaacggaaacttaggttgggagaatannnnnnnnnnattcattctgtttgcttaattcagagtacagtttgtgctatttcatatctgtactccaggcagaaatataacttgaaaatactgtgtctaaagaaatttcagtgttctatcattaaattatttacttaataaaaaattccttggc

SEQ ID NO: 313958 - DNA, 1325 bp, Homo Sapiens; identical to SEQ ID NO: 155045

SEQ ID NO: 313959 - DNA, 775 bp, Homo Sapiens
gaggcgaaagagatccacccacctacttcaggctcccagtgatatgaaaaagtgccaaacaggactataaaattgtggtctactgtaaatggtttgcagtaaaagttctcacccagcttccactcaaccaactcaccagttagacaatgggccctctcctgtgtttaaaacagtccggtgcccacctgggtccacatgcagctggcaggtgtttgctagtgtgcccacccatgccaactttcttacatttatatttaattaaagatgatctaaactgagaaatgaatgtgaaaagaaacaaagctcttgtttggtttttaactaaattaaatgtttttaacaagttgaaacgtgaatcatttaaaaaattgctatcagatccacagagggcaatccactcatatagttgactgtaaagcttgaggaggaattcataaaaatctaaaggttttacacatgcagattgattaataaatgtcgagatatggtccacttcaaaaataaggaaagtaattattgtagatgttgcactagagcatagtttatgcaggaaatgcaccagagaccttctactggtgaccccatattcgaagaaaaaaagcctctgctctacatcaaaaggtgtcaagtacacttgtgttttcaatgaaaatataaaatgtttaaggtatatttgcaccatcatttaaggttacgcactttagccatttttaaattcactgatcaatcacatggggaaagtactcctaacatacctgcagcaaactaatgcttt

SEQ ID NO: 313960 - DNA, 644 bp, Homo Sapiens
tggatacatgttacatacatgatgagacagagtaagagaatggggaaagggtttttagatgggggaatggcaggcttttccgaggctgaaagagatccaacccacttctatttcttcagggtcccagtgatatgaaaaagtgccaaacaggactataaaattgtggtctactgtaaatggtttgcagtaaaagttctcaaccagcttccactcaaccaactcaccagttagacaatgggccctctcctgtgtttaaaacagtgcggtgcccacctgggtccacatgcagctggcaggtgtttgctagtgtgcccacccatgtctgttccccccacgtgagttatgtgcttacaacgagtcgtttctttgcattttccaactttcttacatttatatttaattaaagatgatctaaactgagaaatgaatgtgaaaagaaacaaagctcttttttgtttggtttttaactaaattaaatgtttttaacaagttgaaacgtgaatcatttaaaaaattgctatcagatccacagagggcaatccactcatatagttgactataaagcttgaggaggaattcataaaaatctaaaggttttacacatgcagattgattaataaatgtcgagatatggtccacttcaa

SEQ ID NO: 313961 - DNA, 741 bp, Homo Sapiens
tggttacccgggttccccggcttgctaccgggctgctccgtgcatctttccccccaggcgtcaggaactgcgccctcatggcggaggtgaaggtgaaggtgcagccgcctgacgcggatccggtcgaaatagaaaacaggattatagaattatgtcaccagttccctcatggaatcacagaccaagtaattcagaatgaaatgcctcatatagaagcccagcagcgggcagtagccatcaataggttgttgtctatgggtcagttggatctcttaaggagcaatacgggccttttatatagaataaaggactctcagaatgctggtaaaatgaagggatccgataaccaagaaaaactagtatatcaaatcatagaggatgcaggaaataaaggaatatggagcagagatatccgctataaaagtaatttgccattaacagaaatcaacaaaattctgaagaatctggaaagtaaaaagcttatcaaagctgttaagtctgtagcagcctcaaaacagaaggtgtatatgctctataacctgcagccagaccggtctgtgactggtggagcctggtacagtgagcaggattttgaatctgaatttgtcgaggggtgtaccaacagtgtggtaattccacagtcaaggagaacagccgagaagcgaacgagcccgatacggaccccacaccacggaagggcctggcccacggggtgacgggcacccggggcgcgccgggcag

SEQ ID NO: 313962 - DNA, 756 bp, Homo Sapiens
  misc_feature (653)..(653): n is a, c, g, or t
cggcctcagcagagcgctatcctccactggttacccgggttccccggcttgctaccgggctgctccgtgcatctttccccccaggcgtcaggaactgcgccctcatggcggaggtgaaggtgaaggtgcagccgcctgacgcggatccggtcgaaatagaaaacaggattatagaattatgtcaccagttccctcatggaatcacagaccaagtaattcagaatgaaatgcctcatatagaagcccagcagcgggcagtagccatcaataggttgttgtctatgggtcagttggatctcttaaggagcaatacggggcttttatatagaataaaggactctcagaatgctggtaaaatgaagggatccgataagcaagaaaaactagtatatcaaatcatagaggatgcaggaaataaaggaatatggagcagagatatccggtataaaagtaatttggcattaacagaaatcaacacaattctgaagaatctggaaagtagcttatcaaagctgttaagtctgtagcagcctctagagcctggtacagtgaccaggattttgaatctgcatttgtcgaggggttaaaccacagcgtttaaattctacagccaagcggaacagagagaagcaacgaccacgtcaagaaagcanggcctcctgaggggcattgccgggcccaggaggtccgggacagacccgaaccctgggaggggaattggcagcgggggacggccaccaggggcgctgcggcggc

SEQ ID NO: 313963 - DNA, 1915 bp, Homo Sapiens
gggcgcccccatgaggcccgtaagctcccggggctaattcttaagctccccagccattcctacaacctttttccttcagggttttagggccttcccggggactcccagttttctctttccgggcctttatttttccaggaatgtggatctcgggcatttgggggatgctggcttgcttcctgaattaagctgtagggggcatcacccacagccttttttcagggggctttggcccctgtgactgtggatggtgaaagggggccggagcattgtgggacaatggttctccttttcttcagctttctgggccaacatcttggcctccagttctttttgcttcgtcttaagcctctcaatctctaggtccttctcttctactgtcttcattagcaccatccgctctcgctttggggtactcaacagaggggccccctggctcccctgggaggcaagcagacggtccaagctgaggaggcgctccagcatggccgggtccatgctgcttagcttctgtagggggctgagtttctgggaggcagaggctggagctgccatgggctcagggctcccaatctcctcttcctcagggcctcgggctctctttgcctctggtggaccaagcaattctttctgagacagcttaacaggtcccaaggcatgaggctgcaggctctcattggtaaaaggccgattgatcacctccttggacctggcagcaaagttgagtgcggagactgtgtctaggtagaagcgtctctcaggggcaatgttggcaataaggatactgtgggctgagccacccagagagtcctgcaataggcgagtgagcttgctgtcccgataaggtacacgagggaggccctgattcagcgcatctaccactttgcccaggacaaacagggaggtgttgatggctccactctcttttagccgaaggcccttgttgcctgtgcgccggttgtcctctgacccagccaagtcaatcaggtagagttttccctctcgctggcgaaatggggccaaacgttcccgctggtacaccttgaccaggagcacagcatgactgcgggaggagcgctggttgagccgggtggctcctacagtccgatttcgactggctggcaggaagtgccgctcaaaatcagcaaagctactgatgggcttctgggagagacccggaatcaggatattcccccggcagtcttctcggattaccaggtctcccgaagcagggtgcaggaggtctaataccttctcctggtagatctctaggtaagacatggtgacagaaagggcccatggccggccctcggcaccctcctcccttgtgagctgcaggaggtccatgagagcccgcgggatcaccccaggttgctctgggctgcccagcattgtgtgcgtcttcccagctcctgtgggtccataggcaagcacactggcattctgcccttccagcaagtgccttaggatgggctgcactgaacctgcatagatgtcctgctgagtactcctctccccatagaaggcatcaaactggtatttgagagtctcctggtggttcctcacagttagcaatctctagagagcagctgtccatgccccgcacaacagggggaggatcacttgcttcaccgctgttccatccacaaaattgccgcacgtcgcacagccacccttacgcgagctggaggtggacagacgagtagctccaatcttgcttagccgacagcgaccagctcctgagatcgccgtccgactgaagctgcacgccatctcagcgtcgcctcttctgcgtcgagccgcaccgcggccattccactccctccttgggccacgcgacgcgtgggtcgacatatcccgggaattccggaccgtaccagcctgcttttaatcaagggttatatacaaaggcgcc

SEQ ID NO: 313964 - DNA, 977 bp, Homo Sapiens
aggtagcgaggcctgggtggcgaattcggcacgagggatcaatcggccttttaccaatgagagcctgcagcctcatgccttgggacctgttaagctgtctcagaaagaattgcttggtccaccagaggcaaagagagcccgaggccctgaggaagaggagattgggagccctgagcccatggcagctccagcctctgcctcccagaaactcagccccctacagaagctaagcagcatggacccggccatgctggagcgcctcctcagcttggaccgtctgcttgcctcccaggggagccagggggcccctctgttgagtaccccaaagcgagagcggatggtgctaatgaagacagtagaagagaaggacctagagattgagaggcttaagacgaagcaaaaagaactggaggccaagatgttggcccagaaggctgaggaaaaggagaaccattgtcccacaatgctccggcccctttcacatcgcacagtcacaggggcaaagcccctgaaaaaggctgtggtgatgcccctacagctaattcaggagcaggcagcatccccaaatgccgagatccacatcctgaagaataaaggccggaagagaaagctggagtccctggatgccctagagcctgaggagaaggctgaggactgctgggagctacagatcagcccggagctactggctcatgggcgccaaaaaatactggatctgctgaacgaaggctcagcccgaggatctccgcagttttcagcgcattgggcccgaagaaggcccgcctaatcgtgggctggggggaagctcccgggccccctccgccaggggggaggacctggaaacgcgtgggaggggataacgggggaaaccagatgggagccctttcctgaaagggaaacattcctggggtttcccccgccgggccagcgctggggggcgccctcctggaccggtggttttccttcattccggcctt

SEQ ID NO: 313965 - DNA, 620 bp, Homo Sapiens
tttttcaccggagcaaaaactgtatttacacaacacggggttatacaaaaatttgaaaaggcggagtgaggagacgacggtcaggaggcgccacagcgctggccggcggcgagacccaggatgtttgccttcaggaaggactccatctgtttccccgttatgccctccacgcgttccaggtcctccacctggctgaaggggccgtggagctcccgccagcccacgattagctgggccttcttcgggccaatgcgctgaagactgcggagatctcgggctgagccttcgttcagcagatccagtattttttggcgcccatgagccagtagctccgggctgatctgtagctcccagcagtcctcagccttctcctcaggctctagggcatccagggactccagctgggaggcaaagggagatgagtgacacgcagggcagccaagtgctttgggctcctatgccaagactaggagcccagcaccagctacctcctgcgctccagcctcttcctctcttgtcaagtgtgtccaaaatcccgccctcaggtcactctctgggttaattcttattatgcaactagtgaaagagaggtactactcagtacccagtggtaatattag

SEQ ID NO: 313966 - DNA, 633 bp, Homo Sapiens
  misc_feature (88)..(89): n is a, c, g, or t
  misc_feature (185)..(185): n is a, c, g, or t
  misc_feature (192)..(192): n is a, c, g, or t
  misc_feature (207)..(207): n is a, c, g, or t
ggccccctaatcacctcaaggttcatggtgtccaaagccggtaagcgtcggccgtctctggaagacgtagcactagcccaggaagcgnncgggtgtcgtacagcatggcctcggtgacgtccgaatgcaggtcgcccacgtacagggaggccatggggtagttgctggccgcagcgttcatctcnccgcccnccaccactccgagcnccgccaggaggacttcttatcgggcccgccgcaggacaaaggggcgccttcggagcccgggcccgcgccgcggctcacaggtggcaccggcgcggcgaggacgagctggagtcggcgggcttggagacgggacggaaacgggaggcgggggccggctcccacggccgcagcaccgcagacaaaaggctctccgcacaatacggccctccccgcgacgcacttctccgcggtcctggtgcgaagctccaaatttcaaaaaatcaaagtaggaaaaaaattaaacggggaatccccttccgaagggtaaaaatcctttaagaggcgaccggacgctgcccacggcggcctcggggacacgcgtttctctataaatataggcctcgggctccggcggtttaagattacaaccgccggggcagagggaaa

SEQ ID NO: 313967 - DNA, 659 bp, Homo Sapiens
cccccaacgaaggatgatgagtgaagcctgattggcttctttcaaagtcatagacttgtggtaacttcttgcaaggagctctgggcaccctctgaagcagagccaattgctcgagcatcacactgtacaaaggtcccagatgggtccatatgaaacagctggggtcctttctcatcaactcctccaaataataatgctactccaaagggacgagacatggcacctggatctgcatcttcttctccaaactgcaaagccagattggacacagcttgggtcacactctccactgtcattgtctcattgtaggtgaaccagtggttctgtgtctccactctggctttatcaattaaagtcttagcatcctcaatgctgctgggctccatcagtggggaagtaattctcttctccacagctaggcacacaccctctgatgtctggatcccaatggctgtagaaccaagcttgatagcctcaatggcatattccacttgaaataatcttccttcgggagaaaaagtattcacgcccctgtcgtactcagaccgggtaagaaacatggcgagggtaggaggaggcagcggctacgcggggattctgaggaccaacacgactccaccggcacccaactcaccggcagccaactcacccacacggcc

SEQ ID NO: 313968 - DNA, 368 bp, Homo Sapiens
cacacacaagctcaacttttaagtatttaaatatacttcaaatatatttctaaaggagtctttaacagaaaaaagtactgactccatgtactttgctgctgcttttgtgatccctgttgaagtgacttcaagaagtgacaatgatgccaggcatttggttaagtatgatgtggtgagttaaccttaaaatagctgctgcctggaaaggatatccttgggacagcagatcccttagttcctaatgaatagctgcatcaccaacacagcttctcctgaccatggtagggccatcagcagggtaactcagcccagcttattaacccttctgttttctttccagctagccacagtgcagcctggccagaatt

SEQ ID NO: 313969 - DNA, 562 bp, Homo Sapiens
aaagtactgactcaatgacttttgctgctgcttttgtgatccctgttaaagtgcctccaaaaagtgcaaatattgccaggcatttggttaagtatgatgtggtgagttacccttaaaatagaaaatttggtcaataagcatttttattttggagccagagagctattttagggacctgctgcctggaaagaatatccttgggacagcagatcccttagttcctaatgaatagctgcatcaccaacacagcttctcctgaccatggtagggccatcagcagggtaactcagcccagcttattaacccttctgttttctttccagctagccacagtgcagcctggccagaatttccacatgttcacaaaggaagaacttgaagaggttatcaaggacatttaaggaatcctgatcctcagaacttctctgggacaatttcagttctaataatgtccttaaattttatttccagctcctgttccttggaaaatctccattgtatgtgcattttttaaatgatgtctgtacataaaggcagttctgaaataaagaaaattttttaa

SEQ ID NO: 313970 - DNA, 1011 bp, Homo Sapiens
ttttttattttaaaattttctttatttcagaactgcctttatgtacagacatcatttaaaaaatgcacatacaatggagattttccaaggaacaggagctggaaataaaatttaaggacattattagaactgaaattgtcccagagaagttctgaggatcaggattccttaaatgtccttgataacctcttcaagttcttcctttgtgaacatgtggaaattctggccaggctgcactgtggctagctcaatgtttgttgcattcagcttctcctccattacttgtttgaggatgatgagtgaagacttgatggcttctttcaaagtcatagacttgtggtaaacttcttgcaaggagctctgggcaccctctgaagcagagccaattgctcgagcatcacactgtacaaaggtcccagatgggtccatatgaaacagctggggtcctttctcatcaactcctccaaataataatgctactccaaagggacgagacatggcacctggatctgcatcttcttctccaaactgcaaagccagattggacacagcttgggtcacactctccactgtcattgtctcattgtaggtgaaccagtggttctgtgtctccactctggctttatcaattaaagtcttagcatcagcaattagcccactcatggcacaacctatgtgagcatcaatctctacaattttctcaatgctgctgggctccatcagtggggaagtaattctcttctccacagctaggcacacaccctctgatgtctggatcccaatggctgtagaaccaagcttgatagcctcaatggcatattccacttgaaataatcttccttcgggagaaaaagtattcacgcccctgtcgtactcagaccgggtaagaaacatggcgagggtaggaggaggcagcggctacgcggggattctgaggaccaacacgactccaccggcacccaactcaccggcagccaactcacccacacggccgcagtactaaggaccccc

SEQ ID NO: 313971 - DNA, 481 bp, Homo Sapiens
  misc_feature (64)..(64): n is a, c, g, or t
  misc_feature (175)..(175): n is a, c, g, or t
  misc_feature (427)..(427): n is a, c, g, or t
ggagttggctgccggtgagttgggtgccggtggagtcgtgttggtcctcagaatccccgcgtancgctgcctcctcctaccctcgccatgtttcttacccggtctgagtacgacagcttggttctacagccattgggatccagacatcagagggtgtgtgcctagctgtggaggnaagagaattacttccccactgatggagcccagcaggattgagaaaattgtagagattgatgctcacataggttgtgccatgagtgggctaattgctgatgctaagactttaattgataaagccagagtggagacacagaaccactggttcacctacaatgagacaatgacagtgggagagtgtgacccaagctgtgtccaatctgggtttgcagtttgggagaaggaagatgcagatccaggtgccatgttntcgttccttttggagtaggcttattattttggaaggattgatgaggaaagggtt

SEQ ID NO: 313972 - DNA, 2135 bp, Homo Sapiens
  misc_feature (79)..(79): n is a, c, g, or t
  misc_feature (108)..(158): n is a, c, g, or t
  misc_feature (207)..(207): n is a, c, g, or t
  misc_feature (337)..(337): n is a, c, g, or t
ccctcccttccaccccggcctcggccccctccgcccaccgcaccagcccccaaccccactggcccatccccttctcctncccctgcacctccccacccgtcccgccgnnnnnnnnnnnnnnnnnnnnnnnnnnnnnnnnnnnnnnnnnnnnnnnnnnngctccgatagatacctcccacattgagaccgccccctccccgcccctcncccactccgcgggcactcttcacctccacgaacacgccctccgcgcctcagccctgcaacggcgccggttattttgttagttgaggggggaagaaagtggccaaaggggcacctataggttcagagtggnggccccgggcatttttcccctagggagaaaccacgggtaatggggccaagggtttcaccttactctctcccggggcccccgcgccggccaaaccgaaagggtctcggaaaaggcttcctcgaggggccgaggccgccccgaccacgccaatgtcttcggcttcctgcgcttcttgcttgcagtgttgacatcttattttttatgtaaagaagccatatttacataatacattcatatttttaagtatgttacagctcctgtagaaaaccattccattaagacagcaacaagtgatctggattcaatctttaaaatattaagtcaaattaaaatgttcttatcaagactccaatttaatttcacagcccatctgcacaggggaactgaggagaaacaggaatgaagagtgggcgacaaagagaaagcatcccttcccacacgccaagagtccagtgcaacgatccctgccacacggtcagccgaccccacttggtgccacagggtccagcctcggccactctgggctcaacctttccagcacgtctgggagcccaatgaggctatgggacagtgtgcatttccctcaaggcctccggaaagtcacctgccacccactgtgacctctgaggctgaaaggactaaggactcctttccccatcatttcagctgggccagtggctggctaaaatcagcgcagcattcccattcttctgaaagccacagctgaaataatgcaccagctgaaaccacagtggacagactgagatggcctccctctgggcctctagttggcaactttctcacccgggggctcctctttctccttttcccgctccttgttccagtccttaaggccttctggaagtgaggtgtcctcatccaagctgccagtgccttccacaaattcttcataggtagatttttccgcaaatggtctggggcccaaaagttcaaccatatcattcttatctaatacttctttttctaacaacagaagagcaaccttctccacgtcagctttcttttctgtgagaagagctactgttcttttataagcatcattaataagtattcgtacttcatcatctatcaatcttgcagtggcttcactgtaaggtttctccaataccatgtccccctgacgtgggaggtcaaaggagatttgcccaaccttttcattcatgccaaactgaacaatttgggcatatgcactctgagttacttttctcaagtcatcttgagcaccagttgtaattcttccaaagaagatttcttcagagactcgaccacctaaagtcatacacatcctatccaagagctgctctttggtatagaggtattgttcttttggtaaatactgagcataacctagtcctttgccacgtgggatgatggatacctttaaaagcgggtctgcgtgctccagataccagccggcaaccgcatggcctgcttcgtggtatgccacagtcttcttctcctcaggctgcagaacctgcgttttcttctctaagccaccaatcactcgttcaattgcctgttcaaagtgtttctgatttatggaatctgacagatgccttgcagcaatcaacgcagcttcattacagacattagcaacatcagcacctgaaaaccctggagttaaagatgccagttttcttgccaatttatccttctccagggtactgtccagttttagcggtcggagatgaactttgaaaatagaagctcttccttttatgtctggtggtccaataaagatctgcctgtcgaaacgccccggcctaagcagcgcgcc

SEQ ID NO: 313973 - DNA, 906 bp, Homo Sapiens
  misc_feature (14)..(14): n is a, c, g, or t
  misc_feature (28)..(28): n is a, c, g, or t
  misc_feature (41)..(41): n is a, c, g, or t
  misc_feature (58)..(58): n is a, c, g, or t
  misc_feature (67)..(67): n is a, c, g, or t
  misc_feature (73)..(73): n is a, c, g, or t
  misc_feature (96)..(96): n is a, c, g, or t
  misc_feature (102)..(102): n is a, c, g, or t
  misc_feature (111)..(111): n is a, c, g, or t
  misc_feature (164)..(164): n is a, c, g, or t
  misc_feature (192)..(192): n is a, c, g, or t
  misc_feature (201)..(201): n is a, c, g, or t
  misc_feature (211)..(211): n is a, c, g, or t
  misc_feature (223)..(224): n is a, c, g, or t
  misc_feature (236)..(236): n is a, c, g, or t
  misc_feature (255)..(255): n is a, c, g, or t
  misc_feature (259)..(259): n is a, c, g, or t
  misc_feature (262)..(262): n is a, c, g, or t
  misc_feature (264)..(279): n is a, c, g, or t
  misc_feature (281)..(281): n is a, c, g, or t
  misc_feature (823)..(823): n is a, c, g, or t
  misc_feature (888)..(888): n is a, c, g, or t
cctttacccaacanttttttcatttccnccataaccctccnccccaccccctctcttncccctttancatcanactttaattccccactacaactnaacccnccaaatccntcttcttccctttaaactcttctcatcttccccccatctataccacctcccantcctaacataaatctctcttcttatctnaaccccttntctcctccanctaacattaaanntaaaaaatttanttacccccattatttaaanttanaantnnnnnnnnnnnnnnnngnggaggcccactacatgagacgggggcgctggctgcagatgaaggatgtcctggtgggaggatgggccctgtggccgaggttcttctttctagagattcctgacgctgctgctggtgctgctccatcacttgtcttctctggatgtccatctcatcaggagaggggccattctgcacctgacgctggctggaggggcctccttcttgggaattcatgatgttcagggcaaacagcattgcattggagaacgtggttgcctcttctttacttgcaaagtttaagccgtagacctggcgggcatctcgccactggtggaaggttggcgtggcctgattgtacttcagccctttcacgattgaataattgatcacaacctgctgatcctgcaacttgactccaacgactctgaaggtgttgctggcagtgttgtggtagatgttgatccggctgaatccctgctggccaggtttgattggtacccatttcttactggtgtcatcgtagaccatcacggaagcccgggcttggcagatactctgttnacttgtggccatggctgaaaagtggctagcacagggaaccctgaggaggcgagtcctgtactccnaccagcctatgttgatca

SEQ ID NO: 313974 - DNA, 633 bp, Homo Sapiens
  misc_feature (310)..(310): n is a, c, g, or t
  misc_feature (521)..(521): n is a, c, g, or t
tctactcttttctctaaccttatttttttctcttagccgtatatcctggcgatcaatccatagtcctatgtaaagatatttaatatttcttatttctaggactatgaactatttttgtatcttctacactaatctgagctgggcacattaggcatgtaataaatactttttgaaagtgaatgaatagtaatttaaaatagttgatgactaatgcacttgttacagtcttaaaatatattttaaacaaataaataattgtctaattccactttcagaagaaataagaagttcttattcctgtttgtaattnttttttatcatttggtaattttgaaatatttaggtttagcaaaaaattaataggctcaggttttaaaaagatgccttctgcttatgactgttatggtatagaattttgtgtcaatgtagagctccttcagtatgtgtaatttggcacacaacccctttagttcgtcagcatttggcacatcggggatacctaacaaattgtagggtaaatntggttatttatttattttttcccttaggtaaatttatttgcagttctgcctttgtgtatagagtagagctcttttcatagtattaatttaaagtgtaattgcttggcttagg

SEQ ID NO: 313975 - DNA, 1855 bp, Homo Sapiens
  misc_feature (916)..(916): n is a, c, g, or t
  misc_feature (922)..(949): n is a, c, g, or t
  misc_feature (1728)..(1728): n is a, c, g, or t
  misc_feature (1789)..(1791): n is a, c, g, or t
  misc_feature (1799)..(1799): n is a, c, g, or t
  misc_feature (1816)..(1816): n is a, c, g, or t
  misc_feature (1820)..(1820): n is a, c, g, or t
  misc_feature (1824)..(1824): n is a, c, g, or t
  misc_feature (1849)..(1849): n is a, c, g, or t
gtttgttgaaatacagttttgagttattttgatgtggctttttaaaaaagttaatgggtagctaatgttgtattgttttattaaaagtagttttaaattaatggatttaatggaattgtaattttaaacatttaattaaatgtaatttgggggatattttgaactttaatattagtgatcaaatgtaaatgttttgaggatatttttcttgttttttaaaatcaatttttaaccaaatattaaaccctttatttgccagcctgtctgtgtcgttggccttatgacgaggagtgcctgtgggttatcctaatcgttgtcttggtcactcttggttgggcctggttgactttgccagtcagctcctacagtgatcagttggccacctctagatctgtgtttgccggtctagacgttatcggtgcacttccttgaagtgccaggttgcagcgatcccagagcgttgataacgtgatctgatccctaagttgagacctgtcttcctgtaacgcttccgaataagaggtccggtcgaaaagagttgaaagatacgaaattaggtggtcgttggaatcctgatcgcagtaaagtggtccttggtaactgctcgagtagaacatgtctgcatccgccaatagtccgctaatagggagggctgtgcgattaaaggcttccatcgattgggtagtgtccttcaagtgggtggcgaagagccagtcgggcatatgtcatgaaggtttctccgaccgattaatggtttgctgcttgactagcctagggaaataataataaaggtaaagtaaacttttttaatgacatatggggcacaaaataactggtgtcttgtaaatgttctgtttttttaaataaaacttctctactttagtctttactttaaaaatatgtactgtttcctttnttgttnnnnnnnnnnnnnnnnnnnnnnnnnnnnggactgagctcagtatagactaatactaccttaatgttaaaatctgaatttcttttagcattttgcttaaaagcaatatgctatttgcttattccgtgccctgacatagataatttttgaattctgatagaatacaagtgtggtaaatgccatgtttgtactttatctaacatcttctctttcagtagtcttgttttttttatatcatgtgattgtttgtgtgtcccctttcctcttctttgcttaacacaattatcttgtgttaaggatctcaaagatttcatgagacaagctggggaagtaacgtttgcggatgacacccgacctaaattaaatgaaggggtggttgagtttgcctcttatggtgacttaaagaatgctattgaaaaactttctggaaaggaaataaatgggagaaaaataaaattaattgaaggcagcaaaaggcacagtaggtcaagaagcaggtctcgatcccggaccagaagttcctctaggtctcgtagccgatcccgttcccgtagtcgcaaatcttacagccggtcaagaagcaggagcaggagccggagccggagcaagtcccgttctgttagtaggtctcccgtgcctgagaagagccagaaacgtggttcttcaagtagatctaagtctccagcatctgtgggatcgccagaggtcccggtcccgattcaaggtccagattcagtttgacagtgggcaatttaaactgttaaataacttgccctggggggcttttttttaaaaaacaaaaaccacanaaattcccaaaccatacttgctaaaattctggtaagtatgtgcttttctgctgggggtcgnnntttggaanggggggttgggttgggntggntatntttgtagatgtgaccaccaaggttncttgaa

SEQ ID NO: 313976 - DNA, 719 bp, Homo Sapiens
gtttgttgaaatacagttttgagttattttgatgtggctttttaaaaaagttaatgggtagctaatgttgtattgttttattaaaagtagttttaaattaatggatttaatggaattgtaattttaaacatttaattaaatgtaatttgggggatattttgaactttaatattagtgatcaaatgtaaatgttttgaggatatcttgttttttaaaatcaatttttaaccaaatattaaaccctttatttgccagcctgtctgtgtcgttggccttatgacgaggagtgcctgtgggttatcctaatcgttgtcttggtcactcttggttgggcctggttgactttgccagtcagctcctacagtgatcagttggccacctctagatctgtgtttgccggtctagacgttatcggtgcacttccttgaagtgccaggttgcagcgatcccagagcgttgataacgtgatctgatccctaagttgagacctgtcttcctgtaacgcttccgaataagaggtccggtcgagtggtccttggtaactgctcgagtagaacatgtctgcatccgccaatagtccgctaataggggggctgtgcgattaaaggcttccatcgattgggtagtgtccttcaagtgggtggcgaagagcctagtcggcatatgtcatgaaggttcttcgaccgattaatgttttgttgctgactaagctagggaaa

SEQ ID NO: 313977 - DNA, 443 bp, Homo Sapiens
gcacgaggtttgttgaaatacagttttgagttattttgatgtggctttttaaaaaagttaatgggtagctaatgttgtattgttttattgtagttttaaattaatggatttaatggaattgtaattttaaacatttaattaaatgtaatttgggggatattttgaactttaatattagtgatcaaatgttgttttgaggatatttttcttgttttttgttggccttatgacgaggagtgcctgtgggttatccttcgttgtcttggtcactcttggttgggcctggttgactttgccagtcagctcctacagtgatcagttggccacctctagatctgtgtttgccggtctagacgttatcggtgcacttccttgaagtgccaggttgcagcgatcccagagcgttgataacgtgatctgatccctaagttgagacctgtctt

SEQ ID NO: 313978 - DNA, 382 bp, Homo Sapiens
ctgttcttacaggtggagcatttcgtctatcatttcgaggtctgcgactactaaaacggtcagagtatcgtcctctacctcttccacctccatcaagctcatacacagcatcatctgcatcccttggatcctcaaattccacaaaaccaaagcctcttttcagatcaatatctcttatccgtccatatcccttgaagaatctttccacgtccttctccctggccgctggatttagtctcccgatgaatacccgacagccactcatgatgtccggctagtacttcctaccggacggggtctttggcggctgagacccagacaggtccgtagtctgcgacggagtcgtcgacctccacgcagaccaggacttaactcgtctacg

SEQ ID NO: 313979 - DNA, 1202 bp, Homo Sapiens
  misc_feature (17)..(17): n is a, c, g, or t
cctatttccccagagcnttttgtccagaaactctctgtcctgagaggtgattaaagaaggcatccagcaagaactgcacaagaaacggagtcagccggagaacaaggagtggtcttccactgcctcacaggaggatggaggcccacaacgcgtctgccccattcaacttcaccctgccacccaactttggcaagcgccccacagacctggcactgagcgtcatcctggtgttcatgttgttcttcatcatgctctcgctgggctgcaccatggagttcagcaagatcaaggctcacttatggaagcctaaagggctggccatcgccctggtggcacagtatggcatcatgcccctcacggcctttgtgctgggcaaggtcttccggctgaagaacattgaggcactggccatcttggtctgtggctgctcacctggagggaacctgtccaatgtcttcagtctggccatgaagggggacatgaacctcagcattgtgatgaccacctgctccaccttctgtgcccttggcatgatgcctctcctcctgtacatctactccagggggatctatgatggggacctgaaggacaaggtgccctataaaggcatcgtgatatcactggtcctggttctcattccttgcaccatagggatcgtcctcaaatccaaacggccacaatacatgcgctatgtcatcaagggagggatgatcatcattctcttgtgcagtgtggccgtcacagttctctctgccatcaatgtggggaagagcatcatgtttgccatgacaccactcttgattgccacctcctccctgatgccttttattggctttctgctgggttatgttctctctgctctcttctgcctcaatggacggtgcagacgcactgtcagcatggagactggatgccaaaatgtccaactctgttccaccatcctcaatgtggcctttccacctgaagtcattggaccacttttcttctttcccctcctctacatgattttccagcttggagaagggcttctcctcattgccatattttggtgctatgagaaattcaagactcccaaggataaaacaaaaatgatctacacagctgccacaactgaagaaacaattccaggagctctgggaaatggcacctacaaaggggaggactgctccccttgcacagcctagcccttcccctggtggcct

SEQ ID NO: 313980 - DNA, 531 bp, Homo Sapiens
  misc_feature (85)..(85): n is a, c, g, or t
  misc_feature (332)..(352): n is a, c, g, or t
gccttagtgccaagcattaatagttattaggcataactaatctgattacattttataccagacttaaatgtcaaattttttcagnacaaaaaattaaatttgctttagttataaaagagctctgtcaatatacacaaactatatacttcagacattcacaaaaatgtgagcagaaggcttatcaaaagacatttaatacaattagttttcaacaaccccttggtggtccacatctacaaagatatccagcccaacccaaccccccttccaaatcccacccccacagaaaagcacatacttaccagaatttttagcaagtatggtttgggaannnnnnnnnnnnnnnnnnnnnaaaaaaaggcccccaggggaaagttatttacagttttaattgccactggtcaactggttctgggaccttgatcggggacctgggacctctgggcgattccacagatggctgggagacttagattctacttggaagaaccacgtttctgggctcttctcaggcacgggagacctactaac

SEQ ID NO: 313981 - DNA, 810 bp, Homo Sapiens
cttccccatttattttccctttcccaggaaaagttttttccaaatagcatttctttaagttcaccataagagggcaaactcaaccccccccttcatttaatttaggtcgggtgtgcatccgcaaacgttacttccccagcttgtctcaggaaatctttgagatcctgccagctgactcttgaggataaattctcaactataagacgattttctgttcttacaggtggagcatttcgtctatcatttcgaggtttgcgtcttttaaaacggtcagagtatggtcctctgcctcttccccttggtggccgagccctagcatgttcaatagtaaccctttcactacagagttcttttccatcaagctcatacacagcatcatctgcatcccttggatcctcaaattccacaaaaccaaagcctcttttcagatcaatatctcttatccgtccatatcccttgaagaatctttccacgtccttctccctggccgctggatttagtctcccgatgaatacccgacagccactcatgatgtccggctagtacttcctcgaatcaactgcgctcattagacgccatcctccgcaaagagagcagccccggccgctcacgatctgagcggccatgaagaagcctcgatccgagaaggcttgccctcaaagtgagccactcacctaccggacggggtctttggcggctgagacccagacaggtccgtagtctgcgacggagtcgtcgacctccacgcagaccaggacttaactcgtctacgcccctcgtgccgaattcgccacccaggcctcgctcttt

SEQ ID NO: 313982 - DNA, 2476 bp, Homo Sapiens
  misc_feature (43)..(43): n is a, c, g, or t
  misc_feature (47)..(47): n is a, c, g, or t
  misc_feature (430)..(430): n is a, c, g, or t
  misc_feature (585)..(656): n is a, c, g, or t
  misc_feature (763)..(805): n is a, c, g, or t
  misc_feature (1431)..(1451): n is a, c, g, or t
gggacaacagggcggcggaaagaggggaaaaatatgcgggcgntagncagggaggcggggcggttagagtacggggtgggatatccggcgcacgacacggggcgtatcaacagaggtgaagcggtaaataggtaaatataggcggagacatagcgccgcgtggcggtatggaataacgccgcgtaagcgggaaacgagagcgcttggcagagtggtttatataggggcgggacagccagaggaaggtgagattggtggcacatgtagggcgggacaaagagaaggggtggggatagggggagataaagaggatgcgcgcggtacgaacagcgtggcatgagggtataaatgggtgatgaatagggcgggcgcggataaggcggtggagggcgcggcggtcaaacaagagggcgggcgcgcgggcaggganttaacggggatggaaagggcgataaaccgaacgcggcgggagaatagggaatgtggggcgggcgcggcgaggtcgtagcggaaaacgggtatgcgcaatacgagacaggagagaatagggcgcgagggggggagcggtcggggaaattcgtcaannnnnnnnnnnnnnnnnnnnnnnnnnnnnnnnnnnnnnnnnnnnnnnnnnnnnnnnnnnnnnnnnnnnnnnncataacgcgcgcgggcaagctgcggtgggtatggcaaggacggggagatggtcgcggagaggggaagaagcggaggggcgtgggggggttgtgatagggaagccgannnnnnnnnnnnnnnnnnnnnnnnnnnnnnnnnnnnnnnnnnngtacgggctggggtcgcgtggcgcgaatagggtatcagaggccggaatgcgtgggtgtgaaggagtgtttgcgggatgcggatggtggacgggtttattttgtggtttgatgcgtttgtttgttttttttcctaggtgtataatatttcattatcaataacaaacagctgctctaatgtgtctgtccagcagctgttaaagagtggaggacacccttggagcgcctaacaaggaaaacaaattaagcctttatgtacaagcaaatttagagctcttttaagtgtccaaagctattaattagtttaattaaggcattaaactaattctgaattaacatttttataaccaagaactaaaatgttcaaatttttttctagtacaaaaaaattaaatttgctttagttataaaagagctctgtcaatatacacaaactatatacttcagacattcacaaaaatgtgagccgaaggcttatcaaaagacatttaatacaattagttttcaacaaccccttggtggtccacatctacaaagatatccagcccaacccaaccccccttccaaatcccacccccacagaaaagcacatacttaccagaatttttagcaagtatggtttgggaannnnnnnnnnnnnnnnnnnnnaaaaaaaggcccccagggcaagttatttacagtttaattgccactgtcaactgatctggaccttgatcgggaccgggacctctggcgatccacagatgctggagacttagatctacttgaagaaccacgtttctggctcttctcaggcacgggagacctactaacagaacgggacttgctccggctccggctcctgctcctgcttcttgaccggctgtaagatttgcgactacgggaacgggatcggctacgagacctagaggaacttctggtccgggatcgagacctgcttcttgacctactgtgccttttgctgccttcaattaattttatttttctcccatttatttcctttccagaaagtttttcaatagcattctttaagtcaccataagaggcaaactcaaccaccccttcatttaatttaggtcggtgtgcatccgcaaacgttacttccccagcttgtctcatgaaatctttgagatcctgccagctgactcttgaggataaattctcaactataagacgattttctgttcttacaggtggagcatttcgtctatcatttcgaggtctgcgactactaaaacggtcagagtatcgtcctctacctcttccacctcgtgaccgagccctagcatgttcaatagtaaccctttcactacagagttcttttccatcaagctcatacacagcatcatctgcatcccttggatcctcaaattccacaaaaccaaagcctcttttcagatcaatatctcttatccgtccatatcccttgaagaatctttccacgtccttctccctggccgctggatttagtctcccgatgaatacccgacagccactcatgatgtccggctagtacttcctaccggacggggtctttggcggctgagacccagacaggtccgtagtctgcgacggagtcgtcgacctccacgcagaccaggacttaactcgtctacgccactccacaactgacgcacttcgcagctttggcgctccacaaaatggagggcccc

SEQ ID NO: 313983 - DNA, 389 bp, Homo Sapiens
  misc_feature (30)..(30): n is a, c, g, or t
  misc_feature (362)..(362): n is a, c, g, or t
ataaccaagaactaaaatgttcaaattttnttctagtacaaaaaaattaaatttgctttagttataaaagagctctgtcaatatacacaaactatatacttcagacattcacaaaaatgtgagcagaaggcttatcaaaagacatttaatacaattagttttcaacaaccccttggtgggtccacatctacaaagatatccagcccaacccaaccccccttccaaatcccacccccacaggaaaaggcacatacttaccaggaatttttaggcaagtatgggtttggggaatttttgtggggttttgttttttaaaaaaagggcccccggggggaaggtttattttacaggttttaatttgnccactggtcaactggtcttggggccct

SEQ ID NO: 313984 - DNA, 998 bp, Homo Sapiens
  misc_feature (65)..(65): n is a, c, g, or t
  misc_feature (466)..(501): n is a, c, g, or t
  misc_feature (942)..(942): n is a, c, g, or t
  misc_feature (959)..(959): n is a, c, g, or t
  misc_feature (965)..(965): n is a, c, g, or t
  misc_feature (971)..(971): n is a, c, g, or t
acccaactgtgcccttttgcctgcccttcaaattaattttaattttctccccatttaattccctntcccagaaagtttttcaatagcattctttaagtcaccataagaggcaaactcaaccaccccttcatttaatttaggtcggtgtgcatccgcaaacgttacttccccagcttgtctcatgaaatctttgagatccttaacacaagataattgtgttaagcaaagaagaggaaaggggacacacaaacaatcacatgatataaaaaaaacaagactactgaaagagaagatgttagataaagtacaaacatggcatttaccacacttgtattctatcagaattcaaaaattatctatgtcagggcacggaataagcaaatagcatattgcttttaagcaaaatgctaaaagaaattcagattttaacattaaggtagtattagtctatgctgagctcagtacnnnnnnnnnnnnnnnnnnnnnnnnnnnnnnnnnnnnggaaacagtacatatttttaaagtaaagactaaagtagagaagttttatttaaaaaaacagaacatttacaagacaccagttattttgtgccccatatgtcattaaaaaagtttactttacctttattattatttccctaggctagtcaagcagcaaaccattaatcggtcggagaaaccttcatgacatatgcccgactggctcttcgccacccacttgaaggacactacccaatcgatgggaagcctttaatcgcacagccctccctattaggcgggactattgggcgggatgcaggacatgttctacttcgaggcagttacccagggtccactttacttgcggtcagggttccaacggaccaccttattttcggtatcttttcaactctttttcggaccgggacctctttatttcgggaaggcgtttacaggggaggncaggggttttcaatttngggggnttcagnttcacggttttttcaacgttttggggg

SEQ ID NO: 313985 - DNA, 399 bp, Homo Sapiens
  misc_feature (370)..(370): n is a, c, g, or t
  misc_feature (382)..(382): n is a, c, g, or t
ttttttttaaaatcaatttttaaccaaatattaaaccctttatttgccagcctgtctgtgtcgttggccttatgacgaggagtgcctgtgggttatcctaatcgttgtcttggtcactcttggttgggcctggttgactttgccagtcagctcctacagtgatcagttggccacctctagatctgtgtttgccggtctagacgttatcggtgcacttccttgaagtcccagggttgcagcgatcccagagcgttgataacgtgatctgatccctaagttgagacctgtcttcctgtaacgcttccgaataaggagggtccgggtcggaaaaggagtttgaaaggatacggaaattaggggtgggtcgttngggaatccctgnatcgcaggtaaagtggg

SEQ ID NO: 313986 - DNA, 577 bp, Homo Sapiens
  misc_feature (467)..(467): n is a, c, g, or t
ctgcttctagctcggagctaaatgctgctcatgctgaaaagagtaatgtgtatatctttgtgtgggtattagctctattttgatctatagcacagatttgtaattcagatcatcacccctgcactttgtaccacatgggcgtattctttcttcccagtcattgctgcaattatcttggctggtctttgtgtaatatgttctgtgtgagcctctgcattaaactcgatttcttgggcaattatggaaattccagtgtggctgcagtttaactttgcactctctatgcatatgagggttcctaaataaatgaggagtagcataggtttatatatatcttataactttctacaacaaagaattattgagtccaaatgtcatcagtgctcattttgagataccctgctatcgatggtcgctacaaaccaggaaatactcaagttattatgtgtatacattgggtttaggtntatgaaacaatttaccttcatgatctcataggtaaaggcagtgtctcgtgttttaattagcatttgtgtagttcccccggaggggtttgactatcattagttttgcttct

SEQ ID NO: 313987 - DNA, 807 bp, Homo Sapiens
  misc_feature (139)..(151): n is a, c, g, or t
  misc_feature (173)..(173): n is a, c, g, or t
  misc_feature (252)..(297): n is a, c, g, or t
gggggaaattccaaacccctattttctttgcccgcggggtttttttggggagacaaggatttgggccctttttctcttttctcttttggggcgccgccgcgccccaaacaaaaagggtttttaaaaaaaatttttcttnnnnnnnnnnnnncgcccacaacttttttattttnaaggggtttagttattttgtttcccagggtgggtgaaatgttcagggtagtatgggtgggtaaattggaaaagggtaannnnnnnnnnnnnnnnnnnnnnnnnnnnnnnnnnnnnnnnnnnnnnttgtgatttttttttttccaacaaaagcagcttgattttattgcagggaagctaggaaggaataggacaactgagggtctccgcaggaacaccatcacccggcatgactgccaagtcccaggtctgtctggaagccagcgggaggatcagcatcctgccccctttggtccatcctgtgggctgtggggaccaggcccctgctactcaaggccaaggtaggaaacagtctttcctgttttcttcagggttgcaagcagagtgtccatgctgtgctcagattcaatgcagaccttcttgttgggcaggtcaatgtcatacttaactcctccaagcttattgaggacccgagagacagcttcagcacagcctccacaggtcatgtccacagagaactcgtgcttcggcatgactgaggcagcggcggtgtggcggcggtgtggcggcggtgtcagcagcgcctctctggattcggagggccctcgtgccgaattcgccacccaggcctcgcta

SEQ ID NO: 313988 - DNA, 757 bp, Homo Sapiens
ccaacaaaagcagcttgattttattgcagggaagctaggaaggaataggacaactgagggtctccgcaggaacaccatcacccggcatgactgccaagtcccaggtctgtctggaagccagcgggaggatcagcatcctaggaaagatggaaagttagatggaacaaaggtgccatctggtgtggacatagcgacattgcaaaggcaataaatgcactaagagacaggggtgacgcaggggtgcactaagagtcttgcactaaaaggcaggggtgaggtggaaaacgcagggtgcagatgcaggagcaggaactagagccccagtgtccagccctgcacactgctcccatgaagtctgttatacttaggttggctggaacgcaattaaccttgctaagccaatcactgccaaagccctcttctggggaatttcccagggctgcccaggatacccagtcaacagcactctctatcctgttacaggttggaaaggcaatgaacaaaatcatggcaaataaatctgccaagagtcagatgatcaaggtgacttcaaaaccaataaacactctatctttgaggttcccaagcctggcttcaaatcagtcactgaggagcctcttaaaacagacttcaaagacatgctgcctgagcatgtggactaaagctggcttattgggtgattcttactgagtactgtgcatctgaatttccaggagcctttccaaacaatacatggttactgaaatctgtgccgaat

SEQ ID NO: 313989 - DNA, 631 bp, Homo Sapiens
cgctgttatacagcctcatataatctagctagtgacagctgacacctgagtcttctgttttcggccagcgttgatgagacccggttttggtcatcgcgagattttgtctactactaagagttatcaatctgttgtctttacattcattcgacagtgtgaggttttcttttacacaggagaaattgttcaaactaccaacattgcggttacttcctcagctttaatcccgggacagttgttggaaccaacggtgccacttcagctgtcgtcagcattgtggccttagttgttaccaccacgagtacaaactggattctcttggtctcttatgactcagaagtgaatgcagacacgctgtatttataccgccaatctagacatacctgtgtccgtgttcaggagtatactgtatgtttttttcagatggatcacattggataatccactatgtctttggactatatgcgcttaaataatcacttgcatttcacaagctaagaccattttacaaacatgacatgggagggctcaaactttttccacccgattttgtctttgtgggccaggctctattgcttcgttttcccctttttggcccgtgtcatttccctgggggcccctgtgccccttt

SEQ ID NO: 313990 - DNA, 423 bp, Homo Sapiens
gggcaggaacgccccgtctctcaggaccataagggcagggataggtctggaaacttccattccacatggaaggctccctcgtgctcagtgtgacagggcaggagagagggaaggtgtcttgtgagccaggccgaggtgtctggcgtgtctcacttcggcatctgcttgtgtcactgtgtgcagtgctgctgtcccacgcctgcgagtaatagtcagcttcatccatagcttgggtcccgctgatggtcagagtggctgtgttcccagagttggagccagagatctcgctcagggatccttgaggggcgcttcctatcttgatagatgccgagcacaggggcctggcctgcgcttctgctgataccacgcgagcatatttatccccctatttatctccagagcaggtgatgctgactgtgtgtc

SEQ ID NO: 313991 - DNA, 726 bp, Homo Sapiens
gccaggggagcaatcggaggacgaggcctacccataatccagagaggcttgcccagaggaggactacgtgggggacgtgccaccagaaccctacttaggggcgggatgtcactccgaggtcagtgctgtgtaccctgataattgtcgggccctactcccttcccttttctcttgggctgcttatggacacgtttgtttaacatctttaagcctgaatttgtattaatataataacttctgaaatcacatatttttaatagtgctgcatgtcttttatcaataccattccttttctgataatgtgcaatggtgagaggctatgacctgcgtaacaacaggtaattcatgtcatctccattccattttaaaacaccctgctgttgcttgaatcaaagcacattcaagttctagaaacaagtcaaacataagaaatttataggtcttttggcctatatctctttgttcctggtgctagtaaaacactgatacagctggagaggacaagttgacccacagcacttacctatatatgttcatttggggcactattactctgttccctgtatagatcttgttccctagaagaatctgttgagatcaggaaccatagcatttatttttatatttaccataatgctaggcatctatctgattattcagtagatatttatttgtatgtacttactaattgaattactcccaacttccgttacgtggcagttggcc

SEQ ID NO: 313992 - DNA, 547 bp, Homo Sapiens
  misc_feature (83)..(83): n is a, c, g, or t
atccccaaacccgtcgtaaggtctccaagcgccttcctgctggtggccccaagacctgcccattggctttgtgtccttgggcncggtggcctgctcccgaaggtaccgagagataatctccagcgactgccggtacaactggtcctcctcctcctctgctggcggcggcgtcgagggtagtgacccgtccgtactggtgttattaccagattccccgaccaactccagcaggggcaggacagccggccgcttcccgagaggctccggctggtacccgtccagttcctcttcgggcgacatgatggcgtcagcggcgggggcttctttctcctcaaggggcaccgcgcggcgggtgggcgcgaagaaaagcagcctcgcgggggtcgcggtgacgtcggggacctcggcgccaatgggcggcggccgcgcgaccctccgggatgtctggcgtagagggtggacggggggcttgcgggggcgcttgcgacaatcagcgcggaggtctcccctccctatatcctcgtgcagaattcgtacagcgcggggg

SEQ ID NO: 313993 - DNA, 816 bp, Homo Sapiens; identical to SEQ ID NO: 122159

SEQ ID NO: 313994 - DNA, 576 bp, Homo Sapiens
cccgcgaggaaaaaaaagcccactggaattgtctaaactgcaatgcaatctcttgctcatttaaaagatctcactttctaatcatgtgctttgagacatttaatactatttcaattatgcagaggaaataatataattcctttatttgaaaaatgatactgaacctcagagatcagttaaatctactgctggaatggggattctttctaaaccgtgttgttccctctcttcaaacagctggagctgtacacagatggaaaaacatttggtcagaaagcagcaaattagtgtttttcaggaccgaattcggctcccgcagctcctgcatctccattcgtctagattttatttcttctttgcattgacatttttgcagacccagttcatgccatcctgaacgccctctcctgtgagagctgagcaagactggatctgccagactcggtcgcggatggtatgcaggttcagtccttctgcaatttcagaggcaggggctgctgtgagcaaatcctgcttattagcaaagatgagcactggcacacaacttagtttttcttcctccagtaattccgctag

SEQ ID NO: 313995 - DNA, 1280 bp, Homo Sapiens
tagtggatcccccgggctgcaggaattcggcacgcgagcagggtgggagatgcctgagattgtaggctctcagcacatatttgttgctttttcctcccccctccccatcccctccagtttgttgaaagtgatgcagatgaagagcttttgtttaatattccgtaagtatctccttgttgcctacactcaggctaaataggctgtacccagttgcctcagatggattcattcactggtgtcaagagcacacatttgcttctagaaatgggataaattactttggtgggtttgaggaggaaagcatcatatctttcttggtgccgactggaaacagatgtatttgtagaacactaactgggaaattgaggtagatttcttataattgtataatgctctaggtagacaggatcttagaaattatctagtacacgttgaccgatgagttaactggagcccatacaggggaagggtcttgcccagggtcacacaactaaacaggtattcaaactcaggtttgacaaccttctcttttgcattctggcagatttacgggcaatgtcaagctcaaaggcatcattataatgggagaggatgatgactcacacccctctgagatgagactgtacaagaatattccacagatgtcctttgatgatacagaaagggagccagatcagacctttagtctgaaccgggatcttacaggagaattagagtatgctacacaaatttctcgtttttcaaatgtctatcatctctcaattcatatttcaaaaaacttcggagcagatacgacaaaggtcttttatattggcctgagaggagagtggactgagcttcgccgacacgaggtgaccatctgcaattacgaagcatctgccaacccagcagaccatagggtccatcaggttaccccacagacacactttatttcctaagggctggccaaggctcccatagaggcgctgtgtcagtgaagatgtacgactacctgttgggaaggacaaagggatgaggctccagagagagttggctgccacagctctgccaagctttgtctttggggcttgctgcagaaacctggcctacggaagatacgacaccactgggagggttgtgtaggtgccaggggaccatcgtggttctctagggcgctgtggaaattgggtcttgggctgggtgggcatctggcagtcatgggtaacacttgcttttccagttaatgtggccatgtgatttcaagtgtcatgttgctttgtggaagattgttgtgtgacttg

SEQ ID NO: 313996 - DNA, 815 bp, Homo Sapiens
ggaccaaaagcgggggggaccaattaccaggggggcccaaaaagttgctggagggggcccaaggcaggcccccgggttacccaacttgcttggggggccaggtaggagctgcccccaacctgccccaggcgagccagaggtgggacgaaggtcttccataacaaaaggccttgtagacactgaggaacatcagcaggaggacagctggccggaaggtgtggtacagatcatagcgtgttatcatccagacctgagcagacgcgacgatgtaatggaccagactgatgttggagtctatgctcatctggatgtacttccagtcaaactcaatgccccgggctccgacccataggggaatgcagcgggacataataagctcagcagtggcccagcccagggcagcaaccatgatcgtactctcccttgccggcattccgggacatgacaaggagacctatcaggtctgccacatccacgctggccttcatgaactccccaatgaagtcatagatgccgccttcccaggtgggaaagaaagtggccaagaacagcatcttgcagagttggacaaagaggtaggtgactccagcctggacgcatttccagaaggcgttgtactcggacaggccgctgcacttgtaggtgatgaagtaggggaagtaggcaagagcgaagcagttcccgaagtgaaacagggtcatgatgccggccgcccggtcccgcccgcgcggggatcgcgaggcggcgtctccgggagcgggtctccggctccgccggctctttcgccacggccagggcctggcacccacctgact

SEQ ID NO: 313997 - DNA, 671 bp, Homo Sapiens
gcaggcagcagttgtagttactgccgcggggcactgctatgtgcagggacagccagcgcccagcccatcaccactccctgggctggctggcaggtatggcaccctgggagcccggcatatacccagggcacccctacggctgccgccagtctcatgcccaggtgggtgctctgggctggagcgagggccaggttttgggccgaggcttccccaggcaatcctgtgagctcccttctagcctctgacccagtctggtctggcttgcatggatgtagggcttggggtgggaagttcaggtcctggctttgcctttgcctgatgtggatgagcagctcacatgctcagggccacctgagactgtcactgctctcccctggctactgggaggagtcactgagagcttcgttacccctgctgccttgcccagggacaccctatacctccttatctgctcttcccctccctgccgccttctgggcaggtagcagtccctggcctctccccctggctgatcactctccctcaggcagtggagatctgcgtctggacaccctcagatcctgtcattgcctgcccagagtccttcaggggcacccctttgccttggtgtgcggtccagggctctcacccaggtgcccccctttgggggtctctggcccgtcccttgcccc

SEQ ID NO: 313998 - DNA, 1759 bp, Homo Sapiens
  misc_feature (1414)..(1414): n is a, c, g, or t
cgggtgatgggcccagctggccatggctgttccccggggaccaggcactggagggggccccatgcggaaaacccaccgcggggcgcgtggatgttggtggggaaagagaggtggtagtaggttattctcagaggcagcttggagcactcccgattctcatggcaaggcaagcgctcacagcgggtggctgcggagcggcggtagttctcagggcactcgaaggccaggcagcggaagccgccctggatgttgaagcaggtctcgttgatggagcagttgtggatgccagtcacacactcatcaatgtcttggcagttgcggccattgggggccagcctgtagccagacgaggggcagctgcactggaagcttccagggatgttgatgcagcggtaggagcagatgtggcccccggtgggcagggcgcactcgtcgatgtcttcacaggtgactccatccacatcgctgagctggtagcctcgccggcagtaacactggtaggagccgtagacgttggcacactcctggctaacaggggctgctgctgcactcattgatgtcttcacatgacctgccatccacagagagccggaagcccacggaacagctgcagaggtaggagcccagcgtgttctcgcacttgtggccacacaggcgcccggggtagcgctggcactcgttgacatcgacacacatcctgctgatgccgtcaaaatagtaacccgtcttgcattcgcagcggaaactgccgggagagttcacgcagcgatgtcccttcccacagggctcagcaggtggcgcgcactcgtccacatcaacacagcgcgttccctcctcgttgagatggtagccacggccacagttgggcacgttcttctggcacgtgtaggagccctctgtgttgatgcatgtatgcccgatagggcacggggcactgatactcaaacactcattgatatcaatacagttgcctagagcatcttgtataaagccactcttgcactgtagcttgggtcggcagcggaaggatcccagagtattctgacagataaaatcggggaggcagttatgaataccactctcacactcgtcaatatctttgcagctattgtcctctgtgagctcatagccagtcccgcagctgctgtcccgctggcagcggaaagagcccactgtgttgatgcaggattctccaagccggcagctgtggctgcccgtgatgcattcattgacatcttcacaggagacaccatcagacagcagctggtagcccacgaagcaggagcagaccacctcgtcacccgtgtctcggcactgctgcttgcagggcccgcctcctcggcagcggtcattcagatatgggtcctcttgttcctcctcaacctcaatgatcttatccgtttcttggaggccnccgacatccaaatctccggtctcctggctcttgacacagcatgcccggaagacctgtccacactggtagccaaccatgaggctgtactcgcagctctggccctgggcctgggccgccctccccagcagacagcaatggcagcacctcttcacaaatgtggcctccaggctggcgttgtcaccgtggggcgtggcacagcaggtcctgctcgttggccaggctgatgcccgtggcacagtgcagctcctccagctggctgtggcagcactgctcctgcaccatcctgcattctttggattccgtagcatatggcagcgagcagtccttctgatgagtggccatccg

SEQ ID NO: 313999 - DNA, 344 bp, Homo Sapiens
  misc_feature (23)..(23): n is a, c, g, or t
aaccgccccctgaatgttgaaancaaggtcctccgttgaatggaaccaattgtggaatgcccagtcaacacactcatcaaatgtccttggcaagttgcggcccattgggggcccagcctgtaagcccagacgaaggggcagctgcactggaagcttcccagggatgttgatgcagcggtaggagcagatgtggcccccggtgggcagggcacactcgtcgatgtcttcacaggtgactccatccacatcgctgagctggtacctcgccggcagtaacactggtaggagccgtagacgttggcacactcctggctacaggggctgctgctgcactcattgatgtc

SEQ ID NO: 314000 - DNA, 843 bp, Homo Sapiens
  misc_feature (600)..(600): n is a, c, g, or t
  misc_feature (752)..(752): n is a, c, g, or t
tgaagcaataaaagcacagatttattgaagcaaaagtatattccacagagtggtagcaggctaaagcaagctgctcaagagccccagttgcaaaatctggggtttaagtaccctttaggggtttcctattggttacaccctatgcgccaccaatcggaggccgaagtgaaggctcccagtctccagactcttattctcctagctcaaagaaatccactgatttcctctgtagcatcttcaggttccatcttgacaacttcctctaaatccccaggggaagagttgtttagagactcctggatgccctgagggagcggctccagagcttgccttccctcctctgttttcacaacggtccagcgataggcactgttctctgacaatccttcttggcactgtttatcgactggtggaggccctgggctatgttccactttggggaaaacagtagcagagagaggagatagttcctggggctctaatttgggttctaggccctgaaaggcattttccccatcagccacagcacaagcaatgtccacattcatgtgggccttatcttcaggggtggatggtataggaagattcacagaattgccnagaaacaattaagggtgagacagaggaggccacaaggggctggttcaatggacaggggaaggaagtagggttaaccaagagggtggcgatgggaatagtctggggactctggccacagccgcattgacaggctggatcatgttacagccaancccaaggctcacaatcttcacagtggtagcaggaacagtgaagataacagatgcagggtattgaagctcatgggctagcctgtgccgaaat

SEQ ID NO: 314001 - DNA, 366 bp, Homo Sapiens
tttttttaggtttaaagacatttattcaactgacacttgtctttagtagccagcccatctcttctttgggtggtgtctctagccgagaatggcacctcagtctccagactgcccagggttctcccctcaccgcacagccatttaatcaccaaatagatcgggcagtccatttaatgcgattctctgacatgtgtgtccagatgttcagacggaagcagagattccagctgccactccccagccctttctctatcactgtttaggacctgtgatgtcccacagcacagagctgggaccactgctttcaggtgtgatcctatctttttcagaacctcttgatgacatttcagccctgcgccagatggg

SEQ ID NO: 314002 - DNA, 598 bp, Homo Sapiens
  misc_feature (577)..(578): n is a, c, g, or t
aggtttaaagacatttattcaactgacacttgtctttagtagccagcccatctcttctttgggtggtgtctctagccgagaatggcacctcagtctccagactgcccagggttctcccctcaccgcacagccatttaatcaccaaatagatcgggcagtccatttaatgcaaagattctctgacatgtgtgtccagatgttcagacggaagcagagattccagctgccactccccagccctttctctatcactgtttaggacctgtgatgtcccacagcacagagctgggaccactgctttcaggtgtgatcctatctttttaaaatttttaatcagcgaattttaagaaacatagaacttgtaagccccagaagacagaacctctaatgatgacatttcagccctgcgccagataggggtagaagggatacttttgtgaatgagcattcagattctcaaagcagcaacaggtaataccttcagattcataaagtcacaggcagtctggttcatttaaacttgacatgtagaatggattaggaaccactttgatctggtcagcctgagccacatggnntgatatttcttttgtctcgg

SEQ ID NO: 314003 - DNA, 875 bp, Homo Sapiens
  misc_feature (678)..(687): n is a, c, g, or t
  misc_feature (737)..(745): n is a, c, g, or t
caaagttgtaggtttaaagacatttattcaactgacacttgtctttagtagccagcccatctcttctttgggtggtgtctctagccgagaatggcacctcagtctccagactgcccagggttctcccctcaccgcacagccatttaatcaccaaatagatcgggcagtccatttaatgcaaagattctctgacatgtgtgtccagatgttcagacggaagcagagattccagctgccactccccagccctttctctatcactgtttaggacctgtgatgtcccacagcacagagctgggaccactgctttcaggtgtgatcctatctttttaaaatttttaatcagcgaattttaagaaacatagaactttgtagccccaaaagacagaacctctaatgatgacatttcagccctgcgccagataggggtagaaaggatacttttgtgaatgagaaaacattcagattctcatccacactctgtgaggtattatttgctttacctactcatggtggttaagaaagcagcaacaggtaataccttcagattcataaagtcacaggcagtcttgttcatttaaacttgacatgtagaatggattagaaaccactttgatctggtcagcctgaggcgacatggttgtatattaaatcttttgtctcaaggaccaagggcannnnnnnnnnccgttgagaaaagtacagtccactcagaggtgctaaaataaatcccacannnnnnnnncattattttctggaatagtgtttgaatgatgggcaaaccctcaagtggagaatttgctttcacacacgtagcagcttcaactgctgagatcatgttgttcagcacccattctaatccacatggaaagggg

SEQ ID NO: 314004 - DNA, 755 bp, Homo Sapiens
  misc_feature (507)..(508): n is a, c, g, or t
  misc_feature (519)..(519): n is a, c, g, or t
  misc_feature (531)..(531): n is a, c, g, or t
  misc_feature (533)..(533): n is a, c, g, or t
  misc_feature (548)..(619): n is a, c, g, or t
gatgccccgggctgcaggaattcggcacgaggagagaactagtctcgagttcttatttttgatctaggtatctgcctctctatcagggcaccctctatttctatctgtattaaccctctgaaaacaggaatacacagaggccactccaaacatggacatttgcaatgcctagaacattgtgccagtggatatgtgaatttgccactcgtatcagaagggcctttctttactcctaaccatattagcaccatcttgtcacatgtctttccctacctcttatgatctagatcattaattctggagttttaattttaaggtatactatatgggaaaaggaggcacctcaggagttcatgagaaatagcatgaaaagcttgggatgcttattccatggaacttaagacatttgctgaggtttcagagtattatcaaaaaatttaaagaagaaaaatcagatttttaatacacagagcacatcatagatgtgggttgtagtttgtagacacnncacaaccgttntcacctccccananaaggccccatcctcnnnnnnnnnnnnnnnnnnnnnnnnnnnnnnnnnnnnnnnnnnnnnnnnnnnnnnnnnnnnnnnnnnnnnnnnccgggattgggaccctggggtacccacttaatcggcttgaggacatccccttttgccagtggcgaatagcgggccgcaccgttgccttccaacagttcgcagcctgaatgcgaatgcgaattgtagggtattttgt

SEQ ID NO: 314005 - DNA, 711 bp, Homo Sapiens
  misc_feature (523)..(523): n is a, c, g, or t
  misc_feature (526)..(526): n is a, c, g, or t
  misc_feature (551)..(551): n is a, c, g, or t
  misc_feature (557)..(642): n is a, c, g, or t
gagagaactagtctcgagttcttatttttgatctagttatctccctctctatcagggcaccctctatttctatctgtattaaccctctgaaaacaggaatacacagaggccactccaaacatggacatttgcaatgcctagaacattgtgccagtggatatgtgaatgaattattccctgtcccccacctgcacattattccgttttcttgctcattgccactgtatcagaagggcctttctttactcctaaccatattagcaccatcttgtcacatgtctttccctacctcttatgatctagatcattaattctggagttttaattttaaggtatactatatgggaaaaggaggcacctcaggagttcatgagaaatagcatgaaaagcttgggatgcttattccatggaacttaagacatttgctgaggttccagagtattatcaaaaaatttaagaagaaaaatcagatttttaatacaaagagcacatcatagatgtggtttgtagtttgtcgacaaanaanaaaaaaacaatatactcaccataancctaannnnnnnnnnnnnnnnnnnnnnnnnnnnnnnnnnnnnnnnnnnnnnnnnnnnnnnnnnnnnnnnnnnnnnnnnnnnnnnnnnnnnngttgccgtattagcgaagaagcccgcaccgatcgcccttccaacaggtgcgcaacctgatgccgtgcct

SEQ ID NO: 314006 - DNA, 576 bp, Homo Sapiens
  misc_feature (87)..(87): n is a, c, g, or t
agactctgatggatatgggtgagctcattgagattctcctccagctcctgagcccactgcctcagcaactcagcagactcggatccnccttgtgcaagtccagtgagtcttgcacaaggttgactacatccagcacaacgaggacacctgaagtggccttgcccaggttccgggctactctcactatccgggtgggggccccacgtgttctcagtgtctcaacaacatttataggtacatatcgccaagcaatcaaagggcgtccaacagtggctttagatctcctgagtgtatggacatcattcgcaatcatttttgtggcttcgtcaaaatcaagtgcaaaggaaagcacattgggtgtgatgtcatgcagaatgtcccttaatgcctccaattggtcagtgctggttgcagtcagcctgctggctgtgagttctgctgaccttgtgtatgtgttctccacgatgctggaggcgatcccagccgtggcagatgctattcccagccctaccccagctgcagtaatgctcaggctcagccctgctgtaaatggtgccaacataacgccaatgacag

SEQ ID NO: 314007 - DNA, 955 bp, Homo Sapiens
  misc_feature (202)..(248): n is a, c, g, or t
gccactaatgttcatcttttcgtctttcttcatttgaatttcaagatccttataggctaatcgtaatgatgaaacaattgattcttctttagataccaccttggccaggtcttcctgctccttcattttatccgcagcttgagcttgtttttcaatttcattaaagcatgtgtttgccagtttctgagctcccaaacttccnnnnnnnnnnnnnnnnnnnnnnnnnnnnnnnnnnnnnnnnnnnnnnntgatagaggatacctctaaagtagcctttgttggtacattaagaccttccacacttggtccttgctcttgtccaccttcattattttccaaagtggtttccacaggccttgatgttaaagaagatggttctgctattgctgatgcccacgctgtgtcactcacctcaggagaaacgtgagaggcaaaaaaatcttcctcctttggtggaggggacaaaggtggaaccacacaactatcaagccacagatcagtgccatgcttccgtgttgcttgagaggcgagcgatttgattttctccctatagagctgagcagcacgactgttgtacttggcattggtgtcattggtggaacacccatgttgatgaaaaaaggaagatgcactagcgtttcctccgacttgcatgcatcgcaactgaaaccatgaccagttggaatccaactctgtagatcgaataaaactcaagtgaacaccaagtgaccggtgggaccgtgagcaatcaatgcaaagtaacactccataggttatgcttgcccagctgggatttttggcaccacaatcaaaacacaccttgttagtgggcaccgagcggcggcgcttgaagatggtcaagatgtcctgcttgctggggtcccccatcgtcagctgtgagccgcggcgcagctggcccagccaaccggtaagagtcgacgaaaagcggctaccg

SEQ ID NO: 314008 - DNA, 1618 bp, Homo Sapiens
  misc_feature (1330)..(1330): n is a, c, g, or t
ggggagtttgaagcaaacaggcagcgcgcgacaatggcggtcgctcgtgcagctttggggccattggtgacgggtctgtacgacgtgcaggctttcaagtttggggacttcgtgctgaagagcgggctttcctcccccatctacatcgatctgcggggcatcgtgtctcgaccgcgtcttctgagtcaggttgcagatattttattccaaactgcccaaaatgcaggcatcagttttgacaccgtgtgtggagtgccttatacagctttgccattggctacagttatctgttcaaccaatcaaattccaatgcttattagaaggaaagaaacaaaggattatggaactaagcgtcttgtagaaggaactattaatccaggagaaacctgtttaatcattgaagatgttgtcaccagtggatctagtgttttggaaactgttgaggttcttcagaaggagggcttgaaggtcactgatgccatagtgctgttggacagagagcagggaggcaaggacaagttgcaggcgcacgggatccgcctccactcagtgtgtacattgtccaaaatgctggagattctcgagcagcagaaaaaagttgatgctgagacagttgggagagtgaagaggtttattcaggagaatgtctttgtggcagcgaatcataatggttctcccctttctataaaggaagcacccaaagaactcagcttcggtgcacgtgcagagctgcccaggatccacccagttgcatcgaagcttctcaggcttatgcaaaagaaggagaccaatctgtgtctatctgctgatgtttcactggccagagagctgttgcagctagcagatgctttaggacctagtatctgcatgctgaagactcatgtagatattttgaatgattttactctggatgtgatgaaggagttgataactctggcaaaatgccatgagatattttgatatttgaagaccggaagtttgcagatataggaaacacagtgaaaaagcagtatgaaggaggtatctttaaaatagcttcctgggcagatctagtaaatgctcacgtggtgcgaggtctcatttgttgtgaaaggcctgcaagaagtgggcctgcctttgcatcgggggtgcctccttattgcggaaatgagctccaccggctccctggccactggggactacactagagcagcggttagaatggctgaggagcactctgaatttgttgttggttttatttctggctcccgagtaagcatgccaccagaatttcttcacttgactccaggagttcagttggaagcaggaggagataatcttggccaacagnacaatagcccacaagaagttattggcaaacgaggttccgatatcatcattgtaggtcgtggcataatctcagcagctgatcgtctggaagcagcagagatgtacagaaaagctgcttgggaagcgtatttgagtagacttggtgtttgagtgcttcagatacatttttcagatacaatgtgaagacattgaagatatgtggtcctcctgaaagtcactggctggaaataatccaattattcctgcttggattcttccacagggcctgtgtaagaatgggttctggagt

SEQ ID NO: 314009 - DNA, 749 bp, Homo Sapiens
  misc_feature (152)..(152): n is a, c, g, or t
cttccgtgctagaaaaagcccatgatactattggcagtagaatgggaacctaggaaccgggtagctgaattctgttggtaaagtaaagagtcccaatttctggaagtgaccttccatcaactgcagcgtatctttcaaagcccttctgtaanttcccttccttgttcatcaaactcaaagagaaagagtacctttaaaatatggtatacttcatctttcaggttttcagtgttctgcaccacttcactcagtgcctccaggagggccaggtcctccatcggactgccttctttgaggctgtgcttcttctgctccgcttttcggcgattcttggatgatctcgctgatatcctggagttactatgggagtatttgccactcatctcactgccactcacgacactgctagtttcagagaagaggtctgactcttgcccgtggggtacctcatcatccagacctgcctgctgggcttgctccttgagctctcgaactaccaataaacgtttcttgtggcgactgaatgtggctgtctgagagtccagaaatgccatataatttttctgggcttctaaaatggaaggctttacgttggtttctataatatccagtctgttatatttgtataccagcctcaaagcttcttcccaggcagctccttctaacagcaagagcacagcttcttcataatctagtcaagagtcagctggatccacacagacatgagggttggttcactgttgaaggag

SEQ ID NO: 314010 - DNA, 1198 bp, Homo Sapiens
  misc_feature (35)..(35): n is a, c, g, or t
  misc_feature (922)..(922): n is a, c, g, or t
ttggaatgcaaatgtgaagtatttccacagccgtngcagggaacacataactggcactatttataagcgataaaagggttatttcatgcatcctctttaagctgcaaatgcttcatttacaaaagaaaaaaacctgtccttttcattcatgagactggcttaaggatcaaatgagatctgtttttaatataaagatgttttcttaaaatctctgtatgaaattatctccggagagatagattcaccatgtttgccctgagatttagaggcctctgcctgccactccacaccctgtttgtgaaggcccaagtcactcactatgcaaagaagtcattccctctagttagtgttaaaaccagttatgggtcttcctggcatggtggataatccacacgtggataatcaagagttgactatatgggttcctccctcccctccccttccaccagggatccctgacagaggccacagcgagactcttcagcggatgtagatcatgtcggagatggctccaggcaagtgggtcatgatctgcattcgcagccaccagtagtagtccatggggtggtagcgggtgtagggggtggtggcggtcagggcgtgtgtgacagcatcgatgacaggggacgtgtctgtggagccactgctgcagtaggtctccatcttggcgatcttttcatcaaagtacttcttgccgtagtccttgcgcacgacctcaggcagctccttccacaatcttcttggcgatggcctgaatgctctcagggctgtaaaggctggtggcagcgatgaagttgccgggctccaccacgctgaccttcacgcccagggggtacatctcatagcgcaggcagtccgagaaagcctctaccccgaacttggtgatgcagtacggggagcgggccgggttgtccatgcggcnccagcatgctgctgatattgacgaacgcggtttggccttcggatgagggggagaaaggatttcgtcatccgcactgtgccccaaaggttcacttctgccacctgcttgtaggtctccaggctggtgaactccacctccccgaacgttgagatgccggcattgttaacgaggccccacatgcctttctcagggtccttcaggctcgagcgcacaatctccaccactttctccacctcttcgctgctgcacacattgagctgcacggttctcaatcgg

SEQ ID NO: 314011 - DNA, 446 bp, Homo Sapiens
  misc_feature (184)..(184): n is a, c, g, or t
  misc_feature (208)..(208): n is a, c, g, or t
  misc_feature (379)..(379): n is a, c, g, or t
  misc_feature (432)..(432): n is a, c, g, or t
taaggatcaaatgagatctgtttttaatataaagatgttttcttaaaatctctgtatgaaattatctccggagagatagattcaccatgtttgccctgagatttagaggcctctgcctgccactccacaccctgtttgtgaaggcccaagtcactcactatgcaaagaagtcattccctctagnttagtgttaaaaccagttatgggntcttcctgggcatggtggataatccacacgtggataatcaagagttgactatatggggttcctccctcccctccccttccaccgggggatccctggacagagggccacaggcgaggacttcttcaggcgggatgtaggatcatggtcgggagatgggctccggggcaagtnggggtcatggatcctgcattcgggggccaccagtaggtaggtccaagggggtnggtagccggtttag

SEQ ID NO: 314012 - DNA, 1089 bp, Homo Sapiens
cttcaagactaggcaagtgaagcagtgggaatggagaaggaacaaagaaatctacaaactggttgtgatcaattagttgtaaataccactgcacttggatcagccaggaacaagttctttgaaatacgccagagaattaacattatcagtgggccaaatgtgtggaagatgtattatcctagtctcttttcctgttctctagaagtatgttactggctcttaaaagatttcacaaaaatacgctttgaggagaatcacagctttcttgattagtatctacaaggcacttaatgcacattttcagtgaggaagctgatggagagagaaagagtaacatgaaccattctcttatactgaacgccaaaattctggatgtaaaataacattcagttgtactgcctctgtaaacagggccaattcacatcattccacagcgtggccatgtcaataggtttcactgcaggttttcaaaaagcagattccacatcacccatctccacacacacagtcttcagctgtgaataatattcgattgtcacacggccgttctctctgccaaatcctgacttcttatatccaccaaagggcaactccactgggctgacgttatagttgttaatgaagcacgtcccagcctgaagctcagctaccactctatgagcccgttggatgtccctggtaaagacgccagctgctagtccaaaagtggtatcattggctctttctagaacctcagcttcagtgtcaaatgataaaatggacataacaggcccaaagatctcttccttcacacaggtcatgtcgtctctgcaattagttaatacacaaggtctcatgtaatatccatcctttaatttgggatcttcaggtacatatatatctccaccacataacactttagcaccctgctcctttgccactttgacaaacccaaggactcgctccaggtgtggtcggttgatgagtggacccatccttgtatcttccagaaggggatctccaattttaatcctttgggtctgtttcaccacttcctctgtaaatttatcaagaatttctttctgcacaaatactcttgccccattacag

SEQ ID NO: 314013 - DNA, 897 bp, Homo Sapiens
  misc_feature (341)..(365): n is a, c, g, or t
  misc_feature (375)..(470): n is a, c, g, or t
  misc_feature (576)..(576): n is a, c, g, or t
  misc_feature (589)..(589): n is a, c, g, or t
  misc_feature (616)..(616): n is a, c, g, or t
  misc_feature (618)..(619): n is a, c, g, or t
  misc_feature (643)..(643): n is a, c, g, or t
  misc_feature (661)..(661): n is a, c, g, or t
  misc_feature (718)..(719): n is a, c, g, or t
  misc_feature (722)..(722): n is a, c, g, or t
  misc_feature (724)..(724): n is a, c, g, or t
  misc_feature (726)..(726): n is a, c, g, or t
  misc_feature (742)..(742): n is a, c, g, or t
  misc_feature (762)..(762): n is a, c, g, or t
  misc_feature (766)..(766): n is a, c, g, or t
  misc_feature (771)..(771): n is a, c, g, or t
  misc_feature (815)..(815): n is a, c, g, or t
  misc_feature (826)..(826): n is a, c, g, or t
  misc_feature (838)..(838): n is a, c, g, or t
  misc_feature (847)..(847): n is a, c, g, or t
  misc_feature (860)..(860): n is a, c, g, or t
  misc_feature (876)..(876): n is a, c, g, or t
  misc_feature (882)..(882): n is a, c, g, or t
tttttaacagtgtgatttattttaatttcaccatattacattagcatacaaataatttgtacatttaaagggtagctccactggtgtaagacagcaggctgtagttcaaggacccaagatagggagatagatttcctctatcgcagtagtgaacagagacaaagtgcttactaggcaagttcacattcacacagaatttgaccccatctattatctaatcccctccctatcccagttgtcagctttctcaatggaatgacaaggggatatagcttaaaaaaatgtcaatgagctgaaatcatctctactgattctaccaggaacctataaaggaacaaggnnnnnnnnnnnnnnnnnnnnnnnnncttcaagacnnnnnnnnnnnnnnnnnnnnnnnnnnnnnnnnnnnnnnnnnnnnnnnnnnnnnnnnnnnnnnnnnnnnnnnnnnnnnnnnnnnnnnnnnnnnnnnnaggaacaagttctttgaaatacgccagagaattaacattatcagtgggccaaatgtgtggaagatgtattatcctagtctcttttcctgttctctagaagtatgtnactggctcttaanagatttcacaaaaatacgctttgaggngnntcacagctttcttgattagtatanaaaaggcaattaatgcanattttaagtgaggaagatgatggagagagaaagagtgaaatggaaaattatattatnntgnangnaaaaattatgggtgtnaaataaaattaagttgtgangaanatgtnataagggaaaattaaaataattaaaaagagtggaaatgtaaatnggtttcaatgnaggttttcaaanagcagattnaacatcacaaatnataacacacacagtcntcagcngtgtattatattcag

SEQ ID NO: 314014 - DNA, 641 bp, Homo Sapiens
actttttgctgccctgatgagtaggtggaaagccactcggattttctcctatgggtacggccgaatagaaattctgtctggatttattaatggactttttctaatagtaatagcgttttttgtgtttatggagtcagtggctagattgattgatcctccagaattagacactcacatgttaacaccatgcccatagccatgcccatggagcttctcaaggaagctgtcactcatctgatcacagccattcacaccatatgcatggacacagtgaccatgggcatggtcacagccacggatctgcgggtggaggcatgaatgctaacatgaggggtgtatttctacatgttttggcagatacacttggcagcattggtgtgatcgtatccacagttcttatagagcagtttggatggttcatcgctgacccactctgttctctttttattgctatattaatatttctcagtgttgttccactgatttaagatgcctgccaggttctactcctgagattgccccccgaatattgaaaagaacctacatattgctttaaggtcattcttctagtattgtgggagggaccatttcatattcaggtgacatcttatgtgctagaaccaagaatagtacaacaggtt

SEQ ID NO: 314015 - DNA, 1296 bp, Homo Sapiens
  misc_feature (1175)..(1175): n is a, c, g, or t
  misc_feature (1190)..(1190): n is a, c, g, or t
ctatgggtacggccgaatagaaattctgtctggatttattaatggactttttctaatagtaatagcgttttttgtgtttatggagtcagtggctagattgattgatcctccagaattagacactcacatgttaacaccagtctcagttggagggctgatagtaaaccttattggtatctgtgcctttagccatgcccatagccatgcccatggagcttctcaaggaagctgtcactcatctgatcacagccattcacatcatatgcatggacacagtgaccatgggcatggtcacagccacggatctgcgggtggaggcatgaatgctaacatgaggggtgtatttctacatgttttggcagatactcttggcagcattggtgtgatcgtatccacagttcttatagagcagtttggatggttcatcgctgacccactctgttctctttttattgctatattaatatttctcagtgttgttccactgattaaagatgcctgccaggttctactcctgagattgccaccagaatatgaaaaagaactacatattgctttagaaaagatacagaaaattgaaggattaatatcataccgagaccctcatttttggcgtcattctgctagtattgtggcaggaacaattcatatacaggtgacatctgatgtgctagaacaaagaatagtacagcaggttacaggaatacttaaagatgctggagtaaacaatttaacaattcaagtggaaaaggaggcatactttcaacatatgtctggcctaagtactggatttcatgatgttctggctatgaccaaatggaatccatgaaatactgcaaagatggtacttacatcatgtgagataactcaagaattacccctggagaataaacaatgaagattaaatgactcagtatttgtaatattgccagaaggataaaaattacacattaactgtacagaaacagagttccctactactggatcaaggaatctttcttgaaggaaatttaaatacagaatgaaacattaatggtaaaagtggagtaattatttaaattatgtgtataaaaggaatcaaattttgagtaaacatgatgtattacatcatcttcgaaaatagatatgatggattctagtgaagaccaaaattacttctgtttactttctatcangaagcatctccattngtaatatgtatttacatgtttattacaaagacccaaatgaaaaatttttagtccattttttgcatagcctaaagataaaataggaataaaagttctgtatttatgc

SEQ ID NO: 314016 - DNA, 710 bp, Homo Sapiens
agaaatgctgtatcctaggaataagctgccctggtaaccagtctctagctagtgcctcttgccctctcctcacctccttttctctcagtgactctggaacctgaatgcagcttacaagacaagcctgacttttttctctgattaccttggcctcctcttggaaccagtgctgaaaggttttgaatcctttacccaacaatgcaaaaatagagccaatggttataacttggctagaaatatcaagagttgaatccatagtgtggggcccatgactctagctgggcaccttggacctccagctggccaatagaagagacaggagacaggaagccttcccattttttcaaagtctgtttaattgcctattacttctctcaaagagaacctgaagtcagaacacatgagcagggtgagaggtgaggcaaggttcatcctgaatgggagaggaagtcgaaccactgctgtgtgtcttgtcaggatgctcacttgttcctactgagatgctggatattgattttgtaacagcacctggtgtttcacggctgtccgagtgagctaaacgtgcggtgtggctggctggacctcctctttcaggttaacgctgacagaatggaggctcaggcttgctgcaagaaaacagttggtttgcctgtgattttgacctcctctttcccactgccatcttctaagagactttgtagctgccttct

SEQ ID NO: 314017 - DNA, 487 bp, Homo Sapiens
aaggaagtgtcaagcctcgatgttgtcaaaggaatctgctcccatataatcagcctggccctgttcccatcgttccttccgttcttccgaggatacaaacggctgtgccatagctgggatctccccaagggacagatgtgatatggctcctgagacatcttccacatttacatatgagcaggtgtctttgacaaggccaaattgttgaagcagaggtaaaacgttggtggtaaagatgttccagacactgttttgggatcataagtataattccatggtttgactcgtcccaggaaatgcacaactttggcacttgcaccaaacactttaaatgccggaaggtagaagtatatagagatgctgcttaggttataaataaccgccagtgtgttttctgatatctgttgttgcacagctgctaaaaaatgtgctcagtatgccttggtccccaccatcaaaactaccttgctcagaagcaagatgcacc

SEQ ID NO: 314018 - DNA, 1257 bp, Homo Sapiens
  misc_feature (39)..(39): n is a, c, g, or t
  misc_feature (50)..(50): n is a, c, g, or t
tcacaacttttgcccagtctcacctcttatcctaaaaanctctcatctgntaagtttaatgacacctctagcaacctgtaacagacttttctcaaccccagctctagatactaagtatcagaaacaaggcttgtgaagtggatgtgttcacagaacaatgcagtgtttctactggaggtaagtgtcaagtttcctcttgatgttgtcaaaggaatctgctcccatataatcagcctggccctgttcccatcgttccttccgttcttccgaggatacaaacggctgtgccatagctgggatctccccaagggacagatgtgatatggctcctgagacatcttccacatttacatatgagcaggtgtctttgacaaggccaaattgttgaagcagaggtaaaacgttggtggtaaagatgttccaccacaggatgagaaactctggatgagtcatgttgggatcatgggcctcacttttgacactttttgttttgggatcataagtataattccatggtttgactcgtcccaggaaatgcacaactttggcacttgcaccaaacactttaaatgccgggaggtaggagtatatagagatgctgcttaggttataaataaatggcaggtgttttctgatatctgttgttgcccagctgctaaaaaatgtgttcagtatgccttggtccccaccatcaaaactaccttgctcagaagcaagatgcaacagctgattgtatgtttcaactgaaggctgataaacgaagactccggaattgaagcagtcaggccaccctgggtctggtgctgctgacaattcttctctgtcaaaaagatcatcaatatttgctaggaccagagtatctgcatccatgaatacacattttgaatactgtgtaagcgaccagcagtggagctttgtcagcgtgacacccaactctggcctcttcattaaggttagatgagcagaatcgccactgtccaagacatctaccatgatgacttcatcaaagactgtctctaaaacttttctcatggagtctgagacctgaggggtggcgagcacgaccagcctcctggtggtcctgtgctgtttcagagatgatcccaggaccagggcacctttggcgtaggcatcgtttgtggttagtgtcacaaaggcctgatctgtcatggtgctgccgggtgcgcaggcggccggggcagcctcaggttggtgactcagagaagccggcaccgggagggagcgcggccagcgagg

SEQ ID NO: 314019 - DNA, 433 bp, Homo Sapiens
ccagagctcaggtcagagactcacaccagaagctgtcccctgacccgcttccaaaacgcccacaacacacaaaagctaaaaggcacccaattgtgcaataaagttccctctctgtgaaagggagggggttctggcctggggctcgatgtggagctcctgctgatggcccatggccctccagagaggaagaggacaaagccagtctgactcccgggggaatcacagtgagtctcaataatgtgttgctttcccaaagggctgtgctttaaaaacaaacacctgctacttgtccaactcccctgacctgggaaggggggaaggggagaaccatgccgtgctggctatgggacccagcttggccttggaggtggttgggaggagggggtgggggaccaggtactgctcccctggggtcgggtgccacctcgcgtgc

SEQ ID NO: 314020 - DNA, 1280 bp, Homo Sapiens
  misc_feature (316)..(316): n is a, c, g, or t
  misc_feature (325)..(325): n is a, c, g, or t
  misc_feature (416)..(431): n is a, c, g, or t
  misc_feature (1234)..(1234): n is a, c, g, or t
ctcctggtctgcgggtttcaaagaccatgggaaaagtgcagtatctgggccggagtgcaccgttcctcaggtacagtccctcatggcttcccttgggtagaggaggtagttccctgaccccttgtgcttcctgggtgaggtgacaccccaccctgtttcagctggccctccatgggctgcacccactgtccaaccagtcccactgatatgaactgggtacctcagttggaaatgcagaaatcacccgccttctgcgttgatctcactgggagctgcagaccagagctgttcctatttggccatcttgccaagcaantcagaccangaagttttaaatggactacaaaataggtcaaactctatttcacgaactaagaaggctaaggaataatgtccaaactttggttatggaaagnnnnnnnnnnnnnnnnggtctggtaggataagagggtttttactcatcttaagtttgaattaaactttgtaacaaagttattgtttttttaaacaatgcatgtatcaaattatctgtctcattagataactaggtagacttttccaagatggtttcaaaatcaaatatatattcaaagatcttccagtgtaaagcaataggaatgaaacaagccatgagaaagcagaatattttgagtatattctcatgcctttctttaaaggagaagcgcctatctaaacagttacagaaacccaaattcaaagtagattaaacaagaagtaaatttgtaaactcttttaactgggagacaggaagtatggagggctccaggcacactatcattagcagttcaatgtgaacgaagacccatgtcctttccaagcctccctctgccatcagcattgccctcctttccagggtcacagatggctatcaatggcaaaactggggttccgcgttctcttctcctcatctggcaagagaaaatgggaaatctctatcccaagcttggattaaaaattattttcatttttgtgttccagcaaacttgggtcctatgcccaggcatggaccaaaaataggcttaatgtgaatgttatgtgctgattggatttaagttctgactctgaatctgggaatgtggtcacctttctcagagacaagttgagaggttgggcttatctggaataaaagcagagaatatggagatgctgggagaggtgttcatttaaggagaacattccctgaggtgaattaacggtttaggattatctatcnctgtatttatctatccacccttctatcctcatccttcacctcatct

SEQ ID NO: 314021 - DNA, 1694 bp, Homo Sapiens
tatcagctcacaagacagttttattgaattagttgcatgcaggagcaattctgttcttcccatgagcagcagagtcgagtgttagagtgcaggatccagagcggggagaggctgggcggagttgggggcctggaggctggggcctggttacttggtgacgtgcagagctctctctggggggctgcagctcatcttggggggagctggactcagatgcccccgtaggtgcaaaagcaacatccacatctcactcctcccggtgctttttgcggtattcctgcagcgctttctccgccacggtctccataaatttagggttcttcctggagacttctacagggaccgtcacagtgatgggatcagagtcaaagagcttcacgaccacctcagtgacaccggaaggaacgtccgagtcagaagtgtgggaagccaccgtggtgacccgcagatagtactggtcttcgccttgcgtgaggtttgccagccgggacacccagttaaactgctcgttcagctgctccagcaaggaggaggtgttgagcatcttccactggtaggactttagcagctcgttgtatttcctggtcaacctctcagcgacctggagggattcgtcgagctcccgccgcagcttagcctgggaggggttgttggtggaacagtccacagacaagatctcccggcacttgtcacactggtccttcatccgcaggcagcccgtggagttgtggcggatctcccggcacacagtccggtcatcgtcgccttctcgtatgaattctgttggcgggtgctggaaggccgggctgtggaagtggatgtccatggcctgctgagcctcgtgtatcatctcaaggaagggctggaacatggcgtggaagttcaggggctcgtacggagagaagggcatcaagctgcggacgatgcgggacttgggaaagaagaagtgaggcctccggtggggcaggctgaagggcaggtagtggtaggtatcctggggctcccgggtgaagaacctgtcctggaagagctcgtctatgatgctggacgcgcggctgaagtggtcctgcatgacatccagcatgtgcgtctgctgccggtcgttctccagcagggagtcgatgcggtcaccattcatccagaagtagaagggcgagctctggttcaggaactcctcaagctggcggccaaccaggcctgagccacttctgcagacgcgtgcgtagaacttcatgcaggtctgtttcaggcagggcttacactcttcccagagggccatcatggtctcattgcacactcctgggagctccttcagctttgtctctgattccctggtctcatttagggcatcctctttcttcttcttggcttcttctaggttgctgagcagtgtcttgcgctcttcgtttgttttttctatgagagtctttatctgtttcaccccgttgacagcattttgaatttccttattgacgtacttacttccctgattggacatttcctggagctcattgtctgagaccgtctggtcccccaggacctgcccactctcccaggtcagcagcagccccacaaacagcagcagagtcttcatcatgcctccaattctggagtctttgcacgcctcggtcagcggcaccctgtgcccgcgcgctcctcctggcgatcccgggaattccggaccggtaccagcc

SEQ ID NO: 314022 - DNA, 441 bp, Homo Sapiens
  misc_feature (41)..(41): n is a, c, g, or t
  misc_feature (66)..(66): n is a, c, g, or t
aaaaactcgggctccccgaaccaaaacatgtggccgggaanacaacctcaccgtggtgaccccgcnaaataattactggtccttcgccttgcgtgaggtttgccagccgggacacccagttaaactgctcgtttcagctgctcccagcaaggaggaggtgttgagcatcttccactggtaggactttagcagctcgttgtatttccctggtcaacctctcagcgacctggagggattcgttcgagctcccgccgcagcttagccctgggaggggttgttggtggaacagtctgcccagagatggaagaaacgcaagtgagaagtgtgaagggaaggctacaaagggatagaaccatgaatgaatggaagttagcacatgcagcgggaacaaaagcagtgcttccctaagggaagggccacaaactggaattgtccacgaca

SEQ ID NO: 314023 - DNA, 1062 bp, Homo Sapiens
  misc_feature (17)..(17): n is a, c, g, or t
  misc_feature (921)..(921): n is a, c, g, or t
  misc_feature (953)..(953): n is a, c, g, or t
  misc_feature (957)..(957): n is a, c, g, or t
  misc_feature (965)..(966): n is a, c, g, or t
  misc_feature (973)..(973): n is a, c, g, or t
  misc_feature (980)..(983): n is a, c, g, or t
  misc_feature (990)..(990): n is a, c, g, or t
  misc_feature (996)..(996): n is a, c, g, or t
  misc_feature (1002)..(1002): n is a, c, g, or t
  misc_feature (1010)..(1010): n is a, c, g, or t
  misc_feature (1025)..(1025): n is a, c, g, or t
  misc_feature (1034)..(1034): n is a, c, g, or t
  misc_feature (1039)..(1039): n is a, c, g, or t
  misc_feature (1049)..(1049): n is a, c, g, or t
tcccatgaccagcagantcgagtgttagagtgcaggatccagattagggagaggctgggcggagttgggggcctggaggctggggcctggttacttggtgacgtgcagagctctctccggggggctgcagctcatctcggggggagctggactcagatgcccccgtaggtgcaaaagcaacatccacatctcactcctcccggtgctttttgcggtattcctgcagcgctttctccgccacggtctccataaatttagggttcttcctggagacttctacagggaccgtcacagtgatgggatcagagtcaaagagcttcacgaccacctcagtgacaccggaaggaacgtccgagtcagaagtgtgggaagccaccgtggtgacccgcagatagtactggtcttcgccttgcgtgaggtttgccagccgggacacccagttaaactgctcgttcagctgctccagcaaggaggaggtgttgagcatcttccactggtaggactttagcagctcgttgtatttcctggtcaacctctcagcgacctggagggattcgtcgagctcccgccgcagcttagcctgggaggggttgttggtggaacagtccacagacaagatctcccggcacttgtcacactggtccttcatccgcaggcagcccgtggagttgtggcggatctcccggcacacagtccggtcatcgtcgccttctcgtatgaattctgttggcgggtgctggaaggccgggctgtggaagtggatgtccatggcctgctgagcctcgtgtatcatctcaaggaagggctggaacatggcgtggaagttcaggggctcgtacggagagaagggcatcaagctgcggacgatgcgggacttgggaaagaaaagtgaggctccggtggggcagctgtagggcaggnattgtagtatcttggggtccgggtgaagactntctngaaaagtnntttatangctggannnnggttaantgtctnatgaancagctttngtttctgccgtcgtntcacaaggntcgtncggtccattntcaaagtaaaggg

SEQ ID NO: 314024 - DNA, 1053 bp, Homo Sapiens
  misc_feature (47)..(47): n is a, c, g, or t
  misc_feature (49)..(49): n is a, c, g, or t
  misc_feature (57)..(57): n is a, c, g, or t
  misc_feature (63)..(63): n is a, c, g, or t
  misc_feature (67)..(67): n is a, c, g, or t
  misc_feature (81)..(81): n is a, c, g, or t
  misc_feature (84)..(84): n is a, c, g, or t
  misc_feature (86)..(86): n is a, c, g, or t
cgacctgaggattcgtcgactcccgcccagcttaccttggagggttntngtgaacanccacanaaanatctccggcacttntanantgtccttcatccgcaggcagcccgtgagttgtgcggatctcccggcacacagtccggtcatcgtcgccttctcgtatgaattctgttggcggggtgctggaaggccgggctgtggaagtggatgtccatggcctgctgagcctcgtgtatcatctcaaggaagggctggaacatggcgtggaagttcaggggctcgtacggagagaagggcatcaagctgcggacgatgcgggacttgggaaagaagaagtgaggcctccggtggggcaggctgaagggcaggtagtggtaggtatcctggggctcccgggtgaagaacctgtcctggaagagctcgtctatgatgctggacgcgcggctgaagtggtcctgcatgacatccagcatgtgcgtctgctgccggtcgttctccagcagggagtcgatgcggtcaccattcatccagaagtagaagggcgagctctggttcaggaactcctcaagctggcggccaaccaggcctgagccacttctgcagacgcgtgcgtagaacttcatgcaggtctgtttcaggcagggcttacactcttcccagagggccatcatggtctcattgcacactcctgggagctccttcagctttgtctctgattccctggtctcatttagggcatcctctttcttcttcttggcttcttctaggttgctgagcagtgtcttgcgctcttcgtttgttttttctatgagagtctttatctgtttcaccccgttgacagcattttgaatttccttattgacgtacttacttccctgattggacatttcctggagctcattgtctgagaccgtctggtcccccaggacctgcccactctcccaggtcagcagcagccccacaaacagcagcagagtcttcatcatgcctccaattctggagtctttgcacgcctcggtcagcggcaccctgtgcccgcgcgctcctcctggc

SEQ ID NO: 314025 - DNA, 776 bp, Homo Sapiens
  misc_feature (578)..(578): n is a, c, g, or t
ttttttaagtcacaggcgcatttattattgtctggaacatcaaggcctttcctcccctggcagtggcacaagggagggccaactctcaggaggcggccacgctgccaccagcagcaggcccatggggtggcagggtcatgggcggcagaaacagcgccttcagcttgcctgacaggctggcgatctcaggatcctgggcttcgtaggacttgaccaagcgagcaaacttaaggacaccttccccgtcgcagctgaagccataggctttgataacctcctgctggatctgcgtggccacgggcagcacgaattgcagcatcttacccatgtcgttgcaggcgttatcccgagcctcgtccatgcgcactgcattctccggggcggagaacgcctggatcacctccgcgaggaccacctttgcttgctcagcgctcaaggccgccggttgggtcgaggcggacgccatagggcgtctgaagctctaggttcagcggaggtaaatggaaaactcacgaataaagagccacgtcctacaaccgttcccaacgcccctgggagcggaaaggaaacagcatgcnggcgcagccggaaagcgcccaggcgtggcccaaaccttcataccccaagcttacaactgcatcaagaccaccaaaactacccataatttttgcacagtgaaaacaatctatcattggcaacaaacatcataagaggggctttccggtaaaaagccagaaagcctactagacaaattctaaaagagctgtaacactccc

SEQ ID NO: 314026 - DNA, 706 bp, Homo Sapiens
  misc_feature (487)..(487): n is a, c, g, or t
tccaccattttttctcggccctgccagcccccaggaggaaggtgggtctgaatctagcaccatgacggaactagagacagccatgggcatgatcatagacgtcttttcccgatattcgggcagcgagggcagcacgcagaccctgaccaagggggagctcaaggtgctgatggagaaggagctaccaggcttcctgcagagtggaaaagacaaggatgccgtggataaattgctcaaggacctggacgccaatggagatgcccaggtggacttcagtgagttcatcgtgttcgtggctgcaatcacgtctgcctgtcacaagtactttgagaaggcaggactcaaatgatgccctggagatgtcacagattcctggcagagccatggtcccaggcttcccaaaagtgtttgttggcaattattcccctaggctgagcctgctcatgtacctctgattaataaatgcttatgaaattgtaccaccaancccccaaacacaccatcaacccccttgtcgggcccgccttcggccccctccaagaaagctttttcaaaaaaccattttcgtttttgggccccggcggggcccccaattaggggaaagggggaaaacctggggctccaatagcccgggtctttccccaaaaggagagaaatcccctgggggccctggtggaaccaaagggggggcttgtggggaatattt

SEQ ID NO: 314027 - DNA, 775 bp, Homo Sapiens
ttccaggggaccggcactcagcacaccaggacttgcacgggcactggcctctgagttccctcagttttttattgaatactatctttattatttcagcaaaaaggaatgtagtaggagggcagggtgataataagaaggtcagcaacaaacatgtgagcaatagaatctatgtcataatgaagttcaagggaaggtactatgactgaacgtgcatgtaagccagatttatgtttctctccacccaaacatctcagtggagtaaagaatatcaaggcagtattgctgtaaacatgtctcacctcccaccatagggcggtttttctcccatctcagaattgaacaaatgtacaatcgtgttttataccgagacattcagttcccagggggcaggcaggagacagtggccttcctctatctcaactgcaagagtctttcctctttgactaatccacctcagcacagaccttttatgggtgtcgggctaggggaccgtcaggtctttctcatcccacgaggccatagtttcagactatcacatggggagaaactttgtccaatacccagctttcaagggcagaggtccctgacggctttccacagtgcattgtgcccctggtttattgagacgagagaatggtgatgacttttaccagagtatactgcgttgcgaagcatttggttaacaagggcacgttacttgaacaaggccctaacatgccttaaaaccattgatgcgtcgatacaagcaacatgtatctaatgaagcgtccagatc

SEQ ID NO: 314028 - DNA, 439 bp, Homo Sapiens
  misc_feature (312)..(312): n is a, c, g, or t
  misc_feature (337)..(337): n is a, c, g, or t
  misc_feature (356)..(356): n is a, c, g, or t
  misc_feature (378)..(378): n is a, c, g, or t
  misc_feature (388)..(388): n is a, c, g, or t
  misc_feature (404)..(404): n is a, c, g, or t
ttagagaaacaacagtgggcccaggggaccggcacacagcacaccaaggacctgcactggcaccggcctctgagttccctcagtttttattgattattattttcattatttcagcaaaaaggaatgtagcaggagagcagggtgataatagaaggtcagcaaaaaacatgtgagcaaaagaatctatgtcataattaagttcaaggggaaagtactatgactgggatgtgcacgtaagccagatttatgtttctctccaccccaaacatctcagtgggagttaaaggaattaaccaaggcagcatttctccnaaaacatgtcttcaccttcccaccntagggggcggttttttctncctattcttcagggatttgganccaattgttnccattcggggtttttnttacccggggctttccggtttcccggggggccggc

SEQ ID NO: 314029 - DNA, 614 bp, Homo Sapiens
  misc_feature (482)..(527): n is a, c, g, or t
gtcctattggatatttcatgtttaaatagatattctatattaaacactaatttaaatgtaataaaggccaaaggcctctgtatgaaattggatttaaactttcttattttagggaataaaacattattgatcaaacagtatctgttctaacctaaaattataggtagggcaggctaagtgaacagcattgagtattttctgaatccctcatgataatttatagccacatactgcttcctttgacttcaggaatgatcagttttcataatggccactgggcctgcttagattgcagtattcattatctgcatctaatttggtagtttccacaatcgtatttgatgaaagaaacttcagtccccattattacctgtgtctttgccaagctgcctagcatacattcagtatgtaatgtaaaagacatatgagcaagaaaaaagtgattttacttacctcatcaagaatgtgcccctacaaggccnnnnnnnnnnnnnnnnnnnnnnnnnnnnnnnnnnnnnnnnnnnnnncagttgattaacttaaggcaagaatttgagaccaccctggcaacatggtgcccggctttatatacagagagtccttggacctggggg

SEQ ID NO: 314030 - DNA, 424 bp, Homo Sapiens
  misc_feature (24)..(24): n is a, c, g, or t
gggcccatatggaaaacggaccanccccggaagtccaagggaagccagtatgtggcctataaattatccatgagggattcaggaaaatacctcaatgcctgttcaccttagcctgcccctaccctataattttaggttagaacagatactgtttgatcaataatgttttattccctaaaataagaaagtttaaatcccaatttcataacaggagctttggcctttattacatttaaattagtgtttaatatagaatatctatttaaacatgaaatatccaataggacttcaattacctgttgctaaattttccttcacccatctccttaccatgactcttaaagggctttgacgtatattggcaaaatcccagatgatatgccaaattctaagtatggatgctatgtaagattagaagtgcaag

SEQ ID NO: 314031 - DNA, 623 bp, Homo Sapiens
  misc_feature (453)..(453): n is a, c, g, or t
atttttgaaaggctttatacactacatacggcttttaataaacctttttgcagcaagagggaggaaaagagttttgtttgctttatgaggtagggaaatgtggtaggtgtttcatgcggcctaggaggaggatatgaatgaatggatactatggaatgccagtgatctcgataaggtgggaaccatcctgttcatgttcttttaaggctggttttaagcactatgggtagctgaattttctggctttaagaaaatcatttccattagcccaatatattggccatactataggccttttataattttgttagcaagattatcaggactcaggccatcaactgtatttcatttctagcttggacagtctggtaattaaatgttgattggacatcagctttgtcaagacacttttacaaagaagtacagtgcatatccttcatcccatagggcttnttgggttccaactgcgaagacaacactcttattggccacataggtaggacagtgttagttggggtcatgtttatattccagaccgccaaagagaaaagatactgagaacttgggcctctgagaaagttacctggggggggaccagtttcaccttggccctccggctcttt

SEQ ID NO: 314032 - DNA, 597 bp, Homo Sapiens
  misc_feature (395)..(395): n is a, c, g, or t
gtggttttaacagcaggccccggggtcgcgtctacaggtcaggatagatgggctgctcctctttcccccgcctcccgtgagccccgtatgcttcctcctctctggtctgaggaacctccctccccccacccctccccgtggtcttcaggaactttgtctcctgcctgtgcaggttgaggaaggtagttgcaggccaggccagaaggccagcctcatcatcttttctgcagtagaaattggtgataagggctgcatccctcccttggttcaaagaggcttccacccccagccttttttttcttgggagttggtggcatttgaaggtgtttgcggactacttttttcggagttagggagggattgaagactgaaacctccttggaagaataccagangctagctagttgatccttcccaacaagcctgttggaggattttgagatacttattctttatttgagccagtcttgcagggtaacttctcactgggcctaattgtgtgcccaagtttttggcttgcttcactctgtcttacattttagaccgttaggcatataaccttggcttttataagctttacttgcttcccaggagtgg

SEQ ID NO: 314033 - DNA, 1618 bp, Homo Sapiens
ttttttcgatgagcaaactgaactttaatttgcttacctgaaaggcttgctcttcattattggcataggccacagctatttacacagaatcattgtacaggatttacagcaagatgctacacatagcatcattctggataagcgacaaaggagtaagaacagactggggaataaagctctgaaatcaaagtgtaagcagaaatctgaaggtaggtgtacaaggaaggataagggccaaatgatgagcgaggttggtgaggtagacataagggaggaagaggaaacatccaacaacttgtggtgcagagatataagggaagagtccactggcacatagtcttaaaaattatgtttggagtttgaaggaggaaaaatctgccataagccacctctgtgagaaaaaagaaggcagttagaaccttacaggccaaaccttatacctcccctatcaaaaagtaattctgctgattaaatccctggataggagaatgagaaggttgaaaaaagaaagagagagatgcatagacacagaaccttaaacagagttaagagacacaaagtaaatatattcaagagagacacaaagaaagaggaaaagaacagaagctcaggcacatctagaaattagagacatcctattaacttcacgagtcatctttccttacctcatcttccccaaagctcttcctccacccctaaatctctgaatttctaactttaaccaaagagtagaattcgaatgaggctggcacatgggggacgatctaagattccatctcaccaattcaggtcccctccttatcctgtaccggaaggtcagggcttgagtcgtagccagggatagattagggtgagaatagacaggatggaggacacgaggccacaaagccccacaatcccagggccacagcgccagaggcctagtttgtccagaggaatgaagagatcacaggcatttctgaccacgtctagcagaagtgggggatgacctcttaaggactcgagccaggagcaggacttgcagccgaagtttcagagccagttggggcagacctcctcctggagtccctggtcccccaagtcccccagtttcacttcctcctgggactcctcctccagaacctttcagtcgccggctacaagcagaagactcttgctccatcagtaggcgaatctcataagcatcacggctcaaattcatgatgagggaaaacaaatagtacctgaatgaacgctgggcccacttctcctgatccacacggggagccagtccagactttccagcccacaggacattgtcacaggcgaagtacaaggctcgattgaggtgactaacagtgatgcagaatctcaggacaacatctgataggtgaacagctcttttggctgactcaagggcatctgctgagttacccaggcgtagaagctttcttccaaggctcaggtggctctccagttgtcgaatctgtttctgtaactcaggactggctccatgcctctgcagcgcatggccaagaagagagcaagcatactgggcggccctacacagccgctcccgggcttggctctgagcactgaagcggacccaggcgtccatgacagccgcagcccaggctcc

SEQ ID NO: 314034 - DNA, 605 bp, Homo Sapiens
ggcggccccggggcccgcaggagaggggaaagggtgtccatggcggaggagacggaccacctcattctcctggctatcatgaccatcaccttcgccgtctgctccttgcctttcacgatttttgcatatatgaatgaaacctcttcccgaaaggagaaatgggacctccaagctcttaggtttttatcaattaattcaataattgacccttgggtctttgccatccttaggcctcctgttctgagactaatgcgttcagtcctctgttgtcggatttcattaagaacacaagatgcaacacagacttcctgttctacacagtcagatgccagtgaacaggctgacctttgaggtcagtagtttaaaagttcttagttatatagcatctggaagatcattttggaattgttccctggagaaatgagaacagtgtgtgaacacaatgaagctgtcctaataggagtatacaaacatttaagctgtggtcaaggctacagatgtgctgacaaggcacttcatgtaaagtgtcagaaggagctacattgaagatccagctggcctatggatttaagctttcctgttgaatgacgttgtggcttctgttt

SEQ ID NO: 314035 - DNA, 315 bp, Homo Sapiens
gaaagctacacagcaattatttttatgtaacaactctagttcttgacaagttattatgagaaacatttcatctaggagtgatttctaaggcagcatttgagtttccataatttccaagtgcattggtttctcctgttcacaactcaggtttgaactgtcgttcatttgaatctcttcctcttccaattccaaagatttatctggggctgaagctaccacttcttcgtcttcattttcatgtagaaagttacatcatgttgggtcgataggagtcattatcctttatttgcagccattccaccccaccttgttttc

SEQ ID NO: 314036 - DNA, 844 bp, Homo Sapiens
acacagcaattatttttatgtaacaactctaaaaagttcttgacaagttattatgagaaacatttcatctaggagtgatttctaaggcagcatttgagtttccataaaaacagaaccttctgtctcagaaggtatatcaataagaggaccagaatcttctatttccaagtgcattggtttctcctgttcacaactcaggtttgaactgtcgttcatttgaatctcttcctcttccaattccaaagatttatctggggctgaagctaccacttcttcgtcttcattttcatgtagaaagttacaaatcatgttgggtcgataggagaaatcattatcctttatttgcagccattccaccccacctatgttttcttctccttccttcttctctgtcaggagagttcttgtcatgctgagcttcttcattgtatggcatttatattttagcactgttttattattgccttctgtatcagcatgttcaacattttcttcaaatataacacaggtccctagagtgtcttcatactccccagcaaagacacagctgtccacttgcagaatgggcctctcagtgtcaatgcccaaaaccttgcatttattttcacattttgagaggaagtctgaatcaataattcctgataattccaccagaaccaactgctcctcctcttcctcgtcttctccgtcctctggactccgctcgtccgccgccgccgccatggtcccgcggcgcctcgccttctagtcactggccacgcccgcccggagccgccatcttgagtacgggcttcagctccgaggcgaagcaggttattgggttcctgccgctccgctcctcccc

SEQ ID NO: 314037 - DNA, 536 bp, Homo Sapiens
  misc_feature (13)..(13): n is a, c, g, or t
  misc_feature (49)..(49): n is a, c, g, or t
  misc_feature (119)..(119): n is a, c, g, or t
aagccgaggtgcnctgcatggagtatcactgcatgaaaggacatcttcncagggtctgtccctgcatgacaggtttgaggctgaagacagtgcttagaggaccacgagcgaagtagganctgggcctgaatatattctgggcttatgcttatgggtgtgcaaaaatagcttgaagaccttgaagttctggaccacagcacgtccctgccaggctcaccataggagttagcatgctccctctctacctacaggtcttggcccaaatgctagtatctcagtgaggctggttcccataatatagacctctacacaaattatgaccatttattttatgccgcaccccccccaaaacgggcaatatattcacacctacacagacacacattacaatgtcagctgcacaacggcagggagccattgtctggtttgttcactgacgtatcccaagcaccccgaacactgcctggcacgtggccagggccaaaagctcactggtgaataaatgaaaagtgtcccattggttgaatattattaaa

SEQ ID NO: 314038 - DNA, 678 bp, Homo Sapiens
caaaaaagcacttctcctggtggaccatttgattctgtgagggcctggttcccacaacgcccctctagagcccaaatccagtagaggaatgcaatcttccctgaatatccagactccggagttcaaggtgtgaaatagcggagcttaccctcaggaaatccattgatacggtgatgataggcctttgaaggtcgaaccctgcacgcaggatgaaataaatctcttagcagagaaacctgcaatagctcccttgagcattccttggtgctgtgactggctctgtttagactttcttgaactataacccaaaaccttgctgacactgagttactggattccagagctggcctagtcttgttgtgttactgcaacttgtgtgccctgattgcttaatttgatagtgaccctgcccatctactctcaagttgcaatttgatgccatagagcaactcatgctgacttgtggtctggtgggcctccgtttatgtgctcaactctgcctgtgcccctgtggatgcatttaagtctccctatccctaatgggactctcggtcaactcaagagagagcaccttctccaaagggaaaatgcaggcacagagaaaccaaattatttgtttagggaaacagagctagaaatttagttgggccagaattagaaacttcagatcacattgca

SEQ ID NO: 314039 - DNA, 646 bp, Homo Sapiens
ctgagatgctcctggaaaggagttttgggaggaacccatacttagaattaggaagaccaggctgaggccagtttgattgagcagaatgttttctctccatcctctcctctcttctaccaggtgtccggggcagtggtagtatctgggctgctgcagggcatgatggggctgctggggagtcccggccacgtgttcccccactgtgggcccctggtgctggctcccagcctggttgtggcagggctctctgcccacagggaggtagcccagttctgcttcacacactgggggttggccttgctgtacgtgagtcctgagaggcgtgggatggtgcccagtgggggtgtatggggggactaggggagggcagaactggtggtcctatcagattcagcagcgactggaataggcacatatttcatatttggaatccaagacttctccttgattcattctggcctcccttgtttcacactgtctcccgctgctccccacagtcactggctattcccttcatgggagcttccttccctgcgatcaccccccgctttatgatatcctgcccctcccacgtcttttccatcctacgctcctcacggtctctgcttctgccctccgcctctcaggttatcctggctccgccgcc

SEQ ID NO: 314040 - DNA, 1007 bp, Homo Sapiens
  misc_feature (24)..(24): n is a, c, g, or t
  misc_feature (36)..(36): n is a, c, g, or t
  misc_feature (61)..(61): n is a, c, g, or t
  misc_feature (320)..(363): n is a, c, g, or t
  misc_feature (618)..(886): n is a, c, g, or t
ccggaaagctgccggaaaacaaanttggaccaacangagtttccgtcctcaacccggcccngttccaccctgaccctctcggccaaccccgggtacccacctccaagcacctgaacaactttttaaccaggggaaggtgccttccccacaacccagcaggatgccagaaaatattttcccaagagtttgtcgaatccctgaagcatagatttttaggctacaggaataaacaaacttatttctcagtggcaaaaatgtgttgattgcagtggttcctattttgattaataaagatgtgtctgagtctagttacagtgatnnnnnnnnnnnnnnnnnnnnnnnnnnnnnnnnnnnnnnnnnnnntatatataaattttggtttctttgtctatttctgtaggaaagataccaagcagaccaaatgaacgactactaggttaaggattatgaatatttttaatgcacatgataaattttatcagattgctagcagggatattactccccggcagttttactgcaaatcctttccccaatgtactaatcctctattaatacagaggcagtataggcgcaaaaacatggttaatacagtttgaattatttattttattattnnnnnnnnnnnnnnnnnnnnnnnnnnnnnnnnnnnnnnnnnnnnnnnnnnnnnnnnnnnnnnnnnnnnnnnnnnnnnnnnnnnnnnnnnnnnnnnnnnnnnnnnnnnnnnnnnnnnnnnnnnnnnnnnnnnnnnnnnnnnnnnnnnnnnnnnnnnnnnnnnnnnnnnnnnnnnnnnnnnnnnnnnnnnnnnnnnnnnnnnnnnnnnnnnnnnnnnnnnnnnnnnnnnnnnnnnnnnnnnnnnnnnnnnnnnnnnnnnnnnnnnnnnnnnatgccaggcccaagtttgaattaaaaaaatatatatatttgaatgtgcctagaattttctttggcaaaggacctagtagttcttttgaagacaaggtcttgctgtgttgcgcaggttgaac

SEQ ID NO: 314041 - DNA, 1084 bp, Homo Sapiens
  misc_feature (33)..(33): n is a, c, g, or t
  misc_feature (41)..(42): n is a, c, g, or t
  misc_feature (82)..(83): n is a, c, g, or t
  misc_feature (90)..(90): n is a, c, g, or t
  misc_feature (99)..(99): n is a, c, g, or t
  misc_feature (111)..(111): n is a, c, g, or t
caaatatcatttaagagtgtagatagctctatntgtcatanntaaggcaatgaagcattcagatctaaaaaagaatgtgaanntagggcntagacatcntatatgcctaanaacgacacattcagagctttcttaggcactgagttcaaaccagtgaaggtgctttctccctagcaccactacccatcatggtgtcgaatcaggtagacttcttcctggctacccttagggagagtcttctacaccatattatttcctagtttctaggagaaagggtttcagaaagaattttgacatttaaattctatgccagtactgaaactctcccaaagattgaggcattctgcatttgaattttatacagaaagtcatgaatctaattccaaaagaaaagagtgcacttcatttggtcacttaatttcataccacttggcgaggtaggataactttcttctttgacaactgtctcgactatataaatggtgattataccggaaagggttctaatgccttttccacattcttccagttgtgaaaattctctctgtaccattcaattgttttctttattccttctttccaaggcactttaggtctccatcctaagccatgtattttttctgacttcattgggtatctcatgtcattggtgggtctatcattaacataatcaacccaattttccatttcagactctgaattggtctctttgatcagttgtattagttctttggcaagctggacaactgacatttcaaaattggttccgatgttataaatttcacctggtttcccttttttgaggacagtgagaaatgcttctacaacatcagtagcataaaggaagtttcttgtttgaagtcctgacccatggatgcaacatttcctgttgtgctgtagcaaagatataaattttggaataaccttttctggatattgatgtggtccataaacattactgcttcttgtgatgacaactggaagcttatattgttcccacgtaagagctgtacaaagacattcagcagctgctttagatgatgcataaggatttgtaggttgtttgggtgaagattcatcaaat

SEQ ID NO: 314042 - DNA, 870 bp, Homo Sapiens
  misc_feature (118)..(118): n is a, c, g, or t
  misc_feature (414)..(422): n is a, c, g, or t
caataatagtacaactggggctccagaacgagatgtaagaacaagggctcgtaaaagcggttggcaaaaactgtgctgcaatgaaatgttatcaaattccttctgtctttcaaactcncaagatctataattagggaggaatcacagtctgcacctgatgagaagagggtggtatttatagtgctttgatactaaaatatactgtgttatattttggtatatttccgtttctcttcctgactaatcttgcaaggaatttgtttaattgtggaaacagcaatttcattttaagagcctatagatgatgtctataatacacatctatctcaatgtatgaaatcttttttaaatgacaaaatcaagaaagcctacacaaattaatagagtatttaaagctaccttccccacctgccnnnnnnnnngagtacatggatatgcaaagacataattaaacagagctttacatatttttcattttatgatgaacaacagtttgggaaacattaaaatacatagggaatacaaatggatacataatcaaacatgtcacatttctgccagttgcttgcagaaagaaaactcttctgtgagatatctttttccttgataccagttcaaggactgatttaatactaaaaataaacttctcttgaaaaataacaaagacaatcacaatttcataaaagcaaatatacttaggatttttttctattattggatctactttctattgcaatgaaggacttatatcttttttcattcctcttgaagatgttggagcacacattaagagaatctcagcggggctcagtggtgggaggaacccttaagcccaggagttcgagtcgagtctgggtgagacctcatctc

SEQ ID NO: 314043 - DNA, 410 bp, Homo Sapiens
atcgcggcgggcatccctggcgccagggtgttggtctgggtaccggcttccctctcggccgacttgtcagctctgtgagccgcgcgcgtctgagcccgtgtcctcacctgtaaagtggagaaatgattttcagatgaaattctcgcaagtcagggtggggatggatggtttcatcccacaggtgggaagattgaggcacaacaggggaggggccctcgctaccacacttaggaggggacaggctgggttggttgcagccatttgattcccattttgcctgtgtaggttagagaagaggtcttggggaccccactccatacattgtgctgtcaggtgcaggcctttttggggattccctgaatgttcgtgtgagtcgggggtctcttggaggagtccagcttcactgtgtt

SEQ ID NO: 314044 - DNA, 428 bp, Homo Sapiens
gctgcaggaattctgcacgagcacacatcttctccaggccagagcaaatcttacccaggcctcaaatctttattctggacaagtacaacagcctggtcagacaaatttttataacactgcccagtcaccaagtgctctccagcaggttacagtacctttaccagcatcccagctttccttgcctaattttggatctacagggcaacctctaattgctttgcctcagactcttcagcccccattacagcataccactccccaagcacaggctcagagtctgagtcgtcctgcacaagtaagccagcctttcagaggattaattcctgctggaacacagcatagcatgattgcaaccacaggaaaaatgtctgtggaactgcctttggaagtggcattgatatctttcgggctacttctacaagtccgac

SEQ ID NO: 314045 - DNA, 723 bp, Homo Sapiens
  misc_feature (554)..(554): n is a, c, g, or t
  misc_feature (614)..(614): n is a, c, g, or t
  misc_feature (657)..(657): n is a, c, g, or t
  misc_feature (663)..(663): n is a, c, g, or t
cacacatcttctgcaggccagagcaaatcttacccaggcctcaaatctttattctggacaagtacaacagcctggtcagacaaatttttataacactgcccagtcaccaagtgctctccagcaggttacagtacctttaccagcatcccagctttccttgcctaattttggatctacagggcaacctctaattgctttgcctcagactcttcagcccccattacagcataccactccccaagcacaggctcagagtctgagtcgtcctgcacaagtaagccagcctttcagaggattaattcctgctggaacacagcatagcatgattgcaaccacaggaaaaatgtctgaaatggaactaaaagcctttggaagtggcattgatataaaaccaggcacacctccaatcgctggtagaagcaccacaccaacatctagtgccttccgggctacttctacaagtccgaacagccagtccagcagaatgaacagcattgtctaccagaagcagatccagtcagaccctgccactgtgagaatgacacaaccatttnctacacagtttgcaccccaggcaaagcagagagcagaggttcttcagtccacgcaacggntcttctctgaacagcaacagagcaaacagataggaggaggcanagcccnaaagtggacagtgatttaagtctcctgcactgaccgacctctggtgtcttgcaggttgag

SEQ ID NO: 314046 - DNA, 965 bp, Homo Sapiens
ttccaccaccccccttggggaccacgaaaactatccgtgcttaaaggtgtaagtcccacgttttatcagctttctgacttcttcataagaaacgacagctgcagccaccatcatttattcctgaagcattggctggggtgactgttcccgttccatcagtaagaaagtaaggctttagcttggacatggcttctatgttgctcccatggcgaggaaactcatctgttttaacttcaataagacctcttctagttgacaccaaaactggtacaatctctttgtcaaaatggccagctttctgtgcattctctgtcctgttctgggacagaactgcaaccttgtcctgatcttctctactcacttgccattttttggctacattttcagctgtaatacccatatgacagttgtgaaatgcatctgtaagaccatcacagagtatactgtcagtcagtggcatctcacctatctttactcctgttctcaagtaagccaagtgaggagccttgctcatattttccatgcctcctgcaaccacaatgctggagtctcctatccctattgactggactgcaaggcacacagcttttaggcctgacccacagatcatctggcagctccatgctggaacagagtagggaattcctgcacccacactggcttgtctaacaggattctgcccacagcctgctgccaagacatgtccaaagatgacctcagacacatcttccggagccacagtggccctcttcaagacttctttgatgacagtggagcccaggtcctggacaggaacagcagctaaggcaccattgaaggaacctatgatggtccgcgccgccgagacgatgaccacaggatctgagcctgcattcatcttgcttctcctgccgccgtctgccctgcgctgcctgcaagctaggcaaagccctcgtgccgaattcgccacccaggcctcgctacct

SEQ ID NO: 314047 - DNA, 1331 bp, Homo Sapiens
gtaagtgcaaaactactgtaagataagtggagttatttgaaaaagtgtgtccagctgttgtgaatttaggcaactcccttcccttcttgggcctcagtttccccatacgtcaaataaaggagttaaacacgaggatgaggtctagaagcctgtcctgccccgacagggcccatggctcccatttcaccactctttttcctctgttgagaacagcattcctgggagggcagttgcatcactttggtgtcggctcctctgatctctgtcccctgtgtggcttttcagagcacaggggctggagaattgaggcagctgctcagctctggcactttgtcccggctgcggccagagatgaagggattcagagccagcctgcaataaagctgggcctctgggtagaggtcatccagacatgccagtctcactgccactgctgggaacaggcctcatcaaacctgtcacagatgctcgccaggggagcccctcaacgcttgtccagcctccagtacacaccttcaggtccccacagtggtcattccaagaggctcatctgtggtttgtgttattctccagctcaaagtgttggcaatgctcctgtgttgagctacagcagtgtgtccctaagagacacccattctgagagacactcagctgcaggaacacaggtgtggtcactgaagtttggagaagcagcttctctgtctctgtttccctgacctccttgcagtgcaccaagtccttggctgccacctcccaaagaacatgaacttggctgtgtccttgtaggctgacccctccatcgatgacctgcttctgctggctgtgtccagggtggcctccctgaagccaccagagcagaggcctggtatcttctcagagcagcagccaaccaggcagctggaggaaacccctggtctctcctgcagccaagtgagtgtcttcaggaccctacttgctgcctctgtattggctggtgcaggcctatttcacctcagtatctccccaagagaaaaggggagaccctcctcccatgtcacattcagaagaggcctcctagtaactggcctgtaactgtgacaactctggtggatctaggcacataagcagatagccattcatcagaaggcatgaccaaatcatcacgtggccatgtcaggagaggctgtaagctcagctgcaggccctgtctggaagcagtgtccccctctgacctcaggaggggacacagccatcctcctgtccaaagatcagtcccaatttctttcacggctgtccagcctcgtgccgaattcgccacccagcctcgctaccttacaccgtggagtactgcc

SEQ ID NO: 314048 - DNA, 1683 bp, Homo Sapiens
ggaagttttcttgagggggcggagaggggcccgccacaaataaattatagggcgtagtatgctgtcgacgggagagggtgggttgtcgcgacggggaggtcgtttaagtatatggggttgaatgaggaaaggtggttgatggcatgatcggttgtagggttagagggggtggtgttgttggatgtgatctgatgttccttttatttataacaatgttaaatgcaattgtcttgtaccgtgagttgagtattacacattaaagtaaagtacaagctgtaaacttgggtttttgtgatgtaggaaatggtttccatctgtactttggtcctctgatttcacatattgcaacctagtactttattagtttaaaaagaaattgaggttgttcaaagtttaagcaattcattctctctgaacacacattgctattcccatcccacccccaatgcacagggctgcaacaccacgacttctgcccattctctccagtgtgtgtaacagggtcacaagaattcgacagccagatgctccaagagggtggcccaaggctatagcccctccttcaatattgaccttctctgggtttaatccaagttctttaactattgcagcagagacagctgcaaaggcttcattgatttcaaatatgtcaacatcttccagtgaccaacctgcttttgtaacagcttgctttatggctggaattggtcctattcccataatggaaggctccacacccacttgggaccaggaaactatccgtgctaaaggtgtaagcccacgtttatcagcttctgacttcttcataagaacgacagctgcagcaccatcatttattcctgaagcattggctggggtgactgttcccgttccatcagtaagaaagtaaggctttagcttggacatggcttctatgttgctcccatggcgaggaaactcatctgttttaacttcaataagacctcttctagttgacaccaaaactggtacaatctctttgtcaaaatggccagctttctgtgcattctctgtcctgttctgggacagaactgcaaccttgtcctgatcttctctactcacttgccattttttggctacattttcagctgtaatacccatatgacagttgtgaaatgcatctgtaagaccatcacagagtatactgtcagtcagtggcatctcacctatctttactcctgttctcaagtaagccaagtgaggagccttgctcatattttccatgcctcctgcaaccacaatgctggagtctcctatccctattgactggactgcaaggcacacagcttttaggcctgacccacagatcatctggcagctccatgctggaacagagtagggaattcctgcacccacactggcttgtctaacaggattctgcccacagcctgctgccaagacatgtccaaagatgacctcagacacatcttccggagccacagtggccctcttcaagacttctttgatgacagtggagcccaggtcctggacaggaacagcagctaaggcaccattgaaggaacctatgatggtccgcgccgccgagacgatgaccacaggatctgagcctgcattcatcttgcttctcctgccgccgtctgccctgcgctgcctgcaagctaggcaaagctcctcctcgcagcccacaggcctgccgcgggcccc

SEQ ID NO: 314049 - DNA, 2394 bp, Homo Sapiens
gaattttcacaaaggtgtaaatttattcctaagcagttaaaatgaaaatttgagtttgaaagggtagcatgctgatacattaagaggaaaaagacaagtttaagattttaaactgtgtccacagaagaataaacaatctaaatcttttctcccccgctaggtcaatattgaaggaggggctatagccttgggccaccctcttggagcatctggctgtcgaattcttgtgaccctgttacacacactggagagaatggggcagaagtcgtggtgttgcagccctgtgcattgggggtgggatgggaatagcaatgtgtgttcagagagaatgaattgcttaaactttgaacaacctcaatttctttttaaactaataaagtactaggttgcaatatgtgaaatcagaggaccaaagtacagatggaaaccatttcctacatcacaaaaacccaagtttacagcttgtactttactttaatgtgtaatactcaactcaaggtacaagacaattgcatttaacattgttataaataaaaggaacatcagatcaatcattaagggctccagagtgaacagcatcttcataacttccatgtttatcatctttactttctggatgtaatttaataagatcatcaattcgaagaatggtgattgcagcttctgttgcaaatttcaaactcttaactttaactatggttggttcaaacacccctgcttgtttgttgtctcgaggtttaccattgctcaaatcaagaccaatccattttagatttttacgttctgggttaacctgggcctcattatgaaaagctcttaattttgcaaccagatctgtggagtcctgggcagcattaactgctagtgtattgggaataacaagaagtgatcttgcaaactctgcaatcgcaagctgttcccgagaccccatgctggttgcatagttttcaaggtatatggaaagggctgcttctacagcacccccaccgggaaccacagattttgactccaaaactctcttcactacacaaagtgcatcatgtaaagagcgctccatctcatcacacatgaaatcatttgccccacgtaagataatcgatgcagacgtacgagccttagtatttttgattaagatcagctcatcatcacaaattctctcctgtaccacttcttctgcctgtcccaacattgcagcttcaaaagtttcttcaccttccaaattggccagggttgacagaatagttgctccagaagctttggcaatgcgtttaaggtccctttttaaaactcttctaactgccatagcaccagcctccacaaaatacttcagacacatatcatcaattccaccagtggttagaataacattggcaccagttgccaggatcttctgaattctctccttggtgatatctgattctctctgtctaatttggtccagtttttcagggtctgtaatgaccacctgtacaccaagcttcatttttgttttttgcaggctgaagtcaaggcaagcaatttttgcatttacgattctcttgggcatgccctgggatcccaccacacagttgagtgcatagccactgatgagcatactctccatttgacttctcccatgggctttcaaaatattaacagagttgactggatagcgtggctggcctcttatgtctgtgtatttaatagcaagtacagcatctactaccatgttagcaaagaaatcaccatttattccaatgattttggaagacatggatgtcttagcagcattaatcaggcaatctcttcccagttcatctgtgttaacaattaggttttcattgatataacgcactgcttccttgcaagcaagtcgatagccactaataactgatgtgggatgaattttctgtttgactaattcatctgcattttttaggagttctgctgcaataataaccactgaagtagttccatctccaacttctttgtcttgcagatcagccagctcacaaagaactttagctgcaggatgttctacctccagtaacttcaggatggttgcaccatcgttagtaatggttacatcaccaatatcatccaccaacattttatccaagccaactggaccaagagaactttttacaatattggcaatcgaagctgcagccataacgttttgggagcggatcgtttccccagtgctgcggtcaccgaacacggacaaaggcccctccatcttgacggcagcgatacacgtcgaattctgcttacaccgcgggcaaccagtatcgcggcccctcggccgaccggcgaccacagcagtggctgcgacggcgtggagcgtacccgagcgatgtcccaggagctactgggtaacacaccaccccacccgcttcccggctgccccggccc

SEQ ID NO: 314050 - DNA, 559 bp, Homo Sapiens
gcacaagctgtcttctctacatagtacccggtccccacatcgatgagcacgtgttccacatcccctgtgaaagcaatgaagacaaacacctggggaaggttagcggctccaacgtaagacgtttaaagagagttcccaacagggcacagcaccccacagacagtgtgaaaagaacggaaacaggggcaataggagcagaggaatgtcctgtacttttcaattctaggcaggcaacatgcaaagggttcatgaagcggtatacgatatgtaatggattttctcgtttcaggtaagaaaaactgggttaggaggtgggacgagagaagcaggttcgccactttaggttaccctcacccgcctaccccataccctcgttgctcttgttcagcacgttcagacagtccttggcttccacatacttggtctgtaccactttgagctgagcaatggacgtggacaagaactccacttcctggtccagctggttcttgagcatttctagctgcggcagattcagctccgtgatgttaatagactgcgccatgttgggaaggccgac

SEQ ID NO: 314051 - DNA, 930 bp, Homo Sapiens
  misc_feature (68)..(76): n is a, c, g, or t
  misc_feature (118)..(190): n is a, c, g, or t
  misc_feature (237)..(275): n is a, c, g, or t
  misc_feature (287)..(315): n is a, c, g, or t
gtttgcaaggccggcggatttcttggcagaaaaaaaagggttctccaagaagatcctttggaatcccnnnnnnnnngcccggctcattaggcgggggtaaattccccggttactgcannnnnnnnnnnnnnnnnnnnnnnnnnnnnnnnnnnnnnnnnnnnnnnnnnnnnnnnnnnnnnnnnnnnnnnnnaccactttgtacaagaaagctgggtcaggaaacagctatgaccatgnnnnnnnnnnnnnnnnnnnnnnnnnnnnnnnnnnnnnnngcctcgagtttnnnnnnnnnnnnnnnnnnnnnnnnnnnnntctgcccagctggcacatttattggcattaaaacacaagacccttcccatcaccaggaagccacgcccaaagggtgtccctctgccccatttctgcaaaaactctcaggccttagcagtagcctgagctgcccccagggctgtgagctgctgaatcttctgactcatcatttccatgacggcctgtttcatggcgtgcttctcctgaagagctggttggattttctccatctgcttggttagaaaatctatcttcctcttgaagaagtccttggcatcctcagctgtcttctctacatagtacccagttcccacatcgatgagcacgtgttccacatcatgcagcttcccagggacatacatagaactcgtcagtgggacgagtaattctttcccctcgttgctcttgttcagcacgttcagacagtccttggcttccacatacttggtctgtaccactttgagctgagcaatggacgtggacaagaactccacttcctggtccagctggttcttgagcatttctagctgcggcagattcagctccgtgatgttaatagactgcgccatgttgggaaggccgacttaacgaagaggaagtctctcggcgagcccc

SEQ ID NO: 314052 - DNA, 480 bp, Homo Sapiens
ctttcgttagttaatagtgcgcccagctggcacatttattggcattaaaacacaagacccttcccatcaccaggaagccacgcccaaagggtgtccctctgccccatttctgcaaaaactctcaggccttagcagtagcctgagctgcccccagggctgtgagctgctgaatcttctgactcatcatttccatgacggcctgtttcatggcgtgcttctcctgaagagctggttggattttctccatctgcttggttagaaaatctatcttcctcttgaagaagtccttggcatcctcagctgtcttctctacatagtacccagttcccacatcgatgagcacgtgttccacatcatgcagcttcccagggacatacatctggtccagctggttcttgagcatttctagctgcggcagattcagctccgtgatgttaatagactgcgccatgttgggaaggccgacttaacgaagagccc

SEQ ID NO: 314053 - DNA, 361 bp, Homo Sapiens
  misc_feature (28)..(28): n is a, c, g, or t
cgccagcaacaagcaggagaccagagcnccactataagccatagacagaccaactaagcctctgaaaacctcctaaggatcaagaatatatataaataagcgggtgaaaagtatgctcccaccatgaaaagtgaatgtgtacaatccttccaaatgctacttctgagaacctttccaaagaaaacgtatcagaaacaaaaacacacacaaaaggatggggacaaatgcacagagacaaattaactatgaataataataaagtaaaaacaaaatatatatgtgcatatgtaagggagtagtttagtcaactatctacctaattggatattaaagattacgaatatttacaagaatttattta

SEQ ID NO: 314054 - DNA, 1050 bp, Homo Sapiens
  misc_feature (1)..(1): n is a, c, g, or t
  misc_feature (4)..(4): n is a, c, g, or t
  misc_feature (8)..(8): n is a, c, g, or t
  misc_feature (13)..(13): n is a, c, g, or t
  misc_feature (17)..(17): n is a, c, g, or t
  misc_feature (35)..(35): n is a, c, g, or t
  misc_feature (39)..(39): n is a, c, g, or t
  misc_feature (44)..(44): n is a, c, g, or t
  misc_feature (48)..(49): n is a, c, g, or t
  misc_feature (65)..(65): n is a, c, g, or t
  misc_feature (70)..(70): n is a, c, g, or t
  misc_feature (80)..(80): n is a, c, g, or t
  misc_feature (92)..(92): n is a, c, g, or t
  misc_feature (100)..(100): n is a, c, g, or t
  misc_feature (127)..(127): n is a, c, g, or t
  misc_feature (144)..(144): n is a, c, g, or t
  misc_feature (146)..(147): n is a, c, g, or t
  misc_feature (199)..(199): n is a, c, g, or t
  misc_feature (227)..(227): n is a, c, g, or t
naangaantgganaganagcagttgcaacctaaanatgnttgantttnnttcccatgagaccccnccacnagtattgggncttgcactattncttagatnggtccagttctgaagtttgattaagancattctcttggagatanannttatataaatcttgtaatgtgctaaattgtcaaattgttaatggtactaaanactcaaggacattattttgtatgccccntacatttctgcatcatcgtcgtcgtcatcatcatcatctttggctctgaaatgcatttttctgaactctcgtctgctcattgaaggacaagatgaagacgcaggtgggaggtcctgcatgagctcaacgtttccaaagaaccggctcacgggcattggctgattgctgtcgtcatctagaaagacgctgttgtccatctgaagtggtggcttgtgcacatcctctgtctgtagccctggctcattctgcttctgcacagtggagctgctgttggattcttctgctccggacccggcactgtgttttggcacggacaggccatctctagtctttgctaagcgagagtcactcacatctctgcagccaccgagaggaagacttgcagccccctgctgcacagaaacgccagcctcgctgcctggaagcaaggcactgccttcagcaaactcattttcacaaggggtctcaggtgtcacggcaaagaagcgctgtcattcttagggacaagcttctgtaattctgacttcacaagatgtccgtcacatttgaacttcttggacgttcgcctgtctgtggctttgtgggatgaggaagtcagacatgctgtcttggcagacgtggaaccagcaacttcctgggcagaggccaacctggctgccgaacaacttcgtgctttcaagcgcgctgaagaccgcactgcacctgtgagcttccggctcctcatgagtgtgagcaccgcagccaagcaccgcgcgccccggccaacgcgtcccggcggagcggcgacccggagtctgcagagcgcgccgcggcggcgtccgac

SEQ ID NO: 314055 - DNA, 1324 bp, Homo Sapiens
gttttttccaaaataagacatttcattttatttctgaaatcagaataagtcggtgagagtagaaaccactaggtcgagagcaagaactctcccccaaagtggagagaatatttctccctaccctgggctgcggatgccctggaaatggggcttcttcctcccacatgttctgctggcacaagtccccttgggcgggctgggctgaagtgggcagggttgggcccctttcacccacccagaaacatgggttcactgaacgtcaggctctaggatctcgagggggtccgcagtgcgcttctgacctggcccagcaagagcactcctgacagcctcacagacagaaggagctgcagccaggtgtgcctgagcctcagtgatcgagcaccggaataggaggctcagcaaggcgatgggtatcacctgttccttctcatgtgcaacctggacatggcaggagatgggagcagcccgaatatcatctgacagtggctggggaaagtggatcgctcggaggaggctctcgatgcatcgagccttggactgtccagagaaccgctgcagcatggccagcgcccgccagaagagcttggagttgctaatccgaaggtccaacatgtggttttgtaggatcttaccaagaagcacatgagcacctgtactcactgtattcagcacccatttggtgctttactcacgctggaacttctggatgaagttcccttcatattcaaagaaaagcagtggccatgtgatgctgatgatggagggaaagagcttcttcagagggatcggcaaggtctgacccacggtgctgtgtgccagggcctggatgtggttggtcttctctttcacctgctccactatagtctgcacctccgtgaggttgtcatccagggtgaaaatgaagaccacagtatcgatttccgtgagagagggaaggatggaagtcaggaagtcctcctgggagaaggtgaactggggaccctggggcagaagaagatgggagggtccctcccatgaaaacactctaaagcacagacttgaggactaaagggggccgtggaggagatctaacacttttgtgcacaggtgaaagagctgaagttcaaaaggtacagtgttttgcccaagattatgtaacaagtcagtggactagggccaagtttggggactggatctagagctttccacactgcccatgctaagccaaagcctcatgacttctgacccatattctcttctctggaccgtctattccaatgaacttcccacctagctccgccttccccttttcttccaccctcagcacactagtggtctcccc

SEQ ID NO: 314056 - DNA, 728 bp, Homo Sapiens
gtaggattgtattagttcttcagatgtttggtagacttcagcaatgaagccattgggtccaaggcttttctttactgggagactttctgttacggctttggtctcattacttactattggtctgttcaggttttggatttcttcctggttcagtcttggtaagttatatgtgtctaggaatttgtcccttcttctagattttccaatttattggcatacagttgctcatagtagccactaatgatcctttggatttctgcagtatcagtagtaatttagtctcctttttaatttctgattttatttttaaatgtgcatactttttaagaaagaatttctaaagaaaagatacatatgccaaaatagaagtataatattattcatcactttatgtataacaacaaaaaaattaggaagtaacttaaaagactaaatagtagcctgttgactaaatacctttgatttgcagtgtggcagttcatcagatgtttattgtgttttgtgtttacgtctgtgtatgatagccctaaatagaaatataagatacagttagtttgaggagcattgtattatggagagttgggtacacatgtgaaaagtgggatagtatcagttgatgagagaaagagccttgcctcttctttatatcttttcttagaattgaaggtatgccctatgggaatagggccttattaaatgttaatgattaacattttggttttgttttt

SEQ ID NO: 314057 - DNA, 634 bp, Homo Sapiens
aacaagtcctctcatcatagggtagtgaaagattctgcagtgagctaatatcatgtaatactcttcgcaactggcatttctatggctgaaggaggattcacagagcacactcggtaagggtaggtggcatgtctatgtgagtaaggacacccgaaaggggaagcgaaggcactacaagtagcccctgatatgttgggaacactgtgagtgctcagagttcttgtgtgctcacacaggggcctttcttgccactcagagtggatggaatgaagggaacaggtagactgagacattggtggtggagcaagccgtgaacaggtaggagtccttccatgatggcattcctccacccgcggcgcctcactctggggggcttcttctttcttcacagatgatggagagaccaattcctgctcctcttcaggtgtgtacttataggtgaaggaaggtgggctgcatctggtctccctggagataatcgaacattgacagaggacacaacccttactgggctcaataaggtggttggtaaagactgagaccttcttagaggatagccagcttttgcaaataagtacctttgttttaacaaatcttttgattttagcaggctacgccccatcctttctcgtgc

SEQ ID NO: 314058 - DNA, 959 bp, Homo Sapiens
ggggtctgagacatttaataagtaggtaccactccacccactgtcctctggggcagccggcagaagatcccctgccctgggtgacagggccctgatctgaggctggtttcacggaggacaggcagcgggcaccccactggtggggtcgtctctcggggcactgacttctcagcactggagctgtgtgccggcctcacctcctcacttcgtccaggacgtggaactggtctgcagcctcgcagaagccgtacttggggaagtagaagatctggtcctcagtcaggtgggcctcctggacccgctgctcaaacccactcaggcccgagtcgctcacagggagcgagcgggcgcagggcagacagggcctggggtcctggcaccaggcggcgtggagggctctgggaacggggtctgtgtgtcccctgccccctcggggccctctccctgctcccacaccaggcctgtctgtcactactccctgggcccctgcttagcaggaggatcaggatgggagaaaggaagtgtgtccccatgggctcacccagcccctcggggtggcccagtgagtgtgcagagcttgagcgcctgcctggtcacagaggctggcccccacataccgtagagcttcactgacagctgccccgcccgctccaggtacaggacagcgaaactctggtagtcggtctcagcgacaaccacgtgcacagcccctcgggcgcctcgggctggggcagagccacagtagccatgtcagagagccacagtggctgcgtcatcccccacccacatgccctgcagcccctgcctcaccttgaagcaggaagcggccgaggacccctgtgtctccatagagctggcgcacctgccagcagatcccatccctgggggggcggggaggaggcaccacaggctgggcgcccccacccaggaatcctagtccaggccacagccggggtggg

SEQ ID NO: 314059 - DNA, 861 bp, Homo Sapiens
  misc_feature (595)..(670): n is a, c, g, or t
ggtaccggcccggaattcccgggatatcgtcgacccacgcgtcgcagttcaagcctattcgggtgtcggaaccagtgctttccctgccggtgcgcaggggaagcgtgactgtgctcagtggatatgctgctgatgaaatcactcactgcatacggcctcaggacatcaaggagcgccgagcagtcatcatcctcaggaagacaagattagatgcaccccggttggaaacaaagtccctgagcagctccgtgttaccacccagctatgcttcagatcgcctgtcaggaaacaacagggaccctgctctgaaacccaagcggtccccaccgcaaggcagacccctgatgctgcccacaggccccggaatcctggagatggacaaggaagagaaccggcgctcggtgctgctgcccacacaccggcggaggggtagcttcagctctgagaactactggcgcaagtcatacgagtcctcagaggactgctctgaggcagcaggcagccctgcccgaaaggtgaagatgcggcggcactgagtctacccgccgccctcctgggaactctggctcatccttacgtagttgcccctcctccnnnnnnnnnnnnnnnnnnnnnnnnnnnnnnnnnnnnnnnnnnnnnnnnnnnnnnnnnnnnnnnnnnnnnnnnnnnngaatccaaaaataatttttcccctggggtttttggttgcccggttaaggcgctgaaaaaattaaaatttggggcccagaacactaggtgttccccaaattttctgggggaatccccccctggaaatggaaaagggctttttgggaattcacttagggggcacaaaagctctcacgcttgtaaatcgggcca

SEQ ID NO: 314060 - DNA, 371 bp, Homo Sapiens
  misc_feature (15)..(15): n is a, c, g, or t
gctcacagacaagancagaatgtctaccggtggtgatccaagagggacaaaatcaggggaacatacaagtttgtgcttcacgtgtcccaggactgtcatctcccctgtcctactgtctccaaggcccacggacaccagctcctgcaggaaggagcaggcagttcccatggtcacgtccagagtcaccttgcccaagaggagttgcacccttccagacttgcggatgagtagcttgccaacctgaccctctgtcaggtcagccagggtacaagcattctctgccaatttggcttctcggtctttctcctgcttgatgagcaccacctgtccgtcctcgccctgcacctctgtcttgataggcttgatgtcct

SEQ ID NO: 314061 - DNA, 520 bp, Homo Sapiens
catgaactcctcctggaaggttttcagggctttgtcggcagcttcgtagatgggcatgtcgttgtggcggatgtactcagcgagagagcaggaccagcctccctctgtgttactggtaggcaccttcttaaacatgttgtaaatgagatcgacgagggcccaaaagagaagggaagaacggtaagcggaatagtccttcactgccttatctgtcagcctggtggctccacctggagccactgcccgagcctgcgaggtcaccaacagcctccgcaagatttccacacgtgtggctctccactgctcagggggcaggatgtgaagggccaagactgtgaaatagtagggcccgtccacttcaaaggcactctccacccacttctccttgggctgttccagaaagccttggaggttcttctcttctcgggaagttgctcgggttctagaagaaaagcggcatgataaaataaaagcagggtggaagcaggacccggcagcaagagcaggaagaatttgctca

SEQ ID NO: 314062 - DNA, 1652 bp, Homo Sapiens
agttttccaggggctttgtccggcagctttcgtagatgggcaatgtcgtttgtggcgggatgtactcagcgagagagcaggaccagccttccctctgtgttactggtaggcaccttcttaaacatgttgtaaatgagatcgacgagggcccaaaagagaagggaagaacggtaagcggaatagtccttcactgccttatctgtcagcctggtggctccacctggagccactgcccgagcctgcgaggtcaccaacagcctccgcaagatttccacacgtgtggctctccactgctcagggggcaggatgtgaagggccaagactgtgaaatagtagggcccgtccacttcaaaggcactctccacccacttctccttgggctgttccagaaagccttggaggttcttctcttctcgggaagttgctcgggttgtgttcaggacgtaaagcacagtgtgaatgatgtacgggatcaggtggatgttgctctcccggccgcccccgccagtgtctgcgctgaacgactgctccatggcgaagcgcaggaagagcagtttgatgtcgtggatgttgagctgatacgtgggctcccgctggcctgtacattcctggaggtaagtgttgtgtcttgccaagcaagtggcaaaagctgattcagggacatgaggtccccagaccggaaggagcccgttgcacttggtgttggcattctgcagggcggcactctcccactcttcccggcctcgagccaacctgacggcagccagatggcagtcgtagtgcacaatgttgaagtgggacacggtgctgtagccctgctgtttccggggcttattctccatctcctccaaggctacccgcttcgtgaaggtataaatgcccaggacctttgtgggctggaacttgtatccctccctgcagatgcagcacgtgaggccaggctcctcgatcagctcttgcccatctgcttcaggagtgctgtcttggtccggacctggcccttttcatttgtcgtcatgcccagggtgcccagggccttctgcctcattgccatggccattgcgtttcttctctgcccgggtctccctgcgggctgcgtcaatctttcttgtttacgtcaggggtgttcccgcagggcttccagcaggttctctgccaaggtcccaatgccctcatcactggacacctgctccagcttatgcaggttcgggatggaatcagttccaatcagaacctgggtgccagggtgctggatggccaggccccgaagcagccttaggataaatggcaaggctgggcgagacaaaactttttccagatgtcggcatccaaattcttggcgctagggatgtgctttttcatgtagtcaagtgcattctgggtgatccccttctggagaatcagatccttcagctggtgcccattgctgttgttcttgatgccagcagctattttacagaagcagtccaggaagactttatcatcaccactgtgatcttcatcatatttatcaaagttgcagtatggtttgaatcgctccaccaagatctgcattttctccacctctccaaaggaaaggtacgggatgatgcgaagcaggcctggagcacactgggttgcgacgcgtggtcgacatatccctacttcccggg

SEQ ID NO: 314063 - DNA, 631 bp, Homo Sapiens
cggaagcgcagccgggtcaccgacaaagtcctgaccgcaaacagcaacccttccagtcccagtgctgccaagcggcgccgcacgtagaccctcagccctggtggcggcagagaagcgggcgaggcactgtggtcgctgagggggttggctgggtctgagtgccaccccccaggccacagtgataccatcccagtgccatgagcccacactggccgccctcaggctctcaggtgaacgtggccgtcagcggggaaacgtgtgtgtcagttggaccatgtgggaccctgatggacctgaaagaccaggatcggtccagctcagatattgagggctctgaagcctagttctgtcttctctggagcagctgtggcttccccgtggctgcttggtgacatggattagcgctacgtgggctgcagcatttgggatccaggctacctagaggggcatcgggccagggcctcggattagcaagcaataagttctttccatctgtttgtcccgctgcaagcctctttctgcgctgactgtgacatcggaacgtggccttcctgtcaccccctccgtgccacgcactgaaggccacccccacccacctgggctaagctggatattttgcctcattccttgt

SEQ ID NO: 314064 - DNA, 1319 bp, Homo Sapiens
gggtcccgccgggggctccttgctcggccgggccgcggccatgggagaggccgaggtgggcggcgggggcgccgcaggcgacaagggcccgggggaggcggccaccagcccggcggaggagacagtggtgtggagccccgaggtggaggtgtgcctcttccacgccatgctgggccacaagcccgtcggtgtgaaccgacacttccacatgatttgtattcgggacaagttcagccagaacatcgggcggcaggtcccatccaaggtcatctggggaccatctgagcaccatgtacgacatgcaggcgctgcatgagtctgagattcttccattcccgaatccagagaggaacttcgtccttccagaagagatcattcaggaggtccgagaaggaaaagtgatggatagaagaggagatgaaagaggaagatgaaggaagacgtggacccccacaatggggctgacgatgttttttcatcttcagggagtttggggaaagcatcagaaaaatccagcaaagacaaagagaagaactcctcagacttggggtgcaaagaaggcgcagacaagcggaagcgcagccgggtcaccgacaaagtcctgaccgcaaacagcaacccttccagtcccagtgctgccaagcggcgccgcacgtagaccctcagccctggtggcggcagagaagcgggcgaggcactgtggtcgctgagggggttggctgggtctgagtgccaccccccaggccacagtgataccatcccagtgccatgagcccacactgcccgacctcaggctctcaggtgaacgtggccgtcagcggggaaacgtgtgtgtcagttggaccatgtgggaccctgatggacctgaaagaccaggatcggtccagctcagtatacttgagggctctgaagcctagttctgtcttctcctggagcagctgtggcttccccgtggctgcttggtgacatggattagcgctacgtgggctgcagccatttgggatccaggctacctagaggggcatcgggccagggacaacctcggattagcacagcactaaagacatgacctcactcttcctcaaaggagccctggtcttccctgtgtgactcagttctttccatctgttctgtcccgctgcaagcctctttctgggctgcctgtgacatcggaacgtggccttcctgtcaccccctctgtgccacgcactgaaggccaacccccacccacctgggaaactaagaactggatattttgcctcattcacttgtactgtaacaatgtatataatttggttttacttccaggattaattttt

SEQ ID NO: 314065 - DNA, 411 bp, Homo Sapiens
  misc_feature (44)..(161): n is a, c, g, or t
  misc_feature (170)..(214): n is a, c, g, or t
gctctactaaaaatacaaaaaagctgggcatggtggtatgcgcnnnnnnnnnnnnnnnnnnnnnnnnnnnnnnnnnnnnnnnnnnnnnnnnnnnnnnnnnnnnnnnnnnnnnnnnnnnnnnnnnnnnnnnnnnnnnnnnnnnnnnnnnnnnnnnnnnnnnnttcgtctcnnnnnnnnnnnnnnnnnnnnnnnnnnnnnnnnnnnnnnnnnnnnnctgtaggatacttagcacagtgcctggcacacagctatggatttgggtgctttctaatagtaaagttactaagtaataaagttattactggggtcctgaatatgtgcctccccaccctaggattctcccaagaacatgagtgctcaggctgaggtcactgtgagcgactgagcacagccccctccctggagctgagg

SEQ ID NO: 314066 - DNA, 646 bp, Homo Sapiens
  misc_feature (151)..(151): n is a, c, g, or t
ttggccaaaccaaaatcaatagggaataacttattacagtgacgcccaatacccattaggaagttatctggttaatgtctctgtgtataaattccttgtatgcacatattcaattctactgatcatctggtcagctaacataagtacagtnttcattgtgaaccttcttgaacagaaattgaagtcctgaccataccaccgtatgtgggggatgccaaccccaccttgaagaatcttatagagcttgctctcgtacagcaactggggatgcctggccttctgagattctagcttcactgccacttcctcgccgttggtgatgttgatcgccaaatagatgtccccgaaggagccagacccgatcttccgtaccagtttatatttccctccgacaatgaattcagccttggagccgctgctactcgccatcctgagagacgaagatggaggctggggccaagccccgacacctctgggaagaggacggaggcctcggggctcctacactaggcaaggctacggaggagggcggcaggaaacggaacacggaggcctttaccggggttcggggcccagaatcagcagaggggaacctgatcaccgccgctcagtcaggtttctgccaggccgcagtttgtgctcgtgc

SEQ ID NO: 314067 - DNA, 1264 bp, Homo Sapiens
ttttccagagtgctctgcgccgtgaagaagcggctcccggggactgggggcattttgtgttggctggagctggagtgacaagatggcgtcgtccgcggagtgacaggggtccctctgggccggagccggtggcagtggtggcagcggtatcgccgccctagctcaccgcgccccttttccagcccgcgacgtcgccgcgcaagcgaggcagcggcggccgccgagaaacaagtggcccagcctggtaaccgccgagaagcccttcacaaactgcggcctggcaaaaagaaacctgactgagcggcggtgatcaggttcccctctgctgattctgggccccgaaccccggtaaaggcctccgtgttccgtttcctgccgccctcctccgtagccttgcctagtgtaggagccccgaggcctccgtcctcttcccagaggtgtcggggcttggccccagcctccatcttcgtctctcaggatggcgagtagcagcggctccaaggctgaattcattgtcggagggaaatataaactggtacggaagatcgggtctggctccttcggggacatctatttggcgatcaacatcaccaacggcgaggaagtggcagtgaagctagaatctcagaaggccaggcatccccagttgctgtacgagagcaagctctataagattcttcaaggtggggttggcatcccccacatacggtggtatggtcaggaaaaagactacaatgtactagtcatggatcttctgggacctagcctcgaagacctcttcaatttctgttcaagaaggttcacaatgaaactgtacttatgttagctgaccagatgatcagtagaattgaatatgtgcatacaaagaattttatacacagagacattaaaccagataacttcctaatgggtattgggcgtcactgtaataagttattccttattgattttggtttggccaaaaagtacagagacaacaggacaaggcaacacataaccatacagagaagataaaaacctcactggcactgcccgatatgctagcatcaatgcacatcttggtattgagcagagtcgccgagatgacatggaatcattaggatatgttttgatgtattttaatagaaccagcctgccatggcaagggctaaaggctgcaacaaagaaacaaaaatatgaaaagattagtgaaaagaagatgtccacgcctgttgaagttttatgtaacgggtttcctgcacaatttgcgatgtacttaaactat

SEQ ID NO: 314068 - DNA, 1183 bp, Homo Sapiens
ttcaagactttcttttctgccgttaaatgtgtgtatttattttggtcatttttacgagaagcactttattccctctccctctcactgatcacaaatggaatcacctccctgggcagcgagacgcagttgctctgggaagatgccacagtgaccagggccatggccggtccctctggggagatgggacacggctcctggcagcacccaggagccccccaggctgcctgcctgcgtgcagaggcaggagaggaccgtggagcgtttccgggactgcattttagacagagtgaaatgtacatgaatttggcttttgctggagtctgtgtatggttttttaaggtcctttttccctttctgtttgtaaggtaagagcttctgttcgtgtgcagggaaagcagctcacagacgccgttaaaaccagcttcatctttccttcaggatcatccttttgtacttgatgctggaagctcttggagaaaaagcttaaacatttcaccagaaatcttaattgagcagcggtcatgttgccacagctttgtgagtacacagctaacagatgcgtcgagacctgagatgtgctcgtttttattcctcctctcccagattggctccagcagaaaagtccctcgtgcacaggcagctcttgtgccggcactacttgaaaacatggctactttctaagctacaaaccattagtaactcacccgtcacccacaccttgagcacacaccatgaagatcaccagcttggatggccgtcacctcagacatcactccagggagcacccgcaggagctgggccccctcacgcctgccttcctgggccagcttcctgcttgcagtcactcgcatagcacagaggtggggcttcgggcagggagcggagattcctcataggtgagtccaaatgacctccagcctctcgaaaggcatcaagacaaattgaaagaaagcaataactcaccaaagctcaacgctgcccctgcctcgacctccatgggtctcttcgtgttcctcgtttcaccccagaaagtggaggtttcctcttggcattttcggaggaaacttgtaggacaccccaaggcgactaagagacagccttcttggcaagggcaggcaccactttgtagcaacttgggcaccagcttttctggacagcctggcttcttactggcattgtccaa

SEQ ID NO: 314069 - DNA, 962 bp, Homo Sapiens
gtcgagtcacgggtaaaataggaaacagcttctttttgggcttaaaaaatttgccatatttgttccaaaattgggaacctgcggaaggataacaaatcccgcagtttacataaggtggatgcgcgcaagtttccaaataagagtgggcgctaacccattccacaccatgggttttttggcccttgtgcacacgggtgtggctccgcgccaccgcaaaaaggtttcccaggggcgttttggacccaggttgttgcacccagggacgtttgggggtattccaattccagtgggcaagagggccccatttgttttcctttagaggttacttttcatccttcaaggggtgtatttcttcaaattaatggggtgcgccagctaaccatgttcatcattattctataatagccctcccggaaggtacattttctttattcccgttgatcatctcttgatggtgtaattttaaactcccgtcctggaaagagaaggtgtggccatcacagcagctttagagtgggtatgaatcactgcacctgctcctctcattgtgtaagcattcatgaaaagaggagtacactggcttttttttagcttcttcgatggcgaaggtccacttatgtccttttcatttatatcacaaacaaacatgtcttcaggctgaattcgttccttttgcactcctgaaggagcaatgtagatttcatcgccatgcttcaagctaattcctcctccagtcccagtgacccagcctaaatggtaaaactgtttgcaaagttctgggatcaggtatcttggatgctccttgtcctgcgcgccgcatctccgggaacaacagtctccctcccgagcatcacagccagacatggcccagaccagggacccgcgcggcctccaatctccgcacggctttgcgcgcggcgcttagcctgggatgcggcagcgaggccgcaaatgcaatcccc

SEQ ID NO: 314070 - DNA, 626 bp, Homo Sapiens
  misc_feature (89)..(89): n is a, c, g, or t
  misc_feature (155)..(155): n is a, c, g, or t
cccacatatctggtaaagcctgagaagggtgactatccagaatagaataaagcacaggagcagggaagcctgcctgttatcacaagacntaatccactcctctgcaaggctttccagacattaggccagaaccacactatttaattcttcaatanaatgatccaatgaaagtttaagaaccagtggtttggtttacaaccaagcagaagttaattatctaattgagacaaaattctctgtatgtgtatgtgtgttggggccacttctgccacaatcctaaccccaataatcaaggaggatctgaataaccacatggccattcattcaataaacatatgctgaatgccacataccagactaggtgctggggatgcaacacagcaaaatcactgccctgctagaactgctaggtcagtgaaggagagacattaatcaaaatattacataaacatatcattacaatgataatgaaggcttatgaggggaaggtacagggcactaggagcatagaataggggtatcggattgggtctgagggttcctagattatccttaggactccagggttcaaatcagtaccccttcttcttcccctcaccccactccttccttgcttcctctcgtgc

SEQ ID NO: 314071 - DNA, 649 bp, Homo Sapiens
  misc_feature (340)..(349): n is a, c, g, or t
agcccaccacctcctctctgcaacagcctcacgcacgggtgcaccactccagttcaactcgccttatcacagccccaggagcaggggaaggctgcctgctccatcccaaacgccctcatccactcctcgccaaggcccagacattaggccagacccccctcatcaactcttcaatcccctgatccaatgaaagtctaagaaccagtggtttggttcacaaccaagcacacgttaattatccaactgagccaaaattctctgtacgtgtatgtgtgttgccagtgtggccagtgtatcagataccgaggggacacggactactacccctgctcttgccatnnnnnnnnnnaatcccaaccccactactcaagcacgctctgaatacccacatggcccctcattcaatcaacatacgctgaatgccacataccagactaggtgctggggatgccacccagcaaaatccctgccctgctagaactgctaggtcagtgaaggacagacattaatcaccatattcacatccccctctcctcacaatgataatgaaggcttatgaggggaaggtacagggcactaggagcatttagaataggggtaaatcagtaccccttcttcttcccctcaccccactccttccttgcttcct

SEQ ID NO: 314072 - DNA, 1417 bp, Homo Sapiens
ccagtcttttctatttttaataccgagccattacataatccacacagtaattgctgacttgaaaaactattggcaacattagaaaatccccagagttttaaacaggaaaaggattactacagcacaaaagcctttggtagtttcactgactagtaaaccattggtaatcgtcacttgccagtggaagtcacatgggccctgggaaacactcccctatctcagggaaagcaggctgggggaagggatgaaatgcagcctcagctggggaggaggaggctgctgggtggggtgggtgtgctgagctctgagtgggggctccaacaagtgacctccagccaaaagtgctgaagggagtgagcttcaggttgtcctcgggccaccttttactgcttttgtttcttgctaggggaatgagtgaagtttccagcggcccagtcctttccctctcggtttcccaccttcctacagcctccaacatattcctgtaagagcctgagggagggtggactactccagttaaatagattcttataaagacacaggagcagggaaggctgcctgtttatcacaaagacctaatccactcctctgcaaggctttccagacattaggccagaaccacactatttaattcttcaataaaatgatccaatgaaagtttaagaaccagtggtttggtttacaaccaagcagaagttaattatctaattgagacaaaattctctgtatgtgtatgtgtgttgggagtgtgggcagtgtataagatacagaggggacagggactactctccctgagccacttctgccacaatcctaaccccaataatcaaggaggatctgaataaccacatggccattcattcaataaacatatgctgaatgccacataccagactaggtgctggggatgcaacacagcaaaatcactgccctgctagaactgctaggtcagtgaaggagagacattaatcaaaatattacataaacatatcattacaatgataatgaaggcttatgaggggaaggtacagggcactaggagcatttagaataggggtatcggattgggtctgagggttcctagattatccttaggactccagggttcttttaaatcagtaccccttcttcttcccctcaccccactccttccttgcttcctgtagttaatatttactggtttttttctatgaggaggataatgccaggttcttcacatgcatgatctcatgtgattctcatgacaaacttacaattcagcactttatgacaaaggatttgctgagaaaggctgatccacattttgcaaggagaactatataaaatttatggcactgattagttaaaactcttctggctgcaggtggcaaaattccacatcaaattttcaaaaggaggggtaaaaaaagggaaaacc

SEQ ID NO: 314073 - DNA, 817 bp, Homo Sapiens
ccaaagggtggaaccacccccacttaggcaatcctgggcgtaggtctgttatttaacaaagcccacctcctcgttgtgcaagcctccactgctgcatctgtaaactgaggctacctgtcttgcctgtgggctgtttgggggccccaaaggagccaatgataattatagcgtcctagcacagtgcctggcaccacagagtaggtggttatcgtctacccacatagacattaactaccaccaccacttagagtctcgtggctcttcccccacctcctagcctcacagggagggctgggccaatctttacgagttccagctagagcttattccatagagctgtgctctggtattcagggggagggggaacgagtctcatctatatccaaagatgacttacatctgtgggcagagtgggttctccatatcccccagaggctagaggcacagtagacacaggtcctccacacatccccctcctataatccacaggaaatgctagcaccagcaccccgtgcccatgggggcttcccaaggggtccctaactcagcacaaatcaggaaggatcagtgaagctgagagatctggactccacaccaggagatgggtcaaacctcagatttccaccttgctggtcacttaacctcaccatgcctcagtttcctcgcatataaaatggggtcaacaatatcacctactccttgcaggtttatatggattaaatgacttattcaatgcgatggcctagaagagattctgacacagagtggtggctgcatgagggttagctgggattactttcctgctctctctccagag

SEQ ID NO: 314074 - DNA, 743 bp, Homo Sapiens
  misc_feature (12)..(12): n is a, c, g, or t
agagtatattcnaaaaaagacaagggagacttgtgtctaccaaatataaccccaattaaagcgataattattgacagtgtagaaaaaccccagaaggcccagaaattggcctaagccacaaaaagacacataagaatttaatattctataaaaatagcattactaatcagaggggaaatggtggtttcacatactgaacccaattggtaaattcttcgaaataaaatcaaatcccaccccaaacttgttctgatttagttaatgtatataaacaaaatttaaattccaaagataggtgtaaaagtgaaataagaaaatactagaagaaaataaggacatttatccattcttggattacaaaaatactttcaagcacatacacaaaggtagactcctaaagaaaacaacttctatactgaaataccacaaactatgttaaatgacaaataaggctaaaaaaagttacaatatatgacaaaggacggacattcttaagaacttatatgccaaaaaaagagcaaattctccaagcaagcaacagaaaaaatatgaatgagctattctcaaaagaatgaatatagcatggccaatgaatatgaaaaaaaacacaaccttcactaagtaagaaaaacaaatacaaattttaaatgtagcccttttctgtaattattcaatttgcaaagattttaagtagtaattttcaattctgagcattggatatattgctaatgccgaatgtaaat

SEQ ID NO: 314075 - DNA, 840 bp, Homo Sapiens
gggcttggagaatttgctctttttttggcatataagttcttaagaatgtccgtcctttgtcatatattgtaactttttttagccttatttgtcatttaacatagtttgtggtatttcagtatagaagttgttttctttaggagtctacctttgtgtatgtgcttgaaagtatttttgtaatccaagaatggataaatgtccttattttcttctagtattttcttatttcacttttacacctatctttaaaaggaatttaaattttgtttatatacattaactaaatcagtacaagtttggggtgaaaaggaaatttttaatccatctcaaatgtatttggttatattatataaggtagggatttgattttatttcgaagaatttaccaattggttcagtatgtgaaaccaccatttcccctctgattagtaatgctatttttatagaatattaaattcttatgtgtcttttgtgtcttaggccaatttctgggccttctgggttttttctacactgtcaataattatcgctttaattggtgttaatatttggtagtacacaggttctcccttgttcttttaaattttgtgaaatataacttacaaataagtacttaaaacagagcttaatgggtaaagcaacagctgtgtaatcacaaactagatgcagaggaggtcttgccagcactccaaaatctctgtgtgtcccctcttgacactcactgtttcccccagagctaactatcctgacgtatggtaattctccctctgtccttttaagaattattttcccagttatgtgtataacaatatggtttacattttgctcacttttgactta

SEQ ID NO: 314076 - DNA, 475 bp, Homo Sapiens
gtgttttagtattttaataactatttcaatataattagttttcctttaattctatatattttgttttatgcctgaaaacatcttattctgagaaggggcttagaggcttcaccagattgccagagagtcttaggcaccaaaaacaagaggcacccgtgatccacctcagtacgtgccccctctcctcttctcatcttcacataagatcgccatgctgtcattctcactccaaactcacatctgcttgccactgtagatgagcctctgctgttgtggggggattccctctttctcctccacacgctccttgattcgctccaccttgtctgtaggttcaatgtcaatctcaatctcctttccggtcagcgtcttcactttaattagcatcttctttccagtttggggctgcacacggataaattgctgctcctaccgctccggtcgccgctgccgccctccagcactcttgcatgca

SEQ ID NO: 314077 - DNA, 1182 bp, Homo Sapiens
  misc_feature (169)..(246): n is a, c, g, or t
  misc_feature (275)..(283): n is a, c, g, or t
  misc_feature (298)..(298): n is a, c, g, or t
  misc_feature (322)..(394): n is a, c, g, or t
  misc_feature (441)..(479): n is a, c, g, or t
  misc_feature (490)..(512): n is a, c, g, or t
tccaaacgcaaggtttttttatggccggttgtcacagaatttttttgaaaggtggggggctttaatttagggggtttcccttaagaaaagacccattatttgggtatctggggtctctggggaagagccagttaaccctgggaaaaagggaagtggtaagttctttatnnnnnnnnnnnnnnnnnnnnnnnnnnnnnnnnnnnnnnnnnnnnnnnnnnnnnnnnnnnnnnnnnnnnnnnnnnnnnnagatttccagaaagatcttttggatcacnnnnnnnnngcccgctcattaggncgggtaaatccccgggtactgcannnnnnnnnnnnnnnnnnnnnnnnnnnnnnnnnnnnnnnnnnnnnnnnnnnnnnnnnnnnnnnnnnnnnnnnnaccactttgtacaagaaagctgggtcaggaaacagctatgaccatgnnnnnnnnnnnnnnnnnnnnnnnnnnnnnnnnnnnnnnngcctcgagttnnnnnnnnnnnnnnnnnnnnnnntttttttccaggaggccaggaaatattttattgacaaccagggacacagtcataagagagggaagcacacaggactgcaaactaacacccagtagccagcaagggccctctgggccaggaatactgaatcctgggatcctcacagtctcccaccagtagacatacattactgggcatccaggggagggggcagtggctatggtgtcccagagagtgagaggatatatgatgcctcattatgagcgacagggtaaagaggtaaaatggagggtccatcactgcctaagaccacctcctcctctcagagccaacaccaggtgaaggactgaaccacctaaaatcttgtaatcagctgctgtcttctcatcattcatctgcttgccactgtagatgagcctctgctgttgtggggggattccctctttctcctccacacgctccttgattcgctccaccttgtctgtaggttcaatgtcaatctcaatctcctttccggtcagcgtcttcactttaattagcatcttctttccagtttggggctgcacacggataaattgctgctcctaccgctccggtcgccgctgccgccctccagcactcttgcctgcaagggccacgcaggcctcgggcggaagttggggaacgggggagggagtagggagcgggcgcg

SEQ ID NO: 314078 - DNA, 1821 bp, Homo Sapiens
tttttgacaaatgagaaaaatgtttattaagaaaacaatttagcagctctcctttagaattttacagactaaagcacaacccgaaggcaattacagtttcaatcattaacacactacttaaggtgcttgcttactctacaactggaaagttgctgaagtttgtgacatgccactgtaaatgtaagtattattaaaaattacaaattgtttggtgattattttgatgacctcttgagcagcagctccccccaagaatgcagcaatggtatgtggctcagcagctccatatcggcaaaattcgtggacataatcatctttcaccattacagataaaccatattcctgaaggaagccagtgagacaagacttcaactttcctatatcttcttcaacttgatagttagatactcctggatatctaccctgttgtttatgaaatctatcaacagcccgtaacattaagtacaacactatttccattatctggattgtcccatgctagaaataatttcatccttgttaattgtatccaaaccatattcttcagctaaggatcgacatcttcccactcgaagaaatgcagaattgctgcagagtaattttaattctttctctgaaatggactctggtgcctggccaatggactgcagcaatttggcaacatgattacccacagcggcagcatctttctttgctttttcacggtaaacgttttgcagttttatatatttgcctgaatctgcaatcatatcaggaattgtgcctcgaacaggtaaatttccttgaccctctttggccacaaattcctttaaggcacgagctaaaatccaaaatgatggagtctgtttggtgatatttatgcagcgatcatcattaaatatatcttcaatactgcttgggatctgagttgtatttagtgctgtgttcccatttttaatagctttcttcaaaattctcttcattcttctggagccccattttcattttttagaattccttgtctaatcaaatctctgaagtcctctttttctttatacgttttaggtattcgtccatttgtttcactataccactgtgctaaatatttagctatgatcacaatccatggagtatgactgtggtcctttttttccatatgatccaaatcataggactgaaaatgttctctcagttcaggaaatggcttatctagtcgtagatcctctaatgcattatctggatgagattctattactggatgttcttttataatgatcctcatataaccaactagtccatatgtcctacagatcaaaagaggaatctgggaattccagaggacatctgctaagcgtagtgaagtgctttcaggaagctgagttgcaactacaacagtaaacctacagaaaaatgagggatcattgtctagaaggttttctggactctcttccacaaaacttccagagacatcgctatttaattcttgtaagaattccatggcagcttcagctcggttcttgccgatactgcttctttgaaggaagaaattgtttccagcatcttctccgctgacctgatttccatcaataattgtaaacgaaccaatacctggtagtaccaagtttttaagaatttcagttcctgtggctgttgcatttattaggcaaacatgagcagattctaaagcctcttgcccatgatcaccccacaacctcagctgccggtcgtacttctgctccttgagcagctttcccagctgcgccatggccgcgcctgccgcgcggaaaacagccgagcccctgcggagcgccgccaccagctccacaagcgcgcaggcgcccc

SEQ ID NO: 314079 - DNA, 2173 bp, Homo Sapiens
aaaagacagaagcagcttttactatatttacatccaacaaaacttcgcagggaacaatccttattgcacaggtcaggacctgggtgggtgaggcattccccaaggcggggcaggcaagaaaaattaggactggagggggcaccagttcttcctaaggggagcttgagactcctctagctcccagtgcctgactttgaaggaactacaaaccaccggaccatgggtgccctatttcccttccctttctcactctccataaggaacctcataaggcaagggggctgtgggctccaggaataaataatttaaaataaaatacaaacacttaggtagaaaggcatggagagccttgggctccttcagcaacgtcagggaagagggaccatattttggtggagaatgacatcccctacctcccattcagggcaaaggctcagtagctctgcatctttccagttgttttttgaaacaaaaacttctaaaatgaccagggcaatgcagatctgtgggtaccctggaggggagttcccggtataggacaagggaagaacagagctgtaccaactcccccccagatctcccccaacatcagcacgaacaaactgggtaggttggtgatgggggaatcaggaattttggtaacagtggatccctcttcctgttgtcctcgcttggagcctttgactgggcatccttcccagcctgttcccaactccatgaaggcaacagggaagcagtttaactctagaatcccttcttcctcacttccccaccctaggctggagagggaagcttaaggtctctagcattctggaggtgctccaaaacattttcggcagtcaatggccttgggagtgggcatctgcgcccgccggtgcctcagctcctccttgcccatgctgctggccagcttgttaaaggcagacttgtacttcttatcgaaggccactatgtccacgtggtccttgcccagagcagccattgtcaggaataatatctcacggtagattcccctctgcaggtgcaggccagtgggtgggggccctagagtttccagcaggagccccacagccttgtgcacttcattgagtccaacatggcgcagcactgactccaacagtgccaaactaagggatgcaggtacagggcctggccataccacccgctgggggatctggcctggatgaaaggaaagaaggccaccagaatcactgagccctctgggtatgggacccaccccttccccacccaggccaaataccagactcactgtggaccctccagagcacatagagaggtgggcagctattggggtcaggggtcagtacatcccacagcagccgtacctgaacagagggctggatcaggggttagccaaggagaatggggcctgggagtgcgaaggcccatcacaggagggccagccccaggcctggtagaatactgggcaggcgtagccgttggaaataccacaaaaggttccagaagatgatggggtgggcagagggcagttcaggcaacgccagcacctcactgccctcgttctctaccagcgactccagctccttacgcagcaccagggggctcaggtatgcccatgccccactctcaacccgccgggaggctccctatcaggcacaaagggggagggcagtagagggcatgtacatccccagagccttgcctcccactgagccaccacatccaacagcttttgggatgccccttgccctcaagggcaagagatgtgcccatctctccctggcaccccacaggccccacacagggcaacattcccgttcctcatgcccctttggcccagcccttacccccatgtgcccgttgcagagctggggctcatccagagcaaggcagagccttcggtcactgagcacagggccaggaccaccagggacaggagcatctttgctgccactggcaccagcagatttggggctggggacactgggccgggaatcaagggtctggacactgagcaggggcacaaaggggcaggcgcagaaggggcaggttgtgttgaggttagagtcatcaggtgcccagccagccatgatttcctcatcatacaccagcgaatcacaggcacggcacagggagcagctggacagcagaatttccagggaaggtgactgatcccggagaattccggacc

SEQ ID NO: 314080 - DNA, 723 bp, Homo Sapiens
  misc_feature (571)..(572): n is a, c, g, or t
  misc_feature (575)..(575): n is a, c, g, or t
  misc_feature (584)..(584): n is a, c, g, or t
  misc_feature (599)..(599): n is a, c, g, or t
  misc_feature (665)..(665): n is a, c, g, or t
ggatcattgaaactgattgggtcgtcagaaactggtccagatgaggctgggtggggtgactgacagtatggatcattgaaactgattgggtggtcagaaactggtccagatgaggatgtggctggatggggtgactgacagtctggatcattgaaactgattgggtggtcagaaactggtccagatgaggatgtggctggatggggtgactgacagtctggatcattgaaactgattgggtggtgagaaatgggtccagatgaggatgaggctggatggggtgactgacagtctggatcattgaaactgattgggtggtgagaaatgggtccagatgaggatgaggctggatggggtgactgacagtctggatcattgaaactggtccactatgacgcagcaggggcagtttggcagagcatcctcttcccttgtccttgtgaaagaacacaggatacatttgggttttacagcttttcacaccctactatcaggcatcagaatcaaaattagttactaaattgggtgaatttttggaaacctgcatttctatgcatctgctattccagannatnacacgtgtntctatatgacattgngtgatctgcttattgagtatgacagaatgaagatgtgctggtttgcttctactctgaagtaataanacctgttattgtgaatagctgctatgacttgtcatattgacacttagttagctacagt

SEQ ID NO: 314081 - DNA, 486 bp, Homo Sapiens
  misc_feature (443)..(443): n is a, c, g, or t
  misc_feature (473)..(473): n is a, c, g, or t
gtaatgtttaccctgagtgttattattttgccacatttttttattgagtgtgaacacttatacctgtgagctatttgagtttgttgcacactttgtgcttccttaccccttgcttagtacttcggcatatgttccaagttctagaatatttcatataactagagtttgtcccagtatccttggtagcttgttttagatccccccgtctagagtacaggatcattgaatttagttgttctcagttgtctttaatgtggaacagttccttagcctttatgtgttccatgacctctatgttttttggagtacagggcaatttttcttgtttgttactcattttgcatttgaattgtttattcatgcttaacgcccttctcaagtatactctccatctgctcttcattgatgttacttttgagcgcctggtcaaggtgtcctggttntgccctatgtgtggtacttactactagcantctctgggagctg

SEQ ID NO: 314082 - DNA, 492 bp, Homo Sapiens
agaactgtccgttcaccctcggcaaactgtgggaaatccatggaatcaaacaaatctctaagggctgcagtaatatactgcgctgaagccatttcccctgaagctctcaaggcacctgcataccaagggcatctttgagttcaggcacagaacgaatacactgaactgtggcattcatgtaacaagtgttaccaaggtttgtcaatccacatggtaactccatagcagatgctaactgttcttctgtcatgtcttctacgaagacagttttggctgagggttcttctggaagagcatctgctgaccccatcattagtagagtcattccattttttattttgatgtttccccaatcatcatcctttagcgttcctcctttcaccataactttctgtctggcaggctggactccagtcaacgcaaacagctgagccttgaataccattggaggttcatctgtattcaattctacaccttcaaatttctcctttc

SEQ ID NO: 314083 - DNA, 709 bp, Homo Sapiens
aacccctatggtgacttcttcttctccagattctgactagaaggtgtcgcagccgatgcagatgagcagtcgtgtctctttaacagattcatcctctagggctccatatttctgttgcaatactggcatcatttgtatgccacattcatttagcatcctgttgaagatcctgtccttgttcacctttctcggcaacctgtgggaatagccatgtgcaaaaattgcagtagaataataggtggaatactggaagaagttttatccatggaatcaaacaaatctctaaggtctgcagtaatatactgcgctgtagccatggattcccctgaatctctaaggactgcagtaataagggcatcgagcaggcacagaacgaatacactgaactgtggcattcatgtaacaagtgttaccaaggtttgtcaatccacatggtaactccatagcagatgctaactgttcttctgtcatgtcttctacgaagacagggctgagggttcttctggaagagcatctgctgaccccatcattagtagagtcattccattttttattttgatgtttccccaatcatcatcctttagcgttcctcctttcaccataactttctgtctggcaggctggactccagtcaacgcaaacagctgagccttgaataccattggaggttcatctgtattcaattctacaccttcaaatttctcctttc

SEQ ID NO: 314084 - DNA, 317 bp, Homo Sapiens
gagggtctgggtcagctctatccatggcagctgcaggctctgatgcctgattcaggcattcaagttctactctaagttattgcaggtcactctgctgctgcccactgcgaaccagggcctggtgggtagaagcctcctgtcccagttgtagaaccctaacattgacctgggataattgatccttgtagttctgattctggggtatacagtaaatacataagataacagtgtttttaattttcatgttatatatacatttgcccatcattggctatatttttattaagtagtcatctgctatgttatgttctgttctg

SEQ ID NO: 314085 - DNA, 585 bp, Homo Sapiens
atacagagtgttgagatccaggagtgtctgatgcttagaatccaatggaatgtctctaattctatatagtagatagtagcaagtgaagcttagcgagtaattataaagagattgtgcaaatacataaggtgattatcaactatcattaaatccaaaaattccattaaaattgtgtctaatcagaatggcagttcaggagtctaaaaaaacaggaacctagacagaagtcttagatggtactgagagacggcccaagcctgccactgagccagctgcagaaatgtggccccgtgaccacgtatatccatggcagaaatctggttgactccattggcttagtggtgggaatgtgggcctgtacggaacattgacaggaacggtgtagaggagaaagcccctttatacgcccatctggagaacgggctcacccacagggtgaatctagacagggccctggtgttgctgttacaaacctgagtgcgtgatgcatgactgcactgctgtggcctgacacacggcttgcaggcatttggcttccacacctgccttcagtgagccactcatgcacgggaggcaccgagaacc

SEQ ID NO: 314086 - DNA, 544 bp, Homo Sapiens
  misc_feature (473)..(473): n is a, c, g, or t
  misc_feature (501)..(501): n is a, c, g, or t
aacaaactgggctctttatttctgtccaaaacaaggccacaatttgtgttttatcactgggatggcatggccattgtgtcaatggctcagggagacttcaagatcttcgctggaacctctaaggattggaatgttcgattcagcttcagtgtgagcagctgtcagggcatctttcttggagagcatgtccatgcctggggtctattatcttgtccaaatagatcgtctgcccagggagacaacagcctttgtcatctttgcttcttgtttccctgggtttcctagtactgtcaaatgtgaccttgtgcctcagaatcatcatagacgcttggaaatgggagagatcttcttatctcgttgctgatccaataccacagcatacacatggggaaactgagtcggtgatgaactattcactgcagtgccccccgctctgaattgggttttaagtgatgacaagatggctgagcctnaggtttagaggaaacaccgtgtaggagnaggagcgaacgtttgctctgttcccgtggagcccatcatctac

SEQ ID NO: 314087 - DNA, 786 bp, Homo Sapiens
ttttttgaatagtttaatagttattatttaaataaggctttggcgtgcttttccacatttttaggtttttttctctatgtgtacaccttgcaagatgtatcattaactcatgaaaccaccagctcctcaggcaacgaaaagggaggtagaaagaacgccagaaaggtgggtctgtgtgttctggggtgcgtggggcccgcccccgaggaaggtgccaaccgtccctggagagcagaatcaccaggcctgggaaagccatgcgggttcgagagcctgcgccatggccatgctgggcagggcccaaggggtgcccaggcgtctgcccactgagaacactgttagtgcggagggatccacaggaggggagagcggcgccagggtcccggacacaggcaagggtctctagcccgccacccacccactgccctgggggtctctgtcaggcttctaggagacacagagactctgaggtcgtgtctcgagggtggctacctggggaggctgggcagagtctggagacatttctggctgttgtctgactgggagctgctggctaggggtgggtggaggccagggatacctttaagcatcctacagtgtgcaggacagctcccaccaaggaggacagcccgccagagacacagcaaagtgggctgggattggggaggctgcagcctggtgccagcctcacattggcaggcgggcgctgcaggaggcttgcggagaacacggcgaccgagggaggtttggcgggaaccacgcggaacagatcgtggtgggaatgag

SEQ ID NO: 314088 - DNA, 959 bp, Homo Sapiens
ctctcttcagaagctttattctccctgggaggggcacacctcacccagccaagggctgcttctgactggacagagggcgtccaagatgcagacatggtgtgcaggcaggagggcttccactagccccccaggtgggaggtgctgtgcacccgggctcaagagggagggggccccagccacgagggaggggcagggactttcttctcacaaagacctttcttcagtattcgaaggtcactgtcttgacccgcaggtactcgttcagagccgcctctcctagatctttgccaaatccagactgtttgaatcctccgaagggagcggccacgtcggtcttgttgtacgtgttgacaaacacagtgcctgcctggagcttgtcactgacatacagggccttgttgatgtccctggtgaagacaccagaagccaggccaaattccgtggcattggcccgagacagcacggcatccaagtccccatcagcaaaccgagagatgatcatgacaggcccgaaggactcctccttggctatgaacatgtggtcttccacgtctgtgaaaacagttggctcaaagaagaaccctggccgagggacctgattcccgccgcagaccagtgtggccccttccttcgacgccatgctggcagtactccatcagcttcacaaggtgggcatggtgattctgcggcccgtggtcggtgtccctgtccagcgggttgcccaccttcatcttccgcacctcttctaccactctccgcacgaactcatcatgaatggagtcctccacaaagagtcggcctgctgcaatgcaattctctccgttgaagaaaacagaactcatccccatctgcacagccttgttgaggtcacagtcagcaaagatgatgaggggtgacatgatgtgcttgcccacctctgtggagcctgtgaacccgacctcacatcaggatggtctgag

SEQ ID NO: 314089 - DNA, 349 bp, Homo Sapiens
gtctgtgcatctgtccaggtgagggagcacacgtcgcatttggaggcagagctgggcacatggcggccgccagcgccgagtgccagaactacgccaaggaggtggcaggggtgagtctgccccccaaggagtgcagcccctgcccagcagatctgcggtcctccctgagctgcttctcctcagccctgtgggagcagctctcggtgacataagccttgaagtccgagtcctcaggcgtttgcccgaagcctcacaggcccctcgttgggctgtcaggcctgaggtgtctctcagggcaggtttcaggaggcgtttgacgttctaggttatccctccgcggggttctctg

SEQ ID NO: 314090 - DNA, 561 bp, Homo Sapiens
tcttttttttattaacctggcaccaacgttggttttaatggcatcaacccccaggaggtcacacgtcagttctggttggcaacgtctaggggtgaggggctgtggcctccagtcggccccacagcctttgagaactggttgcccggtcccacccgctctcgtgccgttatgacctggcacattaacccagacatctccatgcctcctttgtattggaggtggaattaggccaaatccaacatggcatgtgagattgaagcttggaggacatgtcgctttgcaggaaacaatctggttaagcagaggacccggccatttattggtgggttctggcgctttcaagaatgtgaagaatgagtggccaaagttaacaaaggagcctgcacagggatgggggtcacacccacttttgagagtttaagaatagtaagggacctacgggaacttctcaaggtaataggtggcatgttttttttccttggcatgacacagaatgtaaagataatgggaggatgaaccttccagccttgaacttttggagaagcttcttctttggaaggg

SEQ ID NO: 314091 - DNA, 2247 bp, Homo Sapiens
acttgatgtgaggttttgtttgtttgttttttaccgggcaccaacgttggttttaatggcatcaacacccaggaggtcacacgtcagttctggttggcaacgtctaggggtgaggggctgtggcctccagtcggccccacagcctttgagaactggctgcccggtcccacccgcttcccgccccgccccactgaaaaaacactaaacgattgcactgacagacagaccccagagcgcccggcctcccacacacccacggggctgtcagagtcaaccagggctttggcgtcactcggcggtggcccggggctgcgcccaggatagtgtttatcaaatgtgacacaggttcatttacaaactggggctctggaaggtctacttctgtggctctaagagacttgtctctcatggcttctctcggagctaccggaagttgggcctggataacgctgtgtaggttggttggtttatttgtaaggaatgtgtaaggcattttggtaagttgaacagtaacttctttttccaaagaggaaactcagacagaggtgccctcctttgagctgctgccgtcctctgccttttccagctgttcctgcagcttcttcaccgtgtccttctcccttgccagctgctcctgggtcgtcttcagaagctcctgcagtctcgtggcggcgcgccccaggtcacttgttaacttcttctctttttctagtctctccttcagctgtgaggcctcctctgtttctgaagactctagggggccggctgtgcggagcttctccaattcttcttgtaaccgacatgccgaggtctgagcctcctcaaactcggccgtgagcttctgccgctgtgtctgctcatcctccaggatggcttctgtccactccagctgcgtcttcagctgaacggggtcctgctcggctgggggcgcctctggggaggaagctggggccccagctatgtcaccatcctctacgtggctcttcatttcactcaactgctgcctgaccagggcaagctcatcgctctgtttctgggcttcgctcttggcggcatcgagctgagattgagattctaggagaagttgcctcagccctgccacctccttggcgtagttctggcactcggcgctggcggccgccatgtgcttttccagctctgcctccaaatgcaacgtgtgctccctcacctggtccgaactttcaagttctccttttagcttctctacaatctcttcgagatgcttcactgtgacccgggacttctggagctcctcctctgcggcgcccaccttggccctccacacctgctcctcctcctccacgctcttctgcaggtctctgagcatgccctccgtctccgccaggatgctgcggtactggtcacactcggcctgcagtgtgctctgcgtctcctcggcctccctcaacttggaggccaggtccgaggagggctccgcgggagctggcgggtgcttcagcagcgtggggcctttctctttgagatcctgcagccactcggtgtaattctgttgtgccaagacagagagttctgggagcagagccagcagggcctccatggtctgcgcctcaatcagacagagctgcttctccgattcctccttggcctgggtcagggagtgcagcttctccttgcaggcctgctcggccgtggccagtgcctccatggacgtccaggccagccaggcggaggctgaccagcagcagactcgcctcaaggagctggagtcccaggtgtcgggtctgggagaaggaggccatcgagctcagggaggccgtcgagcagcagaaagtgaagaacaatgacctccgggagaaagactggaaggccatggaggcactggccacggccgagcaggcctgccaggagaagctgcactccctgaccccaggccaggaggaaatcggaggaagcagctctggtctgatttgaggcgcagaaccatgggaaggcccctgctgggctcctgctcccagaaactcctctgtccttgggcaccaacagaaaattaacaccgaagttgggctggcagggatcttcaaaaggaggaaagggcccccacgccttggctggaaagcaccccggcccaggctcccccgcgggaaggccccctcccctccggaacctgggggccctctcccaaatttttaaaaggggaaaggccccaaaggaaaaaaccccacaaaaaccaccctcttgtccaggggccccaaaagtgtggtaacc

SEQ ID NO: 314092 - DNA, 559 bp, Homo Sapiens
  misc_feature (22)..(22): n is a, c, g, or t
  misc_feature (52)..(52): n is a, c, g, or t
  misc_feature (61)..(69): n is a, c, g, or t
  misc_feature (100)..(100): n is a, c, g, or t
  misc_feature (201)..(201): n is a, c, g, or t
cttttaaaaaaatggctgcccnggtccccaacccggcttcccggcccccgcnccccaatgnnnnnnnnncactaaaacgaatgccactgaacaaaacaanacccccaaaacgccccggccctcccccaacaacaccccaggggcctgtccaagaatccaaccccaggctttggccgtccaactccggcggtggacccccgnggtgcgccccaggaatagtgtttaatccaaatgtgaacacaggttccatttaacaaactggggctctggaaggtcctacttctgtggctctaagagacttgtctctcatggcttctctcggagctaccggaagttgggcctggataacgctgtgtaggttggttggtttatttgtaaggaatgtgtaaggcattttggtaagttgaacagtaacttctttttccaaagaggaaactcagacagaggtgccctcctttgagctgctgccgtcctctgccttttccagctgttcctgcagcttcttcaccgtgtccttctcccttgccagctgctcctgggtcgtcttcagaagctcctg

SEQ ID NO: 314093 - DNA, 626 bp, Homo Sapiens
  misc_feature (76)..(76): n is a, c, g, or t
  misc_feature (104)..(104): n is a, c, g, or t
ggcgcactgctgaagattaagactcgaaaagaacaggcaagacttccggttcgtctctacctggcttgactgtttntgcaggcattaagtaaagaaggttcttnccagaaccttgagttataagaaagagatttatcggccttccacttcagaactctgtgagatttcaaaagctttagtgattggggcaagaatgtgaagtcagtaacaggtgtaaattcaattaagattaaatttttctttccaccaatgcttcatggagtccactttcaagttcatacctgacctcattagacatataacttttacttaggacaatgattagtcttcggcttttctctatcagtgagtggatttcatcaacaacagctcctccaggcactacatccctttcaaatatgcataacttatacccaaaatgtttctccaacaccctgggcaaaatctccacagcaaaggtgtgctcctctccattttcaggtcggcattcttttaggtaagacacaaaagcatcatatgtttttccatctgttaatgtttcatctcttctcgttaaatgtctataaaatagaaccaagtcaactctataaatgacacacacagtcactaggcacactactgccacc

SEQ ID NO: 314094 - DNA, 408 bp, Homo Sapiens
  misc_feature (278)..(278): n is a, c, g, or t
  misc_feature (296)..(296): n is a, c, g, or t
gtgtgagccaccatgcccggcctctggctgcaatttgcacagcagtgtgaccttacagtagagtattcgcccttcctgggcctcggttttgtaatttataaagtgaggataacctactccctgctgggctattgtgaggtttcaattattatagataatacacacacaatgcctggaaccactgatattagagatgtgatgttggaaacatagaagcctaggtaattctccagggatgtgtgaagagctagtgataaagccaggactcaactgacctncacaaacccgttagtggncctgtcctgctagaatcctttagcatgatagcaggggtgctatcatggctcactgcaggcctcaaactcctggtctcaaggcatccttttgctcagtctcccaagttgctag

SEQ ID NO: 314095 - DNA, 972 bp, Homo Sapiens
  misc_feature (19)..(19): n is a, c, g, or t
  misc_feature (22)..(23): n is a, c, g, or t
  misc_feature (29)..(29): n is a, c, g, or t
  misc_feature (48)..(48): n is a, c, g, or t
  misc_feature (53)..(53): n is a, c, g, or t
  misc_feature (56)..(56): n is a, c, g, or t
  misc_feature (72)..(72): n is a, c, g, or t
  misc_feature (78)..(78): n is a, c, g, or t
  misc_feature (92)..(92): n is a, c, g, or t
  misc_feature (124)..(124): n is a, c, g, or t
  misc_feature (190)..(190): n is a, c, g, or t
gacacatccgatgacgttntgnntgcatncggaagtgaaagtggagtntaganatnaaagcagtgtccccgnccagcntagcactgtagaanttcccttcaaccacatcccgccgcagggagcntgccaggggctggagctctggcaggagaaacccccagtgatacgttccccgaggggcatcgccatntccacaccagcaggcaggagtctggcaatacttggtccatgcgcacaaacacccgctccaggttctcccggtagctctccattgagcagcgaccatatcttggctttcagctgggcagctgtgagcagtgagtctttctggagcaagagcaccaggtccttgtacacagccctctgaatggagtcccccaagatgaccacgaacttgttgtgtagcagctgctggacttccgaggcctggaagtggacccatgtctcttcgcagcgggcggcgcggctcttcgctcgacagacagaagaccatgccgccaccagcaacgacaggcaagtcccggggctccgcggtgttcacccgcgacccgggtatgcctgcgcaccgcgcgcctggcccgcagcgggctcctagccaagcctcatgttcccgcgccccagtcggccagtcggttctgcaaagctcccgccccgcagagaccgtgggtccaggttagccgtcggtgcacagcccagcgcccagcgctctccatgcgagcgtcgcggtggccccgacggcgcctcaggcctcggcgcctcgggctgcgacgctcacagcttccacttccgttcacccatgtcccgccctgagcgacccccagtgcccgaagggaaagcaaggcgatggaggtggccgccacagggcgcaggagccagggctgggcccacttggcgggcgcgaagcccaggtacgggctggggtctcggggcggcagccaagtgaggctgcccacagtggtgatggccgcggcg

SEQ ID NO: 314096 - DNA, 1733 bp, Homo Sapiens
  misc_feature (1147)..(1147): n is a, c, g, or t
gtcactctgttcttccatgcctttattggtgacagcaatggacaagaacaataccaggcatagcagacaccctagcccagtacctgaggtgccaggcaggccctgaagggccattggcacatccagtcccagcccaagatccagtctacccaggccatgtccccgaatgggcaggaggccgtctgtccagtttgtatgtgtggatcagtctctctgagtgtctgagccgctgcctgcagggcccccccattctccgcacatggtaggggctgttaggaacatagcgtggcatcccccggtggaccactgggccccagtgctgaccatggggattagggccagggattggaggtggcagagggccaggcacaaagttcactccagggccacatcctaagtggggtggcatcgagaagtcctccactggattatagttgaagaattcatggggtgggaagggctggcctgggaaaaaaggggtatcctggggcaggggtgggaagaggggaggtggcgagggctgaggaagcgggtagggaaaaggcatgggaggaggcaaagaagaaggtgggggtgggagcaaggccaggtgctccccgaagtctggggtctgcctatggcttccctggaatggatgattcatctctgcccagtcctcaatccacgggtcagggggatagccacgcttgggcagctccacgccccaggcgtcagccacatgggtcagaagcaggtgtgagaggtggcggtgtgcatgctggtcccagtggacaccatcccgatgacggtgctgtactgcatgccggaagtgaaagtggaggtctaggacatcaaagcagtggtccccggccagcgtagcactgtagaagttcccttcaaccacatcccgccgcagggagcctgccaggggctggagctctggcaggaggaaacccccagtgatacgttccccgaggggcatcgccatgttccacaccagcaggcaggagtctggcaatacttggtccatgcgcacaaacacccgctccaggttctcccggtagctctccattgagcagcgaccatatctggagagatcccagaggcaggagttgatgatcaccaggtccggggcaggtccatatgtcagctcttccagaacatcctncaaggtactcggagtaaacacgagtgaggaagtagaagcgcacaaggtggtggccagagcccgagcagaactggcggacctcacgatactgtgtcccgttgtgcagctcgcccagctggcccccagccaccagctggtcctgttcaaagctcagctcccccttggctttcagctgggcagctgtgagcagtgagtctttctggagcaagagcaccaggtccttgtacacagccctctgaatggagtcccccaagatgaccacgaacttgttgtgtagcagctgctggacttccgaggcctggaagtggaccatgtcgttcgcagcgggcggcgcggctcctcgctcgacagacagaagaccatgccgccaccagcaacgacaggcaagtcccggggctccgcggtgttcacccgcgacccgggtatgcctggcaccgcgcgcctggcccgcagcgggctcctagccaagcctcatgttcccgcgccccagtcggccagtcggttctgcaaagctcccgccccgcagagaccgtgggtccaggttagccgtcggtgcacagcccagcgcccagcgctctccatgcga

SEQ ID NO: 314097 - DNA, 373 bp, Homo Sapiens
gccaggctcagggtacacctattgccagggagctcccactgattccttgtgagtgtagcacagatttgttgcgactggaccatctgcacgtctgggcttcagagctgttctccccagctgttttctgccaggtcctgtcagaggcagccaccctccctgggcagagcaaaaccttgagcctgtgtttggattttgtttctgggcctaagcctaaggcttcagtttcacattcttggtacctcctggtggtgcctgtgagggagccactgctgtacagagatgccaattccagagagcatggtccgggacagagcgctggcttccagctgaaggacatgtgtaaacaagaccaagggggaaagggggctttttt

SEQ ID NO: 314098 - DNA, 404 bp, Homo Sapiens
ggctgcaggaattggcacgagggaagaacagcctttcaaatttgacttctgcatgtggatagatttctttacatattcatcaatgtctgaagaagttacttatgcagatcttcaattccagaactccagtgagatggaaaaaatcccagaaattggcaaatttggggagcacctccagctccctctcatgtatggcgtccagcagccttgtttctgactcttctgtgccttctgttgctcattggattgggagtcttggcaagcatgtgtatgtactgcccctgttttggtcaagaggaagtatctagaatttctatttagcaacaaggaggacttacaatgtggaacttagtctctttccctcactcctgtagagtaattgctttccctaccccttttctttt

SEQ ID NO: 314099 - DNA, 1253 bp, Homo Sapiens
  misc_feature (15)..(15): n is a, c, g, or t
  misc_feature (53)..(53): n is a, c, g, or t
  misc_feature (143)..(143): n is a, c, g, or t
  misc_feature (170)..(170): n is a, c, g, or t
  misc_feature (236)..(236): n is a, c, g, or t
  misc_feature (686)..(724): n is a, c, g, or t
  misc_feature (817)..(827): n is a, c, g, or t
  misc_feature (965)..(973): n is a, c, g, or t
tatcgtgctcctacnctggcccctcctcggcatgttcctggaaacctacgganctcttcagcctctttaagggctttttccctgtcgccttcggcttcctgggcaatgtctgcaacatccccttcctgggtgcggtaagcagnatgatgcctgcagccctgcgggcttanccctggggagtgtaagggggagtacacggaggggagctggtaaaactgctgccccaggggcattgngccttctcccctgtctcccctcagaccccctagcccaggtttggtgctttaggctcctcttccccccgcaccttctccatttgacaagagcccatgaggagaggggaattcagacgcacttgtcagctgagtgtggctgtagaggcaggtagctatgaacagcttcctgtttacagccaaagaaatgcagacgcacagactctaggtgactcagccagcacctgcctgagatttctggggatctggctaagcgcgggccccacgcatggagagaatgtatgacagctgatcgacaccacgaaaagctgccctgcacgtggcagattttgccctctcctggggataaggacagccactgggatccagcccctggccctccttaccccctccctctgaacccaccctggccagaatggggagcctcctctggagggagctccgggcgaggannnnnnnnnnnnnnnnnnnnnnnnnnnnnnnnnnnnnnnggttcaagttctgggagctcaaggccccccccaccaaggcgccccccttcgtgcggaaaccccgcggcgcatccctaggggcacaccagaagnnnnnnnnnnnttgggggccctcccccaaccgaagggcgcgcccacgggcgctctcgactgggtaccactttagcgcgcctcaggacattacatccccggcccgtcgcgtggggggctcacccccctccacaccgacgtctctctcgtnnnnnnnnnaaggcccccccgggccatctttcttttttcgcgccctcccccccagcaagatctggtggttttctccccggacacaaaccttgtttaaagaggccgtcttcactccgcctccccgaagagggagcgcctggcgaacatgacccgccgcccctatggccgcctctcccttcgtgaccactcggcggcaaccctttttggcgactcgatccgccggggcctcatgcagggtgcgaaaactcggggaacacccccgcccccattcatagccaaccccgcgctc

SEQ ID NO: 314100 - DNA, 786 bp, Homo Sapiens
tttcacacgcacaacttgggaatttaatcttcacttttcctcccataaatatagagtgagggtgtgataccagccccagcccagtctccttggggtctgcatctctgcttcctggcagcctcttgagtcgacttggggatttgacgtcagttgctcagctccattccttccttctggacttggggaggtccggatatgtcggggagtgagtcagtgcaggggactgagggggtggttcccattctccctctagccccctcaaccaatgatccaagttcaaggagctcatctctgtttttcagaccatcgagctagtgccttgaagtctccggaacagcgcacccaggaaggggatgttgcagacattgcccaggaagccgaaggcgacagggaaaaagcccttaaagaggctgaagaatccgtaggtttccaggaacatgccgaggaggggccagcgtaggagcacgataaccacaccccccaggaggaagctggttcccttgagtttgtgccgttggaagaagaaccaaaaggtcttcctcaggccaatgatgagggacaggcccgtcaggaacagcaggtttccaaaggccaggagcacggaatcaaagtacaggagtgttccaaagaggatgaagaagatgccgaaaccggtgatccccacaccaatcttctgccattcggtgatggagatcatgccgcactcagcctggggggctttccgggtggaagcgggcaagtggagcgtggcccagaggacgcagctggtacatggtcacgggaccc

SEQ ID NO: 314101 - DNA, 444 bp, Homo Sapiens
  misc_feature (296)..(297): n is a, c, g, or t
atcgcgcctgcacagcttcctggctctcaaggccagctctgtaataactagatattgcatctgctctctaccctttgtgtggagtaatgattcttggctccccacagctgttccggagacttcaaggcactagctcggatggtctgaaaaacagagatgagctccttgaacttggatcattggttgagggggcttagagggagaatgggaaccaccccctcagtcccctgcactgactcactccccgacatatccggacctccccaagtccagaaggaaggaatggagctgagcanntgacgtcaaatccccaagtcgactcaagaggctgccaggaagcagagatgcagaccccaaggagactgggctggggctggtatcacaccctcactctatatttatgggaggaaaagtgaagattaaattcccaagttgtgcgtgtga

SEQ ID NO: 314102 - DNA, 349 bp, Homo Sapiens
ctggagtatatgagttccaaggtatttttttctgatgaaaaatatctatcttggtttttacttattagaaatggaaatgtaagcactttgtactcactatataggccactggataatcaccaggttggtgcaggtgtgagggtgagtgtcagaaccccaaagaactggttatgttttgaggatccatattcaggaacatataaatttatactgggtgtaaatcccacttgtactgaatgcttgactacactttcccatggtacacatcatcatttccttttaagacatgatcactccacttttctccaagttttaatcacttataatataatatgatataatgttacgt

SEQ ID NO: 314103 - DNA, 613 bp, Homo Sapiens
gcagtccatgttcttttcccaaggttctggatatacctagtgctcacttggcagagcccacccgtgtgccaaagactctggtggccccattactcagctggttagttgttaccacttggcagtcctcatgacctttgctgatataactttctgctgaacttttgttctctgctaagcctcctgttttcttctgaagtagtgtgtaccatggctaaatctccttgacttgtttgcacagggataaggcttgtctcagtattttggctgtggaatatcgttctctcactgactggcctcttatattgggttaactagaatagactacaggaggtgtgacattgtaagtgaacctggggtgaggcacagggcagacaactccagcaaggcatggaatggatcctgttttgccttccccttaactgagaggcagccacctaacctatgtggtaaatgcctttcctccaaggttaggttcccttagagccctcttcattcactttgtggaatacagagagccaaatacaaatgggcttagttacaatatgtttatacttcaaagttgtctctcaggtatttgactcctctccttcactagcctcattcatcttggtag

SEQ ID NO: 314104 - DNA, 554 bp, Homo Sapiens
  misc_feature (542)..(542): n is a, c, g, or t
ggcagcttggtctagtggagatagcactgtgcttggagttcaggggacctaggacaaatcccagccagttagttattcactgtgctcctgtttcctcagctgaataggaagaaggtttttgctcagtacctggcatgcaacagacattggataaatgttagttggatccagatatacacagaaagatatctgcttcctgccaggctggataactgttgaatggacacttgtccatagtctagaaagccagtgcttctaatccttaagccagatctttgactaccttttcagttgcttctttaacactctttgttgcttctctgtgtgtcctagtttaaattcatttcctctccagcaaaagtgagcttaaataatttctccaaactaaaagctctcatgtttttgggaagggctgcctttgcaaagtgaggtttctgaggaaatgactgttgttcccaaaacaagagggagctgggctggaagcaccactaattcctccttaggcatcctggttacaagggagaaggcaagggccttcactnggcatatttaaa

SEQ ID NO: 314105 - DNA, 477 bp, Homo Sapiens
  misc_feature (358)..(392): n is a, c, g, or t
accaaacgagaaaaatcagacaaaatactttaaaaagtatactaccttgatcgggacttagacttgtgtttgcggcttgccttcttaccagacctttgagatttctccacggatcgcgatcgactatgtttaggcttcttagccttcttttctttgctacttcctggagactcagaactgctccttccactagaatcagagcctgaatgttttttactatctttggtagtacttttcttactatcctgtctagaatcatgtcttatgattttaacagatatagaaccactcctagaaaatgttctttcactttctcgtttcctttttaatctatcatcctgactactgaacttaaaannnnnnnnnnnnnnnnnnnnnnnnnnnnnnnnnnnatcctgttcacgttccctttctttgtctttctttttcctatctttatctatacttcgactcctctcctttttcctctcttgttct

SEQ ID NO: 314106 - DNA, 1218 bp, Homo Sapiens
taaggaggaggagggctttggggtggctggtgcggcggacacagcggccatggccggagcacagggcttgactgcagagaagggccccactggtcacgttcaggatgaagggccccagtgcccagctcacccagagcaccactccagctgccccctgggccgcactctcccccaggctgtgctccagctcatccaggggcagaaagtggtttgtcgtgtcatagaagatctggacatagggcagcaccggcagattggggtcaccagcagccacagccacacggaatgcctcggccacacggtgttgcacatacatctgtgacttccctgtgccctccagcactgcgggcatgtagatgctgggatagagggcacggctctggccccacagccaccctagctggtcattttgggcacggatgcctgatgggcactggccggtgtagttggggcttagaaagtcatagttgtagcagtcagggaagccatagaagccccagaggccgcgaggacgcagtgcccgccccagctggagggtgcctgccatccaggcccgtgcagctccctggaactggtcctgggctactgcctccacctgaggagctggccaatcagggtgctgtgcctgtaccagtgcccgtgagcgctgccggtaaatgtccggtgtcccagttgaaggcccagcgtgggcgccatgcctcccagtcgatgactgccagccctgagaagtcaggagcaggtatggcagccaggatgtcctggaatgtgcgggccaggtgggcaatcaggctggcattctggggcagaccaccaaacacaggctccccagtgggcgtgtagtaggggtaggtgcccagctgggagctatagaaaattgtcatgtcagggccgcggaaggtctgccctgggttggctaccacatcgaagacactgacatccacgtccacaccgtgcctctccaggcaccactgggtgtttgcattccagacggtggtgaagggccggttgggtagcaaggggcccctaaagccttgggccatatcgagtaaggtcaggaagagggcgcagatgggaagcaggtgggctgccatggcacgggactggtcgaggacaaccttggggctgaagggccttatcctccaaatttcctgaccccaggatgggggcctaagcagggcctggccagattccaccccagctgcaccagagatcccggga

SEQ ID NO: 314107 - DNA, 1041 bp, Homo Sapiens
  misc_feature (16)..(16): n is a, c, g, or t
  misc_feature (30)..(30): n is a, c, g, or t
  misc_feature (44)..(44): n is a, c, g, or t
  misc_feature (78)..(78): n is a, c, g, or t
  misc_feature (701)..(701): n is a, c, g, or t
  misc_feature (716)..(716): n is a, c, g, or t
  misc_feature (828)..(828): n is a, c, g, or t
  misc_feature (882)..(988): n is a, c, g, or t
gccgagcattccgtgngctgtgctgctgtnccccaatctgccgngctgccctatgccagatcttctatacacgacaanccactttctgcccctggatgagctggagcacagcctgggggagagtgcggcccagggggcagctggagtggtgctctgggtgagctgggaaaatacaagaaccaaggaatcatgtcaggccatcaaggagtatatggacactacactggggcccttcatcctgaacgtgaccagtggggcccttctctgcagtcaagccctgtgctccggccatggccgttgtgtccgccgcaccagccaccccaaagccctcctcctccttaaccctgccagtttctccatccagtcacgcctggtggtgggcccctgagctgcgggtgccctctcacttgaagatcaggcacagatggctgtggagatcaaatgtcgatgctaccctggctggcaggcaccgtggtgtgagcggaagagcatgtggtgattggccacacactgagttgcacatattgagaacctaatgcactctgggtctggccagggcttcctcaaatacatgcacagtcatacaagtcatggtcacagtaaagagtacactcagccactgtcacaggcatattccctgcacacacatgcatacttacagactggaatagtggcataaggagttagaaccacagcagacnccattcattccatgnccatatgcatctacttggcaaggtcatagacaattcctccagagacactgagccagtctttgaactgcagcaatcacaaaggctgacattcactgagtgcctactctttgcnaatccccgtgctaagcgttttatgtggacttattcattcctcacaatgaggctnnnnnnnnnnnnnnnnnnnnnnnnnnnnnnnnnnnnnnnnnnnnnnnnnnnnnnnnnnnnnnnnnnnnnnnnnnnnnnnnnnnnnnnnnnnnnnnnnnnnnnnnnnntacagcccttgcactcctactgagtttgtggtaaccagccctgcacgacccct

SEQ ID NO: 314108 - DNA, 1033 bp, Homo Sapiens
ttaaatcatgactgctttatttgctggacttgtgcctctcagcagattcaggggttgtgcagggctggtttccccaaaattcagtaggagtgcaagggttgtacccccggagctagacagcctgggtttgaatctcaacttctcccttttcttgcgtgcaaccttgggcaacgtgcttactctcaatgtgagtgactcagtttcctcatagcctcattgtgaggaatgaataagtccacataaaacgcttagcacggggattggcaaagagtaggcactcagtgaatgtcagcctttgtgattgctgcagttcaaagactggctcagtgtctctggaggaattgtctatgaccttgccaagtagatgcatatggacatggaatgaatggtgtctgctgtggttctaactccttatgccactattccagtctgtaagtatgcatgtgtgtgcagggaatatgcctgtgacagtggctgagtgtactctttactgtgaccatgacttgtatgactgtgcatgtatttgaggaagccctggccagacccagagtgcattaggttctcaatatgtgcaactcagtgtgtggccaatcaccacatgctcttccgctcacaccacggtgcctgccagccagggtagcatcgacatttgaactccacagccatctgtgcctgatcttcaagtgagagggcaccccgcaggctcaggggcccaccaccaggcgtgagctggatggagaaactggcagggttaaggaggaggagggctttggggtggctggtgcggcggacacagcggccatggccggagcacagggcttgactgcagagaagggccccactggtcacgttcaggatgaagggccccagtgtagtgtccatatactccttgatggcctgacatgattcctaggtgggaagggaggatagcgtcagggacaccatggccatgtatggacccacccagggcactgaggcactcacctgctggtcagccaggactttgcaggtagaaagggtaagtcagggtcta

SEQ ID NO: 314109 - DNA, 458 bp, Homo Sapiens
atcttgctgccaagttcacctcctaacatttcaattgctctattgctaatgacttcatttacattcatatttgtctgagttcctgatccagtctgccataccacgagaggaaaatgatcatttaatttaccttcagctacctcatctgctgccttcattattgcattagcaatctttggatcaagaccataatcctggtttacttcagcggccgctcgcttcaagatgccaaaagctttaataactggggttggcatgcgttctgtcacacctccaatcttaaagttcatcgtagatctcacggtctgggcgccataatacttatggcttgccattcgagccgcgttcggaggccaaaacgagggcgcgtccgcgccactcaagccgggagccgaagctaaggctgcggctggagcccgcacgaggggacgcgagcgcgcgaggagccgaagtgctcg

SEQ ID NO: 314110 - DNA, 915 bp, Homo Sapiens
  misc_feature (186)..(186): n is a, c, g, or t
ggcaaagagccaaattctagtgtatttaaaacccggttcccaacaagcaagtgccttccaggtggcaagttcattagatttcttggcaagggccagctttttattttttgccatggccattattttacctggttgaaccttaaccaataaaatttcctgcccaaggagtaagtgggaccagcatcnctgaggtatgagtacgtcccaatctttgatgatctgtgcaaactctttggattttgcatcaagagcatcatgtaacttctgtagtcctggtaacagtacttcatgaacttctattgcagcagcaatgtgcattgctgtgggaaaagtatcatttgagctctggcttttattaacatgatcgttgggatgcacaggtatcttgctgccaagttcacctcctaacatttcaattgctctattgctaatgacttcatttacattcatatttgtctgagttcctgatccagtctgccataccacgagaggaaaatgatcatttaatttaccttcagctacctcatctgctgccttcattattgcattagcaatctgtggatcaagaccataatcctggtttacttcagcggccgctcgcttcaagatgccaaaagctttaataactggggttggcatgcgttctgtcacacctccaatcttaaagttcatcgtagatctcacggtctgggcgccataatacttatcatttggcacctttagttcaccaaaggtatcatattctatccggaaggaattttggcttgccattcgagccgcgttcggaggccaaaacgagggcacggccgcgccacccaagccgggagccgaagctaaggctgcggctggagcccgcacgaggggacgcgagcgcgcgagcctcgtgccgaattcgccacccaggcctcgctcctt

SEQ ID NO: 314111 - DNA, 1003 bp, Homo Sapiens
  misc_feature (241)..(241): n is a, c, g, or t
  misc_feature (255)..(255): n is a, c, g, or t
cgttccagtgaggcagccaagaggctttcaaatttatattcgggaggcagtgaccaaaagggcaagcccctgtaagttgcagcccacttttggcaggcaacctttttcctgcaaaagcccatttctagtatttaaaacctgtaccaaaacaagcagtgccctccagctgcgagctcatagattcttggcatggcagcttttattcttgtcattgcatattttacttgttgaacataaccanttaaattccctgcncaagagtaagtggaacagcatcctgagtatgagtacgtccaatcttgatgatctgtgcaaactctttggattttgcatcaagagcatcatgtaacttctgtagtcctggtaacagtacttcatgaacttctattgcagcagcaatgtgcattgctgtgggaaaagtatcatttgagctctggcttttattaacatgatcgttgggatgcacaggtatcttgctgccaagttcacctcctaacatttcaattgctctattgctaatgacttcatttacattcatatttgtctgagttcctgatccagtctgccataccacgagaggaaaatgatcatttaatttaccttcagctacctcatctgctgccttcattattgcattagcaatctttggatcaagaccataatcctggtttacttcagcggccgctcgcttcaagatgccaaaagctttaataactggggttggcatgcgttctgtcacacctccaatcttaaagttcatcgtagatctcacggtctgggcgccataatacttatcatttggcacctttagttcaccaaaggtatcatattctatccggaaggaattttggcttgccattcgagccgcgttcggaggccaaaacgagggcacggccgcgccacccaagccgggagccgaagctaaggctgcggctggagcccgcacgaggggacgcgagcgcgcgagcctcgtgccgaattcgccacccaggcctcgctacct

SEQ ID NO: 314112 - DNA, 1921 bp, Homo Sapiens
  misc_feature (125)..(133): n is a, c, g, or t
  misc_feature (311)..(311): n is a, c, g, or t
ccccccggggtgtgttctttcttttgggacaaaccacccttttgggcccccgtgtttctcccttcctgttttttgggggggccgccgcgcccccccaccaaaaaaagggtgttattaaaaaagannnnnnnnnaaggggcccgaagggggggcgccaccaacattttttgcccgcggtgctgagcctctcgtccgcggccccgcggaggcagcgccctcctccccgctgtcccttctctgcctcgccgtcctgcccgcgcgctccccggtccgctggggcccgcccgcgccccggtttggttccgctcccnttttaaattttatacatgtttattttcattataaatttatgtaaatcactttggacccagcatgtccttaggttttacccattcgtcaaactgctctgctgtgagatagccaagttcgatagcagtttcctttaaggttgatccatttttgtgtgctgtcttagcaatctttgctgccttgtcataccctatatgaggattgagagctgtcaccaacattagagactcattcatcagcttgttgatcctttctgtattggcctggattcccaccacgcagttttctgtaaaggaaactgaagcatcccccagcagcctggctgagtgtaacacatttttaatcatcattggcttgaaaacattcaactcaaaatgtccattgctgcctccgacagtgacagcaacatggttccccatgacttgggctgcaaccatggtcattgcttcacactgagtagggttcaccttgcctggcatgatactgcttcctggttcattttcaggcaagatcaattctcccagacctgaccgaggaccagaacccaaaaatcgaatatcatttgctatcttcatcagactgcaggcagtagtgttcatggctccactgagctcaaccagagcgtcatgagcagccagagcttcaaatttattcggagcagtgacaaaaggcaagcctgtaagtgcagccacttttgcagcaaccttttctgcaaagccaattctagtatttaaacctgtaccaacagcagtgcctccagctgcgagctcatagattcttggcatggcagcttttattcttgtcattgcatattttacttgttgaacataaccactaaattcctgcccaagagtaagtggaacagcatcctgagtatgagtacgtccaatcttgatgatctgtgcaaactctttggattttgcatcaagagcatcatgtaacttctgtagtcctggtaacagtacttcatgaacttctattgcagcagcaatgtgcattgctgtgggaaaagtatcatttgagctctggcttttattaacatgatcgttgggatgcacaggtatcttgctgccaagttcacctcctaacatttcaattgctctattgctaatgacttcatttacattcatatttgtctgagttcctgatccagtctgccataccacgagaggaaaatgatcatttaatttaccttcagctacctcatctgctgccttcattattgcattagcaatctttggatcaagaccataatcctggtttacttcagcggccgctcgcttcaagatgccaaaagctttaataactggggttggcatgcgttctgtcacacctccaatcttaaagttcatcgtagatctcacggtctgggcgccataatacttatcatttggcacctttagttcaccaaaggtatcatattctatccggaaggaattttggcttgccattcgagccgcgttcggaggccaaaacgagggcacggccgcgccacccaagccgggagccgaagctaaggctgcggctggagcccgcacgaggggacgcgagcgcgcgaggagccgaagtgctcggtaccctcgtgccgaattcgccacccaggcctcgctcc

SEQ ID NO: 314113 - DNA, 370 bp, Homo Sapiens
gtgttagatatgttgcttttattcaaaagaataaaatgcttgacaaactctttaatcacaaggtttgaaccaaaccaccagtcttctacaacaactctgtgaggtaggtatctgcatagccacaagggatccacatagtcctttcttcccttgtacctctcaaacactgagaattgtagtagttgaaaccactgttctagtgggcagttagaacaggtgttttccccgtcttgttcctcacagagctgcccggtattatctgcttctgggggtggaccatctgttttatgacagttatgatattgttgttatccaattggtatttgatttatatgatctaactctgaatcacggggattactatgtgttc

SEQ ID NO: 314114 - DNA, 517 bp, Homo Sapiens
atcggagaacgatagacgggctgcaggaattcggcacgagagaaagtcgacatgttctcgcaggctgccgggcgtcccggggttgcctcttgcctgtgaccctgacgggagacagagcgcgggcggccgcggcgtccctgtcagcgcccgcggcgagagaagcatgggaaggaggccgagccgggatctcaggtcctcgggggcggcggccacgccaaggacggtacaaaactttttaccaacaaaaagcaagtagttatactcaggaagaacttcgacacttacgggtttcttctgtttgatactgaaaagcaggcaaaattggtatgtcagtgtggactccgtgttggcagcagtgctgttaccactctgggtgatccagccaaagtattacttttacgaactttcaggcaacaccgttattgacgacccagacagatctgtccttatgtaattgtagcttttcgatacagggaaatctactatggcaccaccagctcatgcatacttgcgcgtg

SEQ ID NO: 314115 - DNA, 685 bp, Homo Sapiens
  misc_feature (174)..(216): n is a, c, g, or t
  misc_feature (331)..(407): n is a, c, g, or t
aaattcagccattaacaaattgattctgctcggacaagcctatgccaagacaacaagtcagtaacaattcattgaaaagctttctattcaccaccgccctctccccgcgggtggaccattccttcatgcaaccggcttgacaggtgtcccaactggacaccgggcagtatactnnnnnnnnnnnnnnnnnnnnnnnnnnnnnnnnnnnnnnnnnnnttctttactcttcatacttcaggctagaatcgtgtatggacttgtcatcgcatatccatttcacacagaaaactgctatgccatcattcgccaagctttacatttttcctcagtnnnnnnnnnnnnnnnnnnnnnnnnnnnnnnnnnnnnnnnnnnnnnnnnnnnnnnnnnnnnnnnnnnnnnnnnnnnnngcacaagattttattcacagcgttgagttttaatttaccacttttaaaaggcagagcatttttaacaaggggtgacaggtggttttgataacacacttataaggctttctgtaaaaggtactatagaagggcgaagaatcgttcacctgtcaatcagcctcttgattctttgtaaattgccagggtgggtgggtacatatctcttcttgattctgcatttcatacttaactatattaaagctcaaggaacaatacatagtaccctggtaatgacctaa

SEQ ID NO: 314116 - DNA, 672 bp, Homo Sapiens
  misc_feature (84)..(101): n is a, c, g, or t
gcctttaaaatcattttataaagaatggcacaagttggggtttatgtttactcagatgaacccgtccccttagaggacacaatnnnnnnnnnnnnnnnnnnaactccacgactgcccatcattgctgttaatccctcaggggagggttcacagctgtttatgaagccaagagaggttctgggcaagatcacagctggggaaacaggcccaggccctgctccctggtgtcctccatgctggagtcagcggtgcccaatgacggggtgatgtgatcacatctgcttccttctccacaacaagagcagggctggcgggcaggccaggaaagtcctccaggatctgatcttgccctccgactgaccagtgcgagcgacttctgcttctcttgggtcttctagtggtagaagacagctggagctggggtggtatttggatcaccccagacccaagatcagtggactggagcaccatggaaatgtttgggagggtccctcaggattgggactttcccctgaggcctctaggctcctccaagctgtggcctcaaggataagagagattgtgtcaggttcatgtgtctctggaactgcatgattgctgttgagtctgtatgtgtttcacctgtgtatggatatgtgtctctgatcagatttgtgccagcccctaaagtct

SEQ ID NO: 314117 - DNA, 359 bp, Homo Sapiens
cggagactgctagtgtcctctaaccttcctctatcgcctgtattccttgcaaaggagaaactagatctaaaagtactagatgttgactggattaaatgccaatttaggctgttggctctttagaagactgtctttggctttctaggactccatccccagggaggatcacctagggagggatttgtggttatatagagacagggagagaaacagacccaccctcgctgtgaaaggatcaacactgaatttggaatttagtctggaagttgactatttttattctctggacttcaatttcctcatctaaaaaatgaaataacaacagttttatttttgatggattattgggctcaaatgag

SEQ ID NO: 314118 - DNA, 662 bp, Homo Sapiens
agcacccatcatggcagagagcttggaatggtcagcataggttacaagagtaggatgtgcatcatcttgtaggagacctcgctttacctcaatcaactcctgagctgcaaacttctgcaggaggctttctaccccatcttgagtggcaggagcatctggctagagaacgaggggaggtatgggcaataagacactgaccgtgaactgaaaataagtggtaaatcctaactctgtcaggtcattaccgtggagatggcaagacagatggacacagcatcagtgggcaatgttaaggccagatcagagaggtggtgtagcaacttcttctctaactcaggatctgtagctaattcaggaactgctgaagctgtgctgggcttagggccaccagaggtgggtgcagtaggcactgggctgtcactacggaaggttggagacaatgctgcctctggattccgtagatccaagtgccccgagtcctgcttccgcctccgctgcagcctctcccgcagagagtccagctgcttcttgtgggcctggatagagctccacgtgtccgacatcctagtctcccagccctgacacctctcgaataaggcgcggcggactagcacctcccagcactcgctccaggatatagccaattctcacgcggacacccc

SEQ ID NO: 314119 - DNA, 1117 bp, Homo Sapiens
  misc_feature (15)..(15): n is a, c, g, or t
  misc_feature (27)..(27): n is a, c, g, or t
  misc_feature (37)..(37): n is a, c, g, or t
  misc_feature (96)..(96): n is a, c, g, or t
  misc_feature (110)..(110): n is a, c, g, or t
  misc_feature (115)..(115): n is a, c, g, or t
  misc_feature (180)..(180): n is a, c, g, or t
  misc_feature (186)..(186): n is a, c, g, or t
  misc_feature (217)..(217): n is a, c, g, or t
ttaacgggttaatgntttgaacccttnccgcaatctncattcatcctgttcaaggggtccccataaggggcaaggttcccatgttgaaatatcccnagggtgggttcaanccatncacaaaacttgcaaaaacttgcccaaagaatactgacgtcccaggtagcggatatcaacaaacangatccnactgaggtgggaaaagtcgggtctgcactgnaatcacctccgaacactctgtgtaagagcaagctcctggcttggcgtgtggtctttggctgccaggggccctcagaatcccatgcaaagcatccatttcattagtgaacatacttgcaggtatccatgtggaaacatgtattaaggaaagagcagtcacctaaaagactcatcagtgtgtttattgataattcgtctgaagtgcagcttgcgacagggtcgatcagcatcactggctttcatgcactcctccttggttccatagtcacagaattcttgcacttgggcccgacctcgagagcgaaatttttcaacaatggattgttccttggctgttgtagtatttaatagctctaggatctcctgactgaccttcttgctctgttgttccttagtggactgttggttcagaaggctctctatctccagatcaacatctgaggcagcatgtttccttgatttcttggctggctcctttgctggttccgatgctgaagagttcagaccagagactaacgaactggcaaaggcagctactgtagtcgagtcctgttctgcacgccgcttctgccctgtgacagtccctgctacctccccagggcccttcttttctgccacagcacccatcatggcagagagcttggaatggtcagcataggttacaagagtaggatgtgcatcatcttgtaggagacctcgctttacctcaatcaactcctgagctgcaaacttctgcaggaggctttctaccccatcttgagtggcaggagcatctggcgtggagatggcaagacagatggacacagcatcagtgggcaatgttaaggccagatcagagaggtggtgtagcaacttcttctctaaccctcgtgccgaattcgccacccaggcctcgctccta

SEQ ID NO: 314120 - DNA, 1394 bp, Homo Sapiens
ttaaatatggagaccctttttcggattaaaaccccctagttagggacatgttttccaggtttaaagtttcatgaccatataaaccagaaattgggtcctgccaccttgagtgcaggattctgaggtcctaaatctggttctgaggttctgtatttgattctggggtacagacagctcaagtaggaggtctccttatgtcacaaaactacacgatgcggaggttctgttccccaccaaaggcttgtctggggcccattggctgcctggggaggaggccccagcgaggctcatgggtccagcatggctcctggggggacccctactctcaccacgcaagagcccccagccaggagcactgggccagccagctgcgggccgatgagggggcttctggcccgccctgcacctggaggcccgccctgcacctggagttcctgcttggccacgggtgggcagacccaggagacacagcactccccactgggtctaggaccgtctccgcgggtggggaccccagccggccaggcatgtgccctgacagccctgccgacaacaacacctgaagggaacccagagtcggccgtaggaggcggcggggtctgtgctgctgggggcggcctaggcctcggaggaggactgtgatggcccctgcagcagcagggcacggtaggtgggagagctgaggaagcgggggtaggagtcccggtgcatgagcgtgtagatctgcagctgcgcgtcgtcgaacgtgtgtgcggacggctcctgcatcttcttgttgatgccctcccgcacacgggagtccaggctcacctccttgggggacaggatggatacgtagtcctcgtagatgagcctcgccttctcgtctaccacatgctggttggcctcggccttcagctcctcgcaggccaaccagaagagcatgttctcctcgctgtactctgtccgcaggaacgcccggaacacgctgcgtcccgctgggctgtgcatcagcttgtcaaaagactgcgcccagctctgcacctcctcaggacttggcgtggcacatacttcacagctggggaggggctgcagcttgctctcccgggaggcctgccacgcgcgccgccgctcttggttccaggagcagctacagcagcagcaccagcacaggcagcaggggttgcggctgggggccgctggagaggctgtatcatgactggacattgaagggggccggtccgcctcctctggccctgtgatctgcttctcagcctcatgcggggtgggcatgggtgggcggaggaggttgcccaggctccgtggtaccagctctcagaccctcaccacagcctgggggtcagccgcgctcccgagctactcgcgccgccgccatcccgggaattccggaccgg

SEQ ID NO: 314121 - DNA, 1001 bp, Homo Sapiens
ggtgggggagtcgcccagcgccttgggcaatggacccgggattttccgtacggagatcagggttgggcccatggttcaccttccctagcggggtcccggggggccaaagggaaatggttttgaaagcttttttgaagggggcgaaggcggccgacaagggtttacgggtggtgtgagtcggggaaagggggggtaaaaatatcttcaataatgggacatcctatttttggggggttagggatagagataaatatgaaaacttttttttgataaaacacctagtaaggacatgtttccaggtttaaagttcatgaacatataaaacagaaattgggtcctgccaccttgagtgcaggattctgaggtcctaaatctggttctgaggttctgtgtttgattctggggtacagacagctcaagtaggaggtctccttatgtcacaaaactacacgatgcggaggttctgttccccaccaaaggcttgtctggggcccattggctgcctggggaggaggccccagcgaggctcatgggtccagcatggctcctggggggacccctactctcaccacgcaagagcccccagccaggagcactgggccagccagctgcgggccgatgagggggcttctggcccgccctgcacctggaggcccgccctgcacctggagttcctgcttggccacgggtgggcagacccaggagacacagcactccccactgggtctaggaccgtctccgcgggtggggaccccagccggccaggcatgtgccctgacagccctgccgacaacaacacctgaagggaaccccagagtcggccgtagaggcggcggggtctgttcgtgctgggggcggcctaggcctcggaggaggactgttatggcccctgcagcagctgggcacggtaggtgggagaactgaggaagcgggggtaggagttccggtgcatgatcgtgtagatctacagctgcgcgttgtcgaacgtgtgttcggacggc

SEQ ID NO: 314122 - DNA, 354 bp, Homo Sapiens
gagatagcaaagtaagaactcaatgcattcaggtctattaccatgttagtctggcccaagccaaactcaatgaaaaattaatgccaaaggatgtccttacctcaaatatgtttgaaggctcattgttgtactgattggatattatttctgattggtcactgcaccacttgagtccacccagaaagctgtctgtatccaagtcgttcacatctagttcagaaagatcaagttcaggaagatctgggcaaagaggctggtcttcaccaaccagagcagcacactcgatgtcactccatacagactcagagtcctcaactccaatccacagtgacacagagcacacactcatgcagg

SEQ ID NO: 314123 - DNA, 252 bp, Homo Sapiens
aagcctacatggctagagcaagcaatgtagtgcctggtgaaagagattgtgtcataccttcatatctagatcaccttcgtgatgatagtctggtgagcattcgtattgagctcaaatatgtctcactctgtggctcgctgtggttcgttcacatagtttttccccataactcattgccaccaatccttcagtctttgtctttccgagtccctaattatctcttcgagtgttctctggatcttttcgcttcgg

SEQ ID NO: 314124 - DNA, 1115 bp, Homo Sapiens
  misc_feature (628)..(644): n is a, c, g, or t
  misc_feature (685)..(713): n is a, c, g, or t
ggagcgaggcctgggtggcgaattcggcacgagggccaagatggcggcagctgcggcttcgcttcgcggggtagtgttgggcccgcggggcgcggggctcccgggcgcgcgtgcccggggtctgctgtgcagcgcgcggcccgggcagctcccgctacggacacctcaggcagtggccttgtcgtcgaagtctggcctttcccgaggccggaaagtgatgctgtcagcgctgggcatgctggcggcagggggtgcggggctggccgtggctctgcattcggctgtgagtgccagtgacctggagctgcacccccccagctatccgtggtctcaccgtggcctcctctcttccttggaccacaccagcatccggaggggtttccaggtatataagcaggtgtgcgcctcctgccacagcatggacttcgtggcctaccgccacctggtgggcgtgtgctacacggaggatgaagctaaggagctggctgcggacgcgcaggttcagaacggccccaatgaagatgcggaaatgtttctgcgcgccaggcaaccctcttccactatttccccacaaccatccccccaacatggagcgtcgctcgaggctcgccaccaccccgacctttannnnnnnnnnnnnnnnnttacatgccgccgaactaccccccgcgtgctacgcgcattnnnnnnnnnnnnnnnnnnnnnnnnnnnnntgttttcacccgcccacccggccgctccccccatcccgcccgatttataagccggctatccccccactcaccccatactaccgaccttgttgccccgcgccggctgcgcgcgcccttcctaccccgcgctaaccgcccggccgataatcacgcgccgtcagtcctcgtacggtccgccttggccaccccgcatatgccctccaccccccttacctcttatcccgccccgcgcccgccacctgttacgagtaagccagagaccgcccgccgagaagacgtggcgccccattagaagtgcgcccgccccgcacagctctcctcgcgccatatatagcccacacacccgtcgcgaggttggcggtccccgcccccgcacctgctcgcactctcattttcgcccgc

SEQ ID NO: 314125 - DNA, 1210 bp, Homo Sapiens
ttttacattgagaaaattaatttattcccatgatgggggctgaaggagggcccagagctagagcctggtctcctgcccccttgcctcttcttccagatgaagagaggcttagctgaggcctgaacaggcctgggatggctcttgggcttgagggcctgttctggcaggatggcaagcagacactggacagggtcacttgggcggccgatatgccagcttccgactcttcaggactgaccacttgtgccgctttatggtgtagaccaggggcaccagcagagccatcatcatcaacatcttgagccccatgcgttttcgatggtcgtgctctggctcagatgcccagcgcaggaaggtgcacacatccttggctatctgggacatggtagctggggtgccatcgtcaaactctaagacatctgtgtagatgggaggggccatggcaatggcctggccaggaaagtaggggttgaagtagagaccttcccgcagtgacaccccggtgggtggctcgcagtagcccgtgagcagggagaagacgtagtcctcaccaccatgcctagctcgcacgatgtagctgaggtcagggggcaatgctccgttgttggcagctcgagcagcctcactgttggggtatggttttgggaaatagtcgaacagcttccctggccgcatgaacatctccccatcttcattggggccgtcttgaacctccacctccgcagccagctccttagcttcatcctccgtgtagcacacgcccaccaggtggcggtaggccacgaagtccatgctgtggcaggaggcgcacacctgcttatatacctggaaacccctccggatgctggtgtggtccaaggaagagaggaggccacggtgagaccacggatagctgggggggtgcagctccaggtcactggcactcacagccgaatgcagagccacggccagccccgcaccccctgccgccagcatgcccagcgctgacagcatcactttccggcctcgggaaaggccagacttcgacgacaaggccactgcctgaggtgtccgtagcgggagctgcccgggccgcgcgctgcacagcagaccccgggcacgcgcgcccgggagccccgcgccccgcgggcccaacactaccccgcgaagcgaagccgcagctgccgccatcttggcctcctccgccctcgtgccgaattcgccacccagc

SEQ ID NO: 314126 - DNA, 901 bp, Homo Sapiens
tttttaggaaagacattttgcttttttattttctgtaaaactctgtaaataaaatacaaaaccaagggatgtggctgggcagcggcagggtggccaagccccagacactgatttgtggcaagggatgtgctgagccgaggctgggaggcacttgactgcaggcactgactctccaaccccaggggcaacagaagaatatattagattttcattgctaggaatctgtgggggaggggtatctggagccagcccttaccctccctgccagtgcctggtgagccctgaaagtggggggaaaggggcaccaggaacccatgggtgaatagtttagaatgctgtgctggccatgctgccaggcccaaagatgcggggcagggcgtccagggactcctccagccgtcgatgggcagactgtccctcttctccacactgctgtaggctttgccgggcagcttccctcacagcttctgtgtcagtttggcaagaggtacaccaggggctcaatgccctcgggagccgatgcagcctagggccaggcagccagccactcgagtctgcacgtcctcatcctccagctggtccaggaagcacaggagggccctctcccggaaggtagggcccagtgacaggctccggagctgggtgctgacagcagccatgaccttgttgttgccatggacgagcagggagctgagggcccgcagcccgtcccttcgcagacgcccctcgggcgccaatctcagggccttcagcacaacagcctgatcatccgagttcagattccgcaccagtagcacctcctcagcggtctcagtcacgtaggcctccatggtggggctgtccaaggccacaaaactccagaactggaagactgtgagctgctctccaggccctggctggg

SEQ ID NO: 314127 - DNA, 736 bp, Homo Sapiens
cccctttttttcccggaaaaaagggaggggcccccaggttccccgggtttccccggaactgggggggcgctttaccagccagccccattgccccttggttttttccccccgggcccaaaccaggggaactttggggggccccccaagccccgttcccctttggcaagaaccccccttgggggcgcccattttcaggggcccttaaacccaaaccagccctggaatcctccccggggttccaggattcccgccccccagtaggcccctccttcaaggggtttccaagttcacgtaggccttcccatggtgggggctgtcccaaggttttccacaaaaactccagaatctggaagaactgtgagctgctctccagggccctggctggggctttctgggcagcttctgccccagggcatcctccaggaacttcacacacacagcctcagccaagcctggctggcgcagggagaggcgggcaccatactggttgcagaaggtgagaagcacccgctccaccgggcagaggaagcagctgagtctctctgtgcactggtcccagaaggtcaggaagccaggccgagaggccgagaactgcaccacttcctgggcagagctggccgggatctcccaccgcctgctgaactcgcatactgcctccagtactcgggcttcccgcagcagccgctccagggcccatgcctcctggcagcgcaggggcccaaatgtgcccagtttc

SEQ ID NO: 314128 - DNA, 658 bp, Homo Sapiens
caaaggaacctccgggcggccaaagggccaggcggggtaggggtcgtagggtaccgcaggtggttggtacaactcaaggcccatatgggaggccttggtaaggtggacctaagtctgggccgtactcgtaggggagtccaaaagccacctggtcgcggggggctatatgcgggggggcgtagcacattgcacagggcctcgaagtcatctgagtcctgcgcagggcagagggcgcagtccatgccccaggcctctccatacaggcagcagcactctgtgtaggtggcctgacggtccagccgagggtggctgcacacgaggtcagcccccaccctgccagcacactcccagattgtcatcgaggctctggctctcgttggagacgcagcggcgctgcgagccatccagcaccagtgggggctcgcaggtacagtgataagagcccacagtgttgacacagcggccgccctcacaggccggttcctcatcggcgcactcgtcattatcgatgcactccagccgctgtgtgtggtagtagtagccgttgctgcaatagcatgagtagcccggggccgtgttcacacacacgccactcttgcacacctggtctcggaagagctgacattcgtccacgtctctccggaggctcaggtctcca

SEQ ID NO: 314129 - DNA, 686 bp, Homo Sapiens
gctgtatcctaaggttcctccaagatcgtcccagctcctggctggcctgcctgccaaggccactgctgcctgaagtctccaattagatagtccttcccaaaggcaacagctgccaccaaggcattagtgtctgtagggttaaaggtctgctccagaaggtttgaacacaattcaagctctggatctgcttctgggctgcatctgcaccaatgcgggcagcatctgtcgtcagttgcttctcctgttcttccacttcagggtcaggcttggttctcagatggtcagggactacctcatggctgaaaacaggcacccgtccttcagtctgccgcatgagatcttcatctcggtctggagacaacaccagaggaatgatgacctggttacggaacagcggtgttttttcatgcttcaagaccttgttcagagtgttcagctgtccagaaagcaaggcaaagctgtccaggacagatggccaggtcagccggccatactcgttctccaacttgcaaatgaaactccccagagagttcttcagatcagccacttgactcagcagtgcatctaatgatgcctcaagctgcttctcctctctctgcaccaataggaacaggttggtcacccagataaacgagtatgacacatagaaaggagggctgcattgcggcggccgaggcggctgccac

SEQ ID NO: 314130 - DNA, 618 bp, Homo Sapiens
  misc_feature (128)..(128): n is a, c, g, or t
  misc_feature (153)..(153): n is a, c, g, or t
ccgaaggtctccaataagatagtccccaaaggcacagcctgccaccaaggcataagtgtctgtagggaaaggtctgcttgttcggccgagaccctccactctctgattctcgctcctctttgctgatnttcttccagaaggtttgaacacatnttattcaagctctggatctgcttctgggctgcatctgcaccaatgcgggcagcatctgtcgtcagttgcttctcctgttcttccacttcagggtcaggcttggttctcagatggtcagggactacctcatggctgaaaacaggcacccgtccttcagtctgccgcatgagatcttcatctcgttcatgcttcaagaccttgttcagagtgttcagctgtccagaaagcaaggcaaagctgtccaggacagatggccaggtcagccggccatactcgttctccaacttgcaaatgaaactccccagagagttcttcagatcagccacttgactcagcagtgcatctaatgatgcctcaagctgcttctcctctctctgcaccaataggaacaggttggtcacccagataaacgagtatgacacatagaaaggagggctgcattgcggcggccgaggcggctgccac

SEQ ID NO: 314131 - DNA, 997 bp, Homo Sapiens
cccatgttctttttattgtacccatctaggtgagccttgagcaaaaggtaatttcactgcccaactctgcaaagagcaccagggagtcgaggttgccagccacactcaccgctggtagggatgcatggaagccgacttgatgttggtttttattccacttggcattttccctggttgacctgcctgagccatttgtaccccactgagcattggctgctgctggcttggagctcctgccatctgcacctgctgtaatcctgaggttcctgcaaggatcgtcccagctcctgggctggcctgcctgggcaggacccctgctgcctgaaggtctccaattagatagtctttcccaaaggcaacagctgccaccagggcattagtgtctgtagggttaaaggtctgcttgttcggctggagacctccactctctgattctcgctcctctttgctgattttctccagaaggtttgaccacattttattcaagctctggatctgcttctgggctgcatctgcaccaatgcgggcagcatctgtcgtcagttgcttctcctgttcttccacttcagggtcaggcttggttctcagatggtcagggactacctcatggctgaaaacaggcacccgtccttcagtctgccgcatgagatcttcatctcggtctggagacaacaccagaggaatgatgacctggttacggaacagcggtgttttttcatgcttcaagaccttgttcagagtgttcagctgtccagaaagcaaggcaaagctgtccaggacagatggccaggtcagccggccatactcgttctccaacttgcaaatgaaactccccagagagttcttcagatcagccacttgactcagcagtgcatctaatgatgcctcaagctgcttctcctctctctgcaccaataggaacaggttggtcacccagataaacgagtatgacacatagaaaggagggctgcattgcggcggccgaggcggctgccac

SEQ ID NO: 314132 - DNA, 1055 bp, Homo Sapiens
  misc_feature (551)..(560): n is a, c, g, or t
  misc_feature (812)..(931): n is a, c, g, or t
taaataactttattcagaggaatcctttggtccacttctgctgactcaacccctgcccatgccaacaaaggagtactaagaaaggcaggttagcctgaatgtctaaattcaatttgttcaactttataaaagcaggcaaagctactgggggttgccccctcccaccatcattctggtccaccatttgggccacaggcttagggaaatgaaggaaagtcgttttctttgaaggaaatcctggccaaagtcgagaaagtgggcaccattatgaggtcaactaaaccctgatggcagtgtgaagtgcaattcccttctccctccaaaataaggaaacatgaatccaggggaaggggctttttcgtgtgctaaggaaaaaccctttcccacatagtcctgcctggcagagccacttcctgagaaagcctcgtgtgtataaggtggggtaaaggataggggactttatgactatttgacaggtaaaagccaagttggctccttagaggatggaaaggagagcaggcccaagcttcaccagagctgcaggtgggcannnnnnnnnnccttcctggcccagaagcttcttcaccttgcgccttagagggatagccagaatgaaacccaggcaggagggcctgcaaaaacagtgtgcctctaagaacacagaggttgctacagtttctggcagcacaaaataagcatagccttatttgatcttgtgtccatcagctcaccattgacgtgaggcagtatcagattagggtaagttctggatcaaggactgtggagggtggtggggagaaggatctgtagannnnnnnnnnnnnnnnnnnnnnnnnnnnnnnnnnnnnnnnnnnnnnnnnnnnnnnnnnnnnnnnnnnnnnnnnnnnnnnnnnnnnnnnnnnnnnnnnnnnnnnnnnnnnnnnnnnnnnnnaactccccagagagttcttcagatcagccacttgactcagcagtgcatctaatgatgcctcaagctgcttctcctctctctgcattgcggcggccgaggcggctgccacgatttcacttccccc

SEQ ID NO: 314133 - DNA, 357 bp, Homo Sapiens
aaagtaccaacgctgtcaaaatacaaaattatttaaaaactagtgaatctaataaagccaagtgtgtcattcaaagtgcagcccaagtgcctatgaatccgccactgccagagctcccagaaacacaggtgtctgtgggctcacgcacactgctctcaattgtacactagagaattaaataaatggtggtcaaccttctccactcttcggcagctgtagctgtaagtttatctgaagtactcactgcatataaagtcacttcttggctacttgcccagaaaaaggtggcactgaggcaaggaatgggctggatgctctctagccagactggagcctgggctgagctgtggaaactcc

SEQ ID NO: 314134 - DNA, 394 bp, Homo Sapiens
cagagatttttgtatctctccaccaaaaggaatcacgagcagaggcatattcgggagcataatgggaagggctatgcctgcttccagtgccccaaaatttgcaaaacagctgctgcccttggaatgcaccaaaagaaacacttattcaaaagcccaagtcagcaggagaaaataggtgacgtgtgccacgaaaactcaaatcccttggagaatcaacatttcattggttcagaagacaatgaccaaaaggataacatacaaaccggtgtggaaaatgttgtcctttgagtggcaagaattagaaaaatcttcaaaaatatagttggtggtttttttagttatgatttaagtttagtttcattttgtccatgtgacagtcatgaaggagtgaaaa

SEQ ID NO: 314135 - DNA, 599 bp, Homo Sapiens
  misc_feature (426)..(426): n is a, c, g, or t
  misc_feature (472)..(472): n is a, c, g, or t
  misc_feature (479)..(479): n is a, c, g, or t
  misc_feature (537)..(537): n is a, c, g, or t
agaaaggtttcatcctcacttcccaaaaggaggatgaaatcatgaaggtgcagaacaactcagtcatcatcaactgtgatgggttttatctcatctccctgaagggctacttctcccaggaagtcaacattagccttcattaccagaaggatgaggagcccctcttccaactgaagaaggtcaggtctgtcaactccttgatggtggcctctctgacttacaaagacgtctacttgaatgtgaccactgacaatacctccctggatgacttccatgtgaatggcggagaactgattcttatccatctcctggtgaattctgtgtcctttgaggggctgatggcaatatctaaaaccaggcaccagcatgaacaccaagctgggggtggacagggcatggattcttcattgcaagtgaaggagcctnccagctcagccacgtgggatgtgacaagaagcagatcctggccctnccgcccncacccctcagggatatttcttattttatataccagttaatcttatttatccttatatnttctaaattgcctagccgtcacacccccgattgccttgagcctactaggcacctttgtgagg

SEQ ID NO: 314136 - DNA, 434 bp, Homo Sapiens
atttcttaatgcatgccgggcactgagccagcatctgccagaaactgggaccgccacagaccagctcttgaggcaaagcttgaacaccatcagtcaagagtggttccgcgtctccagccggaagtcgtctagccctgccgtggtggcctcctacctccacgaggtccagcctcactccccacacttcctgaagctgcttgtcaacttggccgatcgcaacgggaacacggcccttcactacagcgtgtcccactccaacttctccatcgcgaagctgctgctggagacaggcgtctgcaatgtggaccatcagaacaaagctggctacactgccgtaatgatcactcccttggcttccgcagagaccaatgaagacatggctgttgtctggaagctcttaagagaaggtgtgaacattcgctactcagggggcc

SEQ ID NO: 314137 - DNA, 735 bp, Homo Sapiens
  misc_feature (268)..(316): n is a, c, g, or t
  misc_feature (449)..(449): n is a, c, g, or t
  misc_feature (640)..(640): n is a, c, g, or t
  misc_feature (678)..(678): n is a, c, g, or t
  misc_feature (708)..(708): n is a, c, g, or t
gttccttcaccccgcgtgtcgccagcctctgggtccagccagagcccctggcttctccgccacccacacccttcccaccctgctgtggggccctgcctttgtggggagcagccagccctctgcccctgcccagggctccccaactataggcctgggacccccgcccagcttggggggctgctcgtacgagtgtagacactgggcccattggacgtgctgttaactactatcttcatttcccacttcccctctctgattgggggtgtannnnnnnnnnnnnnnnnnnnnnnnnnnnnnnnnnnnnnnnnnnnnnnnncttaggttaagatgctctcgagcgttgagcaggcacagctctgtcgaggtccctgtcccccacctgtggttctggcctctgaggttgggggactacttgtttcccaccccaggttcctccaggccaagtcatnggggtgatgaggagtttggggccctgtctgtcctaggcctggagagtgcctgtctgggaaaaggtcactggacctggaagggtccccaagggtcccctgactcccgtctccaatctgtcacgtggttcaccatcatcaggcaccaggcgcaaacttgcttcccgcttttggccatcccttccccaagccanaggttgtccctgcccccaggacagtccagggccagggnttcttgtgagaggcagagggggaacctaancaaatcttgggttgaagaagcccaagg

SEQ ID NO: 314138 - DNA, 758 bp, Homo Sapiens
  misc_feature (83)..(111): n is a, c, g, or t
  misc_feature (509)..(561): n is a, c, g, or t
ccgaggacttttggaattgcccccttaaattgggccttttcttgcaataaaattacaccccagaaatgttgttttttaagccnnnnnnnnnnnnnnnnnnnnnnnnnnnnnctcattgtgattatccctggattccaccctttactaaagtacagtgctcaaattgataagatgcagccaaatttctactcactttgtgctgtgtagaccctgctagtttcctgtgcctattctagaagctgtggtagaaatatggccattagagaggaaaggcccgggtttcccttctggaaccatcatcttccaccagatgggcatatggcatgttagttgcctccaaatctcccctgcttcaagagtcctccacctccacctccaacaaagagtaccttctttgagcatctctggagcttcttcttcaatctgattctatctgtttttccctgctaggattcctcccagtttatggtccatgggaagattcctagtctagtctctgaatacatacnnnnnnnnnnnnnnnnnnnnnnnnnnnnnnnnnnnnnnnnnnnnnnnnnnnnncccacgtatgtgtgtgtttctatcatttctaatgacctggaacaggggaacactgtgtgtgcttagtcccccctcttgtaactctcaaagcttagtttcaaataatgacataaaggagctgcgccaatggaaagcaaattaaaggcctattattacagccagtgtattttttccacttaataaaaaatggaaagaat

SEQ ID NO: 314139 - DNA, 751 bp, Homo Sapiens
  misc_feature (436)..(436): n is a, c, g, or t
  misc_feature (720)..(721): n is a, c, g, or t
  misc_feature (723)..(723): n is a, c, g, or t
cagagcccttgcctgagggcctggcctggcagctctgctgttagaagcaggaggtgtgcagagggtggggagcagcccagcctctgtgatcttctccatggcaggatctcccagcaggtagagcagagccggagccaggtgcaggccattggagagaaggtctccttggcccaggccaagattgagaagatcaagggcagcaagaaggccatcaaggtgttctccagtgccaagtaccctgctccagggcgcctgcaggaatatggctccatcttcacgggcgcccaggaccctggcctgcagagacgcccccgccacaggatccagagcaagcaccgtcccctggacgagcgggccctgcaggagaagctgaaggactttcctgtgtgcgtgagcaccgccggagcccgaggacgatgcagaagagggacttggnggtcttcccagcaacatcagctctgtcagctccttgctgctcttcaacaccaccgagaacctgtcccagaggactacttctatgtgccagacctgggccaggtgcctgagaattgatgttccatcctacctgcctgacctgcccgggattgccaacgacctcatgtacattgccgacctgggccccggcattgccccctctggccctggcaccatcccagaactgcccacttccacactgaggtagccgagcctctcaggactacaagatgggactacaccccnngncccaaccctgaggccaggcccaggggac

SEQ ID NO: 314140 - DNA, 1064 bp, Homo Sapiens
  misc_feature (603)..(603): n is a, c, g, or t
  misc_feature (803)..(841): n is a, c, g, or t
  misc_feature (902)..(902): n is a, c, g, or t
  misc_feature (985)..(985): n is a, c, g, or t
  misc_feature (992)..(992): n is a, c, g, or t
  misc_feature (995)..(995): n is a, c, g, or t
  misc_feature (1017)..(1017): n is a, c, g, or t
  misc_feature (1048)..(1049): n is a, c, g, or t
ggatcctgcacagctagagatcctttattaaaagcacactgttggtttctgctcagttctttattgattggtgtgccattttctctggaagcctctttagagaagaacacagtggcgcaggctgggtggagccgtccccccatggagtacaggcagacagaagtccccgccccagctgtgtggcctcaggccagccttccgctccttgaagctggtctccgcacagtgctggttccgtcaccccctcccagggaagcaggtctgagcagcttgtcctggctgtgtccatgtcagagcaatggcccaagtctgggtctgggggggaaggtgtcatggagccccctaggattcccagtcgtcctcgtcctcctctgcctgtggctgctgcggtggcggcagaggagggatggagtctgacacgcgggcaaaggctcctccgggcccctcaccagccccaggtcctttcccagagatgcccttgcgcctcatgaccagcttgttgaagagatccgacatcaagtccccaccttggctcgtggctctcacttgctcctgctccttctgcttcttcttctccagctttcgctccttcacgctgcgcanttggccttgccgatgcccccagcttggcggatggactctagcagagtggcccggccaccggaggggtcgaccacttccctgggagctccctggactgaaggagacgcgctgctgctgccgtcgtcctgcctggcgccttggcctacaggggccgcggttgagggtgggagtggggatgcactggccagcacctcaggagnnnnnnnnnnnnnnnnnnnnnnnnnnnnnnnnnnnnnnnctgttagtaccccatcttgtaggtctgccttgagaggctcggctacctcagtgtggaaggngggcagttccggaatggtgccaggggcagagggggcaatgccggggcccaggtcggcactgtacatgaggtcgttggcatgcngggcagncangcaggtaggagggaaatcaatntcaagcactggccaggtctggcacatagaannattctctgtgactgc

SEQ ID NO: 314141 - DNA, 1606 bp, Homo Sapiens
  misc_feature (49)..(62): n is a, c, g, or t
  misc_feature (639)..(679): n is a, c, g, or t
  misc_feature (1074)..(1074): n is a, c, g, or t
tggaaaggctgggttcccccggccaccgggggggtggttccggttccannnnnnnnnnnnnnggggaacgccagttctaaggcaagtttgtccctggcctgtgtcccatgtccagagccaatggccccaagttcgggttttggggggaaaggttttcatggagccccccttggatttcccagttgttccttggtcctccttctgcctgtgggctgctgcgtggcgggcagaggaggaatggagtttgccacgcggggcaaaggtcctccggggcccctcaccagccccagggtcttttcccagagatgcccttgcgcctcatgaccagcttgttgaagagatccgacatcaagtccccacctttggctcgtggctctcacttgctcctgctccttctgcttcttcttctccagctttcgctccttcacgctgcgcagcttggccttgccgatgcccccagcttggcggatggactctagcagagtggcccggccaccggaggggtcgaccacttccctgggagctccctggactgaaggagacgcgctgctgctgccgtcgtcctgcctggcgccttggcctacaggggccgcggttgagggtgggagtggggatgcactggccagcacctcaggagcnnnnnnnnnnnnnnnnnnnnnnnnnnnnnnnnnnnnnnnnnttagtaccccatcttgtaggtctgccttgagtggctcggctacctcagtgtggaaggtgggcagttccggaatggtgccaggggcagagggggcaatgccggggcccaggtcggcactgtacatgaggtcgttggcaatgccgggcaggtcaggcaggtaggacggaacatcaatctcaggcacctggcccaggtctggcacatagaagtagttctctgggacctgctgttccagctgctctctcttgctgatggacaagggggcatcaaacagcttctcctctgtctctgcccccagcatcacatgggtctttgttacagcaccagccagggggtccaggaagacatacttcttgtacaggttctcggtggtgttgaagagcagcaaggagctnacagagctgatgttgctgggaagacccccaagtccctcttctgcatcgtgcctcgggctccggcttggtgctcacacacacaggaaagtacttcagcttctcctgcagggcccgctcgtccagggggcggtgcttgctctggatcctgtggcgggagcgtctctgcaggccagggtcctgggcgcccgtgaagatggagccatattcctgcaggcgctctggagcagggtacttggcactggagaacaccttgatggccttcttgctgcccttgatcttctcaatcttggcctgggccaaggagaccttctctccaatggcctgcacctggctccggctctgctctacccgctgggagatcctgctgaagatgtctccagagaccttctgcaggtactgcagggcatccgccatctgctggacggcctcctctcgccgcaggtctggctggatgaggggcacggcataggtctgacctgccagggagtgctgcatcctcacaggagtcatggtgcctgcgagccgatcccgg

SEQ ID NO: 314142 - DNA, 946 bp, Homo Sapiens
  misc_feature (513)..(553): n is a, c, g, or t
acccaagttgggttctggggggaaagggtttccatggaacccccctacgattcccaggtcgtccttgtcctccctttgcctggggcttcttccgtggcgccagagaagggaaggattctgccacgcgggcaaaggctcctcggggcccctcacccagccccaggtccttttcccagagatgcccttgcgcctcatgaccagcttgttgaagagatccgacatcaagtccccacccttggctcgtggctctcacttgctcctgctccttctgcttcttcttctccagctttcgctccttccacgctgcgcagcttggccttgccgatgcccccagcttggcggatggactctagcagagtggcccggccaccggaggggtcgaccacttccctgggagctccctggactgaaggagacgcgctgctgctgccgtcgtcctgcctggcgccttggcctacaggggccgcggttgagggtgggagtggggatgcactggccagcacctcaggagcnnnnnnnnnnnnnnnnnnnnnnnnnnnnnnnnnnnnnnnnnttagtaccccatcttgtaggtctgccttgagtggctcggctacctcagtgtggaaggtgggcagttccggaatggtgccaggggcagagggggcaatgccggggcccaggtcggcactgtacatgaggtcgttggcaatgccgggcaggtcaggcaggtaggacggaacatcaatctcaggcacctggcccaggtctggcacatagaagtagttctctgggacctgctgttccagctgctctctcttgctgatggacaagggggcatcaaacagcttctcctctgtctctgcccccagcatcacatgggtctttgttacagcaccagccagggggtccaggaagacatacttcttgtacaggttctcctcgtgccgaattcgccacccaggcc

SEQ ID NO: 314143 - DNA, 616 bp, Homo Sapiens
  misc_feature (144)..(144): n is a, c, g, or t
  misc_feature (193)..(193): n is a, c, g, or t
cctcaaataatcggcagtttccccaatgtctccaccagtctctcctccgggttaaacacattcctttggtccattctggatgaggagagcctcaaagttggagacttgatcattacagggaattcacccagtcttagtttcctntgtataacacccacaacaccaatggaagctgacatatcattgttaccanagagaatgtcttcaaactgagagagattgccaggagaagccttatatgccaaataccaatcattctccttggatgccttatttccagctctattcttataaacttcaactctatactgacgaaccagaagaagatcacaaaagattcaaaattcattttactaagcacaacactctgcagattctttgctcctgccggccccatgtacttgatcaccccctgggtcttgaacacctcccgggcggccagcagcgcgtcctcgccgtgcgccgtatagaagtcgccccggtcgaaaaggcgcactgtggtggtcggcttctccggcatgccctgaaagaagcgcacgaagccgacctcggccgcgctctccaactgcagcgtctccttcggctgcaccgccatgtcgaaacctcctcacctcct

SEQ ID NO: 314144 - DNA, 476 bp, Homo Sapiens
ccgtgatcacaagttcagatccggggcggctggagaggcacgggtttcagggctgaggggggcgtcctccggagccaagcagaacctggggacgcggaatccgcacaagcaccaacgttccgcccccgtgcctccgcgctggagaggctgctcaccgcccactctctgaggcgggaaaggagccgcgccacaaggccccgggtccctccccagcacgcgccgtccccgccctcacctgccggccccatgtacttgatcaccccctgggtcttgaacacctcccgggcggccagcagcgcgtcctcgccgtgcgccgtatagaagtcgccccggtcgaaaaggcgcactgtggtggtcggcttctccggcatgccctgaaagaagcgcacgaagccgacctcggccgcgctctccaactgcagcgtctccttcggctgcaccgccatgtcgaaacctcctcacctcctggttgaaga

SEQ ID NO: 314145 - DNA, 938 bp, Homo Sapiens
  misc_feature (54)..(54): n is a, c, g, or t
  misc_feature (64)..(65): n is a, c, g, or t
  misc_feature (106)..(106): n is a, c, g, or t
  misc_feature (202)..(202): n is a, c, g, or t
  misc_feature (207)..(207): n is a, c, g, or t
  misc_feature (213)..(213): n is a, c, g, or t
  misc_feature (275)..(275): n is a, c, g, or t
  misc_feature (304)..(304): n is a, c, g, or t
  misc_feature (319)..(319): n is a, c, g, or t
  misc_feature (333)..(333): n is a, c, g, or t
  misc_feature (336)..(336): n is a, c, g, or t
  misc_feature (350)..(350): n is a, c, g, or t
  misc_feature (355)..(355): n is a, c, g, or t
  misc_feature (374)..(374): n is a, c, g, or t
  misc_feature (378)..(378): n is a, c, g, or t
  misc_feature (387)..(387): n is a, c, g, or t
  misc_feature (477)..(477): n is a, c, g, or t
  misc_feature (607)..(607): n is a, c, g, or t
  misc_feature (715)..(715): n is a, c, g, or t
  misc_feature (730)..(744): n is a, c, g, or t
  misc_feature (755)..(755): n is a, c, g, or t
gagaggacggagcacgacagcgcagaggatagacgataacgagccagcaataanacgaagtagnntatgctcatacgcagagactgtgctcgagcggatgataganaagatagtgagatgaatgacgagactagcgcgtagtgtgaccagagatcttaggtagaacgaagaggagtcgtatcaggataatgtatacacgaancacgnaggacnatatagctgcgagactcgttgagctctgctgtccacgtgaattagtcgatgtagtacgacangagtgccgcacgacatgctattagacacnatggcgcgctacgtngagtgtcaatcgtncangccagcagtcccantgtgncccagtcagaccggtacanagangtgactgcngccaagctgcaatgagatagtgcagtgcgaagtagtcctttgctagcgatagaggacacggataggtcgcatatatcagtgatcgacgcnggaagatcctatgctgaccgccgctacatatacgtaagtagatgtctcattgcagtagcccctccgaattggacctggccaaaagcactgccctggtataagggcattgccgatatggtcaggctttcgncgcatggagcccaagttccaggacactacatgcccggatgcccgcctgcaagcatcctgggacatgacgtcgcatcaacatgcacagtcgtacaaatcccgccatacncagccccccacaagnnnnnnnnnnnnnnnctatagagcanccaagaccaccccctcacatatacacatgtgaccactatctgctcactgataaaggcctgaacggactttaagactttaagacagaaggcaggcagaacataaattgaggaggccattaagttagacaaacaactaatgcagggaaaggcaaaccaatgtaaccacaaagaaaaccttcagtg

SEQ ID NO: 314146 - DNA, 313 bp, Homo Sapiens
gctgagcgcaggaggacaggcaccaccggatgccacaccaggcaggaggaggtgtggacagtgatggtacggcggccctgcatcagcctgcgggtggcctctggatcctccgtggaccgaaccgtccccccaggaacacaccttcaggtagaccccgaagcctcaaggccggggctggagcggagaccccagggcctctcaggagacagtgaggctgcccctcctaccacctacctcattctgcctactcaccccaggggccacagccacagcctgctggactcaggactgtcctgtcaactccagacaactg

SEQ ID NO: 314147 - DNA, 351 bp, Homo Sapiens
ggaaaagcacacactttcatggttctatcctcaaaatggtatatgattgtcctgttccaatattataaagtcctatattgttatcataagaaaatgttccatttaaaatatccttcagtgtgagtgctctcattgtacttcagagttatgaactcttgaagggcgtaagacaatgcacatcaccaataaggcaagcacagcagaggtggcaactccaaatacgatttttacccaagtcttcatttttccagatgtttttgaaagttagctaattctgtcttcagagcgtgggtcactggatctgtgaacaccgttgaaaaggaccgagtctgtctttgtagttggaagctg

SEQ ID NO: 314148 - DNA, 383 bp, Homo Sapiens
cagctttcaactacaaagacagacttggtccttttcaacggttttcacagatccagtgacccacgctctgaagacagaattagctaactttcaaaaacatctggaaaaatgaagacttgggtaaaaatcgtatttggagttgccacctctgctgtgcttgccttattggtgatgtgcattgtcttacgcccttcaagagttcataactctgaagaaaatacaatgagagcactcacactgaaggatattttaaatggaacattttcttatcattttttccaaactggatttcaggacaagaatatcttcatcaatctgcagataacaatatagtactttataatattgcaggacaatcatataccattttgagtaatagcctg

SEQ ID NO: 314149 - DNA, 983 bp, Homo Sapiens
cgacggcaattcttgtggcaaatttaatagaagaatatgagactcacctttacttctcacacataaaacactgcaggcactccaaatccttacagacatatgcacttcggaatcaactcaggcatgcacagcatccctgtgctggagtttattttaaaaaacaacgccccagttatcacagtttctttttttgtccaccattttccataacaaaagaagctacacaaaatttggggggagatactctctttggagactgacacatttgcagaggggtcatgaataatgattccaaagctcctatttaacttctgaatcaggcaaagaataagtgacaatataagaatgaattttgtttacagcaatatcataatacagcattgaatcattacagtgcagtggttgtaattaagtccacaataaaatattcttagcccgaacaccagaccaactaaaatcaccaactgctcacgaaccaaaatgatcagtgcaagcagttgcggtctcaatagtgaaaaccaaaatgggtaaggcttttctggcagtgagtctctgacatgaacggctccctctctgctcagcgaggacttggccgccctcacttggagtcttggtctttcttttcatctaaaagggcggagtggatccccagctttttcagttcttccaccaagtccccattctggtgcatctgcagaagaatgtcacagccccctacaaactcgccattgaggtacacttgcgggatggtgggccagttggaatagtctttaatgccttgtcggagctccgggtcgtccagcacgttgtaggccgcgtaatcgcggacgccgtgcagccgcaggatctgcaccacggcgttgctgaagccgcactggggctgctccggcgtccccttgaggaagaccaccaccttgtccttcttcaccagcgcgtccaactgctccgccgagccgccctcgtgccgaattcctgcagcccgg

SEQ ID NO: 314150 - DNA, 1654 bp, Homo Sapiens
attttctacaagtcttgtttattgaaaggatctgaaaagcgtaataaggctttcaatgacatttaatacattttcaagaaattaatatgaaacattaaaatttacttcaaaaatccaaagttttctagatcattcccatctcacgctgctttagaggtcagttcacaccttctgtgttcagatgagcggctggaattctgaacactgccgtcttccagccctaacgctgggcgctggtccctctctcctaagcccacggctgggcttcccctgtgcccagggtcatggcggacttcaagccaggccggctgcccagaatcacactcagggtttttggacgctcaagtccacagatgctgaggtgcccagacgagggtgaagcagggagacacatgcctcggagaacgttgcccaggctgggccaggcggctgcgggaagctcctcacgggcagaggagaacgtcttgtgccttccttatcgatctccagcagatgagggcaacttcgtgtgcaaaactcagagagcagttactcaaaaaaaagacacccgggcagcagtaaccaggacaccagggtccgaccacggcctccacacacctgtgcccgtggaagacgcgggcgccggggtaggcagcatccacgtgcttccacagctgctggtgctgggcaggctggagactcacgggagaggcaggaggagaatcagcgtgttgagtccctcgctgtgttagtgtgaaaaattctcattacagttgcaaataaaagggatcacgatcactagccccggaaaccctcatctcccggaccatcaggatcgcactgaacagaatggtcccctaatggtccctgaggacagcgtcttgcagaacataaatgtaaacattgaatggcagacgactcccttccccttgaaatcttcacaaaagtgtgtacgagaaagtatgtacatcagcacttcagaaagtttaaaagagtctctaaaaagtatatacaggatttaaactaccttcctgggagcagaagctacgtgaggaatgtgtgggtcgctggcgatgccagcccccttcccgctgagtgtcccagactcagtgctggcctcaagcggggagggctggatggcaggggacgcatccaaccctctccagaaactgagcagaacaaaaccgccttgccagccactggcaagaccatgctttcaatggcgcctccgccaggggcttccctgcagaaattttaggggaagaggtgcaggtcaaggggaaaagcatggcagctcaaggaaggtttttggctgagacatttattatcaacattgaaggacaggtcgagtcattctgactcctctgaatttcaaccgactgatttgcggaaaaatatcctggcatggaaattgcggcagctggaggccgcgctccagggacccaccgcggggtgtcagcaggacagaagcactcccagcccatttctcacgcttctttagaaatgcaaaaaaagtcagagattttaaaaaaacagctgatctggacaaaaggcagacccaggctctaacccagctacagaaaggaagtggccgtgccactgagacaggcggtcacagacacacgcagattggtctgtccccagagggcgcttggagggcagcggaaggattcgg

SEQ ID NO: 314151 - DNA, 507 bp, Homo Sapiens
  misc_feature (34)..(34): n is a, c, g, or t
  misc_feature (41)..(41): n is a, c, g, or t
  misc_feature (57)..(57): n is a, c, g, or t
cagggaaaacaacatgccctcggaagaaacgttnccccagnctgggccccaggcggnctgcggggaaagctcctccacgggcaaaaggaaaaacgttcttgtgcccttccctttatcggatctcccagcaagatgagggcaacttcgtgtgcaaaaactccagagagcagttactcaaaaaaaagacacccgggcagcagtaacccaggacaccagggtccgaccacggcctccacacacctgtgcccgtggaagacgcgggcgccggggtaggcagcatccacgtgctccacagctgctggtgctgggcaggctggagactcacgggagaggcaggaggagaatcagcgtgttgagtccctcgctgtgttagtgtgaaaaattctcattacagttgcaaataaaagggatcacgatcactagccccggaaaccctcatctcccggaccatcaggatcgcactgaacagaatggtcccctaatggtccctgaggacagcgtcttcca

SEQ ID NO: 314152 - DNA, 600 bp, Homo Sapiens
  misc_feature (296)..(307): n is a, c, g, or t
  misc_feature (405)..(442): n is a, c, g, or t
  misc_feature (465)..(503): n is a, c, g, or t
ccaagatgctaatggcctggtccagatccctgtgagcatgtaccagactgtggtgaccagcctcgcccagggcaacggaccagtgcaggtggccatggcccctgtgaccaccaggatatcagacagcgcagtcaccatggacggccaagctgtggaggtggtgacattggaacagtgacatacagccatattatggcatcgttttctagtctacttcaaaattttttacacgtttgcagaggtgcaatcaaatggaattaagtctctcgactttggaaggaaagttttgttaaccnnnnnnnnnnnnggaagaaagcggattttggaattgcattttttaaagcaccactcttgattttctgggattggtgaagaaactgcattgtcaatttcactgtcccaaannnnnnnnnnnnnnnnnnnnnnnnnnnnnnnnnnnnnnacatatggacatacacatttacnnnnnnnnnnnnnnnnnnnnnnnnnnnnnnnnnnnnnnngtatgaaacccgcatggaattatctgtatgaaatcaaggtgcgctgtggcaatttcacccagtttagtgggtggtagggtacgtggccagacacgtc

SEQ ID NO: 314153 - DNA, 257 bp, Homo Sapiens
aacaagcaagaccccatcccccacccaaaaaacctaaccccagctgatccatcaccacaggcagcttcgacaatcatggatctgatgaccaacaaactttcctgaggaaagtgctgttcccaccagaagagatctcaggacaaatgtagacagccctggcaagtggggtctccctgggagctagcagacaggtgaaagactgacagttcttggggaattaggcttttcttttgttttggagatgcgcgtttcatact

SEQ ID NO: 314154 - DNA, 723 bp, Homo Sapiens
gaactagtttccattctgacttgtaaggttttggggtcatatataaggactaaagccaagctaggcaaaacaatgacagcaccgttttttcagtgaagctctcagaatgtccagtacagatgttgcagataattccaagaactccttcagcaggtgttcttcaccattcgtaaacagtattttaagatgttcactttgctcttctttttggttacatacattttaataactggtatgttgaagtagtgtctaaaagtatctagtctttattcacagtacattatattgtgtgatgcactggactaactcttgtttaccattcatgtaacaaaacccagcacattatctgcactataagctcaaagaatgtcacatccgcccagacagctctttgatgagggtgatgggaactgaataaaccatacggactggcagtaacaagggcttttactgttctgttcagtggaaccttcttggtcaaattgtaattagctagcattatatttatatacagggtcttttttctttaccgatgtattttcctactcatagccaaccaataaattcagtatctgtttcaaatattttagaagtgtagtttgtatagctgtagtactgaggtttgaggataaatgttgatcagcagaccacgtattttgcagggtgactgggccatgatatggggaaatggtgtcttggcatgctttattggactgctgctgt

SEQ ID NO: 314155 - DNA, 370 bp, Homo Sapiens
gtgaagctctcagaatgtccagtacagatgttgcagataattccaagaactccttcagcaggtgttcttcaccattcgtaaacagtattttaagatgttcactttgctcttctttttggttacatacattttaataactggtatgttgaagtagtgtctgtatctagtctttattcacagtacattatattgtgtgatgcactggactaactcttgtttaccattcatgtaacacagctctttgatgagggtgatgggaactgaataaaccatacggactggcagtaacaagggcttttactgttctgttcagtggaaccttcttggtcttgtttagctagcattatatttatatacgggtcttttttct

SEQ ID NO: 314156 - DNA, 628 bp, Homo Sapiens
gctactgtatttaaaagcatttatttaaaatatgtcaacctccttccaaaagacggaagacacatgagcccattccttatatcatgaggtataaggtaacaacaacgaaaatcctaaatgcaaaaggaccatcagttgcctaaatataaaattgaactttggcaaagatatgagtgttatacagaataacagccaataaagaaatacattagtttacaccatttccccatatcatggccccgtccccctgcactcttccctttggaaggctgagttacaaccctgtcccagaagattcagaattttaaatacgtggtctgctgatcaacatttatttttcttcaaacctcagtactacagctatacaaactacacttctaaaatatttgaaacagatactgaatttattggttggctatgagtaggaaaatacatcggtaaagaaaaaagaccctgtatataaatataatgctagctaattacaatttgaccaagaaggttccactgaacagaacagtaaaagcccttgttactgccagtccgtatggtttattcagttcccatcaccctcatcaaagagctgtctgggcggatgtgacattctttgagcttatagtgcagataatgt

SEQ ID NO: 314157 - DNA, 1056 bp, Homo Sapiens
  misc_feature (24)..(24): n is a, c, g, or t
  misc_feature (28)..(28): n is a, c, g, or t
  misc_feature (97)..(98): n is a, c, g, or t
  misc_feature (213)..(213): n is a, c, g, or t
  misc_feature (287)..(288): n is a, c, g, or t
  misc_feature (344)..(344): n is a, c, g, or t
  misc_feature (364)..(364): n is a, c, g, or t
  misc_feature (391)..(391): n is a, c, g, or t
  misc_feature (408)..(408): n is a, c, g, or t
  misc_feature (477)..(477): n is a, c, g, or t
  misc_feature (482)..(482): n is a, c, g, or t
  misc_feature (522)..(522): n is a, c, g, or t
  misc_feature (533)..(533): n is a, c, g, or t
  misc_feature (548)..(548): n is a, c, g, or t
  misc_feature (666)..(674): n is a, c, g, or t
  misc_feature (679)..(732): n is a, c, g, or t
agcgagaaagacggaccataatgnaagnaagagtgataacaccggcaaaagaatgtcacaatattccccccgaaaaatagataaaaagtaatgtaanntttgtatattatcacttatgaagttgcctgcactggcgcagtctgtgatacactgacagactgctactaaaaaataatatataatatatatggtgctgcaagcagagatctatcnttgcagtgcaaacttgcctttttcatacagctagtcacaatcatatccagtatttaatagtcatatcatatgcnnatatatgccattacacacagtgcacaagaagtcatatcacaatctgtcagtctgcnctattattgatgcagatgcnactcccttagctgcacccttccctcantctatactgaaacacanttgtccctatctgacatgatacgagtgtcgtttctgggtacactgaggtgatcaaacacactttcatanttacnaatgtgattatttcacatcatcccatctctttatcatacngtcattcttcnaggcagcaagctccnactgctctgtgcctccttcctctctttctcctcatatctagttccacaactcctcttctgcccagactagtcctgcaggaatgtttttcttcttcttatccccctttttcatgaattnnnnnnnnnttatnnnnnnnnnnnnnnnnnnnnnnnnnnnnnnnnnnnnnnnnnnnnnnnnnnnnnngctggagtaattattaatagtgccttctttgactcttaagcatgtcccattttggctgataacttatatggttacttacccatattccattagatatcaagtttatctttgccttctctgccttgtttcaggccttcattttctttcaccagggataatataataatctatttatgatgttatccccagtttcctctcttttcaacccatcttttagaagttgccacaataactttcattttaagaggctggccttaaactgttattcccaggccaggtgcagtgactcatgcctgtaatctcgtgccgaattcctgcagccgg

SEQ ID NO: 314158 - DNA, 637 bp, Homo Sapiens
ccaggatgctcgctccattttgtgtctcagccttccgtcgaaagttttcatttgttcgtttgctttttaagaaagagtttttgataattctgtcttagaaggatgagtagttgtctcattaagaagactcttggtggtagcatggtctgactagcttaaggtacagtctttcctctttgagtttcctgtggttttactaactctttgctttccctctgacataaaaactagaagccataaattacggataaattccactacgtaaaataagagatctttaaaactctgcatggcaaagccactataagacaagtaaaaaactaaactgtgagaaaaatagttgcagcttatatctcagaggataatttccctaatgctggggttgggaactacagcccaaggcccatatctggcctgctgcctgtttttatgaatcaagttttattagaacacagccacactcatttgtttgcatattgtttgtggctgctttcaccctatggtggcagaattgaatagctgcaacagggaccttatggtccacataaccaacagtatttattatctggcactttacaaggtttgccaactcttgctctgatgaattaggagttgctacaactaccaatcaatatga

SEQ ID NO: 314159 - DNA, 369 bp, Homo Sapiens
ccaggatgctcgctccattttgtgtctcagccttccgtcgaaagttttcatttgttcgtttgctttttaagaaagagtttttgataattctgtcttagaaggatgagtagttgtctcattaagaagactcttggtggtagcatggtctgactagcttaaggtacagtctttcctctttgagtttcctgtggttttactaactctttgctttccctctgacataaaaactagaagccataaattacggataaattccactacgtaaaataagagatctttaaaactctgcatggcaaagccactataagacaagtaaaactctgggagatagttgcagcttatatctcaggtggcctgctgccttgtttt

SEQ ID NO: 314160 - DNA, 927 bp, Homo Sapiens; identical to SEQ ID NO: 127494

SEQ ID NO: 314161 - DNA, 587 bp, Homo Sapiens
  misc_feature (1)..(1): n is a, c, g, or t
ngaaaataatccccccaaaactaatacaaaatagtaggcatctacaaaggggagatatttatatataaatggagaataataaagaattatcttttttaatacattaaaatgaatattcatattaagaaaggaaaaactaaagtgaaaagagaaatagcaaactgatagaaagtactgctggtactatgacagtcaatgtgcttattattcaagaaaaatactccaaaacttgtcagatatatgattatatgacctttcctacatcatctgtataatccctaatttttctgatcactcggataatgacagttaagtttgctgattctggaaagttacagggtaacttacaatggtgttattttggcactatccacatacatcccaccttctcatacctgcgctgaaccagctttgccatcctgccagtaacctcacttatgagttaaataaaatcctaacatatgctcccattacattaaacattcacactttcagaagtcagtggtagacaagaagccttttattttaattcactgacagacaaatcaacaggcaattgatatgggggcgagagaagggagttgata

SEQ ID NO: 314162 - DNA, 1023 bp, Homo Sapiens
  misc_feature (16)..(16): n is a, c, g, or t
  misc_feature (94)..(109): n is a, c, g, or t
  misc_feature (133)..(357): n is a, c, g, or t
  misc_feature (834)..(919): n is a, c, g, or t
  misc_feature (980)..(980): n is a, c, g, or t
ctaagttcctacagtngggatttgggagaatgatttcttcatagaggaagaggttagactatatctctaaatgcctttccaaattctcatgtcnnnnnnnnnnnnnnnngagacagagtttcgctcttgtcgnnnnnnnnnnnnnnnnnnnnnnnnnnnnnnnnnnnnnnnnnnnnnnnnnnnnnnnnnnnnnnnnnnnnnnnnnnnnnnnnnnnnnnnnnnnnnnnnnnnnnnnnnnnnnnnnnnnnnnnnnnnnnnnnnnnnnnnnnnnnnnnnnnnnnnnnnnnnnnnnnnnnnnnnnnnnnnnnnnnnnnnnnnnnnnnnnnnnnnnnnnnnnnnnnnnnnnnnnnnnnnnnnatgagccaccacgcccagtctcatttctattctatgaatatttccatacatttttcctttcttgtacaccctgctctcttagccaccttcttgaaataatcgactgttgaactgttagtacttccctgaagaccaataatttccagattaatcgtgtttactccgtggatcactattataagtaatttaaatggatttctactaactgtgtgtgtgtgtaaatactagcaatactagcaaccaccattctttggtatgtctttgttaattttcttaagagttagtagagaattttgtcccagtcttactttctgtatcctatgggagatgaactaaactgccttattcactctaatcacttcatttgaaattcagtaagcctctctaatttcaaacactggcatcagcaagtcggtgagcatttgtgagcacacatttgtagatgtgtgtttttttaaaggcaactgaaattatggnnnnnnnnnnnnnnnnnnnnnnnnnnnnnnnnnnnnnnnnnnnnnnnnnnnnnnnnnnnnnnnnnnnnnnnnnnnnnnnnnnnnnngctggcgtaatagcgaatatgcccgtcccgatcgtccttgccaacagctgcccatgctgantggcaaatggcaaatgtacgcgttataccgttttggcgtattt

SEQ ID NO: 314163 - DNA, 2304 bp, Homo Sapiens
  misc_feature (672)..(734): n is a, c, g, or t
  misc_feature (1358)..(1358): n is a, c, g, or t
  misc_feature (1361)..(1361): n is a, c, g, or t
ttacgatagatcacagttttttattcttaatgtcacaagcaggagaaaaatctcacattcatactaaaaattccaactagactcaacaggaatgaagtctctatttgtaatggaaagtcccagcctcccgctgccgtccagtgcgtgtactgtacacatccacactcattctcactcagggttcccggaccggctgtcctgcctgcggaactgaggtaaactagctcaggtactgacactaggagggtctaccttacataaggtacaggtagaagcttgattgctaggcccaggcccacccagaccctccaatcctaacaggtatttaggcttgaggttcactccctcctcagctgcacacgcagccaggtattaacgaggatcagagctgttctgaggggtgggaaggagcagccccgccaccactcactcaccctcagtcacatcggggagggggcaccagttacatttacatcacattatttataaaataagaattacatttcatataacatggccagaaggagctctagtcccccaggaaagctgccggggacagcatttgagcctcttctttgcacaggcataacttaactatacagctaattcctagttaatagcatttatacttaaccacctcaatgaaccaagcttgaaggaatttaaaaggcnnnnnnnnnnnnnnnnnnnnnnnnnnnnnnnnnnnnnnnnnnnnnnnnnnnnnnnnnnnnnnntttagacacacgcattcatacttctcccaaagaggttgggcgtggcagcaaggcgcttgggcctggggtatgtggtttcagaaggacggaaggaaaggatgggctgcagagggccctgtttgggaaaaataggattttaaaaatatggttcattaatttaggttttctaacatctactttgggtgatgtagcctccagtgaggtcagttaagtgggacagaaaccgcagagggaagaggtctttgcttcccctgggcccattctccctgggctgccagcccttgaagtcagaacaccatgggaaaattcaggagtcggcacttgtagccgtcaagtgggtgctactttccacattcaattagcgaggccccagaaaacttgaaacaggaagtccggcactacccaacatgccgccacttcatacaactcaactcttccctcccaaacttcgattcaaagagcaatacacagagcatcagacaaaggaacacaggacaagcttgaaacatacaatccctggagaggcaagacgagggccaatggggccaaagggtaagctgggcgtggaggcagctgaagcagcggtggcatcctgcctgctccaagagcttctcccttccaacngcngctctgccaggctaacagtcttgagccaccaagctctgaggggccaaactggcagagggttggagatgaaacattgattcaggcttggcaggaagaaaacggcaggagcagccacccactggggtctccaaggcaaagctagattcaagggcatttaaaaaggagggaatcctgcaaggaaccggtgagggacacagcagcaagaaatggggaaacagagtccccagaagggaccagaggaagagaaccacttctcacagctaagccaagcaagataaagctttacggatagcccatttcccaaatcccatcaggtgcacaccaccgatccaggcgggctggaccctgccccctccagcgacgacggtctcggggaaaggtggaaggggcgcctgcctaagggtgtgctaagcgggagtcagggcagcggacactatgtacaggtgtttccttagttctccagcctccccagtagaactgttcaagtagaggtcccgggctttggccctccgcatcctgcttccccttccctgaggcttgtgcttcctccagaagggaaagggccccagggctgccactgccccctggcggctgaagccagagatccggggtaggtttgctttacgcaactggaagggtccaaggctcttcctagcaggtgccaaggtccagatttagggaaggggtggggggaacagggacaggggacaaaggctactttttgcgggtgtgctgccttcgggcctgcagtcgctgtcgagcccctggggtcttggatcccgcaccaatggaaaatgaaggggccgccgatccgaaaggtgcacaccaacaagccttgggcgggtgctgaggatgccccaaaggagaggctgctgcctgatgtgcccactccaggcgcaggggtgttcagaccaaaggtgggggtggcggtgcctccaaacac

SEQ ID NO: 314164 - DNA, 1182 bp, Homo Sapiens
  misc_feature (628)..(687): n is a, c, g, or t
  misc_feature (748)..(748): n is a, c, g, or t
  misc_feature (961)..(961): n is a, c, g, or t
  misc_feature (1084)..(1084): n is a, c, g, or t
  misc_feature (1166)..(1166): n is a, c, g, or t
ttacgatagatcacagttttttattcttaatgtcacaagcaggagaaaaatctcacattcatactaaaaattccaactagactcaacaggaatgaagtctctatttgtaatggaaagtcccagcctcccgctgccgtccagtgtgtgtactgtacacatccacactcactctcactcagggttcccggaccggctgtcctgcctgcggaactgaggtaaacaagctcaggtactgacactaggagggtctaccttacataaggtacaggtagaagcttgattgctaggcccaggcccacccagaccctccaatcctaacaggtatttaggcttgaggttcactccctcctcagctgcacacgcagccaggtataacactcgccctcagtcacaacggggagggggcaccggttacatctacatcacattatttataaaataagaattacatttcatataacatggccagaaggagctctagtcccccaggaaagctgccggggacagcatttgagcctcttctttgcacaggcataacttaactatacagctaattcctagttaatagcatttatacttaaccacctcaatgaaccaagcttgaaggaatttaaaaggcaatttagcnnnnnnnnnnnnnnnnnnnnnnnnnnnnnnnnnnnnnnnnnnnnnnnnnnnnnnnnnnnnacacacgcattcatacttctcccaaagaggctgggcgtgacagcaaggcgcttgggctggnggtatgtggtttcagaaggacggaaggaaaggatgggctgcagagggccctgtttgggaaaaataggattttaaaaatatggttcattaatttaggttttctaacatctactttgggtgacgtagcctccagtgaggtcagttaagtggggacagaaaccgcagagggaagaggtctttgcttcccctggggcccattctccctgggctgccnagcccttggaagtcaggaacaccatggggaaaattcagggagtcggcactttgtagcccttcaagtgggtgcttactttttcccaccatttcaatttaggcgaggccccccggaaaacttttnaaacagggaagttccggcacttacccaaccttcgttgcccgatttctttggccttcgagggccaaaatttccctattagttnagtccgtatttaaatt

SEQ ID NO: 314165 - DNA, 376 bp, Homo Sapiens
gaagaaaacacaaataaagcagcaccgcccgctcacctcggggctcccgatatgtgactcttacttcccatcttcccctataccattccctaaagtcaggagattctggaggtctttctctgacttctaccaataaaaggactgctcctgttgtcaagaagatccaaaggggaccgagtggaaaggactatccctttcgagcggcagacagaaagtggtgacagtctggatgttcaccatagcagagctctgactgcccaaccaaagaaaacagggacattcaacaggattctgcacacagtcagatgagataatccagtcctgctccttggctcctagcactaatcctgtgccgaattcctgcagcccgggggat

SEQ ID NO: 314166 - DNA, 918 bp, Homo Sapiens
gagccgggggcccaaggaaaaaggaaatgtggccagctttgggaagcaggagcattaaagaggtggaattgaacctgttcaaatgtgacagctggagttgcaagcagcacctggggcaccagataggcagtggagcaggggacaggaggaacacagggccaagccagacagatgaggctggaccccctactggggcacagaatgaggtaagaaaacatttcaaataaagcagcaccgttcccgctcacctcggggctcccacccctttatacttcataaaccctcgctcagggaataaagtggagggtagttttgatatgtgactcttacttcccatcttccccctataccattccctaaagtcaggagattctggaggtctttctctgacttctaacaataaaaggactgctcctgttgtcaagaagatccaaaggggaccgagtggaaaggactatccctttcgagcggcagacagaaagtggtgacagtctggatgttcaccatagcagagctctgactgcccaaccaaagaaaacagggacattcaacaggattctgcacacagtcagatgagataatccagtcctgctccttggctcctagcactaatccattcacattattgagggcagctgaaagtgccctctgggctcagttttcaaaccacagcctcctgcacagccatgatgctcttctatacttcagtcctgcccccagggtgggaggcagatagtgacctgacttaaggaccaagtcacacccatggactggctaggtaaccagtaactcagagtaggaaatgaccgccctactaaacttatatccacagcataatacatccagacatgaatcttgaagtttgagaaatcatgcatagttgcagaggtccctgccctcgtgccgaattcgccaccc

SEQ ID NO: 314167 - DNA, 1237 bp, Homo Sapiens
  misc_feature (189)..(189): n is a, c, g, or t
ttcaacaagtatttattgagtgtctattatgtgctagatactgagacacatcagagaacaaaaccaaaagccctgcccttgtcgggcttacagtctagcacttaccgccagttaacctgcaggctacctggggccccgggcaagtcaccgcacctctgtgcctcggtcctcagctgcccaatgggagantaagcagacctgggctcagacatgaatcatgtgcttggtgtactgcagatgccaaactgcatccccacaacccaccacgtaggacagcagacagggctgggaagttgatttttaatgataaagtacaatgaagggagggcagaggggctaagcctagctgtctggggtgctgtggtggtggtagactggctacacaaactgttgctgctgctgctgcttcttggtggccgccttgctggcgaggtccttggccttctctgtagctgccagtgccgtctcctttgccttctccttggcttccttggctgtctcaacaagtgttttggaaggggcctcgccttgcagcttagccaagatatattcaaaacccttcatagtcttggtcacgttgcttttgaaccgggcaagaccaaattcctggacagctctggagacaccaaataagctagaggagacccaggcttcccggcggatttcagtccagccactgttgtcagagttcacacagtaaacacatcgttcctccaccaccatcagccgggcgtggttgatgttccaggtgaaggtagtcatggtctgattctgtgggtccacaatagagtcctccaggacgtacaccgagtgagcaacattggcaggaaatagtcgctcggcccagcgtggcatcctgttggtcttggtcaggagtcgccgggacagcagtttctggtcaggggtcacctcccggtgtactatgtcttccgtcaagacatgtttgctatagggattcgggtaccgctgccagaaggcggcgaacacttggtcccaggaactccggagcacgctctggcccaggaaatacttcaccatcgtcccggccgaagcgggctcagcacccgcgcagcatcaggggtgcggagcctgggaggcacgcgagggccgggccgggccggggctcggcgcacacccgccgccaggctcgtagctcagtcaccaccgcaccgcgcccaagcagctgccgccgccgccgcccctcgtgccgaattcgccacccaggcctcgctaccta

SEQ ID NO: 314168 - DNA, 465 bp, Homo Sapiens
aaattacaatcattttcattagaaatttgtgaactccttttctgtacatagttgaccacctctctatttaatattttattatttaaggaatggctatctgaactgctggtttgttttattttattatctgtctctaagttcttttctttatttgtaaaatcatgggctaagggtacattacaatgaactgaaaaaatactcctgttttggtctctaacagatggacaaccaaatgatttgtcttcattagtcatttgttcagatacatttttttcactccaattattgtttccatttttgcaagtcaaagaaaagttattcgtagtattaggattatgtgaaaatctctctatacttcgatcggcatttctgttaaagtcaatggttgcaattccttagtttccatctgttctttctggacagtttcttctgcggcctcctccagtgcttttggtcttggagtac

SEQ ID NO: 314169 - DNA, 389 bp, Homo Sapiens
agcaacaaaagccgaccctgagaagcatgggtgtggtcgtccgatccagcagttcccacgtggatgttgtactgcttctgtccttgatgttgatgccgtgggcagtcaggccccggcgcagggtgtcgcatgcttccagcaggggctgcctttctaggagctgctgccgccgggcgtcccccgtggcctcgggcatggccagcgcaaactgccggaccttctgccggaaccgcaccagctcgtccaccacaccatgcaaggtagcctcgctgccgtctcctgaaacgtactgttgatttgccagagaaattccaacagtttcaaaaaactgttcaaagtaagagatgatggcaccaaacacagcaggacttctcggcccttcaggttcc

SEQ ID NO: 314170 - DNA, 395 bp, Homo Sapiens
  misc_feature (37)..(37): n is a, c, g, or t
gcaaccgaggcctaccttgcatggtgtggtggacganctggtgcggttccggcagaaggtcccggcagtttgcgcctggccatgcccgaggcccacgggggacgcccggcggcagcagctcctagaaaggcagcccctgctggaagcatgcgacaccctgcgccggggcctgaactgcccacggcatcaacatcaaggacagaagcagtacaacatccacgtgggaactgctggatcaaaggacaaaagaccaaaaatcagcgggctgaggatggagcacagccatgaacctgctcacgacaagacgcacccatgcttctcagggtcaaggctttatgttaaagcttcctgtcggggctgctaggtcagcattaaagtaaggcaaccaaccgtgg

SEQ ID NO: 314171 - DNA, 357 bp, Homo Sapiens
gtgcatcacactccagtttgaaaagtccaagccacatggaaaaatacccgcaaaaagagaaaaccaaagaagatctggattcacgaagcaacctacacttgccagaaactaaattttctgaattgtcaaaactgaagaatgatgatatggggctaatcatattgaaagtgttattaaatcaaacttgccaaactgtgcaaacagtgacaccgacttcatgggtcttttctcaagccggtatgacccaagcatttctttttctggaatgtcattatcagacacaatgacacttagaggaagtgtcctctctgagaagtgcattggttttcagtgacattcaggattgcagttcttggg

SEQ ID NO: 314172 - DNA, 1692 bp, Homo Sapiens
gcatttccgccagtcggcttacccgctggccgcctcctgacaagcgggagggatccgcggtggacccagggaagcggaggagcctggcggccaccccctcttcctcacttccctgtactctcatcgctctcggcctccgacacgaaaaggaagcaaatgagctgatggaagatctgtttgaaactttccaagatgagatgggattctccaacatggaagatgatggcccagaagaggaggagcgtgtggctgagcctcaagctaactttaacacccctcaagctctacggtttgaggaactactggccaacctactaaatgaacaacatcagatagcgaaggaactatttgaacagctgaagatgaagaaaccttcagccaaacagcagaaggaggtagagaaggttaaaccccagtgtaaggaagttcatcagaccctgattctggacccagcacaaaggaagagactccagcagcagatgcagcagcatgttcagctcttgacacaaatccaccttcttgccacctgcaaccccaatctcaatccggaggccagtagcaccaggatatgtcttaaagagctgggaacctttgctcaaagctccatcgcccttcaccatcagtacaaccccaattttcagaccctgttccaaccctgtaacttgatgggagctatgcagctgattgaagacttcagcacacatgtcagcattgactgcagccctcataaaactgtcaagaagactgccaatgaatttccctgtttgccaaagcaagtggcttggatcctggccacaagcaaggttttcatgtatccagagttacttccagtgtgttccctgaaggcaaagaatccccaggataagatcctcttcaccaaggctgaggacaacaagtaccttctaacctgcaagactgcccgccaactgacagtgagaatcaagaacctcaacatgaacagagctcctgacaacatcattaaattttataagaagaccaaacagctgccagtcctaggaaaatgctgtgaagagatccagccacatcagtggaagccacctatagagagagaagaacaccggctcccattctggttaaaggccagtctgccatccatccaggaagaactgcggcacatggctgatggtgctagagaggtaggaaatatgactggaaccactgagatcaactcagatcaaggcctagaaaaagacaactcagagttggggagtgaaactcggtacccactgctattgcctaagggtgtagtcctgaaactgaagccagttgccgaccgtttccccaagaaggcttggagacagaagcgttcatcagtcctgaaacccctccttatccaacccagcccctctctccagcccagcttcaaccctgggaaaacaccagcccaatcaactcattcagaagcccctccgagcaaaatggtgctccggattcctcacccaatacagccagccactgttttacagacagttccaggtgtccctccactgggggtcagtggaggtgagagttttgagtctcctgcagcactgcctgctatgccccctgaggccaggacaagcttccctctgtctgagtcccagactttgctctcttctgcccctgtgcccaaggtatgatgccctcccctgcctcttccatgtttcggccatatgtgagacggagaccctc

SEQ ID NO: 314173 - DNA, 649 bp, Homo Sapiens
  misc_feature (55)..(55): n is a, c, g, or t
aaaagagccataattatcttaaatgtgaaaaaccacatccaataaactgatatangttttaggaacaagggaatatcttattgtcacgcattcacagtgaaacccattttaatgcaggtccagagccaactgcagtcctgtccaatcccataggtacaagggcctggctcctcttcctgtgtactgcccgacttcctcatcttactgggtccagcataaagcagatgtccactgtcttcctcacatgctgtgatcttggcttagaggtaggcacagtgccgctccagcagcgaggggttcgcgttacttaggaacagcagctcttttttcccttctgtaggagctttctcatgttgaagccaattgttttccaaataatactgaatacaactttcaaattcctttgggttatagttggaaaccaggatgggaataaagggatccagggcatcaaatccttcctggggaagaaaaaggatcaggaaacatgttagttaaggaacaaagcaccagacagacagactctacttaagcactttgaaggtaaggtatttgtttttcttctatgtaactctacttctcattctctggcaacattgcctgatacaggactccacatatggactccacatatggtggctggctactc

SEQ ID NO: 314174 - DNA, 367 bp, Homo Sapiens
gagtagccagccaccatatgtggagtccatatgtggagtcctgtatcaggcaatgttgccagagaatgagaagtagagttacatagaagaaaaacaaataccttaccttcaaagtgcttaagtagagtctgtctgtctggtgctttggtccttaactaacatgtttcctgatcctttttcttccccaggaaggatttgatgccctggatccctttattcccatcctggtttccaactataacccaaaggaatttgaaagttgtattcagtattatttggaaaacaattggcttcaacatgagaaagctcctacagaagggaatgcctacctctaagccaagatcacagcatgtgaggaagacagtgg

SEQ ID NO: 314175 - DNA, 772 bp, Homo Sapiens
atggttcaggaagccgctcatttggtagttttgaaattcctccagcccagggtgaagcctctaaaagtttgatcaaaagcgctgtttgttgtagctggactgcagaagatcccgacattttttcacccaaagatgagcatctggaatatgtagtatcagccagtcctgttttgcacagaaatgaataacatggcaaagacttagggtttttcctgttcccttctctccatacagaagatatcgtatagctggataagcaaaactggtgtttttcaggtaatgcagaagttctagggctggtttccttaccatcaggcaagcttcactgaatgtcttcacctgcatcacaaagcgaggaggaaggccatggggaaatacagtctccaaatcctggggggagatgttgtagtgctgaccctcgtgctgatccccatgcttggccgggtcattctcattggtgcgggaaatagctctcggactctcaactggaacctggttatctaggtgagcagcaatgctttggcgagcctgggtccccatgtgtaaaaaacgcccagggtccaacttatggatcctagagataagccttgttattcctttcagcatcatccttgcactcctggaggtccggagtcccgctcctttccctcagcggtacaatacccgtgtcggtccattccctcaccgtgagtcgaggactagttctcctgactaggcgaccggcacacgctgcctggggccggctccaaagcgcccgtcctgagactgcccc

SEQ ID NO: 314176 - DNA, 1603 bp, Homo Sapiens
atctaacacaacactttagaaagatattttattttttaggaaaagagccataattatcttaaatgtgaaaaaccacatccaataaactgatataaagttttaggaacaagggaatatcttattgtcacgcattcacagtgaaacccattttaatgcaggtccagagccaactgcagtcctgtccaatcccataggtacaagggcctggctcctcttcctgtgtactgcccgacttcctcatcttactgggtccagcataaagcagatgtccactgtcttcctcacatgctgtgatcttggcttagaggtaggcacagtgccgctccagcagcgaggggttcgcgttacttaggaacagcagctcttttttcccttcttctgtaggagctttctcatgttgaagccaattgttttccaaataatactgaatacaactttcaaattcctttgggttatagttggaaaccaggatgggaataaagggatccagggcatcaaatccttcctttcccagcaactcctggggcagataggctttccggggcttaaagagagacccagtctggctcaaagccgacacaatggcgcctccatgccaatcatttttcatcattttcctcaagttgtgaacaagtgctaattcctcgggggcaatcgggcttttatcttctcttttcagagtggttcttccccaaagagcattgattccatccacggccactaggaggtgaaacatacccaaagaactttgcctctttagctctttcagcacaattccaactgcatctgtggcgttcctcacccgtgttatgccctgttcaaccacttctcccagaggactccctttctcagtgctttctctcttattccagacatacttctcttgaacttttatctggttcaggaagcgctcatttgtagttttgaaattcttcagccaggttgaagcctctaaaggttgatcaaagcgctgtttgttgtagctggactgcagaagatcccgacaatttttcacccaaagatgagcatctggaatatgtagtatcagccagtcctgttttgcacagaaatgaataacatggcaaagacttagggtttttcctgttcccttctctccatacagaagatatcgtatagctggataagcaaaactggtgtttttcaggtaatgcagaagttctagggctggtttccttaccatcaggcaagcttcactgaatgtcttcacctgcatcacaaagcgaggaggaaggccatggggaaatacagtctccaaatcctggggggagatgttgtagtgctgaccctcgtgctgatccccatgcttggccgggtcattctcattggtgcgggaaatagctctcggactctcaactggaacctggttatctaggtgagcagcaatgctttggcgagcctgggtccccatgtgtaaaaaacgcccagggtccaacttatggatcctagagataagccttgttattcctttcagcatcatccttgcacgtgagtcgaggactagttctccagactaggcgaccgacacacgctgcctggggccggctccaaagcgcccgtcctgagactgcaaaaaagggtcccc

SEQ ID NO: 314177 - DNA, 616 bp, Homo Sapiens
aatcagcacccacatcccctttcttgacaaatgatttttctagagaactatgttcttccctgactttagggaaggtgaatgtgttcccgtcctcccgcagtcagaaaggagactctgcctccctcctcctcactgagtgcctcatcctaccgggtgtccctttgccaccctgcctgggacatcgctggaacctgcaccatgccaggatcatgggaccaggcgagagggcaccctcccttcctcccccatgtgataaatgggtccagggctgatcaaagaactctgactgcagaactgccgctctcagtggacagggcatctgttatcctgagacctgtggcagacacgtcttgttttcatttgatttttgttaagagtgcagtattgcagagtctagaggaatttttgtttccttgattaacatgattttcctggttgttacatccagggcatggcagtggcctcagccttaaacttttgttcctactcccaccctcagcgaactgggcagcacggggagggtttggctacccctgcccatccctgagccaggtaccaccattgtaaggaaacactttcagaaattcagctggttcctccaaaacaaaacggacac

SEQ ID NO: 314178 - DNA, 421 bp, Homo Sapiens
aggcaccatgatacttcgtctgtgagcactaatcagcgtagcagtagcgcaagtgtaccgctgatacgctcagaccgtcatcattcagttagcgtgttcaatgctcctgtagtgctgactctttcgtcttgctcgtgtatgcttcgttgaaatctgtccacatccgtagtgcattcatgtcaggttctttctccaggccatgactcatacctatatagagacccttgccaatgagcgtagtactacacgcctgtagtcactgtcaggcctctcagtgagatcttcgggttgtgcatccatttctactgagttagtgttacttctgtagtgtgttctcagagccatgttccgatatactcgccaggcatgactcaccgatgcgcagtcctttgcgtaggctgtgctatagaggtggtctcgg

SEQ ID NO: 314179 - DNA, 715 bp, Homo Sapiens
ggcctttccctcaggttttcctcttccccactgcggctccccagtcggcgcttgcgcggagaactcagcgctgagattgtctaaagccccaggaaaaatggtggaaaattcaccgtcgccattgccagaaagagcgatttatggctttgttcttttcttaagctcccaatttggcttcatactttacctcgtgtgggcctttattcctgaatcttggctaaactctttaggtttaacctattggcctcaaaaatattgggcagttgcattacctgtctacctccttattgctatagtaattggctacgtgctcttgtttgggattaacatgatgagtacctctccactcgactccatccatacaatcacagataactatgcaaaaaatcaacagcagaagaaataccaagaggaggccattccagccttaagagatatttctattagtgaagtaaaccaaatgttctttcttgcagccaaagaactttacaccaaaaactgaactgtgtgtaaccatagtaacaccaagcacgtatttatttataagtttttgccattataattttgaccataaattaatttgaccatctctcttattaatagagaagtaaaaaatgtaagttgaccttctcttagattatgttcaatgaatattgtaaatgttcaagtattgttaatgaatagaataaatacaatattgcattcccatatagca

SEQ ID NO: 314180 - DNA, 409 bp, Homo Sapiens
  misc_feature (69)..(78): n is a, c, g, or t
  misc_feature (371)..(371): n is a, c, g, or t
  misc_feature (387)..(387): n is a, c, g, or t
ccatactgtgaaggtcagcctgcctaggaattctgccacatttacacacacccctggccaaagtaatannnnnnnnnnccatgtagaacaaattatgggcagaaagtaaagttagttttagaagtgctgtttgtggttggagaattgtaaaaatcttttaaagggataagggaattagtggcttttaatataaccactgcttcagcccgaaacacaaaatcactgttacatggaactggttattaggccagatttatattcatctctgtctagagtatttcatgtgtgtatgtgttgcttacgttgtctgtctccaaagtctctcatctcttttaatcactgcaaattaaagcaatactgaaaacttgagnagaatgcaccttaggnggaaggggctatttcaagtcag

SEQ ID NO: 314181 - DNA, 406 bp, Homo Sapiens
agcagttctcagctgccgcgccgcctgtccgactcgcccgtgttcgacgcgccccccagccccccggactcgctgtcggaccgcgacagctacctaagcggctccctgagctccggcagcctcagcggctctgagtctcccagcctcgaccctggccgccgcctgccaatcttcagccgcctctccatctccgacgactgaggcaagagggcgccagtgaggaggaagggaaggcggttcagagatgttggaggacacccctcgccatctcgcccttgctgggggcacgggagtggggggggtgacatgggccctaggcagactgcaagcccgaccgagcacttggactcgaactctgtgccgggaggggcccccacccctcctttttcgggttcctcttggcttt

SEQ ID NO: 314182 - DNA, 2560 bp, Homo Sapiens
  misc_feature (56)..(118): n is a, c, g, or t
  misc_feature (135)..(143): n is a, c, g, or t
  misc_feature (197)..(210): n is a, c, g, or t
  misc_feature (212)..(452): n is a, c, g, or t
  misc_feature (600)..(611): n is a, c, g, or t
cgcgggtcgttgttgttttttcttccggccccgcgggtggtcccccccggggcggnnnnnnnnnnnnnnnnnnnnnnnnnnnnnnnnnnnnnnnnnnnnnnnnnnnnnnnnnnnnnnnggcccgtggggcgcggnnnnnnnnngtctgctggggggcccccgtccccccggtggggtgttttttttggggttttttnnnnnnnnnnnnnntnnnnnnnnnnnnnnnnnnnnnnnnnnnnnnnnnnnnnnnnnnnnnnnnnnnnnnnnnnnnnnnnnnnnnnnnnnnnnnnnnnnnnnnnnnnnnnnnnnnnnnnnnnnnnnnnnnnnnnnnnnnnnnnnnnnnnnnnnnnnnnnnnnnnnnnnnnnnnnnnnnnnnnnnnnnnnnnnnnnnnnnnnnnnnnnnnnnnnnnnnnnnnnnnnnnnnnnnnnnnnnnnnnnnnnnnnnnnnnnnngaatgccaagtctcttctgtactttcttttattaacatcatagtctttgcatcaagatacatagcaatgatagcaggtttctttttaaagcttagtattaaatattaaatatctttccccatttaaattttacattactctgccaagnnnnnnnnnnnnttaaaactcaagttacttgaagcctggacacacttccatgattagccgggctaggtaaaagttggtggctttattcttcctgctctataagcagatccaggccctagaaagatgggaccagggtatataattgtttttgaaaagtgtgctacaaaaatggatggcctgttataagccaggatacaaagttaaggatgggggtaagggagggacattttcttccagaagaaaagacagaatttctgaagagtcccagtccataattttcccaaaatggttggaggagagggtaaaatctcaacatgagtttcaaagtactgtctctgtgaggggccggtagatgccttgctgaggaggggatggctaagtttgaccatgccccatccccagctaggagaatggaaatggaaagtttattgcccagtgggtgtgaaagtgggctgaagcttggttggtactgaattctctaagaggtttcttctagaaacagacaactcagactcttcctctcacttcagcaaagaagttatttttaaaagcacttgggaagttcctcctccaccccgcaggtgggaaggctcagagaagggtgtcatcagtacagccgccttctaggccgtaacggaattcctgaaggttggagactccatagaagtggacaaaggctgctgccaccaccaggacatggaaaatctgatgagactggaaccatatgtcaaattttccaggaaagaagcgctcaggaattcgagcagcataaaggccagctccagtgatgtacatcacagccatgaggaagaaccagcccatctggcccactgtggtggccttgacaaagccctcagcgatagtaaagtgcatggtgggcacgacgccactcaagccaagtcccaggaacacgcctgctcttgtctgccggtgcttaggagtggcaaaccggtcccactgcgccacaatgatggcagaaatgcccaggacacagacgatggagaggtagatgagccgtggctgtggggagcagtagaaggaataatagagccaggggacaaagctccccataattagaaggagcaatcccctgaataagtccagtttggaaaaagtccgagagacttttctcggaatgtcaatagacggtgtgaaagagccaggagaagctgaggcagagcactgcccccaaaaagaacatcccaaaaaccaccttctcctgtagaggggccatgaagtacatatttggtctgagcatggtcaagattcccaaaaagagaaacagcacgaaaccaagcagatgggtccagatgttgccagtttctgtatgaatgcggaagatgctcttgaagcaagcccgaaaggagggcatgggaggtctatgaccatgtagcagatagtcgttgtcctttagccagtcagggagcacatcatatgggatgaccctccaacgtccctcccagaccttgtacacaaactcttccatcttctccatggcgtggtgggcttgcaggggaagtgtcagtacccgcacctcctcctcttcttcctggggcactgggcatgtttgctcttcttcagctttgggtgggttggcgattacccgtttgcccttctcttctagcaggggtcccagttcagccagttccaccgtgtcagcttccctgttactggcaggagccccattcccctgtgccaccacagatcctttgtgggaagacatctggctggtacctcaataccctgcagcttcagcttggggaaaggttggggtctctcagccccagggggcagagatctccctctgatggtagacaagccgggcaggcgggctctgctgggggccgcggtcccccgcgctacatcccgcggcgctggaggcggcctgcggccgagcggccccgatcttcagcgccctccccgcgcctcgtgcggaattcgccacccaggcctcgctactt

SEQ ID NO: 314183 - DNA, 821 bp, Homo Sapiens
  misc_feature (84)..(99): n is a, c, g, or t
  misc_feature (228)..(228): n is a, c, g, or t
gtaaagggtttaggtctgtagaattattaaaagttcttcttccccccctttttaaagttttacccatttactttgcgccaaggnnnnnnnnnnnnnnnntttaaaacctccaaggttacttggaaggccttggacccccctttccatggattagcccggggctaaggtaaaaagtttggtggcctttattcttccctcgtcttataagccggatcccaggcccctagnaaagattgggacccagggttatataattgtttttgaaaaggtgtgctacaaaaatgggatggcctgtttataagcccaggatacaaagtttagggatgggggtaaggggagggacattttcttccagaagaaaagacagaatttctgaagagtcccagtccataattttcccaaaatggttggaggagagggtaaaatctcaacatgagtttcaaagtactgtctctgtgaggggccggtagatgccttgctgaggaggggatggctaagtttgaccatgccccatccccagctaggagaatggaaatggaaagtttattgcccagtgggtgtgaaagtgggctgaagcttggttggtactgaattctctaagaggtttcttctagaaacagacaactcagactcttcctctcacttcagcaaagaagttatttttaaaagcacttgggaagttcctcctccaccccgcaggtgggaaggctcagagaagggtgtcatcagtacagccgccttctaggccgtaacggaattcctgaaggttggagactccatagaagtggacaaaggctgctgccaccaccaggacatggacc

SEQ ID NO: 314184 - DNA, 486 bp, Homo Sapiens
  misc_feature (474)..(474): n is a, c, g, or t
ttattcctccttgcattatcctaaaggctcttttctttttattcctacagttccagtctcatcagattttccatgtcctggtggtggcagcagcctttgtccacttctatggagtctccaaccttcaggaattccgttacggcctagaaggcgggctgtactgatgacacccttctctgagccttcccacctgcggggtggaggaggaacttcccaagtgcttttaaaaataacttctttgctgaagtgagaggaagagtctgagttgtctgtttctagaagaaacctcttaggagaattcagtaccaaccaaggcttcagcccactttcacacccactggggcaataaacttttccatttccatttctcctaggtgggggatgggggcatgggtcaaacttaggccatccccctcctcaggcaagggcttttacccgggcccctcacaggaggacagtacttttgaaactcangtttgaggtttt

SEQ ID NO: 314185 - DNA, 549 bp, Homo Sapiens
  misc_feature (69)..(242): n is a, c, g, or t
  misc_feature (463)..(509): n is a, c, g, or t
ttttatttttaggtgtacatcggctcagtggaattgcttccacctatgcctcccgggtcccggttcagnnnnnnnnnnnnnnnnnnnnnnnnnnnnnnnnnnnnnnnnnnnnnnnnnnnnnnnnnnnnnnnnnnnnnnnnnnnnnnnnnnnnnnnnnnnnnnnnnnnnnnnnnnnnnnnnnnnnnnnnnnnnnnnnnnnnnnnnnnnnnnnnnnnnnnnnnnnnnnnnnnnnnnnnnnnnnngcgtgagccaccatgcctggccaagacttcttttcagtattaagtgagattatatacaggaagcacataagacactggcacattgtaccgaatgtgcagtaaggaggctgtgtttatctcaccccaactgggtttaacagaggatgtaagttattctcatattgagatgtgcctaaactgcaagtgatgtgttccgtgcatacccaatgcagtggctcatnnnnnnnnnnnnnnnnnnnnnnnnnnnnnnnnnnnnnnnnnnnnnnnagcgcagcagtttctctccaggctgacagtacctgcagcc

SEQ ID NO: 314186 - DNA, 1206 bp, Homo Sapiens
  misc_feature (112)..(127): n is a, c, g, or t
  misc_feature (307)..(317): n is a, c, g, or t
  misc_feature (949)..(949): n is a, c, g, or t
gtgaaaagagggcttttccccacagtgtcgcgggcacgaagaaaatcgctgtataaagtagaatttcgacccacccccgcgtattttgtcggaaatgaaagttgggccaaannnnnnnnnnnnnnnncgtataaattgtgagaataatcgcgaaggctctcggcgattgtgggagctccccccttgttggaatagagatccccccaggttaaagtggacgcctcccagggaaacctcccccatcttcggggatatttggtgtttcaagaaaacgcgtttcggggtttgcaccgccccggggggcggnnnnnnnnnnnatctggggggaggaaattcccaaaggcccctatggtccatggaccaagggatttttccttgggagaaacagagctatgggccccatgtttcactttacccttacgggggcccgcggcggccaaaacaaatgggtctagaaaagcttcttggagggccggagggcggcccgacaaggtttttttgttcggttttcgggttgtttttccagtcttagcatttactttccccaccccacattcttggaacagcctttagttttacagggaaatggcactgatggacagaagactagcattaccttcatgaaagggctgttagagctgcctgggaagaaggcgtgccttggggaactgggaagatgccgtcagtgtgggtgggcaggaggacagccagtcgtcctgctgccagcccaatagcttccagcggcaggtgcccaggtgctaccggagcccctcataggggtaggggcagggactgcacctcctccaggcactcatcgtaagcctcctggtactcctcatggggcttgaccattatcacacaggtggggcgcttggagcctgcggctgcacccaggtccgtcttagaggggatatagacatagggcaaacggtcctcacacatgactggnagatctcctttgttgacaaatttctgaacctctttcaccccgcgccgaatctgcttctgcttcaccgctttcttgatgcatttgtagagcttccgcgtgaggcggcgagaagccaggggctgcgcgatggggttctggttgaccagcagctcctggtaggtgcgctccccggaacacgcctccgcctgagcctcgggcccgtcgggatctgcctttaggtcatcgcagcggccgctgaaacctagtcccagggaggc

SEQ ID NO: 314187 - DNA, 866 bp, Homo Sapiens
  misc_feature (49)..(79): n is a, c, g, or t
  misc_feature (82)..(82): n is a, c, g, or t
atggttctaggaaagccttcttgaggggccgagggcggcccgaccaagnnnnnnnnnnnnnnnnnnnnnnnnnnnnnnnggncctaggcatttactttccccaccccacattcttggaacagcctttagttctacaggaaatggcactgatggacagaagactagcattaccttcatgaaagggctgttagagctgcctgggaagaaggcgtgccttggggaactgggaagatgccgtcagtgtgggtgggcaggaggacagccagtcgtcctgctgccagcccaatagcttccagcggcaggtgcccaggtgctaccggagcccctcataggggtaggggcagggactgcacctcctccaggcactcatcgtaagcctcctggtactcctcatggggcttgaccattatcacacaggtggggcgcttggagcctgcggctgcacccaggtccgtcttagaggggatatagacatagggcaaatttcggtcctcacacatgactgggagatggcagtatacctcaatgggcagtgtgtctcctgccaaaaccatgatccctttttctcctttgttgacaaatttctgaacctctttcaccccgcgccgaatctgcttctgcttcaccgctttcttgatgcatttgtagagcttccgcgtgaggcggcgagaagccaggggctgcgcgatggggttctggttgaccagcagctcctggtaggtgcgctccccggaacacgcctccgcctgagcctcgggcccgtcgggatctgcctttattttggtcatcgcagcggccgctgaaacctagtcccagggaggcgagcccacgcggtccacagctttaggcatcacttccaggtcccc

SEQ ID NO: 314188 - DNA, 613 bp, Homo Sapiens
  misc_feature (98)..(98): n is a, c, g, or t
ctccaggctccgtgtgcctgctgtgcaggacgctgcccttgatgtcgctcaggtccgaggggctaatgacgttctcgtggctcgtgatgcaggaactnccgccagagcttgtccagttcttcgccggagaatttcccagaggtcttcgccttgtgccacagcccagcctggggtcatccagcccgtcttcctgggtgccactgagggagttgctggtcacctgccgagcgtccttctttccgtccagaccatacttggccaagatgacattgaggttgcgtatgagtctcgcttccttctccccatcttcgtccaagccgtcaagctttagtttcttccaggcgagttcgtccctctcctgtatcttcagatcagcgtggagctcggccagcctcacgggaggaagatgcagtcgctgggccttctcccacagctggttcaacttctccatgcggaactcctctccggactcgcgtttcggggacggcttgggctggttcttctcccgcgagtacttgccgccgtggctcgcagcgggccagggcccgaggaagagcagcagcagtagcagcgccgggagcccgcgcagaaacgacctgaccctccgcggcgc

SEQ ID NO: 314189 - DNA, 952 bp, Homo Sapiens
tttggtgcgcaatctcccagctgcctttggtagtgttgtgctttctcgatttgggcttcgaaagtgcttgagctcctcccggaaccgcctccagtttcttgtccgtaaggttggcggactgcgcccaggtcccacaggtccaatcaccctgggctcctcgaactcagcctcaagtgctgtaagccctggtggctgaccctgcgcaggcggtcccaggccctggtttgatgctgcgcagcttctccttcagctccgtgtgcctgctgtgcaggacgctgcccttgatgtcgctcaggtccgaggggctaatgacgttctcgtggatttcttcggtcctgctcagggtctccagcaggacgttgtactcgtgaactttctctttgtgatgcaggaactcccgccagagcttgtccagttcttcgccggagaatttcccagaggtcttcgccttgtgccacagcttttccagcctggggtcatccagcccgtcttcctgggtgccactgagggagttgctggtcacctgccgagcgtccttctttccgtccagaccatacttggccaagatgacattgaggttgcgtatgagtctcgcttccttctccccatcttcgtccaagccgtcaagctttagtttcttccaggcgagttcgtccctctcctgtatcttcagatcagcgtggagctcggccagcctcacgggaggaagatgcagtcgctgggccttctcccacagctggttcaacttctccatgcggaactcctctccggactcgcgtttcggggacggcttgggctggttcttctcccgcgagtacttgccgccgtggctcgcagcgggccagggcccgaggaagagcagcagcagtagcagcgccgggagcccgcgcagaaacgacctgaccctccgcggcgccatcttcctctgcgactggcgctgcgcggagaaaac

SEQ ID NO: 314190 - DNA, 686 bp, Homo Sapiens
  misc_feature (21)..(21): n is a, c, g, or t
  misc_feature (39)..(39): n is a, c, g, or t
  misc_feature (120)..(120): n is a, c, g, or t
  misc_feature (170)..(170): n is a, c, g, or t
caaggcggggggtgcccatcnatgtcccggttcgggttncgaaagccaagcttggacctgaaggcaatgtatgaccggttctaccaggactctgtgctcgtgcacacgcggtaagccccntcctgtccatgcacacggggtgaccaacgcacacggggtgagccgctgcntgcctgtgcacacgcggtgagccccctcctgtccacgcacacggggtgacccacgcacacggggtgagccgctgcctgcctgtgcacacgcggtgagccccccagtggccagcggggacatggcacctggggctgccacggctgctgtccaggccctgaacggcatcctgtgtggcaagcagggggcagcagacatggttggggagagggaccttggtggggggtgatccaggatcatctgggaggcgccagtgtcatcacgggaggcgtcacagtgaggcaggagggtcagagtcaggccgagaagacactgcactgtcggcttccaagatggaggaagggccccgagcccggggacactgcagcttctagaggctgtgaaaggagaggagaaacctgtcccgtagagccacaagggcacggccctgcccgcacctcggccttagctccgtcttggcttctgacctccaggacgtggagagaatgaatgtgcctctgtgttgtggggcccctaag

SEQ ID NO: 314191 - DNA, 403 bp, Homo Sapiens
gctgcagagaaaacaccacatcactttaactaatctaattactgaagagactactcatgttgttatgaaaacagatgctgagtttgtgtgtgaacggacactgaaatattttctaggaattgcgggaggtgggtagttagctatttctgggtgacccagtctattaaagaaagaaaccaccaaggtccaaagcgagcaagagaatcccaggacagaaagatcttcagggggctagtctgttgctatgggcccttcaccaacatgcccacagatcaactggaatggatggtacagctgtgtggtgcttctgtggtgaaggagctttcatcattcacccttggcacaggtgtccacccaattgtggttgtgcagccagatgcctggacagaggactggcttcctg

SEQ ID NO: 314192 - DNA, 762 bp, Homo Sapiens
ggacagtagaaggactgaagagtgagaggagctcccagggcctggaaaggccactttgtaagctcattcttggggtcctgtggctctgtacctgtggctggctgcagtcagtagtggctgtgggggatctggggtatcaggtaggtgtccagctcctggcactggtagagtgctacactgtccaacacccactctcgggtcaccacaggtgcctcacacatctgcccaattgcatggaagccattgtcctctgtccaggcatctggctgcacaaccacaattgggtggacacctgtgccaagggtgaatgatgaaagctccttcaccacagaagcaccacacagctgtaccatccattccagttgatctgtgggcatgttggtgaagggcccatagcaacagatttctagccccctgaagatctttctgtcctgggattctcttgctcgctttggaccttggtggtttcttccattgaccacatctcctctgacttcaaaatcatgctcattcagcatttttctttctttaatagactgggtcacccagaaatagctaactacccattttcctcccgcaattcctagaaaatatttcagtgtccgttcgcacacaaactcagcatctgttttcataacaacatgagtagtctcttcagtaattagattagttaaagtgatgtggtgttttctggcaaacttgtacacgagcataaattcttctggggtcaggccagacaccaccatggacattcttttgttg

SEQ ID NO: 314193 - DNA, 690 bp, Homo Sapiens
  misc_feature (30)..(30): n is a, c, g, or t
  misc_feature (108)..(108): n is a, c, g, or t
  misc_feature (129)..(129): n is a, c, g, or t
  misc_feature (201)..(215): n is a, c, g, or t
ccaccaaccaaaagcacattaatctaatcntgttatgaaccaatgcagaggcagtagcccaaaattgaatgaagaagaaagctttcaaactctatcgaagactgttanataatctagatctattcttcntacgtccctttcgttcccacccttaaaaaagagagttgctacctgggagtcacttttaacaagacaataccnnnnnnnnnnnnnnnggaactaggttagtcaatacacactgtgagctccaacacatactgtacccatctgcattcttcaagacctcagctgcagaattttatgcccgctgttgaaaagtgttaaaggaaaagttttcttgcccacacctgcagtaaggaagtcgggggaatgatacataaaagtaaaggtaaagtggtatgtgacaaattttaaagctagtctgtgtatacaacacagagctgtgcaacgctagaggagaaatatattttaggatttgcaagcatccaggattaatgtagtgtctttttattgaaaatgttttctttctaaactacacttttaaagttacttgtgaaaaaaagcaaacacttttttgttataacagcttagaaattggttgtgactcacggctcgatgaacatgaggctttctgcaactcccttgcagattgatgtaggcaggcaaagatacactgaacctttataaata

SEQ ID NO: 314194 - DNA, 659 bp, Homo Sapiens
gcccaccctcatccaccctccatatacctacactgcccacactccttatctcccagccaacgagccagaccattgaggattcactggggagtgagggcaggactgggcagaggaagaagctgacctgcaatgtgtctgcaacccagtgatccttcagttcgatggggatctctggatctggaatgaccttctggagttgtccccgttgagtcaagggttggggccagaaggtacccctgcaaaggtgcattgcccctgtggtgcatgcagctccctgtggctgagagtgagttccagagcggagtgcatctctggaatgcatctctgccagcagcaacactgttctctcaagcagctggggtgttacccctgaaaaggtcatctgggcagagctccacagtgtccccacatgcagattctccctgtggtgtgtgatcacaaaagcgcccatacatcctaactgatgctccccaacactccccagacaagggtgctttcccctgaggctgtcattggatgtctggtaaatgttgattattgctaaagccttcccacagtccctacacataaacttctctcctaagtgtgtccgtgcatgctcaaggctgactgatggctacagttgcccgtactctatactcataaggctcctctcgtgc

SEQ ID NO: 314195 - DNA, 1361 bp, Homo Sapiens
  misc_feature (36)..(36): n is a, c, g, or t
  misc_feature (547)..(547): n is a, c, g, or t
  misc_feature (564)..(564): n is a, c, g, or t
ctagggaaggctgaagctggaggatcacttgaaacncaggaggcagaggctgcagtgagcctgagattgcacccactgcactcctagccctgggtgacaaagtgagaccctgtctgccaacaaacaaatattcacacatcacccagtattaaggaagggtcatcattcagagaggtttttctgagataatctattaaattacaatttataaagaaatgtttataaatttgtatgaagttataaatttataaatataaaagtataaatccatatagagctgtttaaacaagaagtttccctctgagaggattacagactatgcaatctgctacatgtgatttcagataaatgataaattatacctaatgtgtaagtataacaatcaatttttgatatttaaattatcctaaaacctgttgagtgtgaatcctcttaaatctttcttttctgtttatgcttctggctgagaatggaagaagggacggaggcttcaaatgactgaaattgttcagatggtttcttgtgaccgaccactgtaaagtatttnttcaccagagtccaaanggcaagataaaaagtctctgacttgaaatcagaatcgatctgctgatctgctagccacagctcgaatattgccataaaccttggaaggaggatttcccaagattaggttgcaaatggcagttcttgccatcttgatattttggaaggagccaaggatgtgaactttcacatcagccaaaactatccttgtccgtgtcacattctctatggtgaatttggtttttcctcctttgccagcgattcttcctattgccctggatagatggtctccctttaggggtttaacatctgtaatttcaaaagactctaggaagaggtcatccaacctgatgagggcaagtgcatcctccacctgaaagccgagaataaaagctttcacaaaatcagctgcttttgtcagagcactaacatccttggtttctttacaagtcctgatttctacattccttgatttcaggttaaagcgtatctgaagtcccaaatgttccacaataggagtaaatatcttcatccagttttctttcaatggtgtgtatctgttagctgggactggaattttccttgtttcttctttcccactcaggagcccgtccccacagaggggtgggaagacgggcctcttcgccggcctggcctcctctgtgtccatgcggcccgcatccccgccctctcctgctgcggacagctgttcagcctgtcgtttcttcgcccgtcggccacccttgcgggtgacctgggtaaagccctcctctgccctggcgctctgcgtttccatttcggattccatccccggaccc

SEQ ID NO: 314196 - DNA, 1243 bp, Homo Sapiens
agaaaatgtcaaaaaactttcacataaggtgctagactggtcttcttataatctctggttctatgtttgacatcagattcagcttcattctcctctttttcctcttcattagtggaaatggcatccaattcacggcagatgaagcttatggtcggaacagtaaatggatcaaactggtccactttctgcaaatcaataggcacagagatgcgacctgttttaggatgaacactaaaagggctcttcagtagatgattgattcctttgctgacattgatatccagccgtggaaaacagtactggagcataatctcccactccagccagggtccatatttgtcatttttgatgttattctgatatctgctggctactttcttcaagtgctcccaacgctgaagtgaattgtgagacttttggaagctttgttgaagttcatcatgaattgtttcaggaacaagggctaaaatcttatcccagctttctttattttcgagaatatcttgattaaccaaggcatattcttcaaagtatttttttattatgtttatagattttctgataaaaggggtgaattttttcacttaggtgaactttctttttaacgtcttgaccaccctttacaaggctcaaatactcaactatcccagaacgtactgcagaagacagttttctaactgattcatcacagacccaacaatgaacacctctccttccagaatatacccagagacgatgcttaaatccaaagtcctccttcaatgctctgtcaatgatgcgtatggccattgtcatgagggtccagcacttaggacatatgtctgcagaactacaacatctcctcacatcgtcatagtctgtcatgtcaatgtcaaataccagttctttttcctgagcctggaaagctcccagcttcactgtattgtgttgattgggtctgtgagaatatactgcgcctatatcaatcttgtatggattcattttctgcatctccttttccagatcactctggttgttgaaggattggtagcgaatgtaaatatcatctttcaatgtgaatgaaaattcacggtgttgaaagtaattctttatcactccaccgtagttgagccagcgatagtactgagagtagggaaagagcctccggtaataaagtttaagcagctcgggcagctcggtggggtcaaacgtctccattgagcgcggaactcgccacggtaaggattaccacaggaattggcgg

SEQ ID NO: 314197 - DNA, 1622 bp, Homo Sapiens
  misc_feature (235)..(235): n is a, c, g, or t
ggttaattaaaaaatgttttatttatacaaatggacaatcagaggccagtcccccgtccttgccttccggctccagtgtggtgtaccaggtggccactgcctgctgtcccggcaagcacgtcctcacgctcagctctggcccgcctcgtcgtcactgtcctcaatcagacagtcccggatctcgcaagcccaggcccctctgtgtgcggagctgggcctcagcaggaatgtacgncggcagggggtccagtgagggcaagtccttcatgttcacgcggcagctgtagcacagctgctcctcaatgcaggcttgggggtcctccctcctgcaggccccctggccgcagcgcgggcccagcccacccctggagaacagcagggccccgggggtgtccgggtctcagtcagggggatgggtgactgcatccgggagagacgcgaggaggtctgagccccaaaagccgtggcactgtcagcggcgtcgacgtccagggcacacatgcagaggaggcagcgggggccggagtcgccagcagcagggccatcccgggggccccaccagcttctcacttgtcctgtacacagtgctgacagtggaggggaactcaggggccttggtgtcgacggctggtgtgaagacagaaggaacggagaacaggcggttgtagaaagcgacctccttcagggtgtggtcccgcatgggccgcaccaccaccacgtccccgtgccgctcatccgagaagcccgtatcccaggccaggaaggcccctcgacccagcgccaggttggtcatgagcttgatagccaagcgtgtgcagctgtccccagttcatgaccttggagtagccgtgggcttgggccctgtggaggatcaggtgggtccgcagggtttgcagaagctcctccttggcagtcagtgtcctcactgagcagaacagttggggaaagagcctcagtctgggcagggggcaggcggtcttgccaggttctgggggtccagcgggggctggggtggctgttcctccccttgagtcgggccaggaccacccccgggcccccagcacatgctgctgctggaggaagctgtccacggccgccttgtaggccccctcggatcccaccagctcctgggcagagcaccaaagcaccgacggtggcaggctgaacacctcctctaaggccaccacatgccatgggaacccagttgcttgcagaatgggcttcacttcggccagggtctttgatctctcctctaggctctggccacaggctgctccctcgtcaacaaagatgactcctgccacaaagcgcagtcttttggcagaatcttggctcaggccctcaagaacctgccagaccatggagctggacgaaggccccccagaccacgccaagagcaccttctcgcctggaaagatgagccggttcttgcccagcatggctctgaacttgtggacgtagaaggccttgaaacagtccctgcagaaggcatctccggctcgtatcaccacaacgggctgcgcttccttgcacttcacacacttctgctcacggctgggccgcggcgccgggggcggctcctcaggcgccggctccccgtatcccctcgtgccgaattcgcc

SEQ ID NO: 314198 - DNA, 366 bp, Homo Sapiens
ccaaacctgataatgtctcgcctaaatggacatcctggtgggtacagcagtaacacactcactatggcttgagtagcacaagcattattaattacctgcttagcaaaaaatatcgtgtcaagtcgggagtcctgaaccacagagcctgctggttcttcaaaattctcaggctctaaactccatatttcttctacttgggctcctcggcaaccgaatcctttaatgagctcggtgaagaccccggggtcgctttccatgaggcaccactccccggcattgcccgtcatggccctggccacacaccgccccgatccacctctcgctctcagctgccccccgcaccagctgccgccggccacagatctc

SEQ ID NO: 314199 - DNA, 727 bp, Homo Sapiens
gggaggcggggtgacgtgtggttgacgagctcggcggcgggtttgctgagatctgtggccggcggcagctggtgcggggggcatctgagagcgagaggtggatcggggcggtgtgtggccagggccatgacgggcaatgccggggagtggtgcctcatggaaagcgaccccggggtcttcaccgagctcattaaaggattcggttgccgaggagcccaagtagaagaaatatggagtttagagcctgagaattttgaaaaattaaagccagttcatgggttaatttttcttttcaagtggcagccaggagaagaaccagcaggctctgtggttcaggactccccgacttgacacgatattttttgctaagcaggtaatttaataatgcttgtgctactcaagccatagtgagtgtgttactgaactgtacccaccaggatgtccatttaggcgagacattatcagagtttaaagaattttcacaaagttttgatgcagctatgaaaggcttggcactgagcaattcagatgtgattcgacaagtacacaacagtttcgccagacagcaaatgtttgaatttgatacgaagacatcagcaaaagaagaagatgcttttcactttgtcagttatgttcctgttaatgggagactgtatgaattagatggattaagagaaggaccgattgatttaggtgcatgcaatcaagatgattggatcagtgcagt

SEQ ID NO: 314200 - DNA, 593 bp, Homo Sapiens
  misc_feature (515)..(515): n is a, c, g, or t
  misc_feature (580)..(580): n is a, c, g, or t
cgtggtttggggtgtggtgggcacgtcactcgtgtgggtggtcatcatataccacacaaggcggaggaatgaagattgcagcattaccaacacagatgagaccaacttgccagcagatattcctagttatttgtcatctcagggaacgttagctgacaggcaggatgggtacgtgtcttcagaaagtggaagccaccaccagtttgtcacatcttcaggtgctggatttttcttaccacaacatgacagtagtgggacctgccatattgacaatagcagtgaagctgatgtggaagctgccacagatctgttcctttgtccgtttttgggatccacaggccctatgtatttgaagggaaatgtgtatggctcagatccttttgaaacatatcatacaggttgcagtcctgacccaagaacagttttaatggaccactatgagcccagttacataaagaaaaaggagtgctacccattgttcttcatcctttcagaaggaatcctggcggaacggnagctttcagtaattattatcgtgggcctttcacatgtgagggaaggttacttaacattagtttantcttcacaatgga

SEQ ID NO: 314201 - DNA, 627 bp, Homo Sapiens
gagtccctggtacgtgagcccctttcccggcgccggcagctgctccgggagaactttgtggagacagagggcgagtttgtcttcgccacctccctggacaccaaggacatcgagcagatcgccgagttcctggagcagtcagtgaaagactcctgcgaggggctgatggtgaagaccctggatgttgatgccacctacgagatcgccaagagatcgcacaactggctcaagctgaagaaggactaccttgatggcgtgggtgacaccctggacctggtggtgatcggcgcctacctgggccgggggaagcgggccggccggtacgggggcttcctgctggcctcctacgacgaggacagtgaggagctgcaggccatatgcaagcttggaactggcttcagtgacgaggagctggaggagcatcaccagagcctcaaggccctggtgctgccctgcccacgcccttacgtgcggatagatggcgctgtgattcccgaccactggctggaccccagcgctgtgtgggaggtgaagtgcgctgacctctccctctctcccatctaccctgctgcgcggggcctggtggatagtgacgggcatctcccttcgctttcctcggtttattcg

SEQ ID NO: 314202 - DNA, 761 bp, Homo Sapiens
ttagctatccgataattatttattgaaagaaatgacgggatgaatcccagactccggagtaagccaccccctcacacacacacccctcccctgactctcaaaatccacagcctgccacagcagatttgctaaaaagcaaaggcaataataaccctggggtccgtccaactcatgccctgtacccaggccctaggagggcgagggcttagtaggtatcttcagggtcagagcctgagtcctcgccttgttggttctgaatctgactttgcttccggtacaaacaggccacctgagcactggtggtggcctgctccggctgcttgtcttcacggactcgaataaaccgagggaagcgaagggagatgcccttgtcactatccaccaggccccgcgcagcagggtagatgggagagagggagaggtcagcgcacttcacctcccacacagcgctggggtccagccagtggtcgggaatcacagcgccatctatccgcacgtaagggcgtgggctgggcagcaccagcgccttgaggctctggtgatgctcctccagctcctcgtcactgaagccagttccaagccatcagaacaaagccggcaacaacttccccacacagccacggggagctggttcaggacacagcactatgtgctatggggcacagcacttgaaaactcttgtgcgggcattcaggtcctgttgccatattgcttaagggcatatacaaccctgaaaacaaagtacttccagttctcgtgcc

SEQ ID NO: 314203 - DNA, 408 bp, Homo Sapiens
caaatgacctcttacttatcaggctcacctgtaactcgtttattctatcagtacagacttgtggtttgctgccttattcttaaagtcccgaccatcactttgtatgtggctgacagaggccccttggtgctggcgctgtgtccctgaacatccctgtcattctttggacacccttgtcgaattctcagcacaaggcgctctggctcttttggggtgtggttcggctgctgctgcctggacgtgggctgccactctagaccagctgcccagcaccccgtgggtcccgtcgcttgggactggtgcccaagcaggtgtgctgaaggcctgtgtctgggcccatgtctcgctggctctcagcagagaactatagtgtcttttccgtttggctcatttgtgtacctgttgatc

SEQ ID NO: 314204 - DNA, 377 bp, Homo Sapiens
gttttaaacagtagctcccaaatattagatgtaaacaagtggttagtgcactatggttggtcacagtagggaagaaatgttaattccagtttttcgttttaatattaattaaggataagggggcctaacatttacatgtgtagataggtgtttcacctgttttctcattttacaggaacttgaggtttgtcgtagtcccattttagtgtatgtagcactctcccatttccccatatggatttcaaagaacttaagtcttgtaacttccttatttatttatatgctctaacttcaccgtgtttcaaagtggagttagcttatagcagtacagagtcagggagttgaggaagggaaatatatttgaaggattcagatac

SEQ ID NO: 314205 - DNA, 579 bp, Homo Sapiens
gggagaagcgtcaattcctgggagtagttcgttggttttctttcccctcatccttttgcctgctcccggcgaggggtggctttgatttcggcgatgagctcccagaaaggcaacgtggctcgttccagacctcagaagcaccagaatacgtttagcttcaaaaatgacaagttcgataaaagtgtgcagaccaagaaaattaatgcaaaacttcatgatggagtatgtcagcgctgtaaagaagttcttgagtggcgtgtaaaatacagcaaatacaaaccattatcaaaacctaaaaagtgtgttaaatgtttacaaaagacagtgaaggattcttatcacataatgtgcaggccatgtgcctgtgaacttgaagtttgcgcacaatgtggaaagaaagaagacattgttattccgttgaataaagaaacagaaaaaatagaacatactgaaaataatctaagttccaaccatagaagaagctgcagaagaaatgaagaaagtgatgatgatttagattttgatattgatttagaagacacaggaggagaccatcaaatgaattaatatcactgtatt

SEQ ID NO: 314206 - DNA, 635 bp, Homo Sapiens
aacaaatgatgctccatataatgtgcacaaatcgaagtgtcgcatattaccttctcttctcagactcaaaatcctgaaaaacatcataacttccaattatgaccagaggtaccggaaatgggtcaattaattcatgatcaggatgatccttcggcatattattccagatcttctgtctcatttcagaaactgtggcttgcaagagaccatggtgggccagagatcattaggttttgaaagatccagaacgagaccaagagaaaacgtccgtaaggtgtcacctgtgatgggtatgctgattaagtccaataaagaggttcctccaccgagttcccaaaagtgagcgatatcttttggtgtgttgtgcccttttgctcttcttccatatgtatattccaaagctaaggttggttttggtggttcatctctgtcaagacaccttagaataatagtagtctttcccccatttttactgccaatgaagaaaacaaatttttctgcaatttcagctccatcaccttcacttccattaattccccttttttccacttcagcttttgcaatttcccagagagtttcactgggcatcgtcgacggcctggctgccgcaaacgtcacaggctcggagtagtgac

SEQ ID NO: 314207 - DNA, 493 bp, Homo Sapiens
  misc_feature (34)..(34): n is a, c, g, or t
  misc_feature (62)..(62): n is a, c, g, or t
  misc_feature (98)..(98): n is a, c, g, or t
acaggatgatccttcggcatattattccagatcntctgtctcacagaaactgctttagcatntgtctttcccatggtgggccagagatcattaggttntgaaagatccagaacgagaacaagagaaaacgtccgtaaggtgtcacctgtgatgggtatgctgaaagtccaataaagaggttcctccaccgagttcccaaaagtgagcgatatcggtgtgttgtgcccttttgctcttcttccatatgtatattccaaagctaaggttggttttggtggttcatctctgtcaagacaccttagaataatagtagtctttcccccatttttactgccaatgaagaaaacaaatttttctgcaatttcagctccatcaccttcacttccattaattccccttttttccacttcagcttttgcaatttcccagagagtttcactgggcatcgtcgacggcctggctgccgcaaacgtcacaggctcggagtagtgac

SEQ ID NO: 314208 - DNA, 804 bp, Homo Sapiens
cgtaatttttataatagagcttcttatttactggtaacattaatgatgctccataataatgtgcaacaaatcgaagtgtcttgcatattacctttctcttctcagactcaaatcgtgaaaaacatcatatttacttccaattatgaccagaggtaccggaaatgggtcaattaattcatgatcaggatgatccttcggcatattattccagatcttctgtctcatttcagaaactgctttagcatttgtctttcccagtttcattatcactttgtctacatggctttttgtggcttgcaagagattttccatggtgggccagagatcattaggttttgaaagatccagaacgagaacaagagaaaacgtccgtaaggtgtcacctgtgatgggtatgctgattaagtccaataaagaggttcctccaccgagttcccaaaagtgagcgatatcttttggtgtgttgtgcccttttgctcttcttccatatgtatattccaaagctaaggttggttttggtggttcatctctgtcaagacaccttagaataatagtagtctttcccccatttttactgccaatgaagaaaacaaatttttctgcaatttcagctccatcaccttcacttccattaattccccttttttccacttcagcttttgcaatttcccagagagtttcactgggcatcgtcgacggcctggctgccgcaaacgtcacaggctcggagtagtgaccagcctagaatcaggcgacgcgtggtcgacgatatcccggaatccggaccgtacactctttacacgg

SEQ ID NO: 314209 - DNA, 452 bp, Homo Sapiens
aagattcattttctaaatctgccttatccccattctaatcactgcatttattttctttacctatttttttctgtcccaactatgtcttttccaaaatctttaagatgcatgacttaaccgattccttcaataattatttttcttattttgatattatttttgtacctcccctcataaaaagcacagcccatatatgtacaacaaactcagctagaagcggaagagcttacctgaaaaacatcatatttacttccaattatgaccagaggtaccggaaatgggtcaattaattcatgatcctgctaataaacatatttccttgagttgttgtaattctttattgctaggtgcttagcaatttctatttacttccaaaaacattccattttcagtctcttcatagatgtttacttaatttgcttgacatagaatttgttctaatatttaacttt

SEQ ID NO: 314210 - DNA, 291 bp, Homo Sapiens
  misc_feature (21)..(21): n is a, c, g, or t
taaattatggatggttttccngggtaagccccctccccccttcctagcctgagtttggttggtacccatatatggcctgtgcctttttatgaggggagggtaccaaaaataatatccaaaataagaaaaataattattgaaggaatcgggttaaagtcatgcatccttaaagattttggaaaagacatagttgggacagaaaaaaataggtaaagaaaataaatgcagtgattagaatggggataaggcagatttagaaaatgaatcttgccgggcacagtgcttatgcca

SEQ ID NO: 314211 - DNA, 960 bp, Homo Sapiens
tgttaccattggccaagaacctcttccaccgggccatttctgagagtggcgtggccctcacttctgttctggtgaagaaaggtgatgtcaagcccttggctgagggagaccccagagagagtcaaccccttctgggcactgtgattgatgggatgctgctgctgaaaacacctgaagagcttcaagctgaaaggaatttccacactgtcccctacatggtcggaattaacaagcaggagtttggctggttgattccaatgcagttgatgagctatccactctccgaagggcaactggaccagaagacagccatgtcactcctgtggaagtcctatccccttgtttgcattgctaaggaactgattccagaagccactgagaaatacttaggaggaacagacgacactgtcaaaaagaaagacctgttcctggacttgatagcagatgtgatgtttggtgtcccatctgtgattgtggcccggaaccacagagatgctggagcacccacctacatgtatgagtttcagtaccgtccaagcttctcatcagacatgaaacccaagacggtgataggagaccacggggatgagctcttctccgtctttggggccccatttttctgggccaactttgctcgcaatggaaaccccaatggggaagggctgccccactggccagagtacaaccagaaggaagggtatctgcagattggtgccaacacccaggcggcccagaagctgaaggacaaagaagtagctttctggaccaacctctttgccaagaaggcagtggagaagccaccccagacagaacacatagagctgtgaatgaagatccagccggccttgggagcctggaggagcaaagactggggtcttttgcgaaagggattgcaggttcagaaggcatcttaccatggctggggaattgtctggtggtggggggcaggggacagaggcc

SEQ ID NO: 314212 - DNA, 2007 bp, Homo Sapiens
tggccttcaaaaagatcctttattcccaaagctgaggtcacaaatacaaaacttgctccttcatggcctctgtcccctgccccccaccaccagacaattccccagccatggtaagatgccttctgaacctgcaatccctttcgcaaaagaccccagtctttgctcctccaggctcccaaggccggctggatcttcattcacagctctatgtgttctgtctggggtggcttctccactgccttcttggcaaagaggttggtccagaaagctacttctttgtccttcagcttctgggccgcctgggtgttggcaccaatctgcagatacccttccttctggttgtactctggccagtggggcagcccttccccattggggtttccattgcgagcaaagttggcccagaatttcatcaccatcttgctaagtctgatctcctcttctgaggcaccctcttttaaaaatggggccccaaagacggagaagagctcatccccgtggtctcctatcaccgtcttgggtttcatgtctgatgagaagcttggacggtactgaaactcatacatgtaggtgggtgctccagcatctctgtggttccgggccacaatcacagatgggacaccaaacatcacatctgctatcaagtccaggaacaggtctttctttttgacagtgtcgtctgttcctcctaagtatttctcagtggcttctggaatcagttccttagcaatgcaaacaaggggataggacttccacaggagtgacatggctgtcttctggtccagttgcccttcggagagtggatagctcatcaactgcattggaatcaaccagccaaactcctgcttgttaattccgaccatgtaggggacagtgtggaaattcctttcagcttgaagctcttcaggtgttttcagcagcagcatcccatcaatcacagtgcccagaaggggttgactctctctggggtctccctgtaagtccagagataagaatttcattttcaatgtcgtctccaagagctcctcttccgtcttctgtcgcaggcagtgaaccatgacagcagaggtggtggttttgcacccagcagtgatagcaatttgctcagccaagggcttgacatcacctttcttcaccagaacagaagtgagggccacgccactctcagaaatggcccggtggaagaggttcttggccaatggagacaaaacaagaacagagacactttctcctcccgctgactctccaaagatggtcacagagcctgggttccctccaaagctggcaatgttgtcctggacccagcgcagggcagccacctggtccaggtgaccccagttcccccggctgtgttcatcccctgtgctgaagaatccccagatgcccaggcgatattgaatggtcaccaccaccacgttttcatgggcagcaagggccagcccatcataggttgatgccgcacccaccatcagcccccctccgtggatccacaccatcaccggcagcctgtttttcttggtcaagtcagcaggagtgtaaatattgaggtaaagacagtcttcagaaagcttgagaggaatgttctcctttcggtttgtaaatagctctgagagtaactgccccgccttgggatcttgggtgcacataggagggtacgaggtggcattcttcacaaagctccatggttctgcaggctgcggtggagtaaacctcaggggtccaagaggcggcttggcaaaagggattcccaggaaaatggccacaggctgtgcaaatccttctaagctgacgaacttccccagcactttgccatgcacggtgtccaccacaggtggcgaggacggatgccctgcccaagccgcggaagcagcgagagtggccaggacaagagcagggagccacatcctggaagggcgacagttccgggggcctgcgaggtctccgtgcagctcagagggactgtgctgtccagccctggcgcccagccccgcccagagttaccgccct

SEQ ID NO: 314213 - DNA, 651 bp, Homo Sapiens
ctcattatcatgcatttcttggagtttccattattccagccagagagagaacatttaccattcagcagatggctgcatatgcacatttaagacttttttgagaggatacagtgcaccagggagactactgttgtggctaatgactatgaggatgataataccaagagtttggagtatgccccttagccagggtccccatgaaccaaaccaactgaaatcatttagatcaaataatgagccagatggggaatctacctgttttagccaagcagcctgtttgttcggtttatccatgtgcaacaagaagcattagcaactgtgcagattatttcctgttcggctagaaggtggcatttctgttacctaccatcccatgactaggtttggcatgacagatccgtttttttcatcaagtctctgtagaagctactgattgtgcaattccggcaatgtagcattatcctgccaagtgaaaaaggtaggcataagcaaggatcaagaggagtcagagcctcattatgatgaatcttgttctgatgtcttgggcctgtgattataacgtcccggtgtttgggtgaactctctgtggcccacatatcaggtatgagacctgtcccttcatatatacatggaagtgtcgctcagcttgtg

SEQ ID NO: 314214 - DNA, 1902 bp, Homo Sapiens
tctttaggactgatattaatttgggggtaggcaagtatgaggaagaatacagagaagtgaaggcgtctaggaatttctgcagaggataactccatcttcatccctccaacacgacatcgccgcaaaacatctctctcaggtgcccgagggttctgaggtttggaccttaaggtaaatcgtgttttctttgggctttgcttttctcccaaggttctcggcgtccttcatggtctctggcaaagcgacccccttggtctctggaagaagtagcgtcactcccgcggcaagcaggcccaacaccgcaaacaaaatgaggggcaaggcttgccagacctccctcagcctgaagactatgaagggggtgattatcccacctatgtcacacagggaggaacacaccatcactccgaggttcctgacgaatgtggggtacagctcagcattcaccaggcagatcatttgtattgcaatggtgattcccattcggccaacacacatgattatgatgtttaaccagtgcaggtcaggtgagataaaaatcatgacgaggcaggctgcccccgccaacaaatttgacacggccatggggtagatgcggcccacgcggtcaatggtgatgagggctatgaaggcccccgggatttcgaccagagcggagtaaaggaaatccaggtagaggttcccgctggtggcgcccatgtgcaggatgagcccctgatagagcacagagtccgtgaaccacaggtacatcaggatgaaggtgcgcttcctcaggcgcagcgtgcggaacaggtctgcaaatgaagggctcagcttttcggtgacatcctcttcgagggaaagcatctttaaatcagcaggaggcaacttcccattcttttgagcgatgtggtccattatctttattgcttcagtgtttcttttttgtgataacagccaccgaggggactccggcacacaccagtagtagagcaggaagaggaaggtgggcagggagactgccagctgcagccagcgccagtgaggcagggcgtaggccagcccggtaagcgccaccagccccaccgtgaaggccatctggtacatgatcgccaccgttcttctggagcccgagccaacaaattctgtgattagggtgtagccagccatccagttgcccttgctgaccaggccctgcagcaggcggaagagcagcatggacatgtagttgggcgagaaggccatgagcacgcccgacaccgcgttgaccagcacagttcccaggagacacagcttacggccaaacctgtctgcaaagtagccaacaccgagagagccaaagaagaagcccgcattcaaacaggactgaaagaggtccagcttccaggagtcagcacacaccaggttgaactcagtgacgatggaagagccgggcgtgtcatacacccagccatcctggcagggacccagcggcaggtggctcctgttggtggccaggctagccagggggtctacacagctgagggcgctctggttccagtccacttcatagcgcctgcactggccaaggaaggcctcgcccgcgggccccaggcctggcactgtatagttcagctcctccgcagggctccagccacagcgctggctcagctcagccaccccaggactctggcagtggtggtcaggtgtgaaacccaggaagacgatgcccacacagatgggcgcaaaggcagccgacagcaggcataagatgaggaaggcttgcttctggaaccagccagactccccaacctgctccagaatgtcatccacggtgggcatgatggctcagcatgctcatggccgtggccagacctgctctgggctgcagtggccaggtgcaatgtctccctcagagatcgaaaaggagtggtttgaaatcag

SEQ ID NO: 314215 - DNA, 1557 bp, Homo Sapiens
  misc_feature (48)..(48): n is a, c, g, or t
  misc_feature (60)..(60): n is a, c, g, or t
tggtggccccaggaaaatcttctgaaccccattctccctccctccttnaatccctgaaanacccccaagaacccagttaggaatccccctggcccaaaggtcctctgtgaactgccctctggaactcaagcacgtgcagcagcttgggaggatttgagccagtctcaaaaacttttagccccagaatgagaccagtgaccccaagcaggagggctgggatctggagggaagagagggggtccaaggggaccctgtggctgaggccatggagaaccagtgccagggcccaagagacccatttttccagttatcagaggtgactgacatcttctgccactgccttgagttcagaaatttaaaaaagcttgcagcaagaaaatgccagtgtgcaactgggtgactaaagaccaaagaaaaacagaaaagggacagcttacttgctctctgtctcaggaacttctcacctgaaatctctcatagccctaattaaacacaaacaaaagtctcttccatagataggctacttctcagcttcagctgcctcctgtggtggctctgggggctctggaggtggcatctcttcgggagtgctgctgtcctccggcatctcatttgagttcaggtgttctgtgggggctgggctctgtggcaagaggctgctactggtctcttgagtactgggaggtcgacttccactttcctccagtggcaaaataccccttcgatccagcacactggggggcaaggggccacacagcacttcacagcagttcttccacaatatttgccatggctgtagggattctggacgcgattctttccctgtccatgatcctttgatgtcttcattggttgtctggttgagagccacgaggaaagtatgaaatccagtcagtcccacgacggaccagagtgtaaagaagcaaatgaggacttctagaacagttccaggagtttctttcaatgtctccaagaagccaattttcaaagatttgagggccacatagacgatgttgaaggcgaagacatagattgtgaggagggagagagaaaggatgaagaggtagaagtagcggtagttcctctttccaacacaattccccacccaggggcagtgatggtcgaagcgctccacacagttgtcacagatgctgcaatgggaggcccggggaggccggaagatcttgcatgtgtaacagtatttccagtttcactatctggttgtttatctggaaattcttgatacgaggcggtggtcgctggccctggggcaccgcaccattggtagcttctatctccatttctatgaaagctgcttcatctggtagcgcccgaggaatcactccagggtcactgaagctggtcctcaacagtgtagccatggagaaaaggaagagcatggcagcaaatacagggatggcaggagacagctgaacagccaggtagcggcactcaaaggcgaagaagagtgtacatgtccccaggatgaggaaaagggtcaggtagaaaatgcccttttgccgggccatcatgacgcggccatcacagcaaaaggtg

SEQ ID NO: 314216 - DNA, 376 bp, Homo Sapiens
agaaaacaggccctaggggggcagccatgcactcactcggctggcagagggacaggctcagccagatctctggactccaactctgcaatcaggcagcttccacttccgacgctggacctacagtgacagagcataaggccaagcagatggcagcaaggtcaagggcccagagttacgcacaccagatgccggtcacctgccatgtccccaagccaaaggcagtggcagatgcttctgctgcagaactgccacatctgcttggcctccaggccacccctggagagtttcacaacactgacatggagccagaagccctcgaacacagacctggagcagcccgttccaagactgtgccgaattcctgcagcccggggga

SEQ ID NO: 314217 - DNA, 1024 bp, Homo Sapiens
aaggtagaaggccagaactttataccagtagcacatgatccagcataaaggcagtcttgaaatactgcattatccagggacagggcttcagcagctgatctgtcacacaccaggtgtcccacgtaggaatttcttaaaccacaggtaggatgtagctgcagagagtccataccaggtcacgatgtactgcagatgctcgttcctcagagtaactctggtttgccctccaatgggtcctccagggactgtgctctggaagttggcatcaatgaagatgggctctgcgcctgtgattctggccatagcttccaggtctcgataatgccagtggttcctttctggattgttctcagggacaaaaggctgcctggtttctgtcagcctcaccatcccaatgaggtccacttctccctcaatctggcctttctgccgggtttcaggattcactttcttcctgggaacgaaccctctatttaccaggatggtgactcccaggtcggtgcagtggaagggagtgaccacataggccccactctgagttgaggaggagatgaggccgccctcccgggcctcccggacagggtccaccatggtccggggcatcatatacagctccttggaatggtcaaagcaccccctgaccttcactggcctatactccagatttttcagttccattgggtcggctggcagagggacaggctcagccagaactctggactccaactctgcaatcaggttcagcttccacttccgacgctggacctgccatgtccccaagccaaaggcagtcacagggatgaggagcaggacccactgaagaaaggagtcatcttccgcttttgtggcagatgcttctgctgcagaactgccacatctgcttggcctccaggccacccctgggcgcggggagaccctgaggacgctcctccaggcggcgctggccggggcccgtcccagccccgccgcccgcagccccagctgcaacgcagccaccgccctcgtgccgaattcgccacccagc

SEQ ID NO: 314218 - DNA, 149 bp, Homo Sapiens
gagtgagccaccatgcccggccctgtttctgtgattatcttacattgtcattgtccccccaggcctgtctttcactgtggcatgcattgtctagggtagatgcttgttagatattttatgacttgctgtctttttccaggacttgtggc

SEQ ID NO: 314219 - DNA, 1001 bp, Homo Sapiens
  misc_feature (89)..(89): n is a, c, g, or t
  misc_feature (237)..(237): n is a, c, g, or t
acggtctctcatctgccaagcgcttctgctcaaactctgccaaaggtgcgaggttcctgtctgagtagatctctgtgagtttatctcanaagtacaatgcaactgctttccctgcctgagctacttctgaatcagccttcaatttaatctcttgtgtgtctgcataaacttgaacaactttcatcatttcattaaccctttcacagttcttgaagatcaaacggacatcggccacanagtcatccgggatttggtagtgttgggaatgttctgaagcttctttttcacggtggataaatccattggtttctttataattttatagtagtttggtatcgaagcaggaacaggctcctggaattcaatacttaattcatggcaatagaggtaaagcagaagacgttcacatttcctttggtccacggggcttaaccccctgcgcagttttccccttctttcctatgttgcaaaattatccccaaatcatattccaacttctggctttccaatatctctccaaaatgtgcatatccagtcccccccttggaaagctaagtagtgttggaacatgacaagttagatgaaagccctttggacatttttcgcagcacaagagatctcctccgttttggcagacagcacaccagtcttcatttgggtcatcatctttattgttgccatctcctccaatccttgccgacctgtgcatgaggcttcgaattggggactttccattaacaaggctgctgagccctgactgtttgcagctttcattcatatctgcaggttcagttttcacatggttttccaggcttgccaatgcatccaattcactttctagatgcaggttggttgagagaggtggtgtcaagctactctcaggactgctcaacatgcaagcactcctcctgccatcctctgttttttcttgttttacacctcctgaaaagctacatatttcatcttcagtcccaggttcttgcttgaccttcccctgatcc

SEQ ID NO: 314220 - DNA, 615 bp, Homo Sapiens
ggagtttttgcaccaccccagaccgtggcagccccccggcgactccccatcttcaatcgcatctctgtttctgagtgacaaagtgactgcccggtcagatcagctggatctcaacggggagccacgtctcttgcactgtggtctctgcatggaccccagggctgtggggacttgggggacagtaatcaagtaatccccttttccagaatgcattaacccacttccctgacctcacgctggggcaggtccccaagtgtgcaagctcagtattcatgatggtgggggatggagtgtcttccgaggttcttgggggaaaatgtccaaatctgtctcctagaatcttatgtgctgtgaataataggccttcactgtccctccaggttttatagagctgaggtttcagtgtcttctggtgactggaacctcttctgagggggaatcctggtgctcaaattacccttcacaaagcaagtaggccaaggcgttggcaaaccccacccataaattaatgggccctttatttatgagcgagtctatttattctaatatgaggttataggatttatatatattgggtcgtctggcttcccttgtagttttctttctttttttgta

SEQ ID NO: 314221 - DNA, 1081 bp, Homo Sapiens
  misc_feature (888)..(888): n is a, c, g, or t
  misc_feature (903)..(903): n is a, c, g, or t
  misc_feature (985)..(985): n is a, c, g, or t
  misc_feature (1005)..(1005): n is a, c, g, or t
  misc_feature (1029)..(1029): n is a, c, g, or t
  misc_feature (1032)..(1032): n is a, c, g, or t
  misc_feature (1054)..(1054): n is a, c, g, or t
  misc_feature (1066)..(1066): n is a, c, g, or t
cgtcgttttcaatattacaaaaaaaggaagaaaaatacaagggaagcagacgacccaatatatataaatactataaaatcatattagaataaataaagtcgtcataaataaagggcccattgatttatgggtggggtttggcaacgggtttggctacttgcttttggagggtaatttgagcaccaggattccccctcaggagacgttccagttaccaggagacactggaacctcaggtctataaaaactggaggggcagtgaaggcctattattcacagcacataagattctaggagacagatttgggcagggaagaggtgggggagagggttcattgcctcccttaaatatgctacaattttttttcccccaagaacctcggaagacactccatcccccaccatcatgaatactgagcttgcacacttggggacctgccccagcgtgaggtcaggggagtgggttaatgcattctggaaaaggggattacttgattactgtcccccaagtccccacagccctggggtccatgcagagaccacagtgcaagatacgtggctccccgctgagatccagctgatctgaccgggcagtcactttgtcactcagaaacagagatgcgattgaagatggggagtcgccggggggctgccacgggctggggtggtgcaaaatctcccgcctcgaagacgggagagtcagagccccccaggctgctgccgctgctggcatattcatcagggtcggatcccagggactgtacagagggggtccgaaccaggccacccaagggcccccagacgctgataggagtggcccttcggcaggaggggcaacagactggggtggggtctcttcgagccaggggggtgccaggggcagcaganaaggcagagggtganagtggaaggtcccaggtggtggtggggagctggagggcgaaaaggagctggaggacagggaagggccggcaagcctggttgntgttgttaggtccgcggcanaaggaagccgaaaactgatttttngcnaaaaaggagggtggccggggcncacgtttttctngggttttgataattg

SEQ ID NO: 314222 - DNA, 950 bp, Homo Sapiens
  misc_feature (6)..(6): n is a, c, g, or t
  misc_feature (10)..(10): n is a, c, g, or t
  misc_feature (15)..(15): n is a, c, g, or t
  misc_feature (18)..(18): n is a, c, g, or t
  misc_feature (30)..(30): n is a, c, g, or t
  misc_feature (35)..(35): n is a, c, g, or t
  misc_feature (46)..(46): n is a, c, g, or t
  misc_feature (50)..(50): n is a, c, g, or t
  misc_feature (53)..(53): n is a, c, g, or t
  misc_feature (59)..(59): n is a, c, g, or t
ggtggntgtnaaaanccnctcgagacgganatcanccccccagctntccnctntgcatntcatcaggtcgatcccaggactgtacagaggggtccgaaccaggccacccaagggcccccagacgctgataggagtggcccttcggcaggaggggcaacagactggggtggggtctcttcgagccaggggggtgccaggggcagcagagaaggcagagggtgacagtggaaggtccccaggtggtggtggggagctggagggcgagaaggagctggaggacagggaagggccggccaggcctggtggtggtggtgaggtccggcggccagagggcaggccggagaagctgatgctctggcgaagcacaggagggtggcccggggccgccaggtcttcgctagggttgtggatgaagtggcagcgagagccgtaggggcagcggccctggaggtagaacttgtgacagagttccgtcttgtatttggggtggcgattggcctggcgcagctcgcccaggccatgggcaaactggcacttggccccgtagcggcagcgcccactctctgagaaggtccgacatagctcagtcttgtagcgcgagggggtggtggaggttgcagtgggcgaagtgggtgagggtgacagctcagggcccaggcggggagccagcggtgcgaagccagggggtgggggcacccagccacagctgcggccctccactaggctggtggagcggccaggcaggcgggaggtgaccccagacgggctggagtcggaggggctcaggctccagggtcccgaggagccccagcctgggctggactcagtccctccatggtcggatggcacgggcacgtcagggctcagcgacaggaggctctcgtagatggcagtcagatccatggtgtaacggttggccatgaggggtgtcggccgagagtgggagcgct

SEQ ID NO: 314223 - DNA, 507 bp, Homo Sapiens
ttacactcagattgtttatttaaaaatgcccaaaacacaaaaatagacttttaaggtaataatatatattactaaatatattatagtctacttataataattatatcgtcgttttcaatattacaaaaaaaggaagaaaaatacaagggaagcagacgacccaatatatataaatactataaaatcatattagaataaataaagtcgtcataaataaagggcccattgatttatgggtggggtttggcaacggctttggctacttgcttttggagggtaatttgagcaccaggattccccctcaggagaggttccagttaccaggagacactggaacctcaggtctataaaaactggaggggcagtgaaggcctattattcacagcacataagattctaggagacagatttgggcagggaagaggtgggggagaggtccggcggccagagggcaggccgagaagctgatgctctggcaacgcaggagggtggcacgggcgccaggtc

SEQ ID NO: 314224 - DNA, 618 bp, Homo Sapiens
  misc_feature (37)..(37): n is a, c, g, or t
  misc_feature (43)..(43): n is a, c, g, or t
catatacatgtttttaaatcgggcagccacccgctcnccgccntcagcccggaataggttcagagaggtgcccgggttcacttgcggagcgtgtggcctctgcgcctaacgcgcgccccttcactacacgaatgggtgcgggcaagggtataggattttagaattccaagagttgtcgggggtcatcccgtggaatcctcttttttgcagatgctcttcctggagccttccgatgcaagctcttgggctcacgcagcccttttcctcttctaagcccagagcgccgctgctgctgatctccacggcctcggcagatagggaggggcaggcaggtgtcagcgtcctccctttcaccgttggggaaactgactcagagaaacaaggcgacgggcctcggcggggcgggaccgtaacgggaattcaaggctccaggccagagcggaatttattgtgtctcgttttgggaagcgtgaatgtgaaatgatcgacttcggagccccaggcggagacccttcagtccccgacaagaatcgggatggggtctgggattaatgcagtaattactcgcgcctgggcattgaccccttggcaacttcgcaagatccggcagggtccacc

SEQ ID NO: 314225 - DNA, 615 bp, Homo Sapiens
  misc_feature (540)..(540): n is a, c, g, or t
gggctgcaggaattcggcacggattccttccttaaaatctttcagtttcattctctgacattcttttttgctcgctggattccactgaaactagtctttcacatgctgctttcagatgcataccaaacttttgtgccttaacacactttgcaatacttttctctccactggggctttcttcctcattgttttgacttggctatctcctattgctgtcaggcttagtttaaatgtcatttcagagagacctttcttattcatcctgtctgtagtagatccttgtgcccatattctctatctcagccttttgtttgtgtcataggtcttaccacaatatgtaattgctttatttgttccccacaaaagaatgtaagagaccatgtatgcttgtttaccagtgtgtccctagctcttaaccgcatgcctggaacataactgttcaatatttatttgttggatgaatgagaaaccaaatattgttaacaagcttgttagattgtttaagattttcttctatagtagtctgagttgcatgaactntatggtatctacctcattagggctgttgggctcacgaccttttcagatgattaatgttccctttaatattctgag

SEQ ID NO: 314226 - DNA, 818 bp, Homo Sapiens
  misc_feature (23)..(23): n is a, c, g, or t
  misc_feature (52)..(52): n is a, c, g, or t
  misc_feature (70)..(70): n is a, c, g, or t
  misc_feature (94)..(94): n is a, c, g, or t
  misc_feature (126)..(126): n is a, c, g, or t
aaaccccaggaaggtctcggaantccctggaacctccgtggaaccctccccnaaactcgggccctcctcnaaaaagtggctggggaattaacangccgtgaagcccactggtggcccgggcccccnggtcctcaaaacttcctgaacctcaaagtggatccgtcccaccctccagccttcccccaaagtgcctaggattaacaggcatggagcccacccatgcctcaaccccaatggtgcttttgtattgtttttctcttatttgaatattaaattttgggaacattaatcatctgaaaaggtcgtgagcccgacagccctaatgaggtagatatcataaagttcatgcaactcagactactatagaagaaaatcttaaacaatctaacaagcttgttaacaatatttggtttctcattcatccaacaaataaatattgaacagttatgttccaggcatgcggtgtggggaacaaataaagcaattacatattgtggtaagacctatgacacaaacaaaaggctgagatagagaatatgggcacaaggatctactacagacaggatgaataagaaaggtctctctgaaatgacatttaaactaagcctgacagcaataggagatagccaagtcaaaacaatgaggaagaaagccccagtggagagaaaagtattgcaaagtgtgttaaggcacaaaagtttggtatgcatctgaaagcagcatgtgaaagactagtttcagtggaatccagcgagcaaaaaagaatgtcagagaatgaaactgaaagaaaggaaggaatccgtgccgaattcctgcag

SEQ ID NO: 314227 - DNA, 742 bp, Homo Sapiens
caaacgtcccgcgccttccaggccgcactccagagccaaaagagctccatggcggcggcggccaagcccaacaacctttccctggtggtgcacggaccgggggacttgcgcctggagaactatcctatccctgaaccaggcccaaatgaggtcttgctgaggatgcattctgttggaatctgtggctcagatgtccactactgggagtatggtcgaattgggaattttattgtgaaaaagcccatggtgctgggacatgaagcttcgggaacagtcgaaaaagtgggatcatcggtaaagcacctaaaaccaggtgatcgtgttgccatcgagcctggtgctccccgagtctgtgccacgccccccgatgacgggaacctctgccggttctataagcacaatgcagccttttgttacaagcttcctgacaatgtcacctttgaggaaggcgccctgatcgagccactttctgtggggatccatgcctgcaggagaggcggagttaccctgtgacacaaggtccttgtgtgtggagctgggccaatcgggatggtcactttgctcgtggccaaagcaatgggagcagctcaagtagtggtgactgatctgtctgctacccgattgtccaaagccaaggagattggggctgatttagtcctccagatcttcaaggagagctctcaggaaatcgtcagggtagaaggtcagctgtcgtgcaagccgggtcaccatcgagtgccgg

SEQ ID NO: 314228 - DNA, 959 bp, Homo Sapiens
  misc_feature (24)..(24): n is a, c, g, or t
  misc_feature (54)..(54): n is a, c, g, or t
  misc_feature (61)..(61): n is a, c, g, or t
aacttccgggaagggctgcaatgnaagtaaggggtaagggtgggtcatctcaanagcccancccccacaagcacgagggtccccaccagagcgagtggcgtagatgcccgcctggatggaggcctctgcccccgtgcactcgatggtgacttccggcttgcaccccagcagaccttctactttccctggcgatttcctgagggctctccttggagatctggaggactaaatcagccccaatctccttggctttggacaatcgggtagcagacagatcagtcaccactacttgagctgctcccattgctttggccacgagcaaagtgaccatccccgattggcccagctccacacacaaggaccttgtgtcccagggtaactccgcctctcctgcaggcatggatccccacagaaagtggctcgatcagggcgccttcctcaaaggtgacattgtcaggaagcttgtaacaaaaggctgcattgtgcttatagaaccggcagaggttcccgtcatcggggggcgtggcacagaagaagatggaaggtgacagattgtatcggcccatcttgcagaattcatcattttctcggggagcaccaggctcgatggcaacacgatcacctggttttaggtgctttaccgatgatcccactttttcgactgttcccgaagcttcatgtcccagcaccatgggctttttcacaataaaattcccaattcgaccatactcccagtagtggacatctgagccacagattccaacagaatgcatcctcagcaagacctcatttgggcctggttcagggataggatagttctccaggcgcaagtcccccggtccgtgcaccaccagggaaaggttgttgggcttggccgccgccgccatggagctcttttggctctggagtgcggcctggaaggcgcgggacagtttggtcgctctggtggcgctacccaa

SEQ ID NO: 314229 - DNA, 279 bp, Homo Sapiens
atgagccaccatgtctggcctagagtgtccactttctttacagaaatttctgagttcattgattcgacttatatttaaaatataaaaaaatctttattatatttataatagtcatttaaaacacttgcctgcaaatttcaatggttaggtcttctgtgtttctccttgtatttactatttctctttactatatttcatgtcttttttcttctgccatgtctcatatttaatgtatgctggattttgcaaaaatagcagtaaagactgatgttaaacctt

SEQ ID NO: 314230 - DNA, 414 bp, Homo Sapiens
ggcagatggctccctcctggaactccaggtgaggggtctggagcaccagccacggaaagcacagtcagatgcacagggtcgctgaggctggtctggccagtctggcaacgtgtactccccgctgtcaattgttgttggccttgaacctgtaagctgggctgcgtgtgggtgggaatgagattccccattgtggaaccactgaatggagtcgctcctccgggctgcggagccccctggcatgtcagagtcacagagtcctccctggagcacgttgatccacgggggctcaagtttcagcacagcctttgggggagctgcagcttgactgtctgcagaagccagcagcagcaaaactgtcaatggttgaagcagccacaggtttctgggacatacattctgagacatttgggtctc

SEQ ID NO: 314231 - DNA, 744 bp, Homo Sapiens
  misc_feature (31)..(31): n is a, c, g, or t
  misc_feature (47)..(47): n is a, c, g, or t
atcggtgaaaaactggaagcttggaccattnatggtccacaagcttnggatgagtacagcgtgtagcctatgtttccctgtgcaagtggtaatcaccactgtgactgtggtttgcttgtgggatggagaagttgggatccgaacgggaaaatttcttggattttccattctggaagaatgtgaccttgaccagaggcttgtccttcccagctgtggcacctcaagcacgatggtttctccctcctggaactccaggtgaggggtctggagcaccagccaactcagaaagcacagtcagatgcacagggtcgctgaggctggtctggccagtctggcacgtgtactccccgctgtcattgttgttggccttgaacctgtagctgggctgcgtgtgggtgggaatgagattcccattgtggaaccactgaatggagtcgctctcagggctgtgagtcccccggcatgtcagagtcacagagtcctcctggagcacgttgatccactggggctcgagtttcagcacagcctttgggggagctgcaggtgtcccagcaacaggagccaggaatagcacagctgtccacagaagcatatgaccccaaggctggggggacttgcagtcagccgagtcactctcagtggcaaggacaggtaagaatgacaggattcccatgactccctggagcgagctggcgcccagagcacagcagtcacagccttctctcaaagcttggcggattctac

SEQ ID NO: 314232 - DNA, 577 bp, Homo Sapiens
  misc_feature (17)..(17): n is a, c, g, or t
  misc_feature (29)..(29): n is a, c, g, or t
  misc_feature (54)..(54): n is a, c, g, or t
  misc_feature (64)..(64): n is a, c, g, or t
  misc_feature (76)..(76): n is a, c, g, or t
  misc_feature (121)..(121): n is a, c, g, or t
  misc_feature (139)..(139): n is a, c, g, or t
  misc_feature (160)..(160): n is a, c, g, or t
  misc_feature (194)..(194): n is a, c, g, or t
ccttaaccaaaagcttntccttcccactntgccaacctcaccacgatgttttcncccttcctgnaaattccaattnaagggttctggaaccaccaccccactcaaaaaaccacattccaangccacaggttcgctgaancctggttctggcccaatctgnccacgtgtaactccccgctgtccattgttgttgncccttgaaacctgtagctgggctgcgtgtgggtgggaatgagattccccattgtggaaccactgaatggagtcgctctccagggctgtgagtcccccggcatgtccagagtcacagagtcctcctggagcacgttgatccactggggctcgagtttcagcacagcctttgggggagctgcaggtgtcccagcaacaggagccaggaatagcacagctgtccacagaagcatatgaccccaaggctggggggacttgcagtcagcccagtcactctcagtggcaaggacaggtaagaatgacaggattcccatcactccctggagcgagtggcgcccagagcacagcagtcacagccttctctcaaagcttggcggattctacc

SEQ ID NO: 314233 - DNA, 1847 bp, Homo Sapiens
  misc_feature (153)..(153): n is a, c, g, or t
tttggggttcacactggtttattgggggccctgccgggccacgagctcttcagtgcataggcagacatgcatgtggggcagtgctaggaactggggtaggccttgggcaggggtcactggcaggtgttgtagatctgcacctgcaagttgatnggcttgaagcacgctgcgcatcctggcctccaacccgtccaactgggctgccttactctccagtgcccgctcattttcctcataggtgccttccaattcctgtagccgctgcagcttgtcctgagcggcttgcaacaggtcccgagcctcatccccgcagttgttctgcccttgcctgtgcagccagcacacctttgggccttgcgctcagctagggccttcaccgtctggtactgatcacccagaggaccgcgtagcagctgctcagcctcctgggcacgaccctgggcactgcctgccgtttcttctgctgtagaggctgccagactatttcctgcccgtttcaatttcagagcctccaggagagcatccaactgccgagccctttcacctgcagagctcagtgcccgctctgcacctgccatcctctcctgtacctggtacagggtctgctctgtgtcccgtgtgtcagccactgccccccggatggcaccctgggcaataccctgtgcccgctgggcctcctccagtgctgcctgtactgtctctgccttctgtttctcatcctcagcccagctccttgcccgccgtgcatcctgcagtagctgctcggcacgacgcacatctcctacagtacgtgccaggatcgcatccacatctgccaggctccggactcgctctgcaatcgcacccgccaggtgctggatctgctcagctgaagctgggatggagagctctagcacccgtgtggccaccatttcaatgctatcaggatcagccccctcctggttgaggaagtccttcacactctggataagttcttgaagttcctggttggcctgttccacctgtcccctggaagcattagccttgtccagggctgcctgggcccgctgctgtgcctcgcttgcctgccgacgagtctcagccactctgctgaggatgctaccaccttctgccagtgcccgctgcagctctgcctgtgtgtgccgggcccggcccagtgctaggtcttctgtagccgctgccccattgcagctgaggcccccacagcgcggctgcccatcctcatctcgacagccggcacccccacaagggcttgtagcacagggtgcatcccctggtgccccacacaccagctcatttatgtctgtcaggctcagggtgtgggtatgggcagagagcttgccaagtgcccgctggttggccatgtgtttgctgttgaagtcctccttctgagcatccatcagtgcctctgtccgatgccgagcacttgccgagttgctcacagggctaggtactgccagggctgaggtattggcacgacgttctgcctctgcagactggctatgggcatgccggatgctgtcataggcacccaggaaggaatgtttgagcaagtcaagatgctggtcgagctgccgcagtgtgagattaagtgcaagcctatctcgctccagaccacttagtgcatggttggcattgaagttctcatcttgcacatctgtcaggtctgcctcgagctgagtcaggtgctcagtggcctccccaatttcacgccgcagctcctctgtggcctccacaagctgtgcagtggaggcggctgaggtgttgcgggcacctacgatgccctgcacaatgcccagcttctcctgcatgtgccagaagctgctctcaaaggcacccagcacacc

SEQ ID NO: 314234 - DNA, 816 bp, Homo Sapiens
ccacaggaagggaaaagttgacagttctggtagcattagcctcagatggggctaacagagttggggtgctgtatgtctctgtcgatgcacgattacttggtggatgctggatgggaattgaatgtccttcagtggacaccgatggctgtccctcaaagtcatgcacatattcatccttcaccttcatacttgatggagcattactctgcagtgttaatcttgagagatcaattccaaagtcaaacgcatactgacaatatttacacatgagtctcatttttgtgaagatcaggccacctccagagacgggcatagatcacatgaggaaatcctttccgaccagccacctgaagcctcccatccaatgttctctgtatggtaacacatttactaggatgagctccatttgtagttatagctgttattaaagaatccaattcatcttttttctccttcagcttctttaccaaactttcaattgctctttttgcaaatgtttcactctctccaccttgtctatggcacatcaaactatgcacaatgctcagacaggcatcattacttgttggtgtattcgtaatagacatattgtccatttgttcaagtttttccttttaaatcaaatatgtctccaatttctgaagcaattttgatcctttggaaacagtgaaaaacaacagctaacgttgcaaggaaaattgttagacatgtattcaggataacctgatattgaagacttgctcctccctctgttgttatctctttcacataaatgtctgtctcaactcataaaccccatgcagagaagcagttttt

SEQ ID NO: 314235 - DNA, 1253 bp, Homo Sapiens
  misc_feature (19)..(19): n is a, c, g, or t
  misc_feature (41)..(41): n is a, c, g, or t
  misc_feature (89)..(89): n is a, c, g, or t
  misc_feature (837)..(861): n is a, c, g, or t
  misc_feature (1156)..(1182): n is a, c, g, or t
gtgcgagtgtaatccatancctgaccattaaaaggataatncctatcctgcacacaatataaaataattaatgtaggtgccttggaacnctagttttgaagtaaataatcacatgccagaaagctcctcacaggcaacagagtgcaaacaaaggtggagtctgagaaaacacggctagtcttctagatttcctgatggatactcatttttcatcatagaaatgctgtatctagagctgtcaggctatgctacaatcgagaggagagaatagatatgtctggcgatgcaacacttaaacaggaaaacagtcttactcaaaagcagcaaaaggtgcctgattatagaaaaatgctctgttatatatgtggtatgatgaaacttctgctactttcaaaaggctgcgataagtcctagtacaataatttttttaaagtattaatatttaactcagaataagttttaaaactgtctttcataaaactcttaccattgcaatggaaactctgaaaaataaagttgtacgcacagtaattctgggaggtcattctggatcactcctaaaccctcccccgacccctaattccttgatttttaatggggatcacagtttgactaccttagctggtgtttaaaagtctaacaaattcactgcacgttaaaaatcactggttaaaaacccaccctcaacatttccagagcacccaaaacagtgagctgtaggctttcaacgtcttttcactggttatgtaaaatagtaaaatgtaattttgctttcaaaaatgagtagaaaaaggaggctttaaattaacctatagaactgtagctatctcaatgagnnnnnnnnnnnnnnnnnnnnnnnnnaattgtggaatcagtgtaatgggaaagtgacctgcctggtgcatttggctttttcatcaagttggcaccagcgtttgtaaggaggaagaggccgtttttagggagaatggtgatttgagataaagcctcgaaactcaccaaattcaggtcgtatgctgccgtaattctaaaaatacattttgttttgacttgggtaattttgttcaggagaaaaattagttagagacgaaacttctgaagcttctggatttgataagtttgtcagtggggaagggaccaaagctacccgggttgnnnnnnnnnnnnnnnnnnnnnnnnnnngagatgaagtctcactctgtcatccaggcgacgcgtgggtcgacgatatcccaaggattcgcggaccgtac

SEQ ID NO: 314236 - DNA, 425 bp, Homo Sapiens
gctgatttcggaatgaggcaaaccgttctgtgcccctctcctttctggtttaagtaggctcggatagtggccagtccagcatattctccctgggctccgctgtttggctggaaacagacctggtcataacctgtgagttcacacaaatccttctcaagctctcggaaaagctgctgatatccttgagcttgatccagaggcacaaaggggtggatgtttgcaaattctttccatgtgataggtgcgagttcagacgaactgttcagtttcaccagtttcttcatgtaccggacaatgtttgtttcagagtggtagctgttgaacacttgatgggtgaggaacgggctggtcctcttgaacacagaccctggaatacctctgcactcctctcccatgctttcagcaaccagttctgcagatgactc

SEQ ID NO: 314237 - DNA, 409 bp, Homo Sapiens
ctcatcctcctgagtagctcggattacaggcatgtgccaccatgtaattagcccggctaattttgtatttttagtacagacggtatttctccatgttgatcacgctggtcatgaactcctgacctcatgtgatctgcctgcctcagcctcccatagtgctgctgggattacacgcgtgagccaccactcccggctaagttagtatttctttaatcttaatgctttaaactaagccacttgtatcctgaatcctttaaatcttgagctacattggtaagtaataaattatttaaggccaggaattcctgtagttttcatggagtctgtagctttattaattcactgccaggcttcattcttccatatgatcctctaatggtcaaggttcatttggctccttgatacatcg

SEQ ID NO: 314238 - DNA, 965 bp, Homo Sapiens
  misc_feature (77)..(77): n is a, c, g, or t
cccctgaacgaatgaaccaataacagtggggcaagccccctttacacaggatcttctccgccctcctgaccctcccnacccccagcccctgcagctcaaggactctgaagcttgggcatagtgaggcaggaggagaggatttcagtgggggagggcatttctggggtgacgaaggggaccctgcaggcacagactctcccagggccggcattccctccagcacagccaggccaggggcagagaggccctcacggtcagccggatcttgcgcacatctcggagggtggcggctgatggccagcagggtgctgtcggcagacagggtgcagcccagcacctcaaagcctctgcagatagctgagctcctgcaggccagcatccagccctgtctcggtcacacggtaggtaccacccagcaccagcgagcgcaaggcccggaagcgcgtcaggccctgcaggtgctcgtcacggaaggcggggacgcggtccagcacgatgcattcaagcaggggcagcacggtggggtcctgctgcttgtggagccaggccatggagatctcgcagctgtgcagctccagggtcctcaaggtgctgggcaggctggtgatgggcaccatgctcaggtcggccacgtgcaggcagaggcgccaggttggggcacttctggcccagggctctcaacagagcaggggacaactggggggcctgggagccagagaacaggtagccacccatccgcagggaatggagccgggatgccatgtaccttcgaaggaggtgccacatgacaggtcgcatcgtgtagagcgtcaggtcgacatgtcgccacagccaccggtcgtccaccagcctcttccagcggtgacagaccctggagatgcggatccggtcccgtaccgggaggtaagagaagatctcgagcaggaccgagtccggcagttcgaccaaagtcgccatgatccccc

SEQ ID NO: 314239 - DNA, 627 bp, Homo Sapiens
atttatcttccacccacaccccagctgtcttcttgagcaggatttaaaggggctccaggatcgttctcttctgtgtgtcccacatttggtccatagggacactcaacacctattttgctctaataaactcaaagtgcagaccaatcctaccaaccgtgcagcctcttcactcgccaaagaggctcaccaatccctctctcctgatctgtaggtttccagggctggagtcagacaacaatcccctatgctcccaacttacaggttctctgagtggcccacatggagaggaaaaaatagtatgagaaatattacttttcaagactttccatgactaagacaagaaaatactcctgttttagtcatggttctccagagaaatagaaccaatggattatatatctgtaactatgtctatatctgtatctataaaaggagacttattatgaggaattggctgccacagattatggaagctggtaagtcctaccatatgccatctgcaagatggaaaccccagatagcggtgtggttcagtctgaatccgaaagcctgaatactaaggaagctgctatcccaatccaagagcagaagacgagatgtccccatgctagcagtaaggcagggcct

SEQ ID NO: 314240 - DNA, 881 bp, Homo Sapiens
tagacaactaaatcattttaatgtctattttttcacttctattaattgattattgatttctacacaagtgtatgcatctagtttgacttgcttcatatttattttccaacatggtgcaatcttcagcatgaggtgcacgaagtaccttgtcctcaaagagctttatcaactcgaacattttcgaagagctctataaggcagctcagcatggcagttttttactgaaatctcttatctggaagatggcagaagagacccggaccttcccgagcccactggttgcttgtattcatatcacagctcgcttgagtaagtggtaacgacagaataataagcagattgctcctccaaacccagctgggtgagatagcttcatttttggaaaatcaactgaatcatgaaaaccttcctaatggtataatttgttccagagttcttttgatacttaagaagggaaatattaatccttgtgcacagtcttttattacaagcactcttatttatggtattacagagttttcttctccagccgtcattctctggtgaggtgactggctgtaccccatgcagaatcgaaagcatgaagaaatctcctttcttaatcagagctgatgacagccctctcatttcctgccaaatggatcagaccacacttttaaccctggtggctgcacatcctcttgaacaattccagcccgatttatagcttgttccttcttgtactcctccaatctcattaggggccggaagtagatgggatagaaggcggcgccgatcagggagatgaagccgccgaaaatgagcgcggtgcgcaggttccgggacatggcgtcaggccccgggctgccctgacccgccgaccgcgcggcactctcggaaac

SEQ ID NO: 314241 - DNA, 621 bp, Homo Sapiens
gtgtgagccaccatgcctggccagaatttcttatattaagtcctaggtatttgaattctcctcttgccttaaatttcccagcatgttgaaggcaggtcataggaccataggcaaggaaggaaaattaatacttaattgagcacccactaggtatgcctgctctgtgaacataccctgtggagatccccatttttacagataatcaggttgaggtttagaggggtaacttatcctaataagtctcatagctagtaaaaggcagaaccaggcacaaaaatcaagcagggaaggaaccaaccaggattcacatgttgtataacactctaaagtctattctctccatgatataccctaaactgccttctatggaacaaaaaactagacaagtgctagaatatgcaacattcagttttattgaccccaggatgggacaaggaaaggaagccttccagaccagctcacttaaaggagacgggttaagtgagtcatctcatgactggggcaactgctaccaagccccaaacctcaacctgaccacctgatgtgttatctcttatcttagaccaggggttgccatctatattatattttttagatggagtctcacccttccccagtggg

SEQ ID NO: 314242 - DNA, 1730 bp, Homo Sapiens
  misc_feature (1460)..(1460): n is a, c, g, or t
ttttttgggggccactgctatgacatcaagtttattgtgctgttctcacattgaaaacccaaccccctctcccactgggggagggcaaagggaaggattttcacagtacctgcgtgcctccctgccagtcttccccgtctaaccctcagtccctctatccatggtccactgaaatgcagctagggacaagagctaggtacaatggccgaggagaaatgggaatctctctccttgggagaataggaggaaagggctagagaatttgatatcctcccacctcccatgccctaagagaacagaggtcagcaaacagtccatgccatccagcctgggaggctgggggagaggaagatgatggtgactccagcacagccagccttgctgcgcaggtgccagaggcatagggaggaggctgaggcagcgacggaagaaaagctttctttgcagatccaagaaaggaaactatttttggagtcagaaaggaaagaccttgggacactttcctcttcccccaggtccttatgagcagcgagggcagcctcttcacactttctgtttagggggccacttagtggctgggggatcgggccttgtggaacaggtacacaggacgctggaagcctttagaggtgttgtggggtgtggccacaagctcatagctggagaagcccacgtctggggatgtcaggtaggaactgaactgctctggcttcaattggattcggtagtagttcttgtagatcgtttctgtaagagtctttctcttgccatacgacgaccagggttggggctctaggaccaggatgcccccagggcgtaggtgccggtagatccggcgaaacatgcgcttcaggccctcgtctccccagttcagatgcacccacttggtgaggctgaggcagagcaccacatcatactcaggtgtttgggcctccaccaggtcatctcgatccagcacataattacccgtgacgaagacaacattgttggggaagactgatgtgtccgctccatccaagggcacttggggggcagcgatgggaccccggctggcagtcagcgaggctgggaagcagctcctctttcgaacggtggtggtcccttcctcaccctctgcccccgggtccccttccaaagtctggggtgggagacgcagctcctcggaaaggtagtgtcggatgttttggcgggcagaatggatgagccgggaatcgatatccaggcccaccatgcgggacgggccccacttgcaggcaatgctcagggtcagatggcccacattgcagcccagatctaggacgtcccggccccgaaaccactcaggcttcaacacccgaaggcgcccatcctcacaggaaggattgcggtacccatagtatttgcaataattcccatactggaacttgcgctgttgctttttgagcctgctgcaggcagtgggtggtggtgttggttggcgnccttcccaactccctgggccttttccttggaaccctggccttcacccctagcccctgccttcgacttgttggaagacctgcgacgtttgcgatgttcggaggaaggaagatgggggtgcataaataaccttaggcacttggaggggcttattgggaaccttgaggaccctgccaaacatagggaaggggaaccccacttggatccttgaaatataggtctgggataaaaataatggattgggggacaataccagttttaatcccttttcc

SEQ ID NO: 314243 - DNA, 595 bp, Homo Sapiens
  misc_feature (177)..(177): n is a, c, g, or t
ccccaactcccaaaacagaagcaaggcgaaacccactcgggctccccagcaggtaattaggagtatccctctccagcccttgtcccctagaacttgggtggagctcagagacttaaaatgactcatggcagctgccctccccagctcagtaataaggtcgcccctgccaaacactgnagaccaaagcccaggtccatcacttccatagtgactcctcccattagctctgcctcaactgtgaagggaagagggagaaggggagtgaggctcttgttcctcctcacctagtgggaagatattcctcttcaaggttccaccccagccagggaggagagggcaggcctcaggcagggtgtggacacagctggttgacactcagctcagctacagatcggctcagccacagttggggcggcctgaaccccaggtgcccaccagcagcaacttggcccccttgctctaccttctcaccattcgccagcagtgggtgcaggcagccatcatctttccacaaagatgttcagttggaggaatgagaggagccaccaaatgaaaaaggtacaggttgattttgagttgggttctcccagtggcg

SEQ ID NO: 314244 - DNA, 949 bp, Homo Sapiens
  misc_feature (349)..(349): n is a, c, g, or t
aggcaaggatcccaattggtttttccccgggcccaggggaggaacttggggggcgaaacccgtgttccattctttagagggagggtgggttttcccccctttaattcaggagaccagggttaatttgatttaaacaaacaggaatttccccaggaaactctgattcagctggaggcaagggtggttttgagttgcccaaatcgggccatgcttctgagtcagaggcagcccatccagcacgtgctaggtgttcccatacgcacaggagaggcaagctagccacccaaggcgggcaggcggggaggccctctagctgttctgcctcacctgtggggccccagcagggagngagtcaccagccctcagagggaggccaggtataccccctcatacgagggcagactcaagtttatcagtaagcctttgccctgcatgaactgaatgaagacgccattacaagtgccactggatatcaccaagaaactggctaagacccatattccctgagctcaaccagacacgtcgctggggccccataagtgtgcatcatgtccaacctgtaactctctccccctcttcttccatgaggtcctgagaccaggattcctaaaacaaacaggatgagggacctttagacacgcaaggagacatgcctctagcaggatcagggggactggggtcggaagggtggggcaggaaggaagccagaatcagaagtatcccagccctgataaggcacccacagaaacaacctagcctctgaaacagcagatcaagtccagggagaaagggagtcaaggttgtaagcaccctctgcccagccttactcactaaaaggccaatacattacaaaggaaaataagtctatttataaaaaaaagtctaaaatgcttagattctccttaaaccttcctatttcaacaccaaaggccaggttgcagcttcagat

SEQ ID NO: 314245 - DNA, 920 bp, Homo Sapiens
  misc_feature (47)..(68): n is a, c, g, or t
acggtttattttggggaaggttaaagttgatttccgccaatttcccnnnnnnnnnnnnnnnnnnnnnnggccaaaacccttcccaataatataaatttttccactatgagttacccattggaattgaatgcagtggccaggacagcagcttataacccaccttataggtaggtaagcaacccacgggattccctcggctgggctggggatggggagggggcagtggacaggaagcgggcagggcctgaggaccctgttctttaatgggccacaacagggctcagctcctctcagaacttttgctacaatcagagttaagaccagatacatgctacctaaggccatgaacttgacaatatctgctccagagaagccctgaaccctcgccctaggtccctatgatttaaacccaatggtaagcccaagtctcacctttctaaatattctgtttatcagttaagcttattatgtactgaagagtgttgctggagaagtaagagctctgcatgacacatcaactgtctccaggcaggaggactggggcgaaccctgttcatcttagagaaggtcgtctcccccttaattcagagaccagctaatttgatttaacaaacagaattccacagaaactctgatcagctgaggcaaggtggttttgagttgccaaatccggccatgcctctgagtcagaggcagcccatccagcacgtgctaggtgttcccatacgcacaggagaggcaagctagccagccaaggcgggcaggcggggaggccctctagctgttctgcctcacctgtggggccccagcagggaggagtcaccagcctcagagggaggccaggtatacaccctcatacgagggcagactcaagtttatcagtaagcccctcgtgccgaatcgccacccaggcctcgctc

SEQ ID NO: 314246 - DNA, 561 bp, Homo Sapiens
ttttcagtcctcataatctgtacaaagctatgaggcaaccagtaggccatatctcactaggcagactttgaggaagatgtttccctatttgaaacacaagaaattatgaaaatatggagatgaagagggagtagttctgtgcttcttgctgtgttacctttattatattcctagtgtcactgacactagtttaaaaacagcctgcaacaagaatattctcatcaccagccaccttttccacctttcttctttttctgttgctgtttcttttttgttgctggagcccctgcaggtttctggtgtcttgggggtatgatgttacttgtagaggcagatactgttgcagcactgccaggtcttggggaggtgggtgggctgctcacagttttactggcatccagttcagatgaagctcctgcagttgctccctgggtcccttttccaatctgatccttctttttacccttctttcttccccggtagtaagaacgttctcgcattggcagccatctttctggatctggggtaacttttgggtcataattcttaggcaattttccc

SEQ ID NO: 314247 - DNA, 1677 bp, Homo Sapiens
ttccctgtccttgttcctttggttgactatctccagtaacttttccacccttcttccgaatgtatgtagcaccagcagaattttcaagagcctcaacatctacttttagagacatactatctgacgatggcaagtgtttactaagagctttggctttctctggatctacaagtgagtaagcagaaataagctgtgccagggtgtgaatatcttttggattttgtttccacagctgttgtaggtcactaattgcctccttcttccgcccatatttgagtttgaagtttgcagcttctcttatcaaggacaaatgagcaggagattttggctgatggttttgataccactggatagcttgtgtgaagacctcaatggcactatcaatatcttcttcatggctatacatggtaactaatgcagataccatgcctggtttatgctttaactcctctatgcttctcaatattagacatgctttagaaatattaccttgagaaattttcaactgtgccatggtcagcttaatttcagctgcattttctggatgctgatctgaaaattcctgaagcagctctattgcttttgtgtgctgcttttcacggcagagctgggcagcttggattaacacaggtaagagatgctcgggactttgggactgtaaactggcagatattttgcggcattgttcagcctggtttgtgtacatagcaagtaaagctttgttaaattctatagcttgtagttgtttcttggaaagcttaaactctactccttccgcattggttaatttcactttcttcttggagtcaaagacattttggtccttgttaatggtaatgatgttatttgcaattacagctagtaatcccacatctgttggttttagttttattatttgattgtaaaagttgcaaagccttctcttgttcgaccttgaagctgcagaatataagccatctgaccatgaatgatggccagttctgcctgtgggtcttcctcagtcccatcagtgtcttctgataatgaacggcggcaaagatcttcagctttttgtaggattttcatggcctggttcagctggccttggcctatcagtgcacatgcagtgttgtagcacagctcatgtgtgccttcttggaggcccaggttctctggaaccactttttcccaattgctttgagctgcaacaactgctgaaaggtttgttttcctctcctcatcataatcatcttgggagtttcggacgagatctctatacactgctaagcattcatcatagcgttccaaacggtataacacttgtccataaagctccttcagtttgtctgtctgctggttggcactttctattgtcttcaaggcattctcaattctgttcagcctgtactcgcaatatgccttttcaaaggagagagagttattggctaacactttggtgtgagtattgatgacattcaaagcttccttgaaacttccattctggataaggcataccactttacaatgcagggcagttacgtcatctttgttgatctgtagtatcttattgacggtcttgagagcgcgcgtgaagtcgccgttctggccataccggttcacttcactccacagcgcaggtactgacacccccccgctgccgccgctcgccatcttggaggagacgaggggcggggcccc

SEQ ID NO: 314248 - DNA, 366 bp, Homo Sapiens
ccggaacccaagatggctgcgctgttgctgagacacgttggtcgtcattgcctccgagcccactttagccctcagctctgtatcagaaatgctgttcctttgggaaccacggccaaagaagagatggagcggttctggaataagaatataggttcaaaccgtgctctgtctccccacattactatctacagttggtctcttcccatggcgatgtccatctgccaccgtggcactggtattgctttgagtgcagatgtgggacctaggtactgtgttgtcctctatggggctggcagccatgtggggaggctcccagcatcatcttcctacacattattacattcaccctctttctgtttgtcttct

SEQ ID NO: 314249 - DNA, 614 bp, Homo Sapiens
ggaactttgagtcttatttggaacttgtgaagtccctgtgtctggggccagcactgatccacacagctaagtttgcacttgtcttccctctcatgtatcatacctggaatgggatccgacacttgatgtgggacctaggaaaaggcctgaagattccccagctataccagtctggagtggttgtcctggttcttactgtgttgtcctctatggggctggcagccatgtgaagaaaggaggctcccagcatcatcttcctacacattattacattcacccatctttctgtttgtcattcttatctccagcctgggaaaagttctccttatttgtttagatccttttgtattttcagatctccttggagcagtagagtacctggtagaccataatagtgggggtctagttttccccttgtttctaaagatgaggtggctgcatctctctccatattgggctttgatttgtgctgagggtcagcttttggctccttcttcctgagacagtggcaatgccagctctgtggcttctgccctggggatgggccgggttggggggtgggttggtgaggctttgggtgccctgcctgtgggttgctggcttaaggctttttt

SEQ ID NO: 314250 - DNA, 834 bp, Homo Sapiens
  misc_feature (821)..(821): n is a, c, g, or t
acttccgtccaaaccggcacccaagatggctgcgctgttgctgagacacgttggtcgtcattgcctccgagcccactttagccctcagctctgtatcagaaattggtctcttcccatggcgatgtccatctgccaccgtggcactggtattgctttgagtgcaggggtctctctttttggcatgtcggccctgttactccctgggaactttgagtcttatttggaacttgtgaagtccctgtgtctggggccagcactgatccacacagctaagtttgcacttgtcttccctctcatgtatcatacctggaatgggatccgacacttgatgtgggacctaggaaaaggcctgaagattccccagctataccagtctggagtggttgtcctggttcttactgtgttgtcctctatggggctggcagccatgtgaagaaaggaggctcccagcatcatcttcctacacattattacattcacccatctttctgtttgtcattcttatctccagcctgggaaaagttctccttatttgtttagatccttttgtattttcagatctccttggagcagtagagtacctggtagaccataatagtgggggtctagttttccccttgtttctaaagatgaggtggctgcatctctctccatattgggctttgatttgtgctgagggtcagcttttgtgctccttctttctgagacagtggaaacaatgccagctctgtggcttcttgcccttgggattggcccgggttggggggtggggtggtgaaggctttggtgccactggctgtggttgctggcttgggactctnttcattggtgagg

SEQ ID NO: 314251 - DNA, 1277 bp, Homo Sapiens
acttccgtccagaccggaacccaagatggctgcgctgttgctgagacacgttggtcgtcattgcctccgagcccactttagccctcagctctgtatcagaaatgctgttcctttgggaaccacggccaaagaagagatggagcggttctggaataagaatataggttcaaaccgtcctctgtctccccacattactatctacagttggtctcttcccatggcgatgtccatctgccaccgtggcactggtattgctttgagtgcaggggtctctctttttggcatgtcggccctgttactccctgggaactttgagtcttatttggaacttgtgaagtccctgtgtctggggccagcactgatccacacagctaagtttgcacttgtcttccctctcatgtatcatacctggaatgggatccgacacttgatgtgggacctaggaaaaggcctgaagattccccagctataccagtctggagtggttgtcctggttcttactgtgttgtcctctatggggctggcagccatgtgaagaaaggaggctcccagcatcatcttcctacacattattacattcacccatctttctgtttgtcattcttatctccagcctgggaaaagttctccttatttgtttagatccttttgtattttcagatctccttggagcagtagagtacctggtagaccataatagtggaaaagggtctagttttccccttgtttctaaagatgaggtggctgcaaaaactccccttttttgcccacagcttgcctactctcggcctagaagcagttattctctctccatattgggctttgatttgtgctgagggtcagcttttggctccttcttcctgagacagtggaaacaatgccagctctgtggcttctgccctggggatgggcccgtgttgtgggtcggaaagtgaggctatgagcccccctgcctgtgggcagcaggcctaaaggacggtcccaatcccggttcagagtacaggccatttgcacaatcccagtggtacttgtatcatataccttggggtggcagggttataattagtcacagcttaagggacattaccagggttccttaggacttgaaacatgtgcattgtaggagtttctacatagggtagcatcttagcaacatccatatttcctgccttagacagtttaaagggtgattaaataatctggcttcccacaaaacgctcggaacccatgcctccctgtgaaagctatgtaccgtctctctgtttaataaaactaac

SEQ ID NO: 314252 - DNA, 1099 bp, Homo Sapiens
  misc_feature (46)..(46): n is a, c, g, or t
  misc_feature (69)..(69): n is a, c, g, or t
  misc_feature (77)..(77): n is a, c, g, or t
  misc_feature (113)..(113): n is a, c, g, or t
  misc_feature (209)..(218): n is a, c, g, or t
  misc_feature (1039)..(1039): n is a, c, g, or t
tccccttcttcgaccccccagctttaactggctgggccaacaactngaaagtgacagatgagataagtnctctattnccagagttcccaaaaaactatcaaaaccagcatgcntgctaaagctggccctatagggattttaaaagcagcaagttttctccattaaattatacatttttgccagggttttcaacaatcccttcttttttnnnnnnnnnnctctatgcttcattcaccccaagcctataacctcaggtcatcatcccctagctgtcaccaacactggtcctctgtgcccctcaatgaatcataatttgctgaactgtaccatgaagcttataatcagtccttaatgggattttggtgcctataacccaaaagcactctacatgcgtcacttcttttctttttctccttccttctctgaggcttttctgtgatatttaaatctctggctaagttctatctgattccctgaaaacttttccaatgatgagatgtaggagaactgtttccctcctggtaaaggtcagattgcggggagagggaggatgtaaatgcctgagacccgagggaagaggaggaaattggttccttcccaacagccattttcttggtttctctagatttcaaggagagtcaaagataaaatgagtatttaattcagtttcagaaaaaaagggtacattacttcgatgagaaagcataaaattaagaggcttttctggaaatccaagaaaaagaaataaccattaatatgttcaatgataattttctagatcttcctcgtgtccaaagctatatattttctcctcaaaagcagctgctccaagaactaactagccctctttatctccctctagctgggacagactaattcccctccacccccacctctcttctttcaataacactgtgtaggtgttaatggcctggggctctcaccaatgaagagaattgtcctttaagccagcaacccacaggcagtggcacccaaagcctcaccaacccaccccccaacccgggcccatccccggggnaggaaggcacaggagttgggcattgttttccactggtctcgggaaggagggaggccaaag

SEQ ID NO: 314253 - DNA, 958 bp, Homo Sapiens
  misc_feature (871)..(871): n is a, c, g, or t
gtttattatagtatagtttatttaatacaatgtttaactataaaagttaatacagcttccaagtttcaattttgtaaaatgcagtttgcagaaaagttcaacaattactagactaatgataagagaagcagcattttgaaactaattttacaattgagaagacaacagctttttttctaaacttcattaaaaaaatataatcacagtgacttttgggctaggaaaagaagtgcattaacttcatttatgttttttccttccacaaagagagcggccacaattttgtacatcccacatacaaatacccaattcatttatctttcaaaatactatatacacacaaaaggggaagaaaatatacagcatgtgcttttggtaacatatggaatttgcttaaagaaaaaaagtcagaaacacaaatccaccccaccactccctcacataccttttaaaacaaactaaacccctcaacaactccctactccaaccttgttgacggaattttcttattcatgtcatttttcttttcctttaatatatacctctttgtcacacaataggccaaagactttgcacttgcccgaatcccactgaaggcagttagttgggaagctcactatgggcagttgtgccagtcaatgctgtacttccctgggggcttattaatttttaaaacaagtatttgtaacaaaacacatcttttcacaataaacagcttatcaacctataatccttattcaattgtaaatgtataaatccaaaatgaaataattacagtaaacataatcaaaaggaaacagaagaacacccattttgtttctttataacaaatcagctatggtaggtatttaaagtaccttctggtgaaggnaaacccaacaagcttctacagaaatttagtataaaaagtttagtgtgatgaaaactatattaccaactggaatgaagtacaataaac

SEQ ID NO: 314254 - DNA, 369 bp, Homo Sapiens
gcgcctcttacatttttgtttctcattttctcctgaacctttttttctgttgccatcactgtactctctccagaatcaccggtgacttcagagttgctaaatccaggagacagtttcagtcctctctgcctctgagctgtttcctctgcctgcaattctttttcttcccacctaagcctgtttgtttcttgctcacttagtaaagtcactttcccagggaacatttcgcaccctttgcttttcaactgtggttgaatacttttataattatttgttgaatttctctagggctgcctggtttgtgggggctaggattttctttacttatttatttttggaggcagagtcttgctctgcattccgcctggc

SEQ ID NO: 314255 - DNA, 433 bp, Homo Sapiens
agacccacatatctcgccccttcctggcaatccgtaagggctgtgaccgtgcagctgtggaaatcctcccagtatgtgcacacggtcttgatgttcgtcttgtcgtccaggccctgcgggtagttggccatgctgtcgcccagcttgagcaaacagtccgaaaagcccttgaagaccgcatcgcacttgcccgctgctctcacggcctgcaccagatacgctagcaccgcgaggatcagtgaaatatatctgccgttcaacttaagtcccatcctacgtttagtcaaaccatttgcgaccgcagacctttaaatagttagtttagagaacgcgggggaaagccaaaaaataggcattgccaacaagttccgggagcgacagagactttatgcactgggaaggcagagggaggagagaaagagagggagcgagg

SEQ ID NO: 314256 - DNA, 361 bp, Homo Sapiens
aagtcagttgttgcatcaaatacttcatatttggcttcaatgtcatattttggtttttgggaataacatttcttggaattggactgtgggcatggaatgaaaaaggagttctgtccaacatctcttccatcaccgatctcggcggctttgacccagtttggctcttccttgtggtgggaggagtgatgttcattttgggatttgcagggtgcattggagcgctacgggcactttccttctcaagtttgacaaacaatagttcctgggaattattttcttcctggagctcactgccggagttctagcatttgttttcaaagactggatcagaccagctgtatttctttatcaaccatcaggt

SEQ ID NO: 314257 - DNA, 1010 bp, Homo Sapiens
  misc_feature (321)..(345): n is a, c, g, or t
  misc_feature (356)..(356): n is a, c, g, or t
cgcctttgcccgaagcccggggacgaaccgacggaccgaccgcctggcgcacggacgcgggcctcgctttgtgttcggggctagcgtcggcgaggcttgagcttgcagcgcgcggcttccctgctttctcgcggccaccccggctccggcggcctcggcgcgcgaggggctggaggtgcgggaccgctctccgccggtcggtccgcgtgcggctgagcccaggccgccagcgccgcggccgcgtgcggtgtccctgagctcctgctccccgccgggctgctccgagcaacggtgcttcggagctccagactcgggctggcnnnnnnnnnnnnnnnnnnnnnnnnnaggagtgtcgngaagcactacaagggtcctgaagtcagttgttgcatcaaatacttcatatttggcttcaatgtcatattttggtttttgggaataacatttctttgaattggactgtgggcatggaatgaaaggggagttctgtccaacatctcttccatcaccgatctcggcggctttgacccagtttggctcttccttgtggtgggaggagtgatgttcattttgggatttgcagggtgcattggagcgctacgggaaaacactttccttctcaagtttgacaaacaataaaaacttgcctggaataatcttcgaacagaaggtatgagataagtattttctgtgttcctgggaattattttcttcctggagctcactgccggagttctagcatttgttttcaaagactggatcaaagaccagctgtatttctttataaacaacaacatcagagcatatcgggatgacattgatttgccctcatagacttcacccaggaatattggcagtgctgtggggcttttggagctgatgattggaaccttatttacttcaattgcacagatttcaatgccagtcgagagcgatgtggcggtccattcttctgctgcacttaagattcccgagaagatggcatccactcagtggggtttgatgccggc

SEQ ID NO: 314258 - DNA, 1926 bp, Homo Sapiens
  misc_feature (802)..(812): n is a, c, g, or t
  misc_feature (886)..(899): n is a, c, g, or t
tgttgcatcaaatacttcatatttggcttcaatgtcatattttggtttttgggaataacatttcttggaattggactgtgggcatggaatgaaaaattttctgtgttcctgggaattattttcttcctggagctcactgccggagttctagcatttgttttcaaagactggatcaaagaccagctgtatttctttataaacaacaacatcagagcatatcgggatgacattgatttgcaaaacctcatagacttcacccaggaatattggcagtgctgtggggcttttggagctgatgattggaacctaaatatttacttcaattgcacagattccaatgcaagtcgagagcgatgtggcgttccattctcctgctgcactaaagatcccgcagaggatgtcatcaacactcagtgtggctatgatgccaggcaaaaaccagaagttgaccagcagattgtaatctacacgaaaggctgtgtgccccagtttgagaagtggttgcaggacaatttaaccatcgttgctggtattttcataggcattgcattgctgcagatttttgggatatgcctggcccagaatttggttagcgatatcgaagctgtcagggcgagctggtagagcccctgcaaccgctgctgcaagacactggacagacccagctttcgggaccctcccgcgtgccgaactgatcttcgagctgcatggacctaatcacagatgcagcctgcagtctcgcctaatggagctgccattaggggagtgtaaaactgggaaatgctgctcactgacagaattnnnnnnnnnnntaaccagtatgaaagtcgttgcgccgtgaatctctactgtagccatgaatttatggacagttagatgcttaccnnnnnnnnnnnnnngggagggtaggggacccagatgtacttgaatgtgcagaaaatacattcttgtcctcatcttccgtaattggagggctgggagaggcagctttgctcttcaccacaccttggacggaccaccttctttctgttccatggcctgaaggagtgcatctcctcaaagactcagcccctcacctgggagggcagtggtttgtgggcatccctccatgtacattttaggaaacacttgcaactctcatctgaagaagaaaacaactcatctttgggttcagattttgtgatggtattcagcaagtcacttgggcgagcacacttggtctatcctggaaagtctccttataagagaagttgtgtatttcatgtgcaccgagcaagggcattggaagacgtcatgaggctgtattttagcaggactgatcgtttttctaagtagacctgagctttgtttatcagtgaaattcaaggagaaaatgaggttaatgaagaggtatcagttaaatatccccttcttctcaccctgccaaaattagcagttggatttttggaaactctggaatattctgggtcattttgttttgtatgtttgttgtttttcgtcttccaaaggtgaaagctatgatacagttccacttaaattttagtgttttcttactcagctcaagcattaatttttgattaagtcttaatctgcatgacctgtgaatctgaatccatcatctccctttcctgccagcttttctacaaacattgaaatatgttatttggtcagcacttatttcctaggttcacagccttgggaggttgtggcatgtcctcccagtctggctgggaagagaccagctgtaccatccaaatgcttccctggtcttgatgatctcttccagagtcgatctgagtggccttttctgcaccctccccttctttctctttgaatggaattaaacccaatttggaaacaacattgacccagtcaaaagcttctaatggtttctttttcttcctccagttttagtttgcttttatt

SEQ ID NO: 314259 - DNA, 1156 bp, Homo Sapiens
  misc_feature (959)..(959): n is a, c, g, or t
tttttttcagagagatctaatttaattctttatcattcaagtagagagacaggcattttccaaagcaaacccaaccctcgtgattatttctagccagggtgaagctaaggaaggtagcagtaggtggtaggatcagcaccttggttccaggcatcacgccagtcattttatttccatcatcatccttgtgaagaaatggaagtctggagaggtgaaatgatgaaggcaatctggccacaaatcttccttctggatcctgctcttcagggcatgcatctcccatgctgaaggttaaaatgggggtcatttgccaacaaatttgggagtccgcttctccctgaaggctgccatgccctctagccggtcccgggttggaatattctgggcatagcacatcccttcaatggccatcccagatgcaatgtccacctccgttcctcggtcaatggctactttgcccagccgcacggcaatgggggcctggggcaggatctcctgggccagtgctcgtgcccgctggtaggcggcgtccccctcctcgttctgggccacagcgtgattcaccagccccagtacgtgggcctcagttccactcagtcgtcggcccgtgaagatgagctccttcgccagggccacccccagacaacggggcagcctctgagtccctcctaccaggatggagggagcagggtgggaatcagcatgggaagtgggaacccagagaaggctcagcctgggactcagccaagacttctcagaggagcagggttcaggtgggagggcagagcccagaacagagggcaaaaaaggaaagcagcgaaggaccctggatggggtggaattgggcgggtgctgtagttgcgattacctgcccccgggaggagccctcgcgtggtctcaatcagtcccatgactgccgaggaagctgctcagatagaacaaagtgaggcctccctccnccatccggtcccccagtgctaatcccgggggccacagctgcctctgctgtctactcgcccctctagccacttgccccatggtctggccacagccaggcctctccagactctgccggaagagccctagcccagaagtcaggagcccaggcccttatttcaccatgcccctttgatggagttgtaagtcaccagcaagt

SEQ ID NO: 314260 - DNA, 853 bp, Homo Sapiens
  misc_feature (43)..(43): n is a, c, g, or t
  misc_feature (49)..(49): n is a, c, g, or t
  misc_feature (169)..(169): n is a, c, g, or t
ttcgtcggccccgtgaaagatgaagcttcctttcgccagggcnaccccnaagacaacggggcagcctctgagtccctcctgcccccgggaggagccctcgcgtggtctcaatcagtcccatgactgccgaggaagctgccactcggaggtcacaggccagggcaagctncttggcctccgcccaaggcaaacccatccatagccgcaatggtgggtgcagggaaggctgcgatgtcattcatcaggccccggagtcgctggacaaacacccccacctctgcttcactcatctgttcccgctccttcaggtctgcacctgcacagaacacgcccttcactccacttctgaagagcaggacacgcacttgccggtcctcccgcagctgggccagagtttccagcagctcactgacgaagacattccccaaggcattgcgggcagaaggtctgttcatcagaatctcagtgatccctgtaaggagtcagggcagccacgggaaagcagctggctctgcctaatcctgggctgcgggctggggactggaggcaggaggcctgggatctggggagcctctgccctagatgaccagagtgacttgccacaagtcacacactcaggcaggcctcaattttcccaaccataaaatggagagaaaaacccttgctctttctgcctcagagagaaagtggaaggacttgtaaactgtgaagcaaaatggggagaggaacaacagtgactaccacagtagcccttgcctgcttctgctgttgttagacagacagacacgcacacacacaagcacacatgcacccatgtaccttctttaattttacaactccctccatattcatc

SEQ ID NO: 314261 - DNA, 587 bp, Homo Sapiens
  misc_feature (124)..(372): n is a, c, g, or t
agagcaggacacgcacttgccggtcctcccgcagctgggccagagtttccagcagctcactgacgaagacattccccaaggcattgcgggcagaaggtctgttcatcagaatctcagtgatccnnnnnnnnnnnnnnnnnnnnnnnnnnnnnnnnnnnnnnnnnnnnnnnnnnnnnnnnnnnnnnnnnnnnnnnnnnnnnnnnnnnnnnnnnnnnnnnnnnnnnnnnnnnnnnnnnnnnnnnnnnnnnnnnnnnnnnnnnnnnnnnnnnnnnnnnnnnnnnnnnnnnnnnnnnnnnnnnnnnnnnnnnnnnnnnnnnnnnnnnnnnnnnnnnnnnnnnnnnnnnnnnnnnnnnnnnnnnnnnnnnnnnnnnntcacccaggtgtgcatccttaggtatcatagtttagacttgctaatttctaaaattgccgtgtatcttttaaatcctggtacaacccccacatgctccccacaactctgtctttccctcagagattatctgtggaggagcctggggtatttgacctacagggtttctcaaagcctgggttttgctaactgcacaatcacggggacagatcaatat

SEQ ID NO: 314262 - DNA, 626 bp, Homo Sapiens
  misc_feature (27)..(27): n is a, c, g, or t
  misc_feature (154)..(154): n is a, c, g, or t
  misc_feature (205)..(205): n is a, c, g, or t
gtgattcaccagccccaattacgtggncttcagtccactcagtcgtcggcccgtgaagatgagctccttcgcaggccacccccagacaacggggcagcctctgagtccctcctgcccccgggaggagccctcgcgtggtctcaaatcagtcccnatgactgccgaggaagctgctcagatagaacaaagtgaggcctccctccancccatccggtcccccagtgctaaatcccgggggccacagctgcctctgctgtctactcgcccctctagccacttgccccatggttttgccacagccaggcctctccagactctgcctttggaagagccctagcccagaagtcaggagcccaggcccttatttcaccatgcccctttgatggagttgtaagtcaccagcaagtctcacccttcccaagcctcaaaggtggaagaaagatggctggccctcttctgtctgcttcagagagccgctaaggatcacacgaggtacgacgcttggaacaaggagagttcctaggaggtgccccatatctatttgtggattactattaataggttctctggcttagccctggcctggcctagaatgtcagtgactcctgctcctgctacagtcgtcc

SEQ ID NO: 314263 - DNA, 560 bp, Homo Sapiens
  misc_feature (499)..(499): n is a, c, g, or t
  misc_feature (519)..(519): n is a, c, g, or t
  misc_feature (536)..(536): n is a, c, g, or t
taaataaaatttaattctttatcattcaagtagagagacaggcattttccaaagcaaacccaaccctcgtgattatttctagccagggtgaagctaaggaaggtagcagtaggtggtaggatcagcaccttggttccaggcatcacgccagtcattttatttccatcatcatccttgtgaagaaatggaagtctggagaggtgaaatgatgaaggcaatctggccacaaatcttccttctggatcctgctcttcagggcatgcatctcccatgctgaaggttaaaatggggggtcatttgccaacaaatttggggagtccgcttctccctgaaggctgccatgccctctagccggtcccgggtttggaatattcttggggcatagcacatccctttcaatgggccatccccagatgcaattgtccacctccgttcctcgggtcaatgggctactttggcccagccgcacgggaatggggggcctgggggaaggaatctncctggggccagtgctcgtgncccgctggtaaaggggngttccccctcctcggttctgggcc

SEQ ID NO: 314264 - DNA, 1231 bp, Homo Sapiens
  misc_feature (53)..(53): n is a, c, g, or t
  misc_feature (208)..(208): n is a, c, g, or t
  misc_feature (1176)..(1176): n is a, c, g, or t
cccagagaaaggcagccacgtcagacagttggactgctgcatcacagtggagncagcagagttgaagatccacagagggctgtaatacagcccagaaaagacaatggagagtgaagccaatagaatattcctgcaagttacccatcagaaaaaggtgttcagaggggaaaaagaagtggtttagcccatgccagtgaaggtgacaaanaaacaaaacaacttgatggtcatatcagaaaggatggagggaaacacccaagtacatgcacggacacaagtgctccagccaaaggagtgctgttttcaccagccacaaattttctaacagcaacaacaaaaacccacagatgtaagtaacatggaagtggatcagtcctaagccaaataaggattcccacctggggcaaaagctgacttcctaggacatgaactgaacacatcacagtaaaagcccagtagaggctgctgccagttccagctattagtaattatgagggggacaggatgacacctcacacggaccacccctagcaagagggtttgtttcagttctagctgtgagaggaatgtctgcagttcccacaggtgtgccatgctgtgaagcccatggcccctgctcctctctctgcctcccacacacttaacagtacacacagactttgctggcaagtgctgtttgttcctgcactgctatactatacgactgcaggacaatgccatccgctccatggttcattcagcgccttgtcccaaggtagttggtggagagcaggaccacgttgtgcagcaagagagacagctcagcttcgattttacttcctgagcagtcagctggccaatccccagctttgccaaagccttgtccagttggtgaatcacagttgtatgagtcttcaaacgatgtctcaacaagggaggaggcaggtaagatgtgagaagcatggcccggctcaaggctttctttcatgaagattgtgtacaggacatagaagcgggggaaatgacgacccaagaaacgatggtatttcccattaatcgcttttgtcttggttaccacataagacatcaagttcttcacatctgcctttggagaaaggtgaagctttgaagaccgaggggccccccaagccaggccagagcgaccaagttgcagctccgggtgacaaaatgtccagnggtgactgccgagccccacacagccgaccgagcccagcacaccctggagagcgcc

SEQ ID NO: 314265 - DNA, 773 bp, Homo Sapiens
cactgctatactatacgactgcaggacaatgccatccgctccatggttccattcagcgccttgtcccaaggtagttggtggagagcaggaccacgttgtgcagcaagagagacagctcagcttctttcaggctgcaggaaatctgcagccattctcccagccaagttcgacacctatcttcaccaatatgcgtagaattcaggccacggagataacaagccgattttacttcctgagcagtcagctggccaatccccagctttgccaaagccttgtccagttggtgaatcacagttgtatgagtcttcaaacgatgtctcaccaagggaggaggcaggtaagatgtgagaagcatggcccggctcaaggctttctgtctcaaatgctccatctcccggtatggaagttgatgaaactttatattgtgcttccacatatttgtctttattcttctagcctttttggcatcagcccataacatctgcaatcctttcatgaagattgtgtacaggacatagaagcgggggaaatgacgacccaagaaacgatggtatttcccattaatcgcttttgtcttggttaccacataagacatcaagttcttcacatctgcctttggagaaaggtgaagctttgaagaccgaggggccccccaagccaggccagagcgaccaagttgcagcctccgggtgacaaaatgtccaggggtgactgccgagccccacacagccgaccgagcccagcacaccctggagagcgccatcttcacagcg

SEQ ID NO: 314266 - DNA, 453 bp, Homo Sapiens
tccatcaacaggtttcaagcagtctttacttgggtttaaaaacagtgcttcatgcatttacaataagttattacagaactctaagtcactgatgcacacacaaaagctaaacccaacttactaactatgcagacctctcctgatctccccaggctgggcagtaattagtaccttacaggtgtgatccatggcccagagaaggcagccactgtcagttacagttggactgctgcatcacagtggaggcagcagagttgaagatccacagagggctgtaatacagccaggaaaagacaatggagagtgaaggctagaaacattgaggaaggggtcaagaagcacttgtacttcctgttatcttttccaatagaatattcctgcaagttacccatcagaaaaaggtgttcagagggtttgaaaaagaagtggttagcccatgccagtgaaggtgac

SEQ ID NO: 314267 - DNA, 499 bp, Homo Sapiens
tccgaaaacatcggatttattaggattagctgtagtgtacactgattcctttagctctaaatggatacatatgtgccccgcagacagtatacacgcagggatgtgactgagccacagtgacatagcaaacccaacagctggcttgtgaagccatcgtgatcccaacaaggtctatgttagcaattggtgaaagaagaagagagtgagatgggacccaggtgggcctggaggtgggatcctgtgggttttcagagcacccaccagtgctccctcggtgagcccagcaccacctggaagtggagcgaacgtgggtcgctgctggaagggagggaggctgactctctacccctcacctctgcaaggaactgaggcctgtagggttgcggctgtcactggctacaggcggcatctttctgtaaaaagcttttcaggcatgaaacccatttctgtatggactgggctgtgttgacggtggtgcttgggccttgtgtgccaggcc

SEQ ID NO: 314268 - DNA, 2448 bp, Homo Sapiens
  misc_feature (100)..(100): n is a, c, g, or t
  misc_feature (119)..(119): n is a, c, g, or t
  misc_feature (135)..(135): n is a, c, g, or t
  misc_feature (140)..(140): n is a, c, g, or t
  misc_feature (186)..(186): n is a, c, g, or t
gacctccccaggcccagctcatgctttttgcagcctctccaggcccagctcctgcatctgggtgcccctccaggccccagctttgctcccggtcggcctntacagtcccaacatctgcntcatagcagattctgnaggcncagcatctgcctcactgtggaccccccaagccaagctcccaacctntagcagcttctacacacccagctcctgccacccagtggcctctttaggccaagctcatgcttcacaagggcctttccaggcccaactttcgtctcatggcaaccttccctggccagattcctgcgtgtctcccagcagcctagacaggcccaggtcttgcctcacactggcctctctacatccagctcatgcctcacagtgacctctccaggcacagctcctgtcccagaacgtcatctccgggcccaaaacttactcaagtcagcctctctagtcccaactgctgcctcctggtggcctatgaaggcccaaaatctcctcaagttgacctctcccggcccagctcctgcctcctgtcagcgtctacaggcccaacctctgcctcatgggggcttctccaggcccagctcttcctcttggctgagtctacaggcacaactgctgcctcacaacagccttttttggcccagttcctgtccagctcatggcagccaatgtaggcccaaaacttcctcaagtcatactctccaggcccaccttctgcttcccggtggcatgaacaggcccagctttgacttgagaacagcctctgcatggcctgctcttgcctcccaggggcttttccaagcccagctcttgcctcatggcagctgcctcaggccaaatttcttcctgcctgccagcagcctcaacaggcacagctcctccctcacggtggcccatttaggcccaactcatgactgtcgggccatttccaggcctagtgcctgcctcgtggctgactcttgaagcccaaaacttcctcaaatcagccttttgcccaacttgtgtctactgtcggactctacaggccggcctctgcctcacagtggaccctgcggacccagatggtgtctcactgtggcatcctcagttgaagctcctgcctttcggcagcctctccggggccagctcctcctgcctcccagtggcctctttcggcccagcccagctcatgcctcccagcggccttcccaagccccgcttttgactttcggtggcctctgcaggcctcgacaaggcccagcctcctgcctcccgaaggcctgcacaggcccagcctctgcctcacagcggactctccacgcccagctagctgtcgcctcattgcggcctcccgagtccaaagctcctgcctctcggccgcttcggcaggcccagctcccacctgccagtggcctcttcaggcccatggggctcgttcctcacaacggcctttccaggcccagtttttcccttccggcggcctctccgggcccagaacctcctcaagtcggcctctccagagccacttgcaccctccgggcgtcctctccgggcccagctcttcttcctggttgcgtctccaggcccgattcctgcctctcaacaacctctttggactcagtgcctacccatctcctggcggccttggtcggcccacagcttccccaagccaagctccccaggcccagctcaggcctcacggtggcctctccaggctcagctcctgccctccgatggcatctgcaggccccaaatggcctccggtcggtgggctcctctaggcccagcttgggcctcccggcggcctctgcaggtccaaatcgtcccgaagtcggcctctccaggcccagctccagcctcccggcagtctctgcaggcccaagtcgtcctcaagtcggcctggaattgggcctggaagagcagcaagtcggcctccctgggcccagctccgtcctctcggcggcctcttcaggtgcaaaacttcctcgagtgagcctctccaggcccagctcttcctgccttccagtggcctctttcggcccagcccagttcatggctctcggcggccttcccaggccccgcttttgacttttggcagcctcttcaggcgcagaacttgatctccagtcgggctttgcaggcccggcctcctgcctctcaaaggcctgcacgggcccggccttggccttggcctcacagtggactctccacgcccagctagtctcgcctcactgcggcctcccccgtccaaagctccttgtttcggccacttcggcaggtccagctactgcctccagtgcctctttaggcccagctcattcctcacatacgctttccaggccccgtttttccttccggcagcctcttggcttctaatttgtttatcttttgtgtataaatcccaaaatatggaattttggaatatttccaccgattatatattttggtcggtaattt

SEQ ID NO: 314269 - DNA, 399 bp, Homo Sapiens
tgcctcccagtggcctctttcggcccagcccagctcatgcctcccggcggccttcccaagccccgcttttgacttttggtggcctctgcaggcctcgacaaggcccagcctcctgcctcccgaaggcctgcacaggcccagcctctgcctcacagcggactctccacgcccagctagctctcgcctcactgcggcctccccagtccaaagctcctgcctttcagccacttcggcaggtccagctactgcctgccagtggcctctttaggcccagctcattcctcacaacggcctttccaggccccgtttttcccttctggcagcctcttggcttctaatttgtttatcttttgtgtataaatcccaaaatatggaattttggaatatttccaccattaa

SEQ ID NO: 314270 - DNA, 426 bp, Homo Sapiens
gaggtccccgaggatatcagggcagccctggaggcttactgcaagaagtatgagcagctcaaggccatgcggaccctcagttggaagcacaccctgtgcctggtgaccatggacgtggagctggccgaccgcacgctgtctgtggcggtcaccccagtacaggcggtgatcttgctgtattttcaggaccaagccagctggaccctggaggaactgagcaaggcggtgaagatgcccgtggcgctgctgcggcggcggatgtccgtgtggctgcagcagggtgtgctgcgtgaggagccccccggcaccttctctgtcattgaggaggagcggcctcaggaccgggacaacatggtgctcattgacagtgacgacgagagcgactccggcatgtgcttccaggccgaccagggaggagggctgctg

SEQ ID NO: 314271 - DNA, 398 bp, Homo Sapiens; identical to SEQ ID NO: 296475

SEQ ID NO: 314272 - DNA, 1235 bp, Homo Sapiens
  misc_feature (483)..(496): n is a, c, g, or t
ctgaaagataattgcttttaattttctaaattttcacttatgcaacataaaggcagatttatgtgacctgataatgacatttttacaaaaaacaatcccccccaccccaacatcttggtcagtagtatataaatatttacaatgaaaaaataggcaaggaaaaaggaaatcttcattatccatgtcgatttctttccaatgcttatcaggaactttgaaaataaaatactccattaactttctcgtcactcctatttacacgctgctttagctgatgcattcgcggtatttgggttgcactgtataagagtatttttgttctctatcactcctacttttttctatactattttaaaaatctgaaatagtaaattaaatataaaaatgtaaactctgaaaggagagaaaataagaataaatatgtgtaaaggtaatgcattaagatacaaaggatctcacagaggttaatattttacaacactnnnnnnnnnnnnnntgctctatatattttcttagttgggacattttgtttcaatttaatttttggttatgttaacaaaaattacctctaaagaggatgttaaaaaaatagcaatgacgttaccatcttaactaatgaatatcctatcaccctaattttttctaaaagaaatggattttttaaagtgacaaatataaattataacatagaaagcttaagaagcctcagcaaattatggtatcttttagcgatgaagacttttagagacaaatgtgaacagtgcagccagcctacttgacttagggatttacaaatgcattcgactccgacatgtgaaacacgacgtggcttctcccacacgccgctccgctgaaacatggcgcactcgtgggcggaagggcaggacacctgcagcatgcagttcctgcaggacgtcaatgggaatttcgtgtctagcagtgcaacgaacatcacccgcagctccctgggaggaccgcgagcttcacgtgtgggagctgcgccgccccctggtacccagagacacacggagcctgggctccctggctttgtaatgctcgttgaagtccagcctgaagctaagaaaccgaagactctcgtcagagctggtcgtcagtaacaccaaaaactgctgcacgataccctggtagaaatgggtcaatattcgcaactgtgagcacatttttggtatagattctttaaattctccaatcctcttattttcctcctcgtgccg

SEQ ID NO: 314273 - DNA, 416 bp, Homo Sapiens
ggcagggcagccaccgctgccctctcctgccccacacctagcgctctgcctggccccgctgtgggcgtgaaaatctggcacccgggccgacagggagagagctcagtctgcgtctgctgctctgtttgattcatcactttccccttcaccctggagcccacgttggctgtggggcacctaactggctcctgaggcccctctggggggttgaggccctgggctgcatttggcctcggcagcctgctcacgcctctcctgactgggatgtcagaggactaggttcaaactccagcatggccagctgctggctgtgtgaccttgggcatgttaagcctcagtcccttcatccatacagtgggccaaggaagggatccctgatgtgccaacagatggatttatgaccacgtgtgtgcagc

SEQ ID NO: 314274 - DNA, 1171 bp, Homo Sapiens
  misc_feature (807)..(834): n is a, c, g, or t
  misc_feature (1114)..(1126): n is a, c, g, or t
tctttttttgtctccgtgtaggaaatcccataagttcttatatttgttccagttcccatttcctgccattgaccagataacatcattgactttcaaatgacttttagaagtgataactcttaatttcctaatagatactagattgtattgaattctgttttaattattctctaggtaagtatgttttaggattaaatacctttttacagatactgaaagtgcctccttttgtggtgtaaaaaacaaattatggtgcaaaaagtaatcactagattgaaatacatgaaggttttttgctttttgacatacgaaaatgtcaagagaaaggccaaagatttgtactttttcacttacaaagcactcctttttcccttaaacttctttctgtcaaattagatttaatgagagagtactatttttaaggagctatctgtttatgtagaatgattttgttaagagtaatgtaaactattattgagtagaggcctaaagaggactgtgcatttttgctatttaaaggaatcacaaatgatcatacttaagtgagcaaaaatgacaagttttactagctaagtagagaaataaatctcaaatgcagcgctacaattttcattatcttaagtacattgtacatttctacagaacctgtgattattctcgcatgataaggatggtacttgcatatggtgaattactactgttgacagtttccgcagaaatcctatttcagtggaccaacattgtggcatggcagcaaatgccaacattttgtggaatagcagcaaatctacaagagaccctggttgnnnnnnnnnnnnnnnnnnnnnnnnnnnncccccttctcctgaatcagcagggatggaaggagggtagggaagttatgaattactccttccagtagtagctctgaagtgtcacatttaatatcagttttttttaaacatgattctagttaaatgtagaagagagaagaaagaggaagtgttcacttttttaatacactgatttagaaatttgatgtcttatatcagtagttctgaggtattgatagcttgctttatttctgcctttacgttgacagtgttgaagcagggtgaataactagggcatatannnnnnnnnnnnngtaagctgtttcatgatgttttctttggaatttccggatgttcgg

SEQ ID NO: 314275 - DNA, 373 bp, Homo Sapiens
gggtttttgctctttgacatacgaaaatgtgacgagaaaggcctcagatttgtgctttttcacttacacagcactcctttttcccttatacttctttctgtccaattagatattaatgagagagttctatttttaaggagctatctgtgtatgtagaatgattttgttatgagtaatgtgaactattattgattataggcctaaagaggactgtgcatttttgctatttaaaggaatcacacaatgatcatacttaagtgagccataattttcattatcttaagtacacttgtgcatttttacagaacctgtgagtattctcgcatgataaggatggtacttgcatatggtgaattactactgtggaccggtt

SEQ ID NO: 314276 - DNA, 608 bp, Homo Sapiens
  misc_feature (222)..(222): n is a, c, g, or t
  misc_feature (239)..(239): n is a, c, g, or t
  misc_feature (242)..(242): n is a, c, g, or t
  misc_feature (249)..(249): n is a, c, g, or t
  misc_feature (267)..(267): n is a, c, g, or t
gcagaggagtagacctccccagaactagtgggcgtatacactgcgcacttagcggggatgataactagcctgccagtactctgatcgatatgcgaggtagacgtccgttagtatactcgacagtgtggccttgttggttcgaagctcttcagagacgggcgggaacagactgaacgaggggccaaccatggcatgacataagacggtcagcatggtcccagnccggaaccagccacgcnccnccgcccnccagcatccacctctccncctcaccgcgctggcagaagcggccctcccagccgctgcggcagtcgcagctgaagctgccgatgccgtcgatgcacgtgccgtgcccgcagcacaggctggcgcacgggtgctccaagggcaagaccaagcactggtcaccgtcgacgtgcttggaccagaaggccagtgtgtcatccacaggaaaatttccttggcctcctcgaagtcacagatctcctctatgcactcccgctccaggctgctgtgacggagctcctccaggaaggagttggcacgtttgcggatccgcagcacctggtgggcacgctcgctgctggagaacactgagtcaagaggag

SEQ ID NO: 314277 - DNA, 999 bp, Homo Sapiens
  misc_feature (475)..(517): n is a, c, g, or t
ggtccagctcccacttctcccagcgccgcaggtcatactctccaagcctgacaaggagcttttggactcatccatgcagtgggccgctgtcagcacccaggaggggtggatgagcactgccccgcaggccagcttcttctttgagtccagcaggaccacctgccaggggctgtctccccgcctggtcatcttcccatcaatgagccgcggatctacttggtcttcttggtcttctgtgtctcgtttcaggtgactgcgcttcttctccatccgcttccagggcctcccacaagggaacttcactgcggggtgacactgcaggaggtcgtcccccagcttgtagccaggcgcacagctacagcgccgccagcccacctcctctaggcagtaatgcgtgcagccgccgttgtccagagagcaattgaggaagctcacctctgcgggcaggggagggcgcgggcagctggtgctggtnnnnnnnnnnnnnnnnnnnnnnnnnnnnnnnnnnnnnnnnnnnagcatccacctctccccctcaccgcgctggcagaagcggccctcccagccgctgcggcagtccagctgaagctgccgatgccgtcgattcacgtgccgtgcccgcagcacaggctggcgcacgggtgctccaagggcaagaccaagcactggtcaccgtcgacgtgcttggaccagaaggccagtgtgtcatccacattttggaaaatttccttggcctcctcgaagtcacagatctcctctatgcactcccgctccaggctgctgtgacggagctcctccaggaaggagttggcacgtttgcggatccgcagcacctggtgggcacgctcgctgctggagaacactgagtcaagaggagctggtgtgccggaaattccccaggtggccacgaacagcaggaggcttgtgagctgccacattctggaggcactggcacctgtctgaggaggacttctgagctccgggcagtgcctacccccg

SEQ ID NO: 314278 - DNA, 968 bp, Homo Sapiens
ctggagttctttttattagactgggcggccgcggccagctctaggtgggctgctccagctttctggagttctcattagactgggttctaggcgggctgctccagctccataaggaagcactcgatgtcgtcatagaggctgttggcgctggacaggcagaggctgaggctgctgctatccagggaagacacaccctcacgctgcgtgccctctaggtgcactcggcacagccagggttccagcttcaccaggaccaggctcttctccttgggcctcccagctgacaggtcctgcccgaagcccaggtagatggtatagcgtggggagccacggcgctgccgtgcccggaattccaccagctctgaagaaggggactctgctgagtacctggcaggcaggtgctcccaaggacccctggagacagccccccaggcaagggcctcactgaccttggaagaagactctgaagtcgaagatgggggtgtcacagttccgaggcagcaggcaggctggggtggaggggctggcggagcctgggggtccgcccacctcccagtacaccttgcacttgcccatgcgccgggcccacagctgtggcccccgaagctccaggtgcaacccaggggccacgtgccgcagcagttcctccgtgtagcgcagctgcttctggtccgggagctcggcagggctggggaatgctacctgctgggggtctgtggcccggacagctgggtctggggggccgtataggaacgtgcagctcgggtgtcccaccaccttctgcagcaccgtgcggcccttgtacatgatggtcacgtccagcgcccctgggctgggctcttgcaccgcggtgcaggcgcttggggagggtgacaggtacggctctgcctggtgcggggactctggggccgcggcctcgcctgcatccggaagggaatcctgtgctggcacctcatccctagcctctc

SEQ ID NO: 314279 - DNA, 670 bp, Homo Sapiens
  misc_feature (85)..(85): n is a, c, g, or t
  misc_feature (119)..(119): n is a, c, g, or t
  misc_feature (195)..(195): n is a, c, g, or t
ccgcctcatgagaatatccggataatagattcagccaaacattacatgtgccctgagagcttccttagttggcatctgctgcatntgtcttttcccactgcagcctggactggtgcagnatgtgaaggaatgaggtattgcttaacacacattagagacaaaatccttgacaaaaataaagtactaaagtgaatntgattcatttacttgataacccatactatagactacctttgcccttaagattgatttctgcagaccagagaatttttttattgcctcagctattaatgccagcccaaccacaattttctagaatttctttcatttctttctgaaaagcacacacatctttatttcatattgcatcacttctttagaagaaaacatgattttgctcattgtttttggcaacattgctaaagatataaaagcatttaatttaacaataattactatcaaaagaaataacttttgaaaaacttcccagagtgtttattacagaaacaaaaagaaaaactgagaggagtgaagactaggcatttgcaatttgtggataccaaccacccataagcagaagaagaataatttggttctaatcaaaagatttggtctatttggggccaggtgcaatggctcatgcctataatcccaacactttgggagtctg

SEQ ID NO: 314280 - DNA, 574 bp, Homo Sapiens
cagggaaggacaaccataacccaccctaagttgcaacattcctttcataagttgtttcattatgatagtagattgtgttgaactatagaaattaatttgttgtgtatatatccatttgtggcaagctgctgtggaatgggaagcagaggtctggagcttaaatacagtttcttttgaaattaacaacatgttaatgacatgtaccatgctccttgaatgtaacagttttatcacatttgaatgtttcacattgacttaaacatttgagtcaaagcataagggtttctgattgataaattctatatacacctaagaactggtaaataaatttgttcaatttcattgattttcaacagaagcatatttcataatcaatattataactatgataaattatgataatcagtaacaggttatcagaatcaaatgtaaatgttatataaggatcaataagtaacaggttatcagaatcaaatgttgttatataaggatttctctattttcctcccattaatttatatacatactaatattctagtcaagagatatactgaatgccttactattagggcct

SEQ ID NO: 314281 - DNA, 318 bp, Homo Sapiens
cagggaaggacaaccataacccaccctaagttgcaacattcctttcataagttgtttcattatgatagtagattgtgttgaactatagaaattaatttgttgtgtatatatccatttgtggcaagctgctgtggaatgggaagcagaggtctggagcttaaatacagtttcttttgaaattaacaacatgttaatgacatgtaccatgctccttgaatgtaacagttttatcacatttattgataaattctatatacacctaagaactggtaaattttgttcaatttcattgattttcaacagaagcatatttcattc

SEQ ID NO: 314282 - DNA, 351 bp, Homo Sapiens
agccacaccatacgcgtgagccaccatgcccggccctacccttagtcttgatatatcaggcactgtttgatgtgcttcagtgtaaaccattgtggttcggtgaattctggcaggtcatctggaggtttctttggagagcttctatcctactggaaacccaggttgggccccatgtggattgatcggcagtgggaatcagctagggctgctgtaactgagttcgcagacccagtggcatagacagcgaggtactgccacgtggctttggagaccagaagtctgagaggaaggtgctggcagggctggttccttctgaggctgctgggtagacagctgccccctccctgttct

SEQ ID NO: 314283 - DNA, 1296 bp, Homo Sapiens
  misc_feature (831)..(831): n is a, c, g, or t
  misc_feature (834)..(834): n is a, c, g, or t
  misc_feature (839)..(839): n is a, c, g, or t
  misc_feature (851)..(851): n is a, c, g, or t
  misc_feature (856)..(856): n is a, c, g, or t
  misc_feature (859)..(859): n is a, c, g, or t
  misc_feature (882)..(882): n is a, c, g, or t
  misc_feature (896)..(896): n is a, c, g, or t
  misc_feature (921)..(921): n is a, c, g, or t
  misc_feature (923)..(923): n is a, c, g, or t
  misc_feature (939)..(939): n is a, c, g, or t
  misc_feature (953)..(953): n is a, c, g, or t
  misc_feature (955)..(955): n is a, c, g, or t
  misc_feature (958)..(958): n is a, c, g, or t
  misc_feature (965)..(965): n is a, c, g, or t
  misc_feature (977)..(977): n is a, c, g, or t
  misc_feature (985)..(985): n is a, c, g, or t
  misc_feature (990)..(990): n is a, c, g, or t
  misc_feature (999)..(999): n is a, c, g, or t
  misc_feature (1024)..(1024): n is a, c, g, or t
  misc_feature (1031)..(1032): n is a, c, g, or t
  misc_feature (1035)..(1036): n is a, c, g, or t
  misc_feature (1057)..(1057): n is a, c, g, or t
  misc_feature (1117)..(1118): n is a, c, g, or t
  misc_feature (1123)..(1123): n is a, c, g, or t
  misc_feature (1126)..(1126): n is a, c, g, or t
  misc_feature (1128)..(1128): n is a, c, g, or t
  misc_feature (1131)..(1131): n is a, c, g, or t
  misc_feature (1133)..(1134): n is a, c, g, or t
  misc_feature (1138)..(1139): n is a, c, g, or t
gtgagaaccatcgtgcccagcttatattttcttaccatccagccacatggttctttcctgtctccctctcacagcaccctgaacgattctcactggcagtccgaccctccggttcccgggctcaagccctccctctgtccagggacacttaccttctgggcgaagctgatcacccccacgcgcaccagcagcaggcggcccactggatccacgcccctggcccgcaggtcctgcaggtcttcgggccgcccgtagtgggcgtacaccagctctcccgtgacgttgccgatggcgctgtaggggcagtagacgtcagggtcctccagcggcagctgctctccgaccttcccggcctcatcgacccagtgcagggtgttggggtgagccggatccgggaattgcagccccacgtagtgcgtgtcggtccacacgttgtccagcttctggcgggagagcgccgcgcgattgtccttgagtcagagccgccatcccggccgagcctgccacccgttcccgaaggcttgtttgcctgatggtgtcctccaggcgcccctcccccaggaactgcaggaacatggcctggaggtcgctccagtagagtctgccctggtggaaatccaggtcaggctcatagttgacatcctcactgaccaccaacacagagtctccgcacgcctggcaggaccctcggaaggcgacgtagcccagtaggaaggccccagtgaagatcagcagggccgtcaggaccaggtagggggcagccctccgtcctgctgccgcccagggaatgaggtttggctgcctgggtctagagcccaggggctcaggganaanaaaanaaaatggagaanaaaanganaaatgtataagaccaaataatanccgtattaaatatnaataataaaaggtgaacatttaagngnaaattaaaaaaagatnatagaaaatatgananganattgggnaaagttgttganatatatgnaatanaaaaaaaanaagataaatgattgtgtaaaataanaaagaannaannatgtaaaaaagagataaaaanataaaaagtttgtgggagaaataggagggaaaattataagtaatggaaggaagaatgaannaaggntgntnctnannaccnncaagggtgggggcacagtcctggcctcagtccagccttccagacgtggcccccgggtccaggccagagcacaaggggctgtgctctcccctgccaatctctccacagccccacgcctgcctcctccctgagcgcaggtcctggggtgctcaggcgtg

SEQ ID NO: 314284 - DNA, 570 bp, Homo Sapiens
gagactccatagggctcggcgtgggatgctgggaaggcctgatgatgcaactggagggaactgggtttgattgaaggaagggaagccaggtgtgtaggggtctccagttcccaggtgcacatgtccatacactgcctgctggctggacaggcttggcttgggtgggtcctgggagaagtccgctggctctgggtatatgagcactccttgagccccgaagtcctgagcattggtcaccttctgggcgaactgatcacccccacgcgcaccagcagcaggcggcccactggatccacgcccctggcccgcaggtcctgcaggtcttcgggccgcccgtagtgggcgtacaccagctctcccgtgacgttgccgatggcgctgtagggggcagtagacgtcagggtcctccagcggcagctgctctccgaccttcccggcctcatcgacccagtgcagggtgttggggtgagccggatccgggaattgcagccccacgtagtgcgtgtcggtccacacgtggtccagcttctggcgggagaggccgcgcgaatgtcctgagtcagcagcggc

SEQ ID NO: 314285 - DNA, 485 bp, Homo Sapiens
tggggaaggtttttgtaactgctgctgtgtggtagaatctgggcccttcaaggagcgggtggggtaggatagtgaggggaagcctcccaagctaggacaagagcaagcagaaacaggcaaatttgtgtaagttcaggttcaaggactctccatcctagctcatctccaaagagttgatgtactcccgaacccatttcttctctgggttggcacacacttggcggttctttcgggtgacaaagacgactgctgggttggagcacttgccactggtgtagaaatactccttgatgtgggcacggggcagtgggcgggcaatgtaggcaaagcagcagggtgtggtgtccgaggaatatggggaggcagatgcaggagcgcagagggcagtagcaatgaggatgacagcgagggctgccgcggagaccttcatggtacctgtgggagaggctgtgcgaggtccacgtgctgtcttgatcctctgcagg

SEQ ID NO: 314286 - DNA, 637 bp, Homo Sapiens
attccgcctggagtttcttctggtcccagtcattggcctttccttccttgaaaactacagtttcactctgctggagatcctctggactttctctatctatctggaatcagtggctatcctgccccagctcttcatgatcagcaagactggagaggctgagaccataactactcactacctgttctttctgggtctgtaccgggcactctacctggctaactggatcaggcggtaccagactgagaatttctatgaccaaattgcagtcgtgtctggagtagtacaaaccatcttctactgtgacttcttctacttgtatgtgaccaaagtccttaagggaaagaagttaagtcttccaatgccaatctgaggaccttcagagacagtctacgccttaacaagcacatgaaggaaactattttgaatgttctctttggcaacttatccataatttgggatcaaatgttaaaaccagaaaagtgtttagtgtggatttcagcataacctgatcatcccacccagaagaccttctcatcaatagatcgcccttaaagacccattgtaaggtcataacctcggccaactgcacaaagatggtgcctcactgcaacaagagaccttggtgtcttaccgacgt

SEQ ID NO: 314287 - DNA, 602 bp, Homo Sapiens
gaagaatattggagtcattatacttgaatgaacagttgactcattgctatgtctacagtgaattgttttaattaacatagcctcctattataccattttctgcctgcgtatatataaacacagattttatgggataatgtgtttttcttatagactgtaggaagaggcagagctctacttcttcaagcaaaggtaaatatcctgaatctacctttctccagtggcccttcttatcccatacactgtatacctgagtctgaattcaagaaagtttgtgcaatgatgttctggttggtaatatttctggaaaggaaaaatgacaaccaattgaatcagtgagctcttgagttttaagggacattacaagatcataaggaacttcgatgaaattgttcatcctgctttagaaacactcttagtctttgggtgggaagataacttttgattttataactatgtccctgaattaagaatttctatagcaacttatattgagcacaacataagactactttttcaagaataactcgaggaaaattgtcccaagagaaccttattgacattcagttgacgttttttgaatacgttgaggtttgagtttg

SEQ ID NO: 314288 - DNA, 1271 bp, Homo Sapiens
gagcgaggcctgggtggcgaatcggcacgaggggcttgggctgcgtggagaatactttttgcgatgcctactggagactttgattcgaagcccagttgggccgaccaggtggaggaggagggggaggacgacaaatgtgtcaccagcgagctcctcaaggggatccctctggccacaggtgacaccagcccagagccagagctactgccgggagctccactgccgcctcccaaggaggtcatcaacggaaacataaagacagtgacagagtacaagatagatgaggatggcaagaagttcaagattgtccgcaccttcaggattgagacccggaaggcttcaaaggctgtcgcaaggaggaagaactggaagaagttcgggaactcagagtttgacccccccggacccaatgtggccaccaccactgtcagtgacgatgtctctatgacgttcatcaccagcaaagaggacctgaactgccaggaggaggaggaccctatgaacaaactcaagggccagaagatcgtgtcctgccgcatctgcaagggcgaccactggaccacccgctgcccctacaaggatacgctggggcccatgcagaaggagctggccgagcagctgggcctgtctactggcgagaaggagaagctgccgggagagctagagccggtgcaggccacgcagaacaagacagggaagtatgtgccgccgagcctgcgcgacggggccagccgccgcggggagtccatgcagcccaaccgcagagccgacgacaacgccaccatccgtgtcaccaacttgtcagaggacacgcgtgagaccgacctgcaggagctcttccggcctttcggctccatctcccgcatctacctggctaaggacaagaccactggccaatccaagggctttgccttcatcagcttccaccgccgcgaggatgctgcgcgtgccattgccggggtgtccggttttggctacgaccacctcatcctcaacgtcgagtgggccaagccgtccaccaactaagccagctggcactgtgtactcggtccgggacccttggcgacggaagacagcctccgagagcgcgggctcccagggcaataaaggcgctccactctggaaaaaacaggaaagggaagacgaccaaaaccgggctccgccgccccccgctccccaaaaaagctttcataaccacttggtttgggacccgcgggccacaataagaaaattgcaacggggccaacaccgtggtctcccacagaaaaatt

SEQ ID NO: 314289 - DNA, 1979 bp, Homo Sapiens
  misc_feature (92)..(121): n is a, c, g, or t
gaattttttaaggaagccactagaagctttattttatacatgaccgaaagttaattttccatcacatatttccaaaatccacccaaacacgnnnnnnnnnnnnnnnnnnnnnnnnnnnnnntacatactttgcatctagaaagttcctcagaggtaagactactcctgggctggggcgggcgcacacaggggtgaccactgggcttgtggtccaggctgctcactctcctcaggtgccagcagatggagaggaaattttgaaagaagaaaccgggagacatcctggaggtcaggagtcaggagcggggaactggaagccgctagaggctcttgcaccatgtggagcggatgtgaggcacgatgcctcatctttcctcactgcttcccttggaggcgcctggggctgcgccagtccccagcccccactgcggccatgccaagcccctcagagtgcagcaatggctttagcagccacctggcggcccaggggcaggctgaggtccgtgatggccagaaccaccttggggctggacatggctgacaccttcaccagttccgacacggtggtgaagggcatgaactgcaggacgctgccacggccaccctgctccaggcagtccacacactcctccatgaaccactgcacgaactgggtgtgggggccagcggtgcgagaaccccagatggaggagatgagcaggaacaggttggccaggactcggttcagagggtcccgcatgttgaccgtgtggagctgagaggctgagagggagctgctcatggatcgggttggggctccgaaaggatgttggcatcgtcctcattagagctcagcagtcgcatcaacttcgaaggctgcacatcgtccagggggaagaggctgatataatcctcaatgtcttcgcggtgtctcttcttctggcgggtggacgcctgtcctttgtgggaggagtaggaactgagggcacaccacacggccagcttggcaagagcagtgcccggggggtccatgaggctgtgccacttggaggagtcagtgagcaggccaggtaggatgtggcccagcaggaccagggtcacttgctgcatgtccaggcagaagatggagtagagcagctccactgcccgcagcgtgtgctccttccgcgtctccttcagcagctccttaatcaggttgttgcagaaccagtagacgccgcccatgtgcagcagggtgtcaaagatgtggatggagcggctgtccacccagcccttctccagcaccttggcaaaaatgtccgtcagcacctctttgatgggccgcttggggggcagcaggttccagtagggcattgtgtccaccccggtggagggaaacttgatctgcgtggctgtctgctgcagcacgtcggcacacatgcgctccaggatcgagttcatgatcaccaccctctcattgtagaactgcagggtgttctcactaaacagtggccctgccagctggcggatcatctgcagcgacttctcacgctcatccagccccagcatccggacgtgggccacaagccaagccacagcacacaccgccagactgcataccttccctttgatgttatcagtgattttctggatggactcgaaggccaggaccccattctcccaggcattgaggatttccaagatggcggctgagatgctgagacaggcctcatgccacttcatctgcactagcttcatctccgaggagttgttgagcagggccaccagggactccactttggtggagtcggggcggaagcaggggtggtcagggttcaggatcttgccctcctcaggcatgcaggtctgcatccaggtctcgaagaagggcacctcagctcctgtgcgcgactcggacagaatcacctctgaaccataggtctgggccacatggcacagcatgaggaaggagatgtcaaacagcagggcccggacgcctcgtgccgaattcgccacccagc

SEQ ID NO: 314290 - DNA, 745 bp, Homo Sapiens
gtcgagacccgctggccatctactttaccagcggaaccaccggggcccccaagatggtcgagcactcccagagcagctacggactgggttttgtggccagcggaagacggtgggtggccttgaccgaatctgacatcttctggaacacgactgacactggctgtgtgaaggcagcctggactttcttctctgcctggcctaatggatcttgcatttttgtgcatgagctgccccgagttgatgccaaagttatcctgaatactctctccaaattcccgataaccaccctctgctgtgtcccaaccatctttcggctgcttgtgcaggaggatctgaccaggtaccagtttcagagcctgaggcactgtctgaccggaggagaggccctcaaccgtgacgtgagggagaagtggaaacaccagaccggtgtggagctgtacgaaggctatggccagtctgaaacggttgtcatctgtgccaatccaaaaggcatggtggatgatgagggcaacgtcctgcctcctggagaagaggggaatgttgccgtccgtatcagacccactcggcccttctgtttcttcaattgctatttggacaatcctgagaagacagctgcatcagaacaaggggacttttacatcacaggggaccgagctcgcatggacaaggatggctacttttggttcatgggaagaacgacgatgtgatcaattcttcaagctaccggtcgggcctgttggtgggt

SEQ ID NO: 314291 - DNA, 1283 bp, Homo Sapiens
gctgcttgaacttcagggaactcctccgggaggcttctacagagcacaactgcatgaggacacagagtcgagacccgctggccatctactttaccagcggaaccaccggggccctcaagatgttcgagcactcccagagctgctacggactgggttttgcggacagcggaagacggtgtgtggtcttgaccgaatctgacatcttctggaacacgactgacactgactgagtgaaggcagtctggactctcttctctgcctgacctaatggatcttgcattttcgtgcatgagctgccccgagttgatgccaaagttatcctgaatactctctccagattcccgataaccaccctctgctgtgtcccaaccatctttcggctgcttgtgcaggaggatctgaccagttaccagtttcagagcctgaggcactgtctgaccggaggagaggccctcaaccgtgacgtgaggtagaagtggtaacaccagaccggtgtggagctgtacgaaggctatggccagtctgaaacggttgtcatctgtgccaatccaagaggcattgaaatcaagtctggatcccatggtgaaggcgttcccacgctacgatgtgcagcattgtggatgatgagggcaccgtcctggctcctggagaagaagggaatgttgccgtccgtatcagacccactcgggccttctgtgtcttcaattgctatttggacaatcctgagaagacagctgcatcagaacaaggggacttttacatcacaggggaccgagctcgcatggacaaggatggctacttttggttcatgggaagaaacgacgatgtgatcaattcttcaagctaccggatcgggcctgttgaagtggaaagtgccctggcagagcatcctgctgtcctggagtcggctgtggtcagcagcccagaccccatcaggggagaggtggtaaaggcatttatagtccttactccagcctactcctctcatgacccagaggcactaacgcgggaactccaggagcatgtgctgccaaagacggtttctggaaagatccaaaggagtaaattgcgaagtcaggagtgggggaaatgaggtgcaccccaggaaggccccgtagacctccgaagactccacaagagactaatggatcactggtcagtccccatggggagcatcatctctttgaccctaaagatgtcaaaggtgtgcagcttccaaacgggatccccaggatcactgtgcaatgctggacagagcggtatcattgggcctgatcacatac

SEQ ID NO: 314292 - DNA, 699 bp, Homo Sapiens
agttttaatgctgtgtgatcatcttagtgcaccacaccattttctgcattttgattttttcttttgtggtgactcccgaagatagaatttctgagctaaaggatattttattttatgttcctgcatacttttgccaaatggttacatacaaaggatgaagcctttacattcccactggcagagaatgagtacccacaagtgccccaagtctatggtaacctgtcctatggagggaaatctgaaagctcttagtgagaccagtgggcagatgctgagcctgcccccagacagagggagaagtcgaaccaccaagcatttgctaggcggcgcagcatctatgtgatcagggccaatgatattcttttgctctttccagcattgcccagtgatcctggggatgccgtttggaagctgcacacctttgacatctttagggtcgaagagatgatgctccccatggggactgaccagtgatccattagtttcttgtggagtcttcggaggtctacggggccttcctggggtgcacctcatttcccccactcctgacttcgcaatttactcctttggatctttccagaaaccgtctttggcagttctgaaacaaaggccaccttcctggggtatttgtatggagcagtcacccttttcacatgctcctggagttcccgcgttagtgcctctgggtcatgagaggag

SEQ ID NO: 314293 - DNA, 1074 bp, Homo Sapiens
  misc_feature (925)..(978): n is a, c, g, or t
ttttgcctgcaactatatacacattgcaaaactattctgcgtcacatgattttaaatgaaataaatacaaaaatgaaccacacaatcaacacataactttaatactccacatttatcttgatcacaatggtggtaacctcctagtcaacaatcttgtgagttgaggagttgattctcattctcatatccatcaggaagatatgccctccgtagctggtctgacttaggtatggagcctccattcttcacatggcgagataggaaagcacggactgctgggtgatcagccttctcaaagtgggatgttggcttcccaggcacattttcacaaagtcctggataacactgactttctctgtttgcgcagtactgttgcactgaagagatgcagttaggggcctctgcttctttctcacattctgctcttcaaattctggccttcctcttggtatgagtctttgacttgaggtggtcactaatggcagacttgcgaacatgattcagaaccacattgcaagaagtgcagaagagttttcctccatcttcatgcagctcacctccaaactcagtgactcgatccaggggagtcacatacaaagcagtcttagaacggtttcgagcaggtggtgctgttactacaaatcgctccattctgactctaaataaatatggttcggattagtttccagtttttttcgtcttgatacttagcagggaatggtctccagagcgaaaccagagacgcatcaaatcctggcactttccgtttgttcaaccccggagatgccttcaaatcagtttttcaacaagtggtggtggggaaatagtttctgggcttgcacccgattttccctgtggtgccaggaagtcatgcctttacgtaggatcgaggccgccgttagggaaagtggacgaggcccggccnnnnnnnnnnnnnnnnnnnnnnnnnnnnnnnnnnnnnnnnnnnnnnnnnnnnnntccgtcgctgccgccgtcgccgccgttgcccgatcgagccccgcggcggccgccgtgtcccccgccgcgccccgtccgccctcgtgccgaatcctg

SEQ ID NO: 314294 - DNA, 628 bp, Homo Sapiens
  misc_feature (568)..(568): n is a, c, g, or t
  misc_feature (586)..(586): n is a, c, g, or t
ggaatcacaggcatgagccacagtgcctggtcttagctgtgtttttaattatgccatgcatcaacataacaccgggccatcttcctatcccttcctatcccatatgtttaatgaaaacatattttatgtgctaaattaggttaatttaccagagatttagcttagtgtttttaaactatagaacaatacccctatagaacaatgtacagctgcacccaaggttaaaaagaggtagcagggcaaacttaaactctttgtatatggtgaaacccatccctctcctgccctctaatggtatgtttacattatttcgttattatacaatgtagtggtataaacagtattattaaactgaaggcataagttaaaggaagtatgttactttgagctgatgtaggctcttccacttttatctgtattttacttatttggggactttgtattgctagggcttctctcaaatccatggtagtagtttcaaatgagtttgtggataatgggatgtttagtccttatcatttgctgtgttttgacagttttttaatttgcagtattcactcacgaactngttattttaagtatgcanaaccaccctcggttcgtgatgagaatagccgatgatgagttt

SEQ ID NO: 314295 - DNA, 622 bp, Homo Sapiens
  misc_feature (35)..(35): n is a, c, g, or t
  misc_feature (209)..(209): n is a, c, g, or t
acatcggctaactcatcacggacgaaggttggttntgcattattcctaaaataaaacagttcgtgagtgaatactgcaaattaaaaactgtcaaaacacagcaaatgataaggactaaacatccattatccacaaactcatttgaaactactaccatggatttgagagggaaaccaaaagtttgcaaacctctctgggagctgtgtcanagttagtattctgaagccctagcaatacagagtccccaaataagtaaaatacagataaaagtggaagagcctacatcagctcaaagtaacatacttcctttaacttatgccttcagtttaataatactgtttataccactacattgtataataacgaaataatgtaaacataccattccctgctacctctaaccttgggtgcagctgtacattgttctataggggtattgttctatagtttaaaaacactaagctaaatctctggtaaattaacctaatttagcacataaaatatgttttcattaaacatatgggataggaagggataggaagatggcccggtgttatgttgatgcatggcataattaaaaacacagctaagaccaggcactgtggctcatgcctgtgattcc

SEQ ID NO: 314296 - DNA, 720 bp, Homo Sapiens
tcggcacgagggaatcacaggcatgagccacagtgcctggtcttagctgtgtttttaattatgccatgcatcaacataacaccgggccatcttcctatcccttcctatcccatatgtttaatgaaaacatattttatgtgctaaattaggttaatttaccagagatttagcttagtgtttttaaactatagaacaatacccctatagaacaatgtacagctgcacccaaggttaaaaagaggtagcagggcaaacttaaactctttgtatatggtgaaacccatccctctcctgccctctaatggtatgtttacattatttcgttattatacaatgtagtggtataaacagtattattaaactgaaggcataagttaaaggaagtatgttactttgagctgatgtaggctcttccacttttatctgtattttacttatttggggactttgtattgctagggcttcagaatactaactttgacacagctcccagagaggtttgcaaacttttggtttccctctcaaatccatggtagtagtttcaaatgagtttgtggataatggatgtttagtccttatcatttgctgtgttttgacagtttttaatttgcagtattcactcacgaactgttttattttatgaataatgcaaaaccaaccttcctccggtgatgagaataaccgtatgataagagaatttgctcatcgtgctttaaatga

SEQ ID NO: 314297 - DNA, 548 bp, Homo Sapiens
agctacgcgacctgtgacctggtggctgtgctgggcggccggggcgtgttgcgcctgcggctgcttctctcagcgctgaagcccgggatccacgtcccacgggccggacccgcggccgcgttcggcacctcggtaacctctgccaaagtggctgtgaatggcgttcagctgcattaccagcagactggagagggagatcacgcagtcctgctacttcctgggatgttaggaagtggagagactgattttggacctcagctcaagaacctcaataagaagctcttcacggtggtcgcctgggatcctcgaggctatggacattccaggcccccagatcgcgatttcccagcagacttttttgaaagggatgcgatgctgttgatttgatgaaggcgctgaagtttaagaaggtttctctgctggggtggagtgatgggggcataaccgcactcattgctgctgccactgacgaagacagcatgatatatgagggcatccgagatgtttccaaatggagtgagagaacaaggcctctaggccctcttggg

SEQ ID NO: 314298 - DNA, 646 bp, Homo Sapiens
ccgcctcccggcgcgggtggccgaggcgtagcgctgcgacccccgcacccctgcgaacatggcgctgcgagtggtgcggagcgtgcgggccctgctctgcaccctgcgcgcggtcccgttacccgccgcgccctgcccgccgaggccctggcagctgggggtgggcgccgtccgtacgctgcgcactggacccgctctgctctcggtgcgtaaattcacagagaaacacgaatgggtaacaacagaaaatggcattggaacagtgggaatcagcaattttgcacaggaagcgttgggagatgttgtttattgtagtctccctgaagttgggacaaaattgaacaaacaagatgagtttggtgctttggaaagtgtgaaagctgctagtgaactctattctcctttatcaggagaagtaactgaaattaatgaagctcttgcagaaaatccaggacttgtaaacaaatcttgttatgaagatggttggctgatcaagatgacactgagtaacccttcagaactagatgaacttatgagtgaagaagcatatgagaaatacataaaatctattgaggagtgaaaatggaactcctaaataaactagtatgaattcgtccaccccccgcccttacacaaaaccccctgt

SEQ ID NO: 314299 - DNA, 950 bp, Homo Sapiens
  misc_feature (638)..(638): n is a, c, g, or t
tggtgatttattttttattatgttaaaggtgacagatcttggcttaagaaaaaccagatttgtgactaaagaaaacattttcttggagctttgcattgttctggcttaaatttccttttaaaaagtaactttccgtaagttaaagttagcactttcacaaatactagcagagttactaaatgaaatattaacatcaaaacaaacatgattaacgaagaagtattttattattttgctgcaaagctgttgcttcactgtataaaaatagcaccagcaaatgcagtgtatcgcaaaattaagatagtggtgttcctcatctgacactgtacaagcaacaaaacctcttcacttccagttatttccaatggaaagatcattaagtatttcatcccaaatccaggtatggatacatgcaagttacaatattatataaggcttaagaataacaatgttatctttgaattatgtaatttttataactagtttttaccatggataatttcatgaattctgaacactagagcctagtctaaaaatcataggatattgtgaaaaagacacatattatatttatctataatcattagaaagttaaagggcattttctttcattagcagtgttaacagtagtttttttnttcccatcggtaatactaaaagtttctattctaagtcttctatccaccactaatttaggacaactctgctgggttgcgttatttcatactagtttatttaggagttccattttcactcctcaatagattttatgtatttctcatatgcttcttcactcataagttcatctagttctgaagggttactcagtgtcatcttgatcagccaaccatcttcataacaagatttgtttacaagtcctggattttctgcaagagcttcattaatttcagttacttctcctggtaaaggggggaaatagaggttcacta

SEQ ID NO: 314300 - DNA, 667 bp, Homo Sapiens
cacagtcatagtaacaagtggtgtttctttaatcagtgaggagaacttgcagtagagaccacatggcaactgtgttcaggctgagaagatgacgaagaccctctaaacacctatcatggctagacttgcatgaaataaacaaattcttttcagaggctaacttctgcaactgtcccctgccaggcaagtttgtggcaacaagaggctccctaggtaggtctcccttagaagtatgtactttcttagctgcctgtagttcggtactgcccaaaggaggacgggtggagatttcaggaaaagaaataccctgaaaaaatccaccaccagagggagtagttccaagttcagaaaaaggaacaatatccctagtggacttcactttcttgtgttctttcttctttccttcttcattgtcactgtatctgtcagaatcattacttccattctgccttgtattttctgctgaagaagaaattgttggcagaggagtagaagatcttgattctgttccttgttccctcagtttcaaaagctttttctcatatagcttcctggttgttcccacaataggaccaggattcactccgtatttcacaagctgatccaaaagatcttcattagtgagctctgttactcgtgccgaatcctgcagcccgggggatccact

SEQ ID NO: 314301 - DNA, 827 bp, Homo Sapiens
cattgtcactgtatctgtcagaatcattacttccattctgccttgtattttctgctgaagaagaaattgttggcagaggagtagaagatcttgattctgttccttgttccctcagtttcaaaagctttttctcatatagcttcctggttgttcccacaataggaccaggattcactccgtatttcacaagctgatccaaaagatcttcattagtgagctctgttacatctagatcatctttatcttcttgtctgggtttatcagttttttttgtggctttcctgccgacggctgctcggctccggcccgcggggcgcccccagagccgaggaccggggtgggctcgcgctcttcgtcactggagaagtccgggggccccttgctgttggtgccggcggggagcggcggcctggttgcgagccgtgaggtgctgcaggtagagctggacgtacacgtctttgcgctgctccccggccggcagcgtcacattgttggcgaccaactcactcttcaacttgtcttttgtcaggaccgaggggtcttccaggaactccggcatctcggggatctgcgaagccccctccccacagcctttgccgccgccgctcacgccggcgcgcttgctcctggccggggaccgcgctgccgcctccgagcctcacggctcctgcccgggaagagcgctggggaggggaacaaaaacttcgcggacacaaagctaagccagacccggacacaaaagaccccagagctgaactacgaaccaactgcggccaagctggaagctcgcaccaaccccagcccacacactacaggcaggaggcccc

SEQ ID NO: 314302 - DNA, 366 bp, Homo Sapiens
gagaatgggcaaaaaaaatgcagtaatgacaataatgcgtaaacatataaaaactactcagcactataaatcttggattctttatacttagtctataagatgtgtgaagattggacagtgagagcattcatcatctatcatttaacaaaatatttatgttgatttaaaaagtaaaatggatgagtttttaaaatttaaaccagattattaggtatgatggcaaactgtttttgaagagtcatataaagttaattttgtgtatgttgaaacttgcaaggtaaacctgggtagttattgtacattttaattatatggacagtcttcaacttccagagtccagtaattcctcccaattgaacctcgtgc

SEQ ID NO: 314303 - DNA, 1068 bp, Homo Sapiens
  misc_feature (688)..(688): n is a, c, g, or t
ttaggcgggcaggacggcccccccaggctcaactcaggacaacccccaacgggactgagcggccccatggccctcggcctgtggccactgagctccgccttccccgggctccctgaggaagcagagtcctgacttccaggaaggacaggacacagaggcaagaactcagcctgtgaggctctgggtggctcctgaggccagaggacgccttccgcgatccatggctcagcatcgtccttctggcttcccagccccgggccggaacgttcggggttaataagcagaggcagttattcggctccctggcaggagctccccccgttagtttccacgttgtgagcacattcatacttaagactgtttctctttgtgttttaagcgtctgtctctgtagtaaactgaaatgttaacagaaatgcagctgggcccctcacagcatggggcaggaggtgggccccctggtgggtggggctagaaggtggccttggagtgtccgaagatgcagatggggaagtgcttcacgtgcgaggaccactgcgcggccagctggaagaacttgacgtcgctgcactccacgccgtcgatgaggacccgcagcatgttctgctgctgcctggcagtgcagatgagccggctgatgccctcaatgcactggctcttagactccacgtccttgtccttcgctttncttgggcagaaacatcaccttcttgttcttctccttggtgaccacggtcatggacatggtgggcgtggctgcagcctcgccgctgctgggcagcctgctgacctggagggaccggaaagtgcacttgagcgtgtttttggtgacaggcaggtccttcttctcggcgtccctcttcctgtccgcaggctgtgctgccgtccagtagtccacctgcagccccatcagctcggcgccgacaccctggctgggggaggacaggcctccgctcaccgacggggaggagggcggggtgggtgaggcctccttggccgcaggagatgcggacggcggggtggaggagagcgtgccagagcccgagggggccgcgtcgtccgagtcgc

SEQ ID NO: 314304 - DNA, 433 bp, Homo Sapiens
actgtttcctcctttgtgtttttaaagcgtcctgtcctcctgtaattaaaactgaaaatgtttaaacaagaaaatgccagctgggccccctcaacagcaatggggcaaggaaggtggggcccccctggtgggtggggcctaagaaggtggccttggagtgtcccgaaagatgcagatggggaagtgcttcacgtgcgagggaccactgcgcggccagctggaagaacttgacgtcgctgcactccacgccgtcgatgaggaccccgcagcatgttctgctgctgcctggcagtgcagatgagccgctgatgccctcaatgcactggctcttagactccacgtccttgtccttcgctttcttgggcagaaacatcaccttcttgttcttctccttggtgaccacggtcatggacatggtgggcgtggctgcagc

SEQ ID NO: 314305 - DNA, 428 bp, Homo Sapiens
  misc_feature (66)..(66): n is a, c, g, or t
  misc_feature (325)..(325): n is a, c, g, or t
  misc_feature (336)..(336): n is a, c, g, or t
aaattagaacatgtattgaaaagcattaaaaatatctgctgctataaaacctccagccgcaggggntgtcttattgggaaccacgagtgtgcggtgctgggggcatctcttaggcgggcaggacggcccccccaggctcaactcaggacaaccccaacggatctgagcggccccatggcctcggctggtggcacttgagctccgccttccccgggctccctgaggaagcagagtcctgacttccagggaaggacaggacacagaggcaagaactcagcctgtgaggctctggggtggctccctgaggccagaggacgcctttccngcgatcccatnggcttcagcatcgtccttgttggctttcccagccccgggccgtaacgtttcgggtttaattaagcagagcagttatttcgggttctgggcaa

SEQ ID NO: 314306 - DNA, 1703 bp, Homo Sapiens
  misc_feature (57)..(75): n is a, c, g, or t
  misc_feature (1480)..(1543): n is a, c, g, or t
aaggtagcgaggcctgggtggcgaattcggcacgagggagagagaatagtctcgagnnnnnnnnnnnnnnnnnnngtcatcaatccaatttattaagtcctcaatgagggggaggaagggccacatctccctctgcaggccctttgaccatcttgatggcttctgctcctccctgtcccctcagctctgccttggtttccccactgacaaaggggatcttctgctgtcctgtgtgccctgaaactaaaacccagggggaggccagaaatcctcaggaagttttccagctccctgcaagaatagccaaggacagagaaatcacaggatcaggacgagcagggcaagctgaagcagggggtagaacagaccaagtcctttaccgcagaggaagaaaccacactgtggaagggaaataaatagaggggtccagggcagcagagcccaggcccccagggcgcagtggctataggcgcagcaggcgagtgggagcccccggccgcttcagccactgaggaagagacgcttgtaggccttgttcatctgctccaagaagatgaaggtgaggacggtgtgggggcccaggcgggcatagtacggcgtgaagcccttccacaggctgaagaagccctcgtagcggacaactttgaacagcacgtccagcccgttcttgtattccggcttcccatcaatcatccgcatgttctggattcgggtcttggcaatgtccacaggcatggaggcagcagtggtgacaagaccgctgatcatgctggcacagaagtggcacaagatgttgtcagagaagtagcctgagtccagtaagaactgcttggattgggagtaggaggcgagctgggcagcattgacgacgacggcccgagccatggtagggatgcagccccgccacagtgtgaggacaccctcttcccgggtgattcgaatcagggcgttaaacacatttttgtagccacggcgctggtcagctggaagccggccatcggcagtcatgcggataagagccacttcggctggtgttcccacaaaggcaccagtggcacctgcggtcatgccaatcacagccttcagcagaaagccagggggagtaccatcagccccagtcaggcgctcaaacagcacggtatagatgccaaggcgggtagtggtgtaggtggcctgacgcagcaggccagccgacagcccagtgtaaatgcccctcaggccttctgccttcaggatactggtgagggcatggaagctggttttgtactctcgagtcttggccccttccccgctcaactgcatccggttcttcaccaggtccaggggctggacaaaaactgtagctcccatcccggccaggcccccaaacaggaacttgacggacttaggggaggtacggggcttcccgtctatcccgccggccccggcactcgccgtcgccgccatcgccactcaatggccctcggctccgggtcccgtnnnnnnnnnnnnnnnnnnnnnnnnnnnnnnnnnnnnnnnnnnnnnnnnnnnnnnnnnnnnnnnncgcccctccagctctcaggtccgacacccgctggaagccggcgcgggcgcaggcgcgcagcgcaaaggcggccgggagtaaggcggagctgaaggaggagcttgatggaagcgtgcgagaaggggcgtaactgatttggaaaccagaggaaaggcgctgt

SEQ ID NO: 314307 - DNA, 959 bp, Homo Sapiens
  misc_feature (58)..(76): n is a, c, g, or t
tttctatcattgttcgagtggcgaattcggcacgagggagagagaactagtctcgagnnnnnnnnnnnnnnnnnnngtcatcaatccaatttattaagtcctcaatgagggggaggaagggccacatctccctctgcaggccctttgaccatcttgatggcttctgctcctccctgtcccctcagctctgccttggtttccccactgacaaaggggatcttctgctgtcctgtgtgccctgaaactaaaacccagggggaggccagaaatcctcaggaagttttccagctccctgcaagaatagccaaggacagagaaatcacaggatcaggacgagcagggcaagctggagcagggggtagaacagaccaagtcctttaccgcagaggaagaaaccacactgtggaagggaaataaatagaggggtccagggcagcagagcccaggcccccagggcgcagtggctataggcgcagcaggcgagtgggagcccccggccgcttcagccactgaggaagagacgcttgtaggccttgttcatctgctccaagaagatgaaggtgaggacggtgtgggggcccaggcgggcatagtacggcgtgaagcccttccacaggctgaagaagccctcgtagcggacaactttgaacagcacgtccagcccgttcttgtattccggcttcccatcaatcatccgcatggtctgggattccggtctttggcaatgtccacaggcatggaggcagcaggggtgacaagaccgttgatcatgctggcacagaagtggcacaagaatgttgtccagagaagtagccctgagttcagtaaagaactgccttgggattggggagtaaggagggggaaactggggcaacatttggacgaaagacccggccccagcccctttggttaaggtgatgccaaccctcccccccaacagtggtggaagggaacacccc

SEQ ID NO: 314308 - DNA, 441 bp, Homo Sapiens
  misc_feature (11)..(11): n is a, c, g, or t
  misc_feature (395)..(395): n is a, c, g, or t
  misc_feature (400)..(400): n is a, c, g, or t
ttgttcaaaanaaataaccctgaaatcccaattaagaaactgccttggaattggggagttaggaggccgaagctgggcaagcaattgaacgaacgaacggcccgaacccatggtagggaatgcagccccgcccacagtgtgaggaacaccctcttcccgggtgattcgaatcagggcgttaaacacatttttgttagccacggcgctggtcagctggaagccggccatcggcagtcatgcggataagagccacttcggctggtgttcccacaaaggcaccagtggcactgcggtcatgccaatcacagccttcagcagaaagccagggggagtaccatcagccccagtcaggcgctcaaacagcacggtatagaatccaaggcgggtagtggtgntaggntcttgacgcagcaggccagccgacagcccagtgtaaatgcc

SEQ ID NO: 314309 - DNA, 376 bp, Homo Sapiens
tctatgtgtccatatgtcctcatcatttagctcccacttataagtgagttataccattttatactttttgatgtatatcatataatagtacaactcatttttatatttaacatctttaaaagtactgtgactgatttttcccacttattcattcaagatattaatcatctgaaacccacctacactgtgtctctacgcttatgcaggctctaagatcagagacctaaggagaataggttatgctctcctgctgaggggatcaatgtctcagttatttcaggttgccataacctagaagctggcaagtccaatatcaaggcactagcagattcagtgtctgctttatgcacattctggttcatggagtgacctgtct

SEQ ID NO: 314310 - DNA, 854 bp, Homo Sapiens
  misc_feature (805)..(805): n is a, c, g, or t
ctctattagtccatgaagacattatggtcatgggcccgtagaagcacatagtgtgtccttaacctaagtagggtaacccatatttattattttttataaagctaaaaatcataacactatcctgtgtcacagcctctttctttatagttctttgtaaaatgggtatttatgggagccaaagggagattcatttatataaaatgagagccactgaggtgtttttctaccctaccaggaaaaggagccctatagctcagtcacttatttaaaggtagccaggagaagagaacctagggtaagaagacatcagaaggtctcaggacatataggggtcaggagaagaataggcatttagtgcatggagtgtcataaaagcacaggagaagcccaggctttactcaggtgttacagtgccttaggacctggaccaagagacctggtgacttgcacttttctagaagaggagggtacattagcctgccaacactatgttatttttttctgtcttgtggaaattttctcattctgactacagccccaaacagttcttatttgtggagtatgtctatccctgcatgggtcctattatgtgatagtgtctgtgatatcaggcctttgtgtaacactatgcaaggagagtcatgttcggggttgtctcctgtggttatcactttcttttcgaacatgtgttgatgttaagaagcgcgatttgcatttagcctgggagggttggattcgaggcaaggaaagatgttttgggttggtggcggccaacagtctactaagtccgtgaatatggggatcnggtatacgggtgtgatttgtgtgtgggtaattctgtgtagttgattatc

SEQ ID NO: 314311 - DNA, 833 bp, Homo Sapiens
  misc_feature (767)..(767): n is a, c, g, or t
  misc_feature (804)..(804): n is a, c, g, or t
caaagtcgggggtagtgatataagatcagccgggtggctgccggtttcccccggggtctgattattggtgcagtgaagtggagttcggtccctgtcccttgtccctccaaaaagctcataaccttcctttcttggcagagcccatagagatgttgggcaggactgagcccggttccagatcaaatcaaacttttctgcaggaataactgcgtagactgtatcttttgctgcaaaatattgctgccaaatctgttttatttcttctgcagttttttcttttaccatctcaatgttaaagattgaactgagagtcttgtccttagtgaatcctctgttcacagactgtttccccaaggcatctgtcttctgttccacccttttgataaaatcaccttgcctggaatgccccactggctgcttccgaaattcactgcgtttctccaggcgggactcttaacgcagctgggtctgacctgcgcagcagctggatcttgtctcggtagcggtcgtagtaagggttggcctggagctcggcctcggccccgaccccgctgccgtcggcgcccccctcgggccggcccgagccggggcgctctgtgaagacgcgcagctgcgcgggtgacacgagccccaggcccagggctcggctgcgcaccgcgctcaggccccggtagagtccggccacctgcaggaccgccggtcccgcgccacccgcaagccgccgccaccacagcagccatggccgcctccgcctcctggcagctggnagaggaggggggaggcagggaaggtagatatgtaatntgcgtgacggtgatttgagggtggggata

SEQ ID NO: 314312 - DNA, 872 bp, Homo Sapiens
  misc_feature (25)..(25): n is a, c, g, or t
  misc_feature (208)..(208): n is a, c, g, or t
  misc_feature (471)..(490): n is a, c, g, or t
ccccattccccaacggtcatggctnttaagttatcctaggctgttcttagtaatccagcccatcagaaccactaaattccctccctgttcacatgggttaaatacaggcttctgatttagctttacttcctagtaaagaggccagactacagagaatattaaacagctccttttaactatgctgcatccagactgcctcattccaccntaagagaaggtgcccacatgataatatgcactagagatctaccaatctaagtttctgaggtcttctttttggataagttccagcactggaatattcagaatttcaaaggaaaattacatgttgactactgacattttagactgcatattcaaagttaaggagcaagattaagactagagtgccaaccaagatgctgttaaacatggcaaaaaggtgacagcacaaagggaccaaagaggctgattctttagaggccctttgcnnnnnnnnnnnnnnnnnnnngcaacaagtgtagaatttcccctgatcaaaatctgaatattggttaatgcatgttttctcattctccgtgtatgaacccactcctaacctctctcattgcctttttaagcttaagagagagaaataaaagaaaatggatatagaccatgtatttttatttatgaaaagagaggcatattctaatagtcataaggcaatgtgtttaagagctgcacctgaactggtattctcaaaactgaaaatagttatcaactctattcaacttgtaagatgtatctatgtggcttcccaaggtcactgggttgtcacccaaatgggcccacgggtgactccatccatggccttaaggggggctttatatactgtggtgtagggatggccc

SEQ ID NO: 314313 - DNA, 245 bp, Homo Sapiens
taagtagttataaaagaatgagcacctcagactggattttagaggagagccccctagactgtctctgtgtggccacttgtccaattctgggttggaccggcaggagcctgtgctcatctgtccacagggaccacctcagtgtttggcattaccaggcagcggttgcgtccattgcctctactatccccttcttcgcatttgagtagacttccctgggggcagcatggggaggttcctgctgccct

SEQ ID NO: 314314 - DNA, 777 bp, Homo Sapiens
  misc_feature (691)..(704): n is a, c, g, or t
  misc_feature (724)..(737): n is a, c, g, or t
ttttatggcattgctgcatttattactccgtactgccaatgaatacatgaatgtaggattacattcaattatttgtaggataaatgcaggccctccgatccacacagcagagttgactatactcaacattttgtggcaacgtggtgtcagttttccctgtaagggagtgtgttttggtttctgttttatcttcattgcttgtactgtacctgacacaaagtgggtacttaaatatatctgtgaaataaatacataactatcataaaaataaaatggagtactttaaaaaggcacaaaggaatgttcttgagaccactgccttgttaggctcagcaggctgcaaacattagagctgagacagcacaaaaccacatgaaattagactgaaatgcctcagcgggagaaaatgaaagaaaacgccacagaaagcgacactttccttttattagattcacaatgcctttgtaacgcccaacctctcctttgtagaatttttctttgttagaaaacagacaaactctgtccttaggaaccgtcttctacttggtacagcactggcctcaggccgcctgcatctgcgtggaccagtaagaatgaagtccagcagcatagagaaaagcatcataaaggctgggaggtcatcccccagggcctcccctacttcacatacacagagacgtgtgcatatgtnnnnnnnnnnnnnntattatatatagatatgtannnnnnnnnnnnnnacaaaaataacagggtttgcacagctctattaatttttta

SEQ ID NO: 314315 - DNA, 1254 bp, Homo Sapiens
  misc_feature (148)..(148): n is a, c, g, or t
  misc_feature (271)..(284): n is a, c, g, or t
  misc_feature (304)..(318): n is a, c, g, or t
ttttgaaagcgacactttccttttattagattcacaatgcctttgtaacgcccaacctctcctttgtagaatttttctttgttagaaaacagacaaactctgtccttaggaaccgtcttctacttggtacagcactggcctcaggcgncctgcatctgcgtggaccagtaagaatgaagtccagcagcatagagaaaagcatcataaaggctgggaggtcatcccccagggcctcccctacttcacatacacagagacgtgtgcatatgtnnnnnnnnnnnnnntattatatatagatatgtannnnnnnnnnnnnnnacaaaaataacagggtttgcacagctctattaattttttaaaattacacaggcaaggtttatgcttcagtataaccatttttactttggatttaagtgggaattttaggcctaaaaataagattaccaagcagaggccatctagccacacagacacaagacatcttgagctccatgaaactagaaatgtggtgatgtcatcctcacacgggggggctacacatccccatcgattattttaactaaaatacaaaagcaaaatagtgtgttaaaataatcctctactcaatgcattagcacatataccaaattatactatctgcatgacagtctctaggtaccaagactgtatttttgcaagtgctattctctacttcattaaatacagtacccagccagcaaccacaaaaagagaacgcatgctgtacagcaagagaaggggagggagacgattttcagggccataactttcatggcaaccaaaagaaaaataagtaagacaaatctcacatgacagatataaaactaatttgcagtgacatttgatatatagttttatcagaagtaatacatttaggttacagttacatgaaaaagagaaactatgtgaaattataggctttctcctagaatatcccaaatgctcatcaaccgttaatttgttcaagaaagatgaccaccaggtgattgaatagacagaatgtcatgtagtattttaaaaacacagattctgggactagaagctaccaccaaaatatccagaaatctgagttaacaggtcctttattttgcacacttgctgctgatatatagaaccacgaagtgtttgcacagaccacgaatgcagccgctacctagaggctggtcacagaagagaatgcgatgaacaccgtcctgccagtgtgaggacggagtgtctgatgtgtttgtgtcgccc

SEQ ID NO: 314316 - DNA, 637 bp, Homo Sapiens
ccacgccgaatatcaatctggtgtggcggcttcttttcagggttcagtcaactggaaagtcagaaaggaaaggacatcatggtcatctgcaagacctccagttgcagcagatattccaaaatgcccttgtgcagggataatcatattttccactttggcacaaaattcataatcatttttatctggtgtaaagccattattgatcattactgtcagtgtgttctggtaataggtaatctttgctcggacaggatagggtttgttgcggaagtccctctggcaacttgccaaagcttgactagccccgtcattttgatggtcataatggatttgtccattgttgcctataattactatagcaggattatttttctttccatcattgtcaaaagaatcaaaaaatattccaacaccattccacagatcagctgatccaaacacagggccctccaagccttgattttctgcataccaaattgctaggccatcagctccaattcgacctcttccagtcactcgaaatgtcacctcaacttcccagttctcaaaggccgcttttgtctttgtccacactgagcctctttggctttttaaagatggtgctactcgaatttgatctgaacttggaatagcattc

SEQ ID NO: 314317 - DNA, 664 bp, Homo Sapiens
atccaattcttgttgaaagtgctcaaattcctcctgatacttttctttttccttttccgaaatttctttatctggtgtgggcggctcttttccaggttcagtcaactggaaagtcagaaaagaaaggacatcatggtcatctgcaagacctccagttgcagcagatattccaaaatgcccttgtgcagggataatcatattttccactttggcacaaaattcataatcatttttatctggtgtaaagccattattgatcattaccagactgagatgtacagagaggtgaaaaccaataagtagcagtcacgtgtccagccagtctcttcaaaacgtgtacctgaaaacactagctcccatgatcactcatagacattaggtgaaaaaaaattccatagttaagtcagtctgggaaatgtgaggtctaataaaggtttatttatcctttctttataaaggatccttcataaagaaatctttaatgtgctaatatgcagagtagtgaccaatctcatcaattgtggaaccctttctggggagtacgttttgcaaggctattgttttggagtgctgccagggctcacagctcacggtgttgggtcacacggacagtctgcacccaccatgcttgatgtctgggctttgctacatgcaggtaagcaag

SEQ ID NO: 314318 - DNA, 617 bp, Homo Sapiens
agggggggctctccaccacactgtccttcacaagcaaaactgctatgatccccaagtgacttctgtgctcagagctcacaccaagccacatgcactctcctcagagaacacctcctccgggaagccctccaccgtcagcacttagagcatcaggctccggggcagggaccacatcctcattggccctgcaaatctgtggcccggcgcagtgctgaaccccacgtaggtcccccaaaaagcatgtcaaatgagaagtatgatccagctgttggttcatttgcccggcatcactggggagaacacctccccttgggcgcccaggtaactgaagcttccactttgaagtgtcaggttcccgcttctgaccatctttaccagaaacttcaacataaactgcaagatacggacctcttcctaatgctcttctgatgacacactgccccagcggtggtgctgtttccctcatactacgtggcctacagctttgagggactgtggtgttgtttgtactcggtttatgggctttactctgttctggtcgctccctttggtgtgacactgacacttgccactttgacttatcggcctccctaccaacgtctaatctaggaaattag

SEQ ID NO: 314319 - DNA, 637 bp, Homo Sapiens
aacaaaactgctatgatccccaagtgacctgtgctcagagctcacaccaagccacatgacaccaagtctctctgttaagaggctcttcagcaccactctgccgggtaccactctcctcagagaccacctcctcggggaagccctccaccctcagcatttagagcatcaggctccggggcagggaccacatcctcattggccctgcaaatctgtggcccggcgcagtgctgaaccccacgtaggtcccccaaaaagcatgtcaaatgagaagtatgatccagctgttggttcatttgcccggcatcactggggagaacacctccccttgggcgcccaggtaactgaagcttccactttgaagtgtcaggttcccgcttctgaccatctttaccagaaacttcaacataaactgcaagatacggacctcttcctaatgctcttctgatgacacactgccccagcggtggtgctgtttccctcatactacgtggcctacagctttgagggactgtggtgttgtttgtttttactcggtttatgggctttactctgttctggtcgctccctttggtgtgacactgacacttgccactttgacttatcggcctccctaccaacgtctaatctaggaaattag

SEQ ID NO: 314320 - DNA, 626 bp, Homo Sapiens
  misc_feature (193)..(193): n is a, c, g, or t
gcagcgggggcctctatccccaacactgtccctcacaaacaaaactgctatgatcccaaagtgacttctgtgttcagagctcacaccaagccacatgacacccagtctctctgctcagaggctcatcagcaccactctgccgggtacttatcactctcctcagagaacacctcctccggaaagccctccaccntcagcacttagagcatcaggctccggggcagggaccacatcctcattggccctgcaaatctgtggcccggcgcagtgctgaaccccacgtaggtcccccaaaaagcatgtcaaatgagaagtatgatccagctgttggttcatttgcccggcatcactggggagaacacctccccttgggcgcccaggtaactgaagcttccactttgaagtgtcaggttcccgcttctgaccatctttaccagaaacttcaacataaactgcaagatacggacctcttcctaatgctcttctgatgacacactgccccagcggtggtgctgttactcggtttatgggctttactctgttctggtcgctccctttggtgtgacactgacacttgccactttgacttatcggcctccctaccaacgtctaatctaggaaattag

SEQ ID NO: 314321 - DNA, 1744 bp, Homo Sapiens
  misc_feature (12)..(12): n is a, c, g, or t
  misc_feature (42)..(42): n is a, c, g, or t
  misc_feature (95)..(95): n is a, c, g, or t
  misc_feature (1221)..(1221): n is a, c, g, or t
agccttaatttnaacggtgggaagttaaacctaaacccctgnacctgccctaatgccggacaccctatatgaaattaccgaatatatatatatanttaatttttgaactatttttggacccatctttattcccacaggaaaattgtgatttcctgcaaaagcagctgcaaagtacccacacatagcagaaagacagaaatttatactggggggttggaagatatggctactgagtctgtaattccatttggaggttcaaaaaaccatttttacattgctattatttgtacagaccaagggacctaaattttgaaacagctagacagtgatataaacaaacatttatctctgggggtagaaaattaattataatacaagaatgaaaatgggcaaacagtatggaaggcacccacacctcctagcaccctttggttttctgatggagttctcacttcacacatcagtgcattggattgcagaaaatattgatattttatttcatcaaaagtgccatttggtatgccactattgaaagcttatcgctgtctttttctccttcagcaagtagaggtcaatgaagcagggtgtgttagttacgcaaattcctataaggcactttacggttttcatattggacagtgaggtacacaggatatatttctagggttcgttgctgttaacaaaaagaagaagaagtagcaccatgttgtgacattagctgagtcaggcttcattatgttcttctcatacagacttggcagcggctgacgtgcgtgcgcagctcccctgccttcaaggtggacggcgtaggcttcttgaacatctcgctcctctctatggtggcgagccaaaagctgtaagcgtttgcgtagtaattgcaggtcccacggccgtgacactcgatgaatggcgcacttctaaactcctccaggcaggagccgggggacgccagggcttggccagagccttctgcaccagcgctggtgtgcatcacaaaagagtagccgatccacagcgaggaccacccgctggggcacggtgggatctgaatggtctgtctgtgcacggccatcacccccgtgatgggtgccattgacatgggcatgggctcaggggtggacagccagtacgagtagtcatttcgtgatgcaaagttgcacacgttgttaatattgcagaacagaaagggcattgtgctgatcttgcgcaggcagctcccgnccgtgctcaagtcctgtccatgggcccgttcattgccttgcacgtagagcagagagtacccgtggtacagaattatggtcccagaaggactctgtgggtcatctattgtttgactatgcctggtcacaagtaagccgtgatcgacagatagggtgcatgggggccccatggatcctggcaacccatcggggcctggtgtacctggaaatcctcttggtccagtaggcccggcaggtcccatctctcctttctggccaggggcaccgtcaaacccaggaatacctgaaggtccaggtatacccaccaatcctgtaacaccttgctggcctttcgggcctggcagtccctgaagccctttcagccctggggggccctcaggaccagggagcccgggctcccctttgatgatgtcgtaaggacctggtgggccaggaggacgcggaagacctttagctcccgggacgccttgatcgccttgatcacctttaattccctggaggccaggaagaccggaccgtgaact

SEQ ID NO: 314322 - DNA, 1028 bp, Homo Sapiens
  misc_feature (756)..(769): n is a, c, g, or t
tttaaggtatgcaaagcttacaaatttattagcagcttgtgcagtaagtttcttttaatgcgtctgtggcaatactagcaacaaattaataaaagcttaatttttatacaaatagttttattacaaatttgaattcttaagaaatacacatttaaagaaattacataaaaggccttagtagtcttagaaatgttttggagacttttagtgaaatgtcatttcaggcctagtggtccgaatctgccctcctgcggtccatgcgatgccctgctgaggtctgtgaacacagctcatgagaaaccacggaaatggcccgaatgtgcttacgtgtgaaaatactgatactgtgattcaacagagctgtttttcaagccaggatgcagaatgaggaatactaatgaaatgacggcctttaaggttgttgcttttgaagtcaagtcattcagtttgtgattagtgtttaaaaccctgaaaatatttaatacagaataaaaacaataagctcaaagtacatgtttcactataatagacaccatattcatgaacctgggtttggttttggcaacacataatttttggtttagaagtgaacaatgaaaacggatgtttcacattcaatatcctagtctttaaaaacctatgttaaaggacagcacagtctttcaaaggaagaaaactatgtaagctttattttaacagtggaagttaaactaaaccttgatctgcctaattgctgacatctatataaattactannnnnnnnnnnnnnttaatttttgactatttttggaccatctttattccacaggaaaattgtgatttctgcaaaagcagctgcaaagtaccacacatagcagaaagacagaaatttatactggggggttggaagatatggctactgagtctgtaattccatttggaggttcaaaaaaccatttttacattgctattatttgtacagaccaagggacctaaattttgaaacagctagacagtgatataaacaaacatttatctctgggggtaga

SEQ ID NO: 314323 - DNA, 363 bp, Homo Sapiens
  misc_feature (353)..(353): n is a, c, g, or t
acttgggcacggcggcagctgctgcgcaaggttcagcacaatgcccttcctgttctgcaatattaacaacgtgtgcaactttgcatcacgaaatgactactcgtactggctgtccacccctgagcccatgcccatgtcaatggcacccatcacgggggaaaacataagaccatttattagtaggtgtgctgtgtgtgaggcgcctgccatggtgatggccgtgcacagccagaccatttcggatcccaccgtgccccagcggttgggtccttcgctgtgggatcggctgactcttttgtggatggcacaccagcggtgggttgcaggaaggctgtgggccaagtcctggggtncccccgggtt

SEQ ID NO: 314324 - DNA, 1534 bp, Homo Sapiens
  misc_feature (1186)..(1186): n is a, c, g, or t
  misc_feature (1386)..(1386): n is a, c, g, or t
cagattatgagcttacagaaagcctggcctacattttactctttttggatttcttcctcatcaagagactgctgcggtgcctgtcatgtgacagcggcatggacatatgccccaggctttcctgctggggtccatccatgagcctgcaggtgccctcatggagccccagccctgccctggaagcttggctgagagcttcctggaggaggagcttcggctcaatgctgagctgagccagctgcagttttcggagcctgtgggcatcatctacaatcccgtggagtatgcatgggagccacatcgcaactacgtgactcgctactgccagggccccaaggaagtactcttcctgggcatgaaccctggaccttttggcatggcccagactggggtgccctttggggaagtaagcatggtccgggactggttgggcattgtggggcctgtgctgacccctccccaagagcatcctaaacgaccagtgctgggactggagtgcccacagtcagaagtgagtggtgcccgattctggggctttttccggaacctctgtggacagcctgaggtcttcttccatcactgttttgtccacaatctatgccctctgcttttcctggctcccagcgggcgcaaccttactcctgctgagctgcctgccaagcagcgagaacagcttcttgggatctgtgatgcagccctctgccggcaggtgcagctgctgggggtgcggctggtggtgggagttgggcgactggcagagcagcgggcacgacgggctctggcaggcctgatgccagaggtccaggtggaagggctcctgcatccctctccccgtaacccacaggccaacaagggctgggaggcagtggccaaggaaagattgaatgagctggggctgctgccacttgctgttgaaatgagtgcccttggggccttgcatgggacacattcaagacctcgaagtcattcttggccaatctgatgacaacacatctgctggactggagcaaaaggtccttctgtgcaccctggtcgctgggacacgtattctttgatctgttgaactgtcttgcaacctgccatggtagttttgacactactcctgtttgccctcctgattcctgctttgtttaccttttaacattgccccctttcatgggaccccactttgtaagggaatctgcanaaggtgtgcttttgcactgtgcagactgctctacctcgagttgtttccttgggagacttttattcagctgagagtgccctagacagtaacttctaaggtcacgtttactatttcagaggaaatatcttgccaggatacctacccatccttatagaacagttgcctttagctgacccctttcctcacagggaccaagacanaagcatgggacatggaattaagagtgaacttcttatgggaggctgcagctggatcagaggaaaaatccagtgtgacagagtgcaagtcagaagacctggcttttcatcccagctttgaaacttggaactttttgattgacaaattaat

SEQ ID NO: 314325 - DNA, 643 bp, Homo Sapiens
tttttacagatgatgagcctgaggcatagagaggtttattaatttgtcaatcaaaaagttccaagtttcaaagctgggatgaaaagccaggtcttctgacttgcactctgtcacactggatttttcctctgatccagctgcagcctcccataagaagttcactcttaatttcatgtcccatgctttgtcttggtccttctgactgtgggcactccagtcccagcactggtcgtttaggatgctcttggggaggggtcagcacaggccccacaatgcccaaccagtcccggaccatgcttacttccccaaagggcaccccagtctgggccatgccaaaaggtccagggttcatgcccaggaagagtacttccttggggccctggcagtagcgagtcacgtagttgcgatgtggctcccatgcatactccacgggattgtagatgatgcccacaggctccgaaaactgcagctggctcagctcagcattgagccgaagctcctcctccaggaagctctcagccaagcttccagggcagggctggggctccatgagggcacctgcaggctcatggatggaccccagcaggaaagcctggggcatatgtccatgccgctgtcacctggtccagctccccatcccccc

SEQ ID NO: 314326 - DNA, 375 bp, Homo Sapiens
  misc_feature (174)..(174): n is a, c, g, or t
tggaaaaatggcccaatctgccagtttaggcttaccagcatataatttttaatatctttacttctatgatcccatatcaaagaactcttttctattatgtttaatcaattgcctgcaaatagatttttctttgtaacaatttgttctgcagaaggctgtctttcacttttcctnttcttttgcttctttctgtctttgcttctcttttgtctggagaaatcacttagactctgtgtgcctcttctacattgcattctgctctgctatggttacctgctaggctggcttctttggactccctatatgaatgatgatgtgcctattacttgcagcatatgattacctctttgatggtctcattagcctgccttcttg

SEQ ID NO: 314327 - DNA, 1450 bp, Homo Sapiens
  misc_feature (1191)..(1234): n is a, c, g, or t
ccttctactcatttctgtttccacctaccctgactcaccgtatttccagtcttctacccctgcagttatccctagtcccagcaaagtcatttctttcaaaagagacatcatgtctgaaaataattactggtagtctaatatgagccagagtaaacagctcctcatggtcaatgaacatgttcaggaagcgatcaccttgatgcttgaacccaaccccagacagtggacaattctactttgaaatatccgtgaatatttactgtgggatccaatttaaacttctttcttctctagcctttaaattacacaactttgaactgacacggatctcttacaaagaacaatgcggcactgaaggaagagatgattcctttactcaaacctgcaggaatcagcctattaacaggcaggggaaacggtactttccaatgaatggtaactgatccaggcacgttatcacacttcctagtcatctccacctttcctgtattgcctgtggcttgttgtttaagattaagaatcaaagagattaagaagtatcacttcaagtcttgctctgctcacttctatgtttgcagtcaaattattccttatgttggtgacctaaagagaattactttcattcatttcatttcccccgtatcagatggaagtgagaaacctctgagaaaatgaaaacatccttaaccactatctttcccttttatttgattattttatgtcagaaatttgcaaaagtttttttctcctctttctcttccttgttgcttaactttttaattcatgccatatgcagatatccaattatgtgcctcctgtgaataaaccacgtcttggtcactgtcatattttgaaccatctcatcagagatgaataatatctttttaccagagagagaacgaatgttagccacatgcccaagttaacaaagaaaaaatgttctcaaggttgtccttttgggttaaatctggcccttccttggcaaaagcaaaaattctccctgtgagagctcaacatctcaaatacaaccacaggaaaaatggcccaatctgccagtttaggcttaccagcatataatttttaatatctttacttctatcatcccaaatcaaagaactcttctctattatgtttaatcaattgcaagcaaatagatttttctttgtaacaatttgttctgcagaaggctgnnnnnnnnnnnnnnnnnnnnnnnnnnnnnnnnnnnnnnnnnnnncttttgtctggagaaatcacttagactctgtgtgcctcttctacattgcattctgctctgctatgttacctgctaggctggcttctttggactccctatatgattgatgatgtgaaaacctaaattacttgcagcatagtattacttctttgatgttctcattagcataatgttatttttgaaaaggaaagatactatcacataagttttcctcat

SEQ ID NO: 314328 - DNA, 962 bp, Homo Sapiens
  misc_feature (777)..(777): n is a, c, g, or t
  misc_feature (779)..(779): n is a, c, g, or t
  misc_feature (781)..(781): n is a, c, g, or t
  misc_feature (807)..(855): n is a, c, g, or t
gttttcacagtacaactcaacactttattccattgtgattggtatacatgtaagattgagacatcaagagactaaaaatcagtgcagaacttctctgaactaaagggccgtgaaaggcatgattggttttggcacacagagtggataaccatacattggctggaatgaggtggtcaggaaaataaaatgcacaaatctaacaccatgttgaaatcatgtctgagttctggagaaagttaaagtgtaaataattacaaagactgacatgcaactctttaccttacattattcatctacagactatttttctcccttagagatgaggagatggccttagtaatctgttcagagtagctgaaaagaccaatcaatacacattagaaagatctgcctgatttctatagcaattcattatagctgaagaaataatgctaaataatgtattttctctatatcatcctttaactaaattgaatcacatcacccaggtaattctgacttaacttttacttagttaaatataatttctcctgtcttttaatgtcaaaaagccagtttccgttagtttatccattggtgtatatcacaacagatgcggaaaaacttatgtgatagtatctttccttttcaaaaataacattatgctaatgagaacatcaaagaagtaatactatgctgcaagtaatttaggttttcacatcatcaatcatatagggagtccaaagaagccagcctagcaggtaacatagcagagcagaatgcaatgtagaagaggcncncnggtctctagagtgatttctccagacnnnnnnnnnnnnnnnnnnnnnnnnnnnnnnnnnnnnnnnnnnnnnnnnncagccttctgcagaacaaattgttacaaagaaaaatctatttgcttgcaattgattaaacataatagagaagagttctttgatttgggatgatagaagtaaagatat

SEQ ID NO: 314329 - DNA, 1298 bp, Homo Sapiens
tgataaaatcacaattaaatggcatgtatatacatgaataccaaagctattatgtagaaataaaatcaaaacacttcagacccaagaagaaatcagagacctcctagtctattgccccagtgtaaaaattaaaaaactctggagtaatcattgccattaagcattagtatgagggaaataattttaactctgaggaaaaaaaatgattttttaacattttcaattttatatcaaattagatactggatcacatatatcataaaattaataaatcaagcagatttttctactccataattcatgtcacatttaatagtctcttcacggattctttgtactgagaaatggaattttcattttcctcctcatttttaagactaacaacagactttttgtactcttcaatttctttagtaccaaggagctcttctttatttatttccatatttttctcagcagctttcatctggagaagcgtttccaggatatttctttctgatgagctattttcccatatatactcttccatgtctgcttcagtcttacttttttcccattcttcagtattccaagactcatggtataacactgttagtagatacactgcataatcgtaattctgcctccttaaagggcacctatctgttttgatggtaagcacatctgtggtcttgcagtatcgctctcctacaagtttaattaatttcttctttgcgtgatcatctaaattcaaactggaaagctttactcttaagactactactcgtgctctggggttccgaacagatggtcctgatgaaacataatcagtgctgtcaatttcaattggaaaatgcttctcacatttctcgtcactgtccagtgcggctggccactcagtgcaaaaatctttaagggcttcacagtgctttttaattgctacaggagtcaaatgcagaaaattgggaatctttaaaagttctagatttccctcctttgccatgggcacgcccttttttactggataacccattcgaacaggaagaggtactgcagagggtttaaatggtgctgcaactgggtaaacactaggccagtcctggtcaacagccattttctctgtcctaggaggtagtgcctttcttcttggtggcctttcatttccgggtgttctttccggcaggctaggtgtcgggaccggagtggccgagtagacggcagtggagaatgcacgcagagtccttgccctcgactgcagagacagccatgctgggagcgcggcggccgccatggctgcgaggacggcaagccggaggccc

SEQ ID NO: 314330 - DNA, 601 bp, Homo Sapiens
aaaccagcaagtttaccatgatccctgtaaacgccatggttctcaaatccagatgcttcttccatctgccaaagtgtgttttggatacagagcacatcgtggcttctggggtcacactcagcttaggctgtgggtccacagagcactcatctggctgggctatggtggtggtggctctactcaagaagcaaagcagttaccagcacattcaaacagtgtattgaacatcttttaaatatcaaagtgagaaacaagaaggcaacataataatgttatcagaaagatgttaggaagtaaggacagctgtgtaaagcttgaggctgaaaagtagcttgccagcttcatttctttggtttcttgggtagtgggcgccggaacagcaagatgtgaggttctggttcatggatcatataatggacccatccctgactctgctgaacgccaagattcctccattcagattcagacatcagatgggttttagggaccagcttggctatgtccttgggcagcatgacatgtctttttcttagagtctcatctcaggctctgccctctaggaagctttccccaacattccctcttccgtttttcctctcag

SEQ ID NO: 314331 - DNA, 1324 bp, Homo Sapiens
  misc_feature (109)..(117): n is a, c, g, or t
  misc_feature (158)..(166): n is a, c, g, or t
  misc_feature (268)..(276): n is a, c, g, or t
  misc_feature (294)..(343): n is a, c, g, or t
  misc_feature (387)..(401): n is a, c, g, or t
  misc_feature (411)..(549): n is a, c, g, or t
cgcccccctgttttcccccggggggaaaatttttatcccaaagggcccaaggggggtataaccccgtggggattaggggtccaacaccgccgttgggaggggttctcannnnnnnnnaaaagtttaaaaaattcccacccttttccaaaaaggggccnnnnnnnnnaaaatttataaaagaactcccggggcaccccggttataaaccccaaaaaggccccaagaccccctttgggtttttttaaaaccctggggttcccccgggggnnnnnnnnnggggggaaatcaaccccnnnnnnnnnnnnnnnnnnnnnnnnnnnnnnnnnnnnnnnnnnnnnnnnnnctttgggggcccccgcccaaaaaaaaggttttaaaaattttttnnnnnnnnnnnnnnncgcaaaaaannnnnnnnnnnnnnnnnnnnnnnnnnnnnnnnnnnnnnnnnnnnnnnnnnnnnnnnnnnnnnnnnnnnnnnnnnnnnnnnnnnnnnnnnnnnnnnnnnnnnnnnnnnnnnnnnnnnnnnnnnnnnnnnnnnnnnnnnnnataaaaacttcctctttaatcaaggcttttaacatgaacagatttcttgaataaaatggaaagtttccagtacactgaaacataaatccgcaagtcaccacacatacaacacccggcaggaaaaaacaaaaaccagcaagtttacatgatccctgtaacagccatggtctcaaactcagatgcttcctccatctgccaagtgtgttctggatacagagcacatcgtggcttctggggtcacactcagcttaggctgtgggtccacagagcactcatctggctgggctatggtggtggtggctctactcaagaagcaaagcagttaccagcacattcaaacagtgtattgaacatcttttaaatatcaaagtgagaaacaagaaggcaacataataatgttatcagaaagatgttaggaagtaaggacagctgtgtaaagcttgaggctgaaaagtagcttgccagcttcatttctttggtttcttgggtagtgggcgccggaacagcaagatgtgaggttctggttcatggatcatataatggacccatccctgactctgctgaacgccaagattcctccattcagattcagacatcagatgggttttagggaccagcttggctatgtccttgggcagcatgacatgtcgatactcaaactcctcgtcgtcgtatttgtccgaatagtaaatttgtttgtgcgacatgatcgctcggtttgctagccttcagccccgcgccgccaacctccaagcaactcccaacagcacgcccc

SEQ ID NO: 314332 - DNA, 799 bp, Homo Sapiens; identical to SEQ ID NO: 126906

SEQ ID NO: 314333 - DNA, 814 bp, Homo Sapiens
taagattataaaaacttcctctttaatcaaggcttttaacatgaacagatttcttgaataaaatggaaagtttccagtacactgaaacataaatccgcaagtcaccacacatacaacacccggcaggaaaaaacaaaaacagcaagtttacatgatccctgtaacagccatggtctcaaactcagatgcttcctccatctgccaagtgtgttctggatacagagcacatcgtggcttctggggtcacactcagcttaggctgtgggtccacagagcactcatctggctgggctatggtggtggtggctctactcaagaagcaaagcagttaccagcacattcaaacagtgtattgaacatcttttaaatatcaaagtgagaaacaagaaggcaacataataatgttatcagaaagatgttaggaagtaaggacagctgtgtaaagcttgaggctgaaaagtagcttgccagcttcatttctttggtttcttgggtagtgggcgccggaacagcaagatgtgaggttctggttcatggatcatataatggacccatccctgactctgctgaacgccaagattcctccattcagattcagacatcagatgggttttagggaccagcttggctatgtccttgggcagcatgacatgtcgatactcaaactcctcgtcgtcgtatttgtccgaatagtaaatttgtttgtgcgacatgatcgctcggtttgctagccttcagccccgcgccgccaacctccaagcaactcccaacagcacgcgctcccacccactttggcctcgctttcaaacacccc

SEQ ID NO: 314334 - DNA, 456 bp, Homo Sapiens
cacggcacaaagcggctgatcctgtgttgtgcacagagtcaaggaaacttttcttttaagctattcacagcttttaccaagtatactcctatgaacgaaatttggagcttatttgtttctctcaacctgatttctccaaaatttggaacccactgtgtaagtattcgtgacttgcgccaatatagttattcgcataagtgaaataagatatcgtgtttttattgtgacacaggaccacaattgaagaaccgtggttattttactaagtctttgcctggaatggtgtcgcttctcctttaaggtattaaccttgattatatagagccatataaaacaccccttggggaaccgtgcgcctacatacctgtgtctgcacgagtccctgacacgtgtgtctcctgacctgtggtaagtaaagtatgtcactttctcacaggcccaagagccataagatct

SEQ ID NO: 314335 - DNA, 430 bp, Homo Sapiens
ccaatcaccatatatgaatgcctacataagtctgagaatcccaaaagacacagacacagacccaatcgaattcctttcttcttggagcttctgcacagcagaagaacctgtcaacagagtgcacagccaccttacagaataggagaaaccgtgttgcaccaatgcatgtgacaaagttctaatgtccaccactgataatgaccttaaccaaatttccaagaaaaaaaattctcattagaaatgtggcgcaaaggctatacacagacacttcaaaagaagacacacatgcggccaccaagcatatgaaaaaaagcccaatatcgtgtgatcattagagaatatgcatatcaaacccacatatgcgcataccatctcatcacgagtcagtatggttattattaaagagtccacgccgcgcatggtggctcac

SEQ ID NO: 314336 - DNA, 314 bp, Homo Sapiens
gacttttcaacattttattcttatatttgtacagctatattttacaacgcggtaatgcagtttagacacagccaaaccctgtgtccggagtagttataacacaagcatgacgcagaatgggatgagacaaacattcccaaagagagtttagttagtaacaacttcaagtccctgtgtctgcctacacttcaaaaagggatggtgcacgctcgcccatcattgaaaacttccgtgaaaaaaggcaccgtgaggacacgttgtacgggtatatacaaactggaaactagaacttacacatttttccttctgcagag

SEQ ID NO: 314337 - DNA, 415 bp, Homo Sapiens
cctccaccctcacccccctttttgactcaaattttattgtgagttggtgtatagttaggaatttgaagagcactttttttgtttattttatcttttcggttactatgcatactatgtgtgtcaactcttaaacctgcagggggtcattttggccatcaactagttttagggctttcgcctcctaaagaatatgaattatggttgtaatttttacagtttaacaagatggcatatgaagaatctttatttcattatgacttcctagtgttctcttcttctagttgtccatatgtagtatgtataactatagaccttgatgatttaagttgagcacagtttagtgtcaggttcctttcagtgatgcatgagattggctatatgatctagtgagtgttatttagttaattcaccagac

SEQ ID NO: 314338 - DNA, 1164 bp, Homo Sapiens
acatgcttttttgtttcagtagcaggcaggagttcagagtaaaaaaggagtttatatatttataaatgccaaataaataccagaggccacccaacgccccctcccagacagggctgtctcccccagccctaggcttctagggtgtgagacatcttggccccaagctatagcccaagagcagctgtcagtctgtgctaccagggaactgagtgaggatgatctgtccagccaagtttcactccccctgtgtgaggggcccccatagccacaggcctgggtccctgtataggaccctaagggtgaaagactcagggggagaaggtggccatctcgagtgagacccgctgccacagctccttggtctgtttgctgcgcttgaggttctgtaggatgtcgttgaactgcatcatgcccatgggcgtcaggcagaaggcgctgcgggcactccggatcgcattcacaaagtcgtcgtagtccgcaggagtcaggtgaatcaagcggtggtggatgtactgcatgtatgcctgctggcagcgctgcaccagttggtggaaggccggggcacgcaggtggttgtgggcatgagcgggactcagccgctgcagcgtcttccatgacgatctcccagctttgctgccagccccagcaaccatttgacatcatcagtgtaggggggggagcgggagaagttgttggggtgatcgttgtgtgcccggcgacccagcatctccagtgccagcattccgacacggtaggcagcatgcaggtggtgcaggctgtggggattgactggctgactgtgtgtctcctcctcgggcggtggaaaacctccgctcaccagagggctgggctgtgtggtcagggcaggcagtgaggcaccttggatggctggaaacgtggatgctggatggacactgctcaaggccacactggtgggcagtggaagccctggctctgtgtggtagggatgtactgtgatgggtgccatggaaggaacggggaaagacacagcagtggcagcaagtgagggaggagtcactgaataagggtactgagcccctaggaatgcaggatgcacaccctgtgggtatgcagagctgggcacagggaagacggcaggccggggcatgtgaggcatggggtgggcagggtgagctgggtgag

SEQ ID NO: 314339 - DNA, 664 bp, Homo Sapiens
  misc_feature (18)..(18): n is a, c, g, or t
acatatttaatcactttnaatttcaagtccctctacacaactgccatttccatacagtttgtacagaatgtctatttttggtacagctcagtactttcgtctgtcctcttgataccctcctacacatctgcaacttgatccagataatgcagcagacttttgtctagccaattagtggtatttggcagtgttataggaggcacataatagctgtcacctctcttaggtgatcttagcagctgttcatgctaagtgtccgtatccattcattgggaattgcaaaatggtgtcattctatcattcatttttcatttattacttggaatactttgtgatggttaatactgtcaacttgattggattgaaggatgcaaagtactgttcctgggtgtgtctgtgagggtgttgccaaaggagattaatattttagtcagtggactaggagaggcagatacaccctcaaacccggtgggtaccatctaatcagtgggcaccatctaatcacttgccagtatggctagaacaaagcaggcaggagaagatggaagagcagacttgctgagtcttctggccttcatctttttccgtgctggaagcttcctgccctcgaacataaactccaagttcttcaacttttggactgttagaccagtggtttctcgtg

SEQ ID NO: 314340 - DNA, 781 bp, Homo Sapiens
  misc_feature (237)..(237): n is a, c, g, or t
atttattgtttcatagttcttgtattagtcagggttctctagtggggcagaactaataggatagatgtatatgtgaaagggagttcattaaggagaattgactcacactgtcacaaggtgaagtccctcagtaggctttctgcaagctgaggagccaggaagccagttcgagtccccaagcttcaaaagtagggaagctgactgtgcattcttcagtctgtggccaaaggtccaagnagcccctggcaaatcactggtgtaggtccaagagtccaaaagctgaggaacttggagtctgatgttcaagggcagaaagcatccagcatgggagaaagatgaaggctgggagactcagcaagtctgccttttccatcttcttctgcctgctttattctagctttgctggtagctgattagatggtgcccacccagattgagggtgggtctgcctctcccagtccactgactcaaatgttaatctcctttggcaacaccctcacagacacacccaggaacaatactttgcatccttcaatccaatcaagttgacactcaatattaaccatcacactccgggagctgagaagagaatggagtggcttggtgggtcctggctacagctacaagactgatgcctgattaaagcaccgggaaggtggcagaacggagagagagcgaaagacaaacccaagggtcattccagaggcagatgatgggaaggcgaggactcggattcccaatggactccagggagcccaggaacagagggaccatggacaca

SEQ ID NO: 314341 - DNA, 181 bp, Homo Sapiens
agaagttagggagtgctaatacaacatctggatttgttatttatttatatggatagccatgctgtacttgctaagaccacaagaataggctcagagagaggggaaagtttgtgtaaattatacattgaattaagggtcaatctagtctgatgactccatattcagagacagggtgttcctt

SEQ ID NO: 314342 - DNA, 1565 bp, Homo Sapiens
tggaggggcttttcatcctcttttgttaaaaacagactagcaccactgtgacgcgtgccacgagacaccaagacggcccagtcacagaggaaaaacccgaacacgacacagaactgaggagagtccaggcctgggctggtgggggccacacccgcgggccctggttgctgggaggcatggggctcaggcctgggcgcctcgggccggggtctccgggcctcacttggccggccgcgtgatgaagcgcgtggagaagtcgaacaggtcccgattgatcttgcgcaggttgcgcacctcgtcctccagctccgtcacacggacgcgcactggtcctggccgccgagcacgctcttctccatggtgctgcacaggacggcctgcagctgctccgtgcggtccaggtagctgggctccgagccctgctggtggaggcccaggcgcagagtgaggcccccgtggcgcggctcgtccccgtgctcggcgcccagcaggtgcttgttgaagtggggcagcggcaggctgggcctgaagtctgagctcagcatgctgacgggcgccagcaggatggcggcattggtgactgggcctttgagggccaccgtccggatgcactgcttgctctgcacgtcccagaggcgcacggtctcgtcgtgggagcctgagagcagcacgctgccgtcagtggacactgacaggcaagtcacctggttcctgtgccctttgaagaccttcccggcgtcctgctctgggtggaagctcctctccctctgtccgggccaggtgaagaggtcgacctggaagatggagccctcactgcccccgcagaacatatggtgctcagccaggtccatggtcactgccatgatggacacgtcaaagaggacggagagcagcagctcccccgaggagacctcccatagcttcaccgtctggtccagtgaggaggtggccacccgggccagggggcccccaaagccgcagtgcaggtccgtgatggggagcgtgtggtgagaccagacgtgcctgggcgccggaatcctggaggggtcggcctgcagcacgctgcagaggctccaaaccagcaccaggcagtccttgccccctgagatgaagtggctgctgtcccctgtgaactgaaggcaggagacgtcctggtagtgtcgactcaggatgaccagaaggttcccggtggagacctcccacaggtggatgctttctgcaactcctgccaggacgtagagaccattgggtgatgcagtcagacaggtgacaggcccggggcacatgatcttctgctggagctggtccttccgctggagctcccaggcgctgatgtagttcttgcccagctgcgccgccagcagatactcgccattgagcagcgccaggccgcggggtcccgcctggccgccgcggtaggtgagcaggttggcgcccgagtgaagttcccacacgatgcagctccacatcggggccgccgagtccgtacacacggccacctccatgggcgccgccatcttgcccgacgcgtggtcgacgatatcccggaattccggaccgtacca

SEQ ID NO: 314343 - DNA, 1875 bp, Homo Sapiens
  misc_feature (1023)..(1023): n is a, c, g, or t
  misc_feature (1564)..(1625): n is a, c, g, or t
  misc_feature (1646)..(1781): n is a, c, g, or t
ttttaggggcaacatgccatttattttttgtcatcttgaactaaaagtacagctgcaagcaagcttgctataggacaagcttcagcttgggaaacatcaactatctgcactcaggacttacctatttccagaggaatatcgatggaaggtcaggttaatacttaatttcaggttgtttgctacttttaaatcaatgcagtgtctagttataataaagagtcaaacaatgctttacattgtatatatgttcatagatttcatccaatataaaataaagacagtccttttaaacaaaagatagggaagaggtaaatgtgacactttttccgcttacaaaaagtaatgccttataataaattttaattcaaccatttaggggggtcagctgcagtgaaccttttatttcttcaaaatgctgcttctgccaacagaatttcatgttctcttctttacagatagatagataggaactccttcaattgtaattctgtttgccctagagtaggcacaaaattcagtgcaaccatggcatagtgttcttctggccagttcccacatctccatttcatgatgatcttcttatttgttaactcctttacagtgaagatgctatacagctgctctacagttgtgtcaaacagttccatcatgtgaagagccacagtgggaatccttacacccagtgccactggagatgaggcctgaacctgcagggtattcccactcagttttcttttgacagttaattcctgggttgccatagctttcgttggtaaaatcattcccgttgtaaattctcagtgtcatctacttcattttcctcagaaagattgggtatttcaatcaatcccttgtgcttcactccagattctttaacgatgcctttccagcccagtttgatgttccactcatagaagaaaatcagctttcctttgcggctgctgcacgaagcctccccttccacctgcttcaaactcgttgatctcgccgcggccagcgtcattcttccacaacggatgcccnaccaggagctcctggaactttccctttggacaagctggtggcatcccgctctgtcctgccagggaccagaaagtcgtgaatggaagccccagctgggatccacctgcctgggtgccagggtcacgtccaagcccagcccagatcggcccaagtcctctcaagcagcctcgaaacctgccaacctccaatgtgctcctcaaacctgctttctatcaaattcttttcatcctgctcagttctttaagatattattgtccactatgcaagtagtattctgtcttaaaaacactggcttatttaagggaggaggatctagctagctcgcccactggaaataggcaaagcctaggccacagggaaagtagcagtagtgaactaatcagaatcatgacaataccagctatcaagtgtcttcgcatatacatcgtctaatgtaatcttcccaggcaatattctcactttaggggacagaaacgagctgagagaaatgacatgtccatcgggccaaggctaggacactagaaagtcagatctagctcannnnnnnnnnnnnnnnnnnnnnnnnnnnnnnnnnnnnnnnnnnnnnnnnnnnnnnnnnnnnnagcagcctgaccaacatggtnnnnnnnnnnnnnnnnnnnnnnnnnnnnnnnnnnnnnnnnnnnnnnnnnnnnnnnnnnnnnnnnnnnnnnnnnnnnnnnnnnnnnnnnnnnnnnnnnnnnnnnnnnnnnnnnnnnnnnnnnnnnnnnnnnnnnnnnccatgccctcagagctcctccggaccagccaagtcatgctcctctggggaccggcctcagcatcccctctcgtgccgaattcctcagcccggag

SEQ ID NO: 314344 - DNA, 684 bp, Homo Sapiens
cgagtaggaggccaggatgacggcaaacggcagcagcaggatgaccacgcgggcggcgaacatctggttctcggtagtgtctccgtcgcctccgcaggccagcttgagcaacgccggcagctcacagatgaagtggtccagcaggcggggcgcgcacagcggccgctcagccaggagcgcggtttgcgcaaccgagttggtgaggccgcttagccaggaggcgctggccagcgtgcgacataggcgcggggagacgagccccgcatagcgcagcgggcggcacactgcggccgcgcggtccagagccatcaccgccaggaggacgcattcggccgaacccagagccagcgatgcgcacagctgggccgtgcagtggctgcgcggcagccagagcgctggtccgcgcaggttggccagcagcggcggcaccacgctagtagtgaagcccgcgtctaccaaggccaggtggcagaggaagtagtacatgggcgtgtgcaggcgcgggtcgcgcaccgtcagcagcaccagcgccgagttgcccgtcaaggtcaggaggtagcacaagaggacaagggcgaataggaccggctgcagggaaagccagtcggagaaacccatcatgagaaagcgctcctctgcgctgtagttggcctaaaggaggctcccagaatgtttggaagtcgt

SEQ ID NO: 314345 - DNA, 380 bp, Homo Sapiens
gtagaacactaattgcccatagtcccactcattagtctaggatgtcctctttgccattgctgctgagttctgactacccaagtttccttctcttaaacagttgatatgcataattgcatatattcatggttctgtgcaataattattcaataacagctcttgaacagttaatttgcacagttgcaattgtccagagtcctgtccattaggggactctgtatcctatttgcacgctacaatgtgggctgatcacccaaggactcttcttgtgcattgatgttcataattgtatttgtccacgatcttgtgcactaacccttccactccctttgtattccagcaggggacccttactactcgacctctgtactaggacgttt

SEQ ID NO: 314346 - DNA, 741 bp, Homo Sapiens
  misc_feature (119)..(119): n is a, c, g, or t
  misc_feature (346)..(346): n is a, c, g, or t
cgaagggccagaggccaaccagggaggaaggcaggcggccgtgtccatcctgtcacacaattggcgggaacaggagggagaaacaagccccaagtgccagcccagacacagaaagaggnccatgatggctccttcggtctctgcctcagctggttcactttctttggcccgaagcacatcaaaggctgccgaggtaccgtttgagaaggcaaagcaacgcatgaagaagatgacccaggcatcgtgctcgaagaccacagtcaggtagcggcggggcttaatgttgcacagcagcaagcagtggccaaacaccagcggggccagcaccaggcttggcagccagcgngctgtccttcgcaggccacatgaatacagctgtgaggctccggcccacccagtcaaagatattgaaagtcaagaaacaggacacaggaatgaagtaacgttcccaggtgctgctgcctgcgatgctggacttgacctcaacagtcacggctggaaacatcctcaggatggctttgatagagtggctttcattggtgggctgagagttggagactgaaacctccaaacttggttctcctgctccccgggtccttcaagcttgagctgctggtagtagcggtagaattccaggcggggcaggcccaggtaacagatgatggtcaaaatgataacagcacagtctgtgatacagtagccgaaggcactttctgatagctccgagccactggcaatagc

SEQ ID NO: 314347 - DNA, 1308 bp, Homo Sapiens
  misc_feature (6)..(6): n is a, c, g, or t
  misc_feature (40)..(40): n is a, c, g, or t
  misc_feature (193)..(255): n is a, c, g, or t
gcaccngtttctgtcaaatatatttttaaaaaaggcagtnacgtggcaactgtacagggtgcatgatgggtaagaactgggcatggggagtcgggagggggacatggagagaacacagaggaggaggcgcaggggagaatggagtatatcaggtcaaaccatacaacggtcagacccagctcctagccacccnnnnnnnnnnnnnnnnnnnnnnnnnnnnnnnnnnnnnnnnnnnnnnnnnnnnnnnnnnnnnnncgtgttctccaagcccaaaagcctccactggcctgcacaagcagggatcagtcagagccaagagtggagaaactcaagcaaatgccgaggctacaccccgtccctcgactctgagccccaaaccccacaatgtccccactgtccgtccagaggctccctccccagggcctggagatccgggcccagcacacgccgtggaaagcagaagtcagttagaagaaaaaaccgccagaccactcaggatcacccctggcagaaggaaggggcaggaggcagacagggagggaggcaggcagtccttctgtccatcctttgtcacacaattgcccggaacaggaaggagaaaacagcccccagtgccagacccagacacaggaagaaggccatgatggctcctgcggtctctgcctcagctggcttcactttcttgggcccgaagcacatgcagaggctggcgaggtagccgttggagaaggcaaaggcagccatgaagaagatgaaccaggcatcgtgctcgaagaccacagtcaggtagcggcggggcttaatgttgcacagcagcagcagtggcacaaacaccagccgggccagcaccaggcttggcagccagcggctgtccttcccaggccacatgaatacagctgtgaggctccggcccaaccagtcaaagatattgaaagtcaagaaacaggacacaggaatgaagtaacgttcccaggtgctgctgcctgcgatgctggacttgacctcaacagtcacggctggaaacatcctcaggatggctttgatagagtggctttcattggtgggctgagagttggagactgaaactccagattcctctttgcctgctcttggctcctctcctttgctaatgaggtccaacttggtctcctgctccccgggtccttcaagcttgagctgctggtagtagcggtagaattccaggcggggcaggcccaggtaacagatgatggtcaaaatgataacagcacaggctgtgataaagtagccgaaggcactttctgatagctccgagccactggcaatagc

SEQ ID NO: 314348 - DNA, 696 bp, Homo Sapiens
  misc_feature (198)..(243): n is a, c, g, or t
  misc_feature (567)..(567): n is a, c, g, or t
  misc_feature (578)..(578): n is a, c, g, or t
  misc_feature (581)..(581): n is a, c, g, or t
  misc_feature (593)..(593): n is a, c, g, or t
gtcaaatatatttttaaaaaaggcagtaacgtggcaatgtacagggtgcatgatgggtaagaactgggcatggggagttgggagggggacatggagagaacacagaggaggaggcgcaggggagaatggagtatatcaggtcaaaccatacaacggtcagacccagctcctagccaccccaggacaggcagacagtcnnnnnnnnnnnnnnnnnnnnnnnnnnnnnnnnnnnnnnnnnnnnnngtgttctccaagcccaagagcctccactggcctgcacaagcagggatcagtcagagccaagagtggagaaactcaagcaaatgccgaggctacactcccgtccctcgactctgagccccaaacccacaatgtccccactgtccgtccagaggctccctccccagggcctggagatccgggcccagcacacgccgtggaaagcagaagtcagttagaagaaaaaaccgccagaccactcaggatcacccctggcagaaggaaggggcaggaggcagacagggagggaggcaggcagtccttctgtccattctttgtcacacaatngcccggaacanganggagaaaacagnccccaatgccagacccagacacaggaagaaggccatgatggcttctggcgtctcttgctcagctggcttcactttcttgggcccgaacacatgcagaggctgg

SEQ ID NO: 314349 - DNA, 1460 bp, Homo Sapiens
accctggttctcccttaagggggttactcttgaaaaggggcatggtggagccttctggagtgctggaaatattctacatctcgatctgggcaggtatgtgtatatacatatattcatgaagttgtacacttaagacttgtacttaactatacataaattatgcctcgactttaaaacaaatggtccccttactaccatactttcttgggttccctctctgggtccaggctggactcttacttcccaccaggcctggggccctcttcctccacttacccacatgaatacagctgtgaggctccggcccaaccagtcaaagatattgaaagtcaagaaaccaggccacaggaatgaagtaacgttcccaggtgctgctgcctgcgatgctggacttgacctcaacagtcacggctggaaacatcccaatggtgatagtgaagatgaagcagacagagaaagccaggactgagatatcaggatggcgatagagtggctttcattggtgggctgagagttggagactgaaactccagattcctctttgcctgctcttggctcctctcctttgctaatgaggtccaacttggtctcctgctccccgggtccttcaagcttgagctgctggtagtagcggtagaattccaggcggggcaggcccaggtaacagatgatggtcaaaatgataacagcacaggctgtgataaagtagccgaaggcactttctgatagctccgagccactggcaatagcgcagatcatggccacggaggcaaagaagcctgctaggccctggccactcatgatgggggccgtgtagctggcaggcagaaggccagccagaccaaacaggctgccctgcaggatggcaccaaatgaattaatgagcacgatcttgatcatggtgatgacaaagaagggcagagcatccagctgcaccttcaccaggatggcagtgatcagaaacaccagcaggatggccaccaggctgcccaggatccgtacggactgggggatcctctgatgcaggaaggagttgaggtaggtgaataacagcaggggcagcatggcacatagggtcatgacattgttgaagatggcactgagagagttccgctcaggcaagggtgctgcaggggcggctgacgcctgggcgtccttgctcagttcagcagtgaccaaggacacattctgggacatgtccaggcggtttgtgaaatactgagtggccgtcatgaaaaaattccacgggagcagcgttcccagacccagcatgaagaagataagccagacagctttgtatctgtcctgaggctggtgactggttgtcatggtgatggtgttctcggttttccctggctgacagctccctccctcaggggcctgctgccgcagaagcactgctcccgcgctgagatccgcgcgctctcgctgcagcttccctctcccgccggggcacattc

SEQ ID NO: 314350 - DNA, 379 bp, Homo Sapiens
  misc_feature (356)..(356): n is a, c, g, or t
taaaaaaacaagaaaggtttatttaaatcagagagcctctgaaggcacctggtttctgtcaaatatatttttaaaaaaggcagtaacgtggcaactgtacagggtgcatgatgggtaagaactgggcatggggagttgggagggggacatggagagaacacagaggaggaggcgcaggggagaatggagtatatcaggtcaaaccatacaacggtcagacccagctcctagccaccccagggacagggcagacagtctgacagacacggacgcagacacacagacacatacacagaggcacacgtttttcttccaagccccaggagccctccacttggccttgcacaagcgggggnttcccgttccggggcccagggtt

SEQ ID NO: 314351 - DNA, 375 bp, Homo Sapiens
  misc_feature (201)..(261): n is a, c, g, or t
  misc_feature (355)..(355): n is a, c, g, or t
gaaggcacctggtttctgtcaaatatatttttaaaaaaggcagtaacgtggcaactgtacagggtgcatgatgggtaagaactgggcatggggagttgggagggggacatggagagaacacagaggaggaggcgcaggggagaatggagtatatcaggtcaaaccatacaacggtcagacccagctcctagccaccccagnnnnnnnnnnnnnnnnnnnnnnnnnnnnnnnnnnnnnnnnnnnnnnnnnnnnnnnnnnnnngtgttctccaagcccaagagcctccactggcctgcacaagcagggattcagtcagagccaagagtggagaaactcaagcaaatgccgaggctanaccccgtccctcgactctgg

SEQ ID NO: 314352 - DNA, 400 bp, Homo Sapiens
  misc_feature (267)..(312): n is a, c, g, or t
tttttcatggagaaaaaaacaagaaaggtttatttaaatcagagagcctctgaaggcacctggtttctgtcaaatatatttttaaaaaaggcagtaacgtggcaactgtacagggtgcatgatgggtaagaactgggcatggggagttgggagggggacatggagagaacacagaggaggaggcgcaggggagaatggagtatatcaggtcaaaccatacaacggtcagacccagctcctagccaccccaggacaggcagacagtcnnnnnnnnnnnnnnnnnnnnnnnnnnnnnnnnnnnnnnnnnnnnnngtgttctccaagcccaagagcctccactggcctgcacaagcagggatcagtcagagccaagagtggagaaactcaagcaaatgccgag

SEQ ID NO: 314353 - DNA, 723 bp, Homo Sapiens
  misc_feature (546)..(635): n is a, c, g, or t
cttcttttgtttatgttgtgtattttgtgtatctagatcacgttttagtagcttgtagttccctgttactgggaagcatttcattgcctcccagcttgggagcatccaaagtagaaccatgactgggtcatgaaatgggttaatttggtttctttcattacagggcaaagttctccctgtggactgagaaataaacatattataaaagttacatctgctcatagaatagaaatcagagagtaaaaagtcttgagtgtaataaacaagtgtcttttttccccccagtctaactacgcagacgcaacctgtgctactagatatgcgatctcctcttaccttcaaggaaagaggtcaccatttttgagttgatgcgtatccttcgcctgagagctatctttgatatcatccttttggggtactttttaattacttgctgtatctctgtcgtagctgctgtgtataatagagaaagacacatttgtgggagtatctgcccacacaggcaggctgtacattctggagagaggtcaccacgtgggtgtactnnnnnnnnnnnnnnnnnnnnnnnnnnnnnnnnnnnnnnnnnnnnnnnnnnnnnnnnnnnnnnnnnnnnnnnnnnnnnnnnnnnnnnnnnngccacaccaattgcatgctgcaggctgggtttacctgtgcttcttgccaaccgattataatttggggttccccccctttcttttggtc

SEQ ID NO: 314354 - DNA, 390 bp, Homo Sapiens
  misc_feature (352)..(352): n is a, c, g, or t
ctttatcttgccgttactctacccccagactgccttctgccctgggtcccaccaaatagatcctgtccttcccttagtgaaaatgaggccacctcttggggaacagaagacgccccagtgcagagtgcaaacctggcctggcatgggagcctccttctggccaatcaggcaggccagagaacagcagcggagggccctgtctttcaggcagacctcatggctgagtgagcctcccctgggcccagcaccccacctcagcatggtccgcccatggggggcgctccagagcacagccgttgaccttgtctttgggggcagccatgacccagcctccgcctggggaggggtcttncgagccctgagcccccattccggtccttcctttctttc

SEQ ID NO: 314355 - DNA, 1341 bp, Homo Sapiens
tagtgggcaaggtgaacatcagacgtaaatttgtgtgtttttattttgtcatgctcttgaaaatgtttgaccatttgtagtatacacagtgaaacttgattctctgttgcataaaacactatatttttttggaaatgttactgtccaaaagcctcttccctccctttccttttcctatgtacttccttcatacttgctttactgatcagccaggcaatagccatccaagagctagagcatgaaacagggccctttccaagtaggctctgggtgtcctaagccagcgtgtgccctctggtttagtgagtgtaatagagtccctggcacctttctttgcaaatgaggctaacagaccagactgcagcaagttatcagattcctcaatcagatgcactaggagtgaggagcccagggatggagggggttcctgaagtattgcagttggctgtagtagctgagttcttttccatgttaccgaaactgtagccagttacagtttactcaggaaaacggtagatcaattcagccatggtagtgctggttggcagggattggtaacggagagaactgctcatcagccaaaactcaagccttgccttttaggaggccaccagcagagggacttggtcctccttgtctggtacttgtgtacatgccggtgacctgaggactccactcacactggcgagcaaaaagggagcagtgattctcttttctctccccaccccctgccctttgttaccaacaccagtttcccagggggtacatgagtttctgaatttttaaaaaatgtttttgggtttggtttttctggggactgataagtgctttaagcaatgtccataccccgtcaagactcccagcttagtcattttcttgtatttttctgttcacagtatttgtgtgtgtgcttgttttggcagctcattttggctgtattatatattgagtgatgaattgatcctcttttttccctaagggatatgaattgtttttcttgtgttatattctgcttgtgaatagctggagcaaacctggggctgacacgcgtaagctagggctgcaaagcgagaagagagccggtggagtgtacttgtccctgacaggctgacctacctgagtctctgagcttttcagtccaaatctttgcaaggctcaaaatgccacagaacctctcctcttctccccactccccatggcagggaccggaccatccctacatgccacatgcttgtccttcagcccctcccattggcatgggcaaggacctttggggcatgggggcttaccatggattccttgtgtaatcgcacctgccttttttttcccttccgtcctccc

SEQ ID NO: 314356 - DNA, 475 bp, Homo Sapiens
taaaatggtggtccctaatttcaaaagatttggagtctagagggcagaaattgaagaggttggtgctctgcacgtctgagtccgcccacagactgaataaataagctctgcgtcggcgcccctcacctttctttcatggccagacttttctctggcggttccacagctgtcctgacagtggaattcagacggggtgaccaagcccctagcccacctaccagcgaaatccagcatcagttccagggcagccggacccgcgcccggggacgactgacccttagcccaaggctgcgggggcgtcggagtcctgaagcgcaggcgaggcagggccagcgggacagggagactcaaggccccaggggatctgggcgtttgaagactcaggtcagactctgaggcgcccgtctaaagagaccggttgtcttttccctaattcaggaggccagtctgtcccttggggcgtcgtacctcgtgc

SEQ ID NO: 314357 - DNA, 2172 bp, Homo Sapiens
ttttcttatttcaaatacagttatataattattttaaattacaatatacaatttctgttaaatacaactgttaagggattctgagaacaattataagattattataatatatacaaactaacttctgaaatgacatggttgtttccttcccaccctcctaccctctcaaagagtttttgcatttgctgttcctggttgcaaaaggcaaaagaaaatctaaaaatagtctgtgtgtgtccacgacatgctcgctcctttgagaatctcaaacagccagaaccatcccgtcccacggactgccaggcgccaggacggcttcccggtgcctctttctcgaccattttcacttaaaagcactgtgagtagaattagctgtgccgttgctgccacaagggaggcagcctggtcaagaggcgtggtttgggatgcaataaggccactgcttcttggccactttcctggacattttcaatcctgcctttcctgggtcctcggagcagctggtcaggatgggcttcccactcagtccacgagcctggggccggctcagggtggtcccggcgacctcagtcctccgtgtcgggctggacgcccaggatggcgtgcagttcctcgggcgtgaaccccagcaagttctggaggtcgcacacgaagcggtacacgtagcgcttccccgacgtcttgtggatgatgttcttgtcgtaatagtagcgtaagccccggctcagcttctcgtagttcatcttgggcttatttttcctctttccccaccggcgggccacctcatcggggtcggcgagcttaaactcccatccgtctccagtccagctgatgaatgactggcaggatttgtctgatagcagctccaggagaaactgccacagctgaataggtccacttcctgtgaagccggccagcacagctgcaggtataactggtttgccttgctccaccgggtcactcctctcttggatgtaatccttgaaagacatggttggcttattgaggcagagagactggctgcagtcatcttcgaagctctcgaaggaaggaacccgttgcacatccagcaaggacgactggctgttccaggactggaggagggagtctgagctctcgaagctgtccgcaccgttctcaggggagtcgtggtctttgggcgtcccagaattgttggtgagcaaattcaagttgctgcctgggaagtcctgactgacagagcagtaggtgacgctgacggagctgagccgagacttggggaacatctgaaactcctgctcagagctgagtacgctgggtgtggaggccggacacatgctgtccaggaggccgcctttggggtaattctgtgtctgcattccatagggcgcctgctctgtgccaaaacctaatgtattgctgttaatccaatgaggaacggaggtgaggtgtgaattttcttcatattgatcttctgtcttttcttggttttctttgatcatttgctccagatgttcccagagaatgtcacccacaaagtcaggtgccagctccagaaagcgttccttgccaaggttacacagcatctggccattcatgccgaacctctgcagattcacgttcaccagactgaactcattggtggcccagagaagccactggcatacctgttgctcactccacagccaggggttctttggaatgcccaggcgccgctgttcctttttgaagccactgaaggtagcttttaaggcttgactcatcacagccttgctgcacggggttaacaaaggcaattcacagttggcggagtcatgagaaatggaatccaagcctgttggcacttcttgcagtgtttgctcttcatttagagaaggaaaaacagcaaacagggacccatcaaaggtgtcaaaggctggctggcgcttgagtgtccctctgtaactgttagccacaggggctacctggtccatattcttgattccgaaatcattcatcctgccgctgcgggcagggccggcgcttggtcgggacggtggctgctcggcgcccgcggctgctcggtgcgcgccgggcgagggcgagggcgccggccagagacgatcagggaggccggacgctggccgggcggctccgggagctctgagctggagcgacaccgcactcgtcagtcatcccgggaattccggaccg

SEQ ID NO: 314358 - DNA, 651 bp, Homo Sapiens
accagttgccacgttggtaaacgcgggccagttaattttatatgttgaaaggaggggagagaggaggaggatgatatgatataagaaataggggataaagagatattttattttgcaggatttgaccgagtctttatcgtggcttccgttacatcttattctaactcaggtttacggacacaatgctggaaaaccaattcctgctctacccacgcctcaacttgttaagaaaaaacaggatctaacaccgaggaatgtcacatcttcgccattcccacttcctttctgccctaggcattcgatatgtgccaccaggggccatcaggactagggctctgcacccatggcagcagacaggtgtgaagctcagagtccctcctaacagcctccctccagcgtcttcttggccgcagcggcgaagcagctccgcagggcctcgaactcccgcgcgcagaagtccttactcaggcggccgcccggggccgtggaggcctgcacgcacctgccgtacgccgcggcctcggccccgcaggcggccagccgctcggggaaggcgcggaggcggcttcgcacgcggccccacaccgctccgttagccgacatgagcggctattcccctcgtgccaattcctgcagcccgggggatccact

SEQ ID NO: 314359 - DNA, 445 bp, Homo Sapiens
cactttggtgtcatgaggattaggtcttatctttggatttttttgagcttcatgccaccattctgagaattttaggagaggttccagccatgcccagggaattcattgagaatttccatggcggttacacaacccacagttggtattccttcggtataatcacttccaagcaaataagccaaatttattaacttattccggtccaatcccaattgattgtgaaagtccacatattgataatattctacaaacttgtttttattaaaaaagtttctatagacatgccgcgctccaaacagccagatatcactgtcatcagtgatggttccggaagtctgatcagtcaggtccaggatggcgcactgcgcctctgcttccatgggagcctggatgtagggaatgccgaacaggcgcaggagttcctggctttccaggaacatctgtc

SEQ ID NO: 314360 - DNA, 417 bp, Homo Sapiens
cccgggctgcaggaattcggcacgagattctcctgaaaggtcgtaggctgacaggcgctcacattccttggctgcctcggttctgagggcagctaaggagctgtttattcctcaagtcatgctccccgatctccttcctctaccactctgtcaccaggagtttaattacaggcttgaggagaagaaaggaagaaaagatatcttgatgctttgctgtgttggcagtgtggcatgactgtttaaagtagataggaagaagggcaagttcagatgcaggctgggtggctgggacaggttggctgggactactctggagggctcttctgcctggcattgcccacttcggcccagccacgtgtttgcagcgaccaggtccctgcggtgtggctggctgtggtcagggtgctactagccctc

SEQ ID NO: 314361 - DNA, 2252 bp, Homo Sapiens
  misc_feature (56)..(56): n is a, c, g, or t
ggtaatctgtgacacaatccaaatgcttacactccagggattgagtaagagaaacncagggcagccctgccacagagaatgacggctcaggttgagtgacatctgagattcatcttctgtacccgtgaacctgactcccaggacaacccctaggaggttttgacttttgacattagtgagttaattcttaaccagattcttaagaatttcagggccaaacaggcttgaaagtacggtttttccaaatttgggggaagggagtggggaagctcttcctgggaacaaattccccaggcaaggaaaaggccccagcagctctgtcccctaacccctgggctctgccctccatctccccacgaagaaacttgtgggctgcctggggctcgtcaagcagcctgcacaggctctcactctctttcccactcactatgcttggctttttcttccacttatgactatctctccctttctccaacacccagtgttgtggggcaagctgtaattatctcacgtgtgtgaaaatgtgccatatccactttcatcatctgggctaaaaccagatcacttgtttcacttttcctcacaaatattaacaatgcaggaattgggtcccagtgaatcttcgacatgaagttgaagcttcaggaagtgaagcagagtctagctccacagcttcaaccttctcctctaccccttccttttttctgtctgtctttctgtctgtcttggtagggcttgattagagaagcatgagcgttgaggcctcctttgtatgccttgggacaacaggtaggtgctgtcactggtcctgcagactgttcagcaacagcccctttggatttctggatattctggaaacaaagtcagaacagtggcctactggggggttggcagaggggtatggtaagaggacctcctttcatctccctgttcagcatccgatggcagtccacaggtcatccttggtgggtgtcaggcccaagacccatgcccaccttaccctttgaatccaggtgagatgagatcaaaccaggcagcacagaagaagacaggatgctacaaaggcagccaatgagctcatggcctcaggggttttaagcaccagccctggctacccagcctcccttgtccctacctagaggcacaggcccagcctacctgaactccctcacactgatgctccagacctggctcctggacagcaaacttctctcttccaatgtcctcttgcctcatttccatttccttcacatctgtctcctacttactggttccttctctaaatctgtattttcattcctgggtgttatgtctccccccatctctctcagcccctatgtcccacccaggacaaagcactcttagttggactggcagagaggagctgagccaatggcgggagtgcgctgatggtgctagtagcaccctgaccacagccagccacacctttgcagggactctggtcgctgcaaacacgtggctgggccgaagtgggcaatgccaggcagaagagccctccagagtagtcccttagccaacctgtcccagccacccagcctgcatctgaacttgcccttcttcctccttcctcgccagcttcacagtcatgcagggatggggtaaaatgacaaggttttatctactttaaacagtcatgccacactgccaacacagttttcaaagcatcaagatatcttttcttcctttcttctcctcaagcctgtaattaaactcctggtgacagagtggtagaggaaggagatcggggagcatgacttgaggaataaacagctccttagctgccctcagaaccgaggcagccaaggaatgtgagcgcctgtcagcctacgacctttcaggagaatacagcaaatcatctgactccagtaacatcctcttcctcccccaagatcactgttctgctgcacacccacactgcttgcatctgttgagtgttggcttccgccccagtgcctgccaccttcacgtgaaggctctggctttagcacgctagctccactcccaaacctaacctccgccgaattctctgcaggattgaccactgggtccacgtgtgactgagagatgtgagaagctcagcagatgggcagggatgactcactcatcatactaatgtgattcaccaaagaaaggccatgttttctcttccaaatatgctgtgtgttcaagttctgagcgacgcgtgggtcgacgatatcccggaaattccggccggtacagcctgctttgtt

SEQ ID NO: 314362 - DNA, 1971 bp, Homo Sapiens
agaagggcgggccaggattccagggttcagattccagggttgcccaccggggctggttccagggagaagggtggagttcgttagccagctgatgcaggggggcggcaggtttggtgacagaatagggcccagcagtacacgctcacattttccgctggttggctggtgagagcttggccaccacgccagtgctgtctgcaccatccaggctgaggctgccatcctcctccttcaggtcagggagcacatggcagagtgagcagctccactcctccccctggtacatcctgcagggccggcaggtgacagtccaggtggaaacaaaactcacactggttgcacataaccagatccgcctggcttctggcagacacggcaaatgggtggcactgtcatccagggttcccgggccaccacctggggctgaggtaccctcaggagccaccacctccagccctgagctggtgctgccactaggtgaggccaggcggggaccctcagcaccaggaccctccgcaagagccataagcacaggtttggtctcagggccctcagtggcagtaggaggggctccaatggcagcctccgtctcctcctccttgacaatggccatgccagccaggggtggggcaccaggggttcctgcaggcgcagtccctggctggccggtagctgcagcggcagcgccacgttcaataacaataaggttgtagtcctcagtggtactgcctgggaagaccttgaagacgggtggctggctgtcagctgtgaggtccaggtccaggcgttcaaggctcactcgtggcaccttgcgcataaggccgctcacctcgccctcacctgagcgggaccgtttcacacctgacacatggggctctgcacttgagtagggatcatctcctgacccaaagccatagccttcctgcacctccatgggctggctgctgccagagccctgcttgctcaggggccctggggctcttggaggggccatgggtgcagggcctgttgagttagtgccaggacgctctgccacaatcttgccaaaggcctcggcactcttggtccaggcattgaggtcccactgaaacttcatctcgccatgtggctccacgggatccacaatcatcttgagggcccggtgcagctggaagtagatcaacttcttagaaagcaaaagggctgtgttgttgtcactctccagagcccaagaggcaaagcgcagaatgtgctcctggtgcttctggatcttggtcatggtccagtgctgccgctccaggcgctcctgctgcccctcagtcaccttctgggcatcattgaccagcacacggccccgcttattcagctccttcatgatctgcaggatggccatcttgacatccacttgcacacgcttctgtacgtcagacacctggcggattgagctgcgaacctccttggtgctcttctgcaatgttgcatgtttgtccccaaggcgcttcaccagtgaggccaggagcttgcgctggttcctcactgcatcctctaagaactggtactggtggtccttgtgggcattgagctggcagtctcggcaggtgagagtatcacagctctcacaaaacagcacaaggggttcatgcttgtgtacgttgcaatagacagtacgttcaccatcccgagacttggctggcccagtagagcgcacagtatggtccttggtgtacttcacccgctggtgcgcctctacacaggtctcacacagaggctccgagcactccacacagtagctggtggctggggcattatcctcacagctagtgcagcactggttcgcatcctgggcgtcggtggcagccttgctgccactatcacgcatgaaataattctccacgatgtctttggagaagcactgttgcttgcacacgggacagtccaccacggtgccgtcgcccctcgtgccgaattcgccacccaggcctcgctcctttg

SEQ ID NO: 314363 - DNA, 1223 bp, Homo Sapiens
  misc_feature (44)..(73): n is a, c, g, or t
tgggtggcgaattcggcacgagggagagagaactagtctcgtgnnnnnnnnnnnnnnnnnnnnnnnnnnnnnnaactggtgaagtttttattaaatccacagaagtaaaaaccatatcgtgaggaactgggggatggggccaccagggagtgggagtcaggccaccaggggagtggggatggggtgacaggacagagaacagagccaggctgggctggccatgggggctccagcctcaggggccatcaccagggccaccagacagctcctgggaactcaggccagcaccaggcaggctcatcggcgggggctccaccagcacagcagagaacttggtgtcaccgaaggcctcgttcatgcgcgtctcgaagaagcgctgcaggccgatgatggactgcacgtctgccttgtcctcagttaacttgttgaattgcttgaacatgcggcccacatcctgggcaaactcctgtggggagctgtagggaggtgacaacttctcctggaggcgggcacggatcagggtcagatccagggtgccaccgggctggtccagggagaaggtggagtcggtagccagctgatgcagggggcggcagggttcgtgacagaatagggccagcagtacacgctcacatttccgctggttggctggtgagagcttggccaccacgccagtgctgtctgcaccatccaggctgaggctgccatcctcctccttcaggtcagggagcacatggcagagtgagcagctccactcctcccctggtacatcctgcagggccggcaggtgacagtccaggtggaaacaaaactcacactggttgcacataaccagatcgcctggcttctggcagacacggcaaatggtggcactgtcatccagggttcccgggccaccacctggggctgaggtaccctcaggagccaccacctccagccctgagctggtgctgccactaggtgaggccaggcggggaccctcagcaccaggaccctccgcaagagccataagcacaggtttggtctcagggccctcagtggcagtaggaggggctccaatggcagcctccgtctcctcctccttgacaatggccatgccagccaggggtggggcaccaggggttcctgcaggcgcagtcctggctggccggtagctgcagcggcagcgccacgttcaatcgcacgcgtgggtcgacgatatcccggaattccggaccggtacc

SEQ ID NO: 314364 - DNA, 962 bp, Homo Sapiens
  misc_feature (160)..(160): n is a, c, g, or t
  misc_feature (869)..(869): n is a, c, g, or t
ggaagcagaagaaagtcccttcagccctgacagagctggctgcctctggagagggctctgccatcagtggctatctcagccggtgtaagaggggcaagcggcactggaagaagctctggtttgtcatcaaaggcaaagttctctacacctacatgggcanttgaggacaaagtggccttggagagtatgcctctgctaggcttcaccattgctccagaaaaggaagagggcagcagtgaagtaggacctatttttcacctttaccacaagaaaaccctattttatagcttcaaagcagaagataccaattcagctcagaggtggatcgaggccatggaagatgcgagtgtgttatagcagttatcaagcatgtggacttgtaacaaattcttaggtcaatatgtgaatgcttttagaagctaagctgtggctcaactcatccggacacacacctggattcagcaatgaggcctgaccttttttgctataaccgccccaccactcccctgcccttgccaacatcttcatgaatggaatccttaagggatatttatggacctctccttttctgtgttttccacccctacccccacccgccacccagtaataaactatttccttaccccgcagtgagtttaaaatttagtaagatgaagatgtggaaaccaatgaaaagtacatttagaaatgcaggctttttagtagaaagaagctcttacagtttttactcatgataaatcttatcacctttcactcatcgaaagcactttattattttacggagctgcaacctccaattttgtgttttctaagtgatttacttaagtcaataacagatggaatcctgtggactaatgtgccaccagttntctacaaaggtgtacattggatttgtgcagacctggctgtggcttgctggtgtgcgacacatcactttagaggggctgcgccccaccgatagg

SEQ ID NO: 314365 - DNA, 394 bp, Homo Sapiens
  misc_feature (273)..(273): n is a, c, g, or t
  misc_feature (333)..(333): n is a, c, g, or t
  misc_feature (364)..(364): n is a, c, g, or t
ttggtcttccaatcaactgttttttttattaagtgttcattgcatcgagacagttgggtgttgaggatggaatgcaagaggtgtagggaaacatgttttctgtctcccagaaatatgaaaggagatgggctgaaaacattaaatcaaaactaataatataataagagcttcagttctatgttacaaaatgtacgtgcttcaaaaaggcatattttttttttttaggatgcagtctcactctgtcactcaggctgggagttcagtgggcatgancttgggctcactgcagcctccacctcccggggttcaaggcaattcccctgcctcagcctncggggggagccgaggaccacagggcgtttgnccacccatacctaggccaacttttggtatt

SEQ ID NO: 314366 - DNA, 454 bp, Homo Sapiens
  misc_feature (312)..(312): n is a, c, g, or t
cagccatctcagggtgaggagctgccagtcatgtccagatggaatggcgtcccatcctctcctcatctcccctttgacgagcctcaaactgctcagctcatcgagccattgccaacttccgtatgtggttctgggtcccagggagccttggaacctggcaccctggggtggtttaattcatcattaagaagcattcctgcttctcaagggacacagtggcctgcatgggccagcatggaccctgggctgatcatgtgcattcctgcttctctggggacacagtgggcccacatgggccagcatggaccctgngctagagcaagcacatctccatctcttccacctcaggcagtgtggctccagatgtcaggagggactgacctcaggaccttccaggttcctctgtgccaggaatgagaggccaggcccgatcctaccacctcgccttgccctg

SEQ ID NO: 314367 - DNA, 708 bp, Homo Sapiens
  misc_feature (142)..(150): n is a, c, g, or t
tcacatacactgtgagagacaattgcgagcaccagcgatttcacagtgggaggtagcaaacgtgggcacccccagcccgaggatctcgccgcttcccacgcctggctgctccttcccatcctctcacctctttcccgggtgnnnnnnnnntagtaacgcaccttctttttgtttgtttaaataatatatatatacacttctgtctttccttttctccttttttcatgtctcctttctaatattgcacatcaatagctccctagcagggaccagctgacgagacgcccccttccctcaagttggcttgaatgtggggctctttgggcaggaagctggggagggaacggggtggccgcagagctgagaggccacggggctcaggcaggttgcaggtccagcttactctggctggctctttggttggtctttggggctaagctgggatccattgttcccaaggacaccctatcccctcctacccccacccacttctactgggcagacaacagctggggtctgcccaaggacccttgggcaggggagctgcctctcctggagccatctgcccctcagtaccctccccttgcctcttcctcttccctcctccgtgaggcctagagtggccacgaggtcagaggtcagaggaagcacgcaggtccaacttacaggcggtactgcttccctgatgagacaggagagaggttgtcc

SEQ ID NO: 314368 - DNA, 401 bp, Homo Sapiens
gtgttgcagacccaggtcttcatttctctgttgctctggatctctggtacttacggggacatcgtgatgacccagtctccggactccctggctgtgtctctgggcgagagggccaccatcagctgcaagtccagccagagtgttttctacggccctggcaataaggattacttagcttggtaccagcagaaaccaggacagcctcctaagttgctcatttactgggcgtctgtccgtgactccggggtcccggcccggttcagtggcagcgggtctgggacagatttcactctcaccatcagcaacctacaggctgaagatgtggcagtttattactgtcagcaatattacatcactcctccgtacacttttggccaggggaccaaggtggagtccgctgg

SEQ ID NO: 314369 - DNA, 475 bp, Homo Sapiens
  misc_feature (292)..(409): n is a, c, g, or t
tttttgtatttggctaaagcccttttgaaaagatctttgacatggcagttctcaccctatcacctccaagtatccagtttattttccccattgaccccatacacttaacagttttgactgccaaacagaatgcacttattatatctcttcctcatccttattaatcagatagcaaactctaatcagaagatcttttcagtctgagataaccaaggtttctacactaagtctatctgacttctagcagcataaagaaacctgatgttttggctgggtttggtggctcatgctnnnnnnnnnnnnnnnnnnnnnnnnnnnnnnnnnnnnnnnnnnnnnnnnnnnnnnnnnnnnnnnnnnnnnnnnnnnnnnnnnnnnnnnnnnnnnnnnnnnnnnnnnnnnnnnnnnnnnngcaggctggcacgtgcctgtgattccagctactcaggaggctggggcacgagaatagcttgaacaa

SEQ ID NO: 314370 - DNA, 351 bp, Homo Sapiens
cccctccagtctctttccattgcaagtcacattctggttctcagggattatacccgtcttagtctcgatcattgctttcccttgtgccattgaggtggactttcgcacttggaggaggtgcttctttgcttcttcacttgactccacaagaaacaagggcagctcttcatcagtgggcttcacccctttcagggtaagtgtggatgttcttctctttgtcagtgccataagatgagaggcttctccgtggctttaagttcttggagcccagcaaaagaactttcacgctgtcatatgggttggcctcagaggtcattatatcccattcctcggagcggacatgcacctggg

SEQ ID NO: 314371 - DNA, 796 bp, Homo Sapiens
ctggctttgaatgctctattttgccttaaaaatttatttactagtctcagtaatacattagtaaaaatcatgtcacttaattaattgtgttagaatcaaagaaacatagagttgggcaatatacttcatcctacccatcccacccaaatcttactctactcatctcattctcattaattttgggaaatcatcagaagatgtgttcgttgagtaagagattaaaagaaataagctttttgacccctgccaacaccccatgcccagggtggtcaccctccaatacaataacatgccaggaagagtaagttgccctttctgatgccgtaatctgccatcatcttcccatcttccagtctctttccattgcaagtcacaatctgggtctcagggattatacccgtcttagtctcgatcattgctttcacttgtgccactgagctggaccttcgcacctggaggaggtgcctctttgcctcatcacctgactccacaagaaacaagggcagctcctcatcactgggcttcaccactttcagggtaaggtggatggtcttctctttgtcaatgccataagatgagaggcttctccgtggctttaagatcttggagcccagcaaaagaacctggtcctgcacaggaaccttggtcttagaccggacatgttctttgatttttttcacgctgtcatatgggttggcatcaaaggtcattaaatcccattcctcggaacggacatgcgcacagaggccggaagccttgggagccatctctggtgggtcctccctggcagaatggg

SEQ ID NO: 314372 - DNA, 1006 bp, Homo Sapiens
  misc_feature (246)..(246): n is a, c, g, or t
  misc_feature (259)..(259): n is a, c, g, or t
  misc_feature (324)..(324): n is a, c, g, or t
gcccttcagaaccctaaaccccaaaaaggccaagggggaaattcggaccagggaccctccatacttctgggggatctattcctttcgggaccttcagggggtccacatataggtccagtgtttttcggtcccccggccggatttgcactccccaactgggaatggggtcgaaacagccttcataaaacatctccagcattttgtaccatctgctcccccaatggccaaaaatcacatcacccaggnccgcagaccagcnccggtgtgcaggggagcccaggatgactttatggatgagtacaccatgctgaacatcgggaaagnctggttctcgaagctgtagttcagcaaggatgctgggactcagggtcagcatcatcaccccaaatgtagcgccgctgggacccactgattccggaggaggaattcttcttttccccacgatgcagaaactctcgaagacgatcagaagggatggcaaaggagattccagctgtgaccttcatggtgttcactccaatcacctccccatccaggttaaccaggggacctccagagtttccaaaatcaatagctgcatcagtttgaaatgtaattcccacattggtttgggggagtccccaggtctctggctggacgctgagcagagctaacaatgccggatgtgatcgtgttctgcagtgcaaagggacttcccatggcaacaacaaactccccttgccggacatcagctgagcgtcccagaggcagcgtggggagaggctccttagtctgaatcctcagcgttgcgatgtctgccacgggatccacagctgtgaccacggcctcatacgtgtcgccgcttagcagtctcacacggactctgcgccgatcagccaccacatgggcgttggtgacaatgagcccatcggcagccaccacgaatcctgagccgttcgagatagggacctcgcggcccaagaaagggtgccggtcccgggaatccggccggtaccagcctctttta

SEQ ID NO: 314373 - DNA, 842 bp, Homo Sapiens
  misc_feature (11)..(11): n is a, c, g, or t
  misc_feature (27)..(27): n is a, c, g, or t
  misc_feature (95)..(95): n is a, c, g, or t
cggagccccanggagtccagtgctggntggtttggagggaccctgccccccaagggttccattaacccttctgtctcggtgccctcagaactcangccagaaaggcaaggaggaaatcagagcaggagcctcatactcttggtgatctattcattctgtgacctcaggggtcacatataaggtcagtgtttctcgtccccgccggatctgcactgccaactgggattgggttcgaacagcttcataaacatcttcagcattttgtaccatctgctccccaatggccaaaatcacatcaccaggccgcagaccagcccggtgtgcaggggagcccaggatgactttatggatgagtacaccatgctgaacatcgggaaagcttggttctcgaagctgtagttcagcaaggatgctgggactcagggtcagcatcatcaccccaatgtagcgccgctgggacccactgattccggagggggaattcttcttttccccacgatgcagaaactctcgaagacgatcagaagggatggcaaaggagattccagctgtgaccttcatggtgttcactccaatcacctccccatccaggttaaccaggggacctccagagtttccaaaatcaatagctgcatcagtttgaatgtattccacattggtttgggggagtcccaggtctctggctggacgctgagcagagctaacaatgccggatgtgatcgtgttctgcagtgcaaagggacttcccatggcaacaacaaactccccttgccggacatcagctgagcgtcccagaggcagcgtggggagaggctccttagtctgaatcctcagcgttgccc

SEQ ID NO: 314374 - DNA, 1078 bp, Homo Sapiens
ctttgttggtaaaagtgacatgttaaggggctatgaagtaaatatgctgcagttaattgtgctaagttaaaatacagtttagttatttgctttaaaataaactcttctttttttctttaaagtatactatctcaaaactcattatgttgtcagagccctagagctggctagtgtaacactgactatgagtaggtgggcccaccacttgaggtgatttcatggtgtctttccaggctcttgatagggtgtcactgcatgcaagccatgaatctgttttgagaatcctctccattttcccaaataaaaacctatcccaacagtgactatatcactcagcattggatctaaatataaaagtggtgctttcagtgtttttggcagatagtgttccataagctttccatcagaagggattttagacaccttagaggtccgtgctacatcttcacagttcctccgaataaccttaggtggtagtgttacttgcctttgacacctgtgcatatgttttaatgactagatccaaactgtgttgttcttaaatcagttctcttaagccttcagtttatactcttaatttaattttctttctgagctggagaactggctttgcactttggttacacagaacattggtttccaattcagtttaactgaaatttgctgctgatatgttgagtttgttctttaaaaaatagctcatatatctcatctttcctcctgtcttagaagaacagacctaactagtgaatgtattaatgaaaatgcatctatttcagagctgacatgaagagtttagtttttttactttataaactgtgaatatgagtatgccagctgcatacgatgtaactaatcatatttaaatatatttcactttctctttgactttagaccttttgaagtctgtataaacttgttttgaaatatagtctctgcttacgaatgtcataacaaaataattttttgcatgataaaaaattactttgattacaaaaggcatattctttcatggtttctgcaatgagaggaagtgtaatgattattttaatatttctattaaatatgtttaactgta

SEQ ID NO: 314375 - DNA, 670 bp, Homo Sapiens
  misc_feature (41)..(41): n is a, c, g, or t
  misc_feature (50)..(50): n is a, c, g, or t
  misc_feature (77)..(77): n is a, c, g, or t
  misc_feature (85)..(85): n is a, c, g, or t
  misc_feature (128)..(128): n is a, c, g, or t
  misc_feature (176)..(176): n is a, c, g, or t
  misc_feature (199)..(313): n is a, c, g, or t
gcccctcctaactcatgtgatttccccatgcatgctgcccnggaataaancccacccggaatgaattcactcccacncttcctcnggaacctcaggacccgccccatttcctcggcagtactgtgaantttgaagttaaactaaattttggtaccataccaactggaatttaggcnttaaaaataatgtttcaaggccnnnnnnnnnnnnnnnnnnnnnnnnnnnnnnnnnnnnnnnnnnnnnnnnnnnnnnnnnnnnnnnnnnnnnnnnnnnnnnnnnnnnnnnnnnnnnnnnnnnnnnnnnnnnnnnnnnngagaccttgtctctaaaaattatagtagtaaaataaaaataacgttttatgactatttattgcaaggtcagatttacagattgttataaattgttgagaaatttttgtgattagaatatgaaggaaaaagctttgttggtaaaagtgacatgttaaggggctatgaagtaaatatgctgcagttaattgtgctaagttaaaatacagtttagttatttgcttttaaactcttctttttttctttgtatactacctcagtaggtgggcccaccacttgagttgaggtgatttcatggtgtctttccaggctcttgatagggtgtcactgcatgcaagccatgaatctgttttggtcct

SEQ ID NO: 314376 - DNA, 815 bp, Homo Sapiens
  misc_feature (77)..(104): n is a, c, g, or t
  misc_feature (578)..(694): n is a, c, g, or t
  misc_feature (708)..(736): n is a, c, g, or t
aaaaaacacattatttgcttatattgtagagtgattctaaaatatagattttacattgagaaattttaatactctcnnnnnnnnnnnnnnnnnnnnnnnnnnnnggtttactttccaaaggtgaggaataaaatgcttcccgttcttctggatgggcatcctatcttcgtagttggtttggacttcgataggttgatggaaggaatgtttttattaaccaaataaaatctatttacaaaaatggttcatgtgtattaccatcattcttttgtcaaaaagtgtgtatatgtttgcatttacatatatttgtacatctatatgacagatgtattttaaaagtttcaacttgaagtaaaagtacaacagcttgaagtgttgataccaggccacagccctctaactcatgtgatctcccatgcatgctgccagaataaaaccacccaggaatgaattcactccccacttctctggaacctcaggacccgcccatttctcggcagtactgtgaattttgaagttaaactaaattttggtaccataccaactggaatttaggctttaaaaataatgtttcaagnnnnnnnnnnnnnnnnnnnnnnnnnnnnnnnnnnnnnnnnnnnnnnnnnnnnnnnnnnnnnnnnnnnnnnnnnnnnnnnnnnnnnnnnnnnnnnnnnnnnnnnnnnnnnnnnnnnnngagaccttgtctcnnnnnnnnnnnnnnnnnnnnnnnnnnnnncgttttatgactatttattgcaaggtcagagttacagattgttataaattgttgagaaatttttgtgattagaatatct

SEQ ID NO: 314377 - DNA, 870 bp, Homo Sapiens
  misc_feature (716)..(815): n is a, c, g, or t
  misc_feature (821)..(821): n is a, c, g, or t
tgattaatacataaatattaaaaattatccaatttttgatttaagaacaacacagtttggatctagtcattaaaacacatgcagcggtgtcaaaggcaagtaacactaccacctaaggttattcagaggaactgtgaagatgtagcacggacctctaaggtgtctaaaatcccttctgatggaaagcttatggaacactatctgccaaaaacactgaaagcaccacttttatatttagattcaatgctgagtgatatagtcactgttgggataggtttttatttgggaaaatggagaggattctcaaaacagattcatggcttgcatgcagtgacaccctatcaagagcctggaaagacaccatgaaatcacctcaactcaagtggtgggcccacctattcatagtcagtgttacactagccagctctagggctctgacaacataatgagttttgagatagtatactttaaagaaaaaaagaagagtttattttaaagcaaataactaaactgtattttaacttagcacaattaactgcagcatatttacttcatagccccttaacatgtcacttttaccaataaagctttttccttcatattctaatcacaaaaatttctcaacaatttataacaatctgtaaatctgaccttgcaataaatagtcataaaatgttatttttattactattattatttttagagacaaggtctcnnnnnnnnnnnnnnnnnnnnnnnnnnnnnnnnnnnnnnnnnnnnnnnnnnnnnnnnnnnnnnnnnnnnnnnnnnnnnnnnnnnnnnnnnnnnnnnnnnnnatggantcaccacacctgggccttggaaacattaattttttaaagcctaaattcc

SEQ ID NO: 314378 - DNA, 535 bp, Homo Sapiens
  misc_feature (18)..(18): n is a, c, g, or t
  misc_feature (46)..(46): n is a, c, g, or t
  misc_feature (75)..(75): n is a, c, g, or t
  misc_feature (80)..(80): n is a, c, g, or t
  misc_feature (89)..(89): n is a, c, g, or t
  misc_feature (98)..(98): n is a, c, g, or t
  misc_feature (116)..(116): n is a, c, g, or t
  misc_feature (150)..(150): n is a, c, g, or t
  misc_feature (171)..(171): n is a, c, g, or t
agttattgccttaaaaanaaacccttcttattacccttaaaagtanactacctaaaaaactcaattatgttgtcnagagncccctaganctggcctantgtaaacactggacctanggaaataggtgggcccccacccacttgaagttgnaggtgatttccatggtgtctntccccaggctccttgaatagggtgtccactgccatgcaagcccatgaatctgttttgagaatccctctcccattttccccaaataaaaacctatcccaacagtgactatatcactcagcattgaatctaaatataaaagtggtgctttcagtgtttttggcagatagtgttccataagctttccatcagaagggattttagacaccttagaggtccgtgctacatcttcacagttcctctgaataaccttaggtggtagtgttacttgcctttgacaccgctgcatgtgttttaatgactagatccaaactgtgttgttcttaaatcaaaaattggataatttttaatatttatgtattaatca

SEQ ID NO: 314379 - DNA, 660 bp, Homo Sapiens
  misc_feature (79)..(79): n is a, c, g, or t
gctaaatcaggatggttcatgagacaatggctagcaaatttcacacattccaggcggattggtacatggatatcattanacctgcccaagtagcactgccaaagtggcttgttttgagaagccaattctgaatcctttgccccaaacatttttgccagtagtttaacaacttgtaggcgctcctcattatcattgctctttaatttaaattcaagctggggtaaaacagagagcagcaaatgactatcaatattgtagagctccaaaattaagtcaaagacatgctctgacaaatcgctgatagatgttttcccaagcatcagaacctgattaaaaaaattggtaatatatggctcaatagcttgagctgtcctcttcagtaaagcctttgccaaatcatatgcttgcttgtttaaattcttatgagcaggtaccagatttactaaaaccgtatccaaaagctcctgagacactgtatcaccttcacaaataatagagctcataaggtctaccatgtgcatatggactttctgattgtggccattgtttataactgaaaataaggttctgtatagctgggtgaaaatttcattgctatcttctaactcaaagcatatgttatatgacttgacccaagcaatgttctcaagtaaataaaag

SEQ ID NO: 314380 - DNA, 988 bp, Homo Sapiens
  misc_feature (940)..(940): n is a, c, g, or t
caatgacccactgcagaccctcttccagctcatgtgggggaggattccacaggcagccacgtgttcttcttcctccacctgccttataaggggctgttcctctttacaacccatctcaagtgcctcagctgtccacgggcactagcctgaatcggccaaatcgcctagctcagcgtcgctatcccacccagccatgctgagaataaacacacgtgccaggctcatctcccaggactgaaactttcttgctctctttttctcaatctcccagcccctctctaccatattgggaccctcaagaggtttgtgctagcccgatgcctccaccgggcacttagaaggcaagaggacaggatctctcaagacacagcacaattcagtctcttaagattaacttcacaatgatggaaattatttcatcaggtggaaagtctgggtctaatagcagactgcacatgagcagagtgacatggtggtggcacttatggtggtggcttgagagccttggggaaattagggccctaacagctagaatcaaagatgataccgcagggccctgtagcaagaaatgggaagcagggggaggggcaggggctcagaacaatattctagaccaactttgactacttcctgtcttagtaatagaccaatacatggctctatttagcaaagtttttatactgaaacttgattattgctgccctttataatttcctcttcaatgatatttcagcagtttccctcttggtcctagttttgtgcacatttttttgaatgtggttcagattaattatatttctctcactttcttagctggtcctattttttcacattctggcatgtggctatcaagttagattgctgtaggcatcatattgtcatggtaactactgaacctaatgatgcagatggatggcacatcagtataataaatgatggnaaacggttcctactccctttctaccctcaggctttgctgatgttcggg

SEQ ID NO: 314381 - DNA, 923 bp, Homo Sapiens
  misc_feature (475)..(483): n is a, c, g, or t
aataaatccattgcctttacaatcccgctttacttctcttctgccaatttaacatattccccatcccttcttttttctcctggatcctcgggtagccctggcctcttttcccttaccctattctctgtatatgagtattgattttcttggaaatcggtcactattattgggcaacaggcaggactcttcaacccctcctccctctcattacttgctgtctgaattttgttgttctccccccctctttgcccatccgtttgtcttcttgggtgttacgggtttaggggctgcaggtgggctcccattcaccctctttttgttttaacttgaaaggatgtgtgaatgaagtccaaaggtggatcacaaggctatttcaaggccaaaatgtactgttctgagctgtgggtgtgcagaagggtctcccttaagctagtagaaatttaaaataacaaaactttattttgagtccattggnnnnnnnnngtttgtttgtagaacttatacacaacacaaggtttcttctttgaatgcaggtgattccttcaacacccagaatgagccagaagacatgatgaaaaaagagaaaaagtctgaagctctgaatatcagaggtgtacttttgcatgtgatgggagatgccctggggtccgtgggttgtgggtcatcacggccatcatattctatgtgcttcccctgaagagtgaggacccgtgtaactgggcagtgttacattgaccccagcctgactgtcctcatgggtcatcatcattttgtcatctgccttcccgcttatcaagggaggaccgctggccattctggctacagatgggtcccaaaagggaggtcaacagggaaggaggctggatggaggtaaactcttctgctgtgcccgggggattaggcagttgtaacatggaagtggc

SEQ ID NO: 314382 - DNA, 924 bp, Homo Sapiens
  misc_feature (859)..(876): n is a, c, g, or t
cacttcattttaatggcccccgcatgtggtgggttcagtaaagggaaacaatatacgtagacataaaatccacaggtttaaattccactgaagactagaaggcatcgactttcacccatcttaagagaacagagaacacacgtttgaacaggtgttcatgccagtcaggtgcgacttggcccaggaagcagccaagtggcaaaacacaatagaaaagagtagagacccactcaagctggctcaagtcaaggagtctgtagtggggacgcacgtggaccaatgaagggctgctgccagaaatccaagaacataccatggccaggccttcactcccagcaggcgccacgctcctcactcctctgagtactgtgctgctccccacaccttctgatgcctagaagcttctgtttccttgtttgcatttcagatctggaaggcctggtggtgtccgtggtccatcatgttctgtcagctctatgctctgatgattgcttgctgcccttgggtcaggtgttcagttctggctgaattaatatggcctagaagcggggtggcaaatcacatggtacgcaacagggccacaacccagggctgcaggtagggcaggcgctgtgccagttctaggacaaaatcaagcacatggaatgcaacaccactcaaaaacatgcccgctgcaattgggtagggactattctggaaatgcaagagtggggtgacacagctaatggacacagctcatcgtaataagcagcaaaaatggtaatcaattactttcttttgaaaattttcacaagtattcaaaactctaataaaagcaatggaggatttttttcaaatggtaggaaaagaacatatttcnnnnnnnnnnnnnnnnnnccatgccaggcagttaatgtgctgacatagtaacaaggtttgaaggag

SEQ ID NO: 314383 - DNA, 615 bp, Homo Sapiens
gcctacgaggacgtggcgggtggagctcagaccggtgggctaggtttcaacctgcgcattgggaggccgaagggtccccgggacccgcctgctgagtggacccgggtgtaagtctaacgccagttcctgcctgttgcctcttgtgagctcggactgctgatgccccggtgctgctgagcgccgtgcgcagaatggaaacagtgggcctggatcaaagttaaagtttctcagggtgggaaatgtgggggctttgccccaatgactgtagcattcaaggcttgaggctggaggaggtagctagggtatagtggctggtgaggctgcacagagcagattcaagaaagaagatcaggaaggggcatgacccctgagttatgaaggggagaagggacagatgagcttccggagactgctctcctcaccacacagcactagtccatcctcagcacctgagcctccctcacttggacactcaggggaccacacagagaagtggatggacacttcgccatccaggcagaactaagccaggcataaccacaggcaagcagattaaccccaggcagaccgattccaaagctttcgagatacagtccacaggtggacgggtccccc

SEQ ID NO: 314384 - DNA, 1003 bp, Homo Sapiens
  misc_feature (892)..(946): n is a, c, g, or t
ccccaaggaaggggggccaatggggtttgttcccaattggggccaggccagtggggtttccatttcccagggagagggggccccgaaacttggggagacttgggagatttttatccagggcttgtggagggccctgccttttctttctccttcccggagatagatgacttcattatccagccaacccagaggtcagcaccgacctcaccagcagcaggctcacaggagtggcaggggcattgggagagtgggaggcagcacagggtcagctctttcacgaaaacagagaaacggggcagctctagagtgggagtaggggcacagagaacaggaagggaaggcggccggcgaaggtatgatatcacaccagctcccactgtgggcacccaaacccaagcctcctgggaaagtctgggaactgttaaaaatccacacctcagcatcaccctgccaaggggtggggtggggtatgtacacatccccatcattccttgattgaaggctgcaggagagtggagttcatgccaaggcacttgagatcgaccatggatgcagccaggcagaggcagaggaaggccagccctatcccagagaagggcaggacaggggtggacatggggcccagggcactgtggcagtgcatacagggacctgggcaggcacagtgtcagtcagaggtccagagacctgaaagtgagaggggcgggacccttgaggttcagggaaagagcatcttatactttttccattttgcagtgacttggagatttgtccacaccagtgcacagagacgtgtcctccttttatttcttttaacagccgcttaatgttttatcctagcaggaaccctaccatgggccatttaaagtgtttcaaatcttagggggctgannnnnnnnnnnnnnnnnnnnnnnnnnnnnnnnnnnnnnnnnnnnnnnnnnnnnnntgcttgaggttgggagttcaagaccagtctgggcaacatggcaaaaactcatttctt

SEQ ID NO: 314385 - DNA, 438 bp, Homo Sapiens
  misc_feature (362)..(362): n is a, c, g, or t
  misc_feature (370)..(370): n is a, c, g, or t
  misc_feature (413)..(413): n is a, c, g, or t
ttttcggagaaatggacagtttattactcacagtgaacacagcagccagaacagtatctttagtcactttcccatgcccctattcccaagaagagggcatgtggatcgtaccagctgggcaggcagtgggtctgcatcccaggagagggacccgaaactgggagacttggagattttatcagggctgtggaggacctgcctttcttctcctccagagatagatgactcattatccagcaacacagaggtcagcaccgacctcaccagcagcaggctcacaggagtgggcaggggcattggggagagtggggaggcagcacagggtcagctctttcacgaaaacagagaaacgggggcagctntaggagtngggattagggggcacagagaacagggaagggaaagggcggccngcgaaggttttgattttcacaccag

SEQ ID NO: 314386 - DNA, 670 bp, Homo Sapiens
gtacgcaacgaggtccaggaaggcatagcaatggcgagaaggcacagtccctcccccagggggtcgggcgggttccagcaggcgactcagtttcttcggagtgagaaggttcaggtttgatgcatggatgtccatgccgaggctggcctgtgagtagacgtcgtgacacccgaagcacatgatgctgctgaagctttccttgtacccccccatggtgttggtcagtgaggtttccttcagagtctgtgcccggaagaagtcccgtggctggtagatcatgacgggctcatggtgctcccgcagctgctgggggctcaggtaatgcttcacggtcaggagccctggcagcgtggtggccatgacgttctcaatggtgctgcacaccgagtccagcagcaggcagcacttgatcttctccgtctccaggccgcggacctggacctcaatgccctggccgtggttgaccagcagcaccagcagctcggccccacggttggccagcttgcagccattcacccacaggcggatgtccgcgtcgccctctgtgctttgctggtggatccaccggcacaggttcacctggaccttgtgaaagatgccacatgggaagggggtgaggtgttccacgggcacgatgcgcacgccaccatacaccatcacctcgtcctcc

SEQ ID NO: 314387 - DNA, 1844 bp, Homo Sapiens
cctaaaataaacatggggcaaaataacccaggggaccccttcgttctttcctatatttaggaaaaatcatgttctatgaaggaaattcagtctatggtttgcatttcttactgcccaaaaagcccaactgtaaattcagttctcaactaacaccactgtcaattattagcttaaaaagagagaacattgttaaataaatttaataataaatctaaacacacatgtacacataattcagggggacagaaatgtttatttttcattaatcttttgaatacaatcatcataattttacaggtttagtttagttgcgaacttcactaataacatttccaagagttcacaatttcaaggctaagcttctgattaaagtatcatggttacaaatgtaatataaatggagtttttaaaaaaggctaaaagcactctagcctcttaaaaaatatatataaatggaaaatggccaggcattaaacttagtaacattaagtacactttagtactacagcagtcaaagagatctccactagagatcagaaagaagcaccactattttcttctatgacgtgtatgtgttggtcatgagcatgctagtatgaataaggcaatgtgttaagcactggcatacaaatgcagctaaaggtgctgaaggaaggcagtggggtggtgcaggcacacagcagggagctcttccccgtgacacgttagtcatcttctccacagagcagcagaagagctttcttatagtccccagatgtatctcccttaatcatggaataaagagaggtggcaaaattcttcctaaactccttcctgatgttaaacagatcaatctcactcctggaaaccatgactctgatgagggtatgatcatctgtcccagctcccttcatagcataatagagggtctctgcaaggtaggcaggtatacttcgaatagatttcacaacagcaaggagtagttgctctaaattgccagaagtctcgcggtcaatggtttcctcaatttgaaatcctgatatagtcatgtacttgtcaaacacctttctcaaatgagacacacttcgtgttccaaagatggtgataaacttttcttcatctgtcccccatttaagttctccagcctgaaataaagcctgagcatcttgttcaacttgagcttcatcaattccagcatcagggtctctgttagcctgaaggagaaccaccaacatccgctggtagtaccctgaagtgtcccccaccacgtcatcttccaggcttgagccatattcttcttcataaacttgtttgatggctctcagttcttcaggtgtccttgaagcaataatttctgtcagtactttttcatttgttccagctcccttcaaggcatgtttcagttcataagcatcataaagccgagagggtttcatcagagccacaattaatttttcaaattttccagttagttctgatttcaggtcatccagaagatccctgccaaacagagtcttaaaagctgcagagatttcctggcgctgagcattacttcgggatgtcaacagagtcaggatgctctcctcatctgtgcccaagcctttcatagccttccgaagagtttctgcatcagcccgctcatcaaatccagggaagtcagtcacagtgcctctgagaacctgtgccatggcgactactcaggtcaggggaaggtgaagcaggaccagactgtgggacccaagtgccccgaaaccccgggagagcggcggagagccgggcgacggtacgcggggcgacgccgagatgcagacgctgaaggatccggcagctgcacctagactgatccaagcaacggaaacgccccc

SEQ ID NO: 314388 - DNA, 1018 bp, Homo Sapiens
tctaaacacacaaacttttttcaaaatacactgagccttatgccctgttcatgcgccatttcttagtacttccctattaatcgtacccccctatactcactagacttgtccccgtaatctcctaactcaagcccccttttcttagcgtatgttgccaaccactaatatgataagcatttttaacatgcaacagcactaagtgctaagtaatcatggttgctccagcacacacaggagctcttcccccgtgacacgttagtcatcttctccacagagcaccagaagagcttttctttatagtccgccagatgtatctccgttaatcatggaataaagagaggtggcaaaattcttcctaaactccttcctgatgttaaacagatcaatctcactcctggaaaccatgactctgatgagggtatgatcatctgtcccagctcccttcatagcataatagagggtctctgcaaggtaggcaggtatacttcgaatagatttcacaacagcaaggagtagttgctctaaattgccagaagtctcgcggtcaatggtttcctcaatttgaaatcctgatatagtcatgtacttgtcaaacacctttctcaaatgagacacacttcgtgttccaaagatggtgataaacttttcttcatctgtcccccatttaagttctccagcctgaaataaagcctgagcatcttgttcaacttgagcttcatcaattccagcatcagggtctctgttagcctgaaggagaaccaccaacatccgctggtagtaccctgaagtgtcccccaccacgtcatcttccaggcttgagccatattcttcttcataaacttgtttgatggctctcagttcttcaggtgtccttgaagcaataatttctgtcagtactttttcatttgttccagctcccttcaaggcatgtttcagttcataagcatcataaagccgagagggtttcatccgacgcgtgggtcgacgatatcccgtacttccggaccgtaccacctgc

SEQ ID NO: 314389 - DNA, 594 bp, Homo Sapiens
gcggggtcgtcgccgccagcggctccgagcgccggaagggccaggtcgcagggctcctggagctgcaggcggcgggaggggctacaaatgcttgactcagtgatgcagaacctttcagagttagctggaagccacagccctgcctcttgatgcagcctggatccagccggtgtgaagaggagaccccttccctcttgtggggtttggatcctgtgtttctagcctttgcaaaactctacatcagggatatcctggacatgaaggagtcccgccaggtgccaggtgtatttttgtacaatggacatccaataaaacaggtagatgtcttgggaactgtcattggagtgagagaaagagatgctttctacagttatggagtggatgacagcactggagttataaactgcatctgctggagttgaatactgagtctgtatcagctgctccaagtgcagcaagagagctcagcttaacctcacaacttaagaagctacaagagaccattgagcagtacagagaagagcgagagattcatgccaccgcttactataaagtggacgacccagtgtggaacattcttgcggatgcttggct

SEQ ID NO: 314390 - DNA, 972 bp, Homo Sapiens
  misc_feature (104)..(104): n is a, c, g, or t
  misc_feature (956)..(956): n is a, c, g, or t
gggaatcgccctggaaggtggtgtccttcctaaaaattcaccttgtgcggagcagggcactgtgaatcacaggctgatgggcaagggacagcaaaggactccanccatttccagctcctgctggtaaaagcttctgcactctgttctccatgaggaattctttgggcttttcactccagcaaactcgtgagactggggaggtccagggcgcctggattgcttagtgcctcttctttctttaggggtggagctgtgaaaaggctgggtcataaactttcctgtagatagtgggcaggctcaagcatccttgcaattggaatgttccacactgggtcgtccactttatagtaaggcggtggcatgaatctctcgctcttctctgtatgtgcggatactgcctctgactcggatcgtgtccccgatctctatctttgttttctgctcaatggtctcttgtagcttcttaagttgtgaggttaagctgagctctcttgctgcacttggagcagctgatacagactcagtattcaactttttccagcagatgcagtttataactccagtgctgtcatccactccataactgtagaaagcatctctttctctcactccaatgacagttcccaagacatctacctgttttattggatgtccattgtacaaaaatacacctggcacctggcgggactccttcatgtccaggatatccctgatgtagagttttgcaaaggctagaaacacaggatccaaaccccacaagagggaaggggtctcctcttcacaccggctggatccaggctgcatcaagaggcagggctgtggcttccagctaactctgaaaggttctgcatcactgagtcaagcatttgtagcccctcccgccgcctgcagctccaggagccctgcgacctggcccttcggaaactcggagccgctggcgccgatcccgaatttcncggaccggtaccagcc

SEQ ID NO: 314391 - DNA, 864 bp, Homo Sapiens
  misc_feature (181)..(181): n is a, c, g, or t
ggaccgaatttggggtagaaggcttattctctttggcagatcctctcagtcattatagatattgctgcactgttaattaaatatatgcttctcttgtaaagcatttatgtttaaaaatccaaggatgagatggctgagttctcagctcaagtatctccaaatacattgctgtccattcccntgaccctttccgtgtgttaatttcttggtttttttccggatcaatgccattctctgttttgtgagcttctgtggtgcaagcttttttgtagggtcggatttcttcagagccaagtcctgggatccacatgttccactggcgctctaaatgcagctggacatctttcacctccagggtgctagacttgcgatgccgcgcaagctgacaggctgctgtcaccacactctcgataaaatcatcagcaatctgcagcagcatctcctccacatcttcatccaactgctcattaggatccacttctcttactaagtcctgtaatttcttcttggtcaatacctgattgttttcagggctaagacgacctcctgccccaggagtgcctggtatctttaccactgcagtactattggccatggagccttgtggaggggtgctggctggttccggttttatggatgagaaattggagaggttgattagggctgaggggccaaactggttcataatctgccgagctttggacttcagctcatagagcttatcgagatcctgtttctttttggagctgtgaggaccaaggccaattaaaggcagcagcgtctatctccccatgatatgcagagactgccccagtgaagcgttcgtctcagcagccggtccgactgcgcggccctccccgaccc

SEQ ID NO: 314392 - DNA, 506 bp, Homo Sapiens
  misc_feature (480)..(480): n is a, c, g, or t
  misc_feature (485)..(485): n is a, c, g, or t
attttcggcacagtacgcttcactggggcagtctctgcatatcatggggagatagacgctgctgcctttaattggccttggtcctcacagctccaaaaagaaacaggatctcgataagctctatgagtgaagtccaaagctcggcagattatgaaccagtttggcccctcagccctaatcaacctctccaatttctcatccataaaaccggaaccagccagcacccctccacaaggctccatggccaatagtactgcagtggtaaagataccaggcactcctgggggcaggaggtcgtcttagccctgaaaacaatcaggtattgaccaagaagaaattacaggacttagtaagagaagtgggatcctaatggggcagttgggatggaagatgtgggagggagatggcttgctgcaggtttggtggatggatttttattcgaggagtgtgggttgacagccaggcctgttcagctttgcngcggncattcgcaagtttttggcacc

SEQ ID NO: 314393 - DNA, 1066 bp, Homo Sapiens
  misc_feature (104)..(112): n is a, c, g, or t
  misc_feature (141)..(149): n is a, c, g, or t
  misc_feature (439)..(439): n is a, c, g, or t
tcggggcgatagccagggccctgtgttgttcgcggaaaggccttgggaaggcctctaaggggagttattgaaagactttggccaccccgagagggagaaattcnnnnnnnnnccaattaagggtttcctttgggagatccnnnnnnnnnctatcggatttaaagtggcaggcttccagctgggccaataaataggtcgttactggaggggtatccaaggaagaaaatggttggtggatgggatcaattcccgaaaatgttttccccaaagggggggtggtttttaaacaggtttcaggtcaacaacccttggcaggaaaacactgatgccccaacacactgattcgcggtccaggaaacacgggtcttccaagttccaagggggctggggtcccccaacgatcaagttcctgtgctgtaatcaagagggtcctttggantggatagggagcacttgggagctgtacaccatcagtcataatggatgggcagtgtaaaagatgatccaaatgacttagtgaggagacaagcacatgaacaaggcaaaagaggtcataaacccttccttcgtgagctcccacgtgccaccatattcttcctcatcaatctgtaggtaattgctgaagtagaggtacaggactcttgcattgatcaggcagaatcctgctattcccaagaaccttcgtaatggcaaaactccccaaatgacacccaggaccacagcaatgatctgtcggaaccagtagatcacatctaaaaattcatctttatcctcccaggccgcgtcgctccgcagcactttactccagacggagactttgagggccccgttggccagctgcggctgaggcggctcttccttccgccgcccgccgctcatcctcccgtcgcgccgcccgggccgggcctggggcgcgcgggctgagccaaagggagtcggggtctagggtcgcaggtcacggcgcggggcggctgcaggctcagcggcccggtcttgcggcgcgctgcggttcttcacaacctggccaagctacccggttccttcgtctgagagtcgcctctcagcc

SEQ ID NO: 314394 - DNA, 1355 bp, Homo Sapiens
  misc_feature (116)..(126): n is a, c, g, or t
  misc_feature (148)..(159): n is a, c, g, or t
  misc_feature (357)..(358): n is a, c, g, or t
gagtaagggatcccccgcccgtgtgaaaaagggggcccccctccaggaaaaatctcccccccttcttgtggggggtattttgttttttaaagaaaacacgtgttccggtgttttgnnnnnnnnnnnggggggttgtttttttatattnnnnnnnnnnnnatttcccaaaccgcccttttgtgtcattgaccccgagggtttcttctctttggggaaacccggttatattgccccaattttccattttcccctaatggggggccccgcggcccaaaaggaaaagggttttagaaaagttttttgagggggcccggaggcggccgaccagggattttagtgtatgtgttttgttgtttnntattaaagatttgatttattcaagtatctgaaaacattctacaatggaaactgttattagatgctgcatgtactgtgctatggaccacgcacatacagccatgctgtttcagaagacttgaaatgccattgatagtttaaaaactctacacccgatggagaatcgaggaagacaatttaatgtttcatctgaatccagaggtgcatcaaattaaatgacagctccacttggcaaataatagctgttacttgatggtatccaagaagaaatggttggtgatggataaattcagaaatgcttccccaaaggtgggtggtttttaaaaagtttcaggtcacaacccttgcagaaaacactgatgcccaacacactgattcgcggtccaggaaacacgggtcttccaagttccaaggggctggggttccccaacgatcaagttcctgtgctgtaatcaagagggtcctttggactggatagggagcacttgggagctgtacaccatcagtcataatggatggcagtgtaaaagatgatccaaatgaccatgaacaaggcaaaagaggtcataaacccttccttcgtgagctcccacgtgccaccatattcttcctcatcaatctgtaggtaattgctgaagtagaggtacaggactcctgcattgatcaggcagaatcctgctattcccaagaaccctcgtaatggcaaaactccccaaatgacacccaggaccacagcaatgatctgtcggaaccagtagatcacatctaaaaattcatccttatcctcccaggccgcgtcgctccgcagcaccttactccagacggagactttgagggccccgttggccagctgcggctgaggcggctcctccttccgccgcccgccgctcatcctcccgtcgcgccgcccgggccgggcctggggcgcgcgggctgagccaaagggagtcggggtctagggtcggactgaggcggctcctccttccgccgcccgccgc

SEQ ID NO: 314395 - DNA, 526 bp, Homo Sapiens
  misc_feature (414)..(414): n is a, c, g, or t
  misc_feature (442)..(442): n is a, c, g, or t
  misc_feature (457)..(457): n is a, c, g, or t
  misc_feature (480)..(480): n is a, c, g, or t
  misc_feature (493)..(493): n is a, c, g, or t
ttcaaaaattaaagatttgatttattcaagtatctgaaaacattctacaatggaaactgttattagatgctgcatgtactgtgctatggaccacgcacatacagccatgctttttcagaagacttgaaatgccattgatagtttaaaaactctacacccgatggagaatcgaggaagacaatttaatgtttcatctgaatccagaggtgcatcaaattaaatgacagctccacttggcaaataatagctgttacttgatggtatccaagaagaaatggttgggtgatgggataaattcagaaattgcttccccaaaggtggggtgggtttttaaaaagtttcagggtcacaaccccttgtcaggaaaccactggatggcccaacacactggattccgcgggtcccggggaaacnccggggtcttccaagttcccaaggggcntgggggttcccccancgatcaaagttcccggtgccggnaatccaagagggncccttggcctggaaaagggagcccttgggagcc

SEQ ID NO: 314396 - DNA, 516 bp, Homo Sapiens
  misc_feature (41)..(41): n is a, c, g, or t
  misc_feature (50)..(50): n is a, c, g, or t
tggaatagttttaaaaaaaactcccaacaccccgatggganaaatccganggaaagaacaattttaatgtttccatcctgaaatccccagaggtgccatccaaaattaaaatgaacagcttcccacttggccaaaataaatagctgttaacttgaatggtatcccaagaaagaaaatggttggtgatggataaattccagaaatgcctttccccaaaggtgggtggtttttaaaaagtttcaggtcacaacccttgcagaaaacactgatgcccaacacactgattcgcggtccaggaaacacgggtcttccaagttccaaggggctggggttccccaacgatcaagttcctgtgctgtaatcaagagggcctttggactggatagggagcacttgggagctgtacaccatcagtcataatggatggcagtgtaaaagatgatccaaatgaccatgaacaaggcaaaagaggtcataaacccttccttcgtgagctcccacgtgccacccatattc

SEQ ID NO: 314397 - DNA, 540 bp, Homo Sapiens
atctaaggaaattttattagaacctcaggcctcctgactgggctcaatatcacatctccaggtgcaccaactgcctcttattttttcctgttgtcacttgtttagtaagatgttggatcaaagtgtcatttaaataaggcatcttgtaaataagcaggaaagtaaactggtccatgtctatttttaactagtctccctacattattctccatcctggatgagtttccatcttcaaggccaagttaaaagttctaagcaacaggttttcccattaccttagtcctcatgaaaatttttccccaagggaagcgaaggatatttcagtttaggaaaattagctttcctgctgtatagcggcctcttaaatatttttttctactcaattaagagctccattaagtgggtccattgatccgatattgatgttgatgtacctcaaagttgaggaagctgccgcctgtgttccgctgatggatccgccttttggccctgctcggtgtcgctttctgctccttgcgacatccttgtgggcccccctct

SEQ ID NO: 314398 - DNA, 1238 bp, Homo Sapiens
  misc_feature (803)..(803): n is a, c, g, or t
  misc_feature (851)..(851): n is a, c, g, or t
  misc_feature (964)..(964): n is a, c, g, or t
  misc_feature (1015)..(1015): n is a, c, g, or t
ggctggtacggtccggaatcccgggatatcgtcgacccacgcgttcgcaggcgtctcagtccacgttctaacccatgtgagaatatttgaactgtggtcagcaccagtgtgctgagctgtgccatgggggtcagtgccagcctgccagatcatttgaaccaggtatgctatgcggcagcacctcccgagatgtgttatgtggaaccgatgtaggaaagtctgatggattggggatttcagctgtttaaagatatgtggcaaggacttgaaatgcggtaaccatacatgttcgcaagtgtgccaccctcagccctgccagcaatgcccacggctcccccagctggtgcgctgttgcccctgtggcaaactcctctcagccaattgctagaacttggaagtagtagtcggaaaacatgcatggaccctgtgccttcatgtggaaaagtgtgcggcaagcctctgccttgtggttccttagatttcattcatacctgtgaaaagctctgccatgaaggagactgtggaccatgctctcgcacatcagttatttcctgcagatgctctttcagaacaaaggagcttccatgtaccagtctcaaaaagtgaagatgctacatttatgtgtgaccaagcggtgtaacaagaaacggttgtgtggacgggataaatgttaatgagatatgctgtgtggataaggagcacaagtgtcctttgatttgtgggaggaaactccgttgtggccttcataggtgtgaagaaccttgtcatcgtggaaactgccagacatgctggcaagccagttntgatgaattaacctgccattgtggtgcatcagtgatttaccctccagntccctgtggtactaggcccccttgatggacccaaacctgcgctagagtccatgagtgtgaccatccagtatatcattcttgcatagtgaggagaagtgtcccccttgcacttntctaactcagaagtggtgcatgggcaagcatgaagttcggagcaacatccnctggcaactggttgatatctcttgcggaatacccttgcatgccacggctccactgggggatgcacaaatgtcagagactcttgcaccaaagggaagtggcttggtggatgagccttgcaagcagcccttgcaccacaccccacaagcttgactggtcggtacaccccgtgtcttggcaacccctgtcctataccggcttcccctgcccttgggctgcctctgg

SEQ ID NO: 314399 - DNA, 519 bp, Homo Sapiens
  misc_feature (21)..(21): n is a, c, g, or t
  misc_feature (24)..(24): n is a, c, g, or t
tggttgttgatggcttccatntcnggagacaaagaaactttatttatacaaaactccaccccttctgttccactctcctcagcaaacacagataacaggtgatgaaactaaaacacacagacgagcattactcaacccaaggttcccgccttccctagcacctgaggtctgggccaacatgcagggtaactggtgccttatgcctgctgtctggattgcccggcccacagggtggctgagcatatttattctgggggttccatgcatacgaggagcccccagccatacagctgggcatgggtgtttggcagcaaattgtccctgctttagtcatagcaatttttcatgtcctctgttgctccccttaactgaacaccccttgacagccgggattctgcctccagcatcaacctaaggaagctctgttaaatgaatgagcacctctaggcaatgaccaccctccctgaagttcaatttctcatcgatttcccaaggccgcccaagtcattcccttgatcc

SEQ ID NO: 314400 - DNA, 407 bp, Homo Sapiens
cttatctatgctgtgcaaaggaataagaaactagtgctgtctcgggaaccagcaacacagatgttcccaggagcaatgtttgcagggttctatgaggctgaaaatattggatcagtattcctgaggaatctgcgtttcagaatcccaggtccggaagagacaagaagtactttgcaaacaaatcaaatgtacgtttaggaagatgaaatcatgcaacagaaagatttttcagaatttttcagcaacagattttacacacacttcagaaggaagaaagaacagatgagtttgggaatcaggagaccagatgtcaagactggactacatctttatattcatttccagatttaaagttctatgttgtattttatttgatgcacagcaatataatattcctccctcctgtg

SEQ ID NO: 314401 - DNA, 1516 bp, Homo Sapiens
  misc_feature (202)..(237): n is a, c, g, or t
gacggtgtcaaactctgctttattggaatagagaatacaggcagcaggaatcacgcttggtgctggcagctccaggtcccctgcccccacgggctctcccacttgtctggatcaggggagacctccactttgaagaacaatatggggtgggagcttccaatgtgcattctgctaccagcctcaggattagcagcaagatgcnnnnnnnnnnnnnnnnnnnnnnnnnnnnnnnnnnnnaggactggactcgacacttcaggaaaggacgtgtagaagagaaagtcagacccacagtgtcacgtgttaacaacggtcccacaacagcagacaggacactggtgtgcacggctgtaccacctgtgggaggctgacagcacacggacagccttgaggggcccggcattctcactcccaacatgagaaagaattaacacaacacacacacatgttcacattctctgcgaggacagtcaaattaaggtaccaaagggaggataaaacatttttagagaacacaaaagcctgctgccctgccccagtaggcgtcaggctggacacgacaggctggctgtggcctgggctagccggtgagctcgacaggcagctcacggccacacagggcctcccactggcgagccaacagcgagatgagcttctctctgctctcagcactggggacaaacacctgccactggacttcacggccctggctggctctagccgggccacctggcacctccccaaagtggtccagggtgacactgcccatgaggtcatgaccttgcacgtcatcgaagacgagggtgagggcctgcgggtaggtctggtagcccatgagcactcggtccaggtcccggacgcggcggccatcgtccagccggtacctgtctctctgcggcggctctttggcaaactcgggcagtgggtagtggacacagtcctcatccaggaggaagatctcggagctggtgagcaggagtgtcttggggcgcagggggcccctgcagcacccagggggtggcatgcccacctggaaggcctgcacgtacagcagtatgctgaggtctggggccttctctggctcagccatcttttgggccacagtgaacgtcaggtccccaatctcctcctcactggggtaggtaaacttgacgcgactagagtggatcagctcgtagttctccatcttccctgtggtcttgttcccaaactcggagtagaagtccttgtcaacaggctccggcgagggcgtgcgttccagagaggacagcacgaccatgaggtgctgaaggaagcagtgcgtcaggtagctgtcccgcgtcaagcacgtgaccacctgcatcggggtggaacccgtcagccggaaatgctggtcgaaaagccccacattgactgactgcaggtcactaagcttctgatgccagaaatcctgcagtggctctgagaagtagcggcggaggccgtcgtggagcacagagtacacagccttggtggagagcagcacgcaggcagtcac

SEQ ID NO: 314402 - DNA, 638 bp, Homo Sapiens
acgagattttcaactcctttatgtcaaaggcaggattttaagacaataaattttcctttaactgtaactatagctgcacctcacacatttttacaaatagtttcagttacaactcagtactagatattttttaatgtctgttatcatttatttcctgtttaattaatgatttacctaaaagcattttcaaaaacttattgccataaatgtattcagtctttttccttttctaatagcttgaaactagaagttgaataagatcttgcccagaaaaaaagcatgtttttaaatccccaaatttatagagttctttttgctttttaaaagattattgatttataacttaatagcattatggttgatgacttggtttatatgatatcagttctttgctatatgttgagatgtgttttgtggcctaaaatgtggtcaatttctgcaaacgtacaatgtgcacttaaacagaacatacattctttttttattaggtacggaaatccatatatgtcaatttatataagtggttccaatccttttaatgacatctcatatatagaaaattctaatatttgtacagcacagtagcatgttggagttgatttgatgtcttgcagggcttacttatttttgtccctttt

SEQ ID NO: 314403 - DNA, 647 bp, Homo Sapiens
  misc_feature (386)..(386): n is a, c, g, or t
  misc_feature (633)..(633): n is a, c, g, or t
acagcaacgcttgatctctataggcaaatggattgctgataatcagccaaggctgattcagtgtgaaaatgaggtaggtaaattgttgtttatcacagaaatcccagaattaatactggaagaccccagtgatgccaatgagaacctcattctgcaagaaacatctgtgatcgagtcgctggctgcagatgggagcccagggctaaaatcagtgctatctacaagccgaaatttacgcatcaactgtgacacaggagagaagccagtggttaccttcaaagaaaacattaagacacgagaagtgaacagagaccaaggaagaagttcttcttcaagagaggttgtaactcaaacctcaactcaagcaagtaactcccagttcatcnccattcatcacccttgagcctttccttctcttctcagtaggccagggtttccgcccccacatatggtatccccccgcttgtggcatttctatggctcaggttacaccttcccagctggtgcttctgtcccaggaacctttcttaagctacaagttactcttcagcaggaaacaggtgcaagctgggcagtcccacattctttacagtcagaacggccctttggaccaggccaatgaccagggacctnactacaggccttcc

SEQ ID NO: 314404 - DNA, 1696 bp, Homo Sapiens
cagtgacaaacttttattcagaaaataaaagtattatttcattttattattcccaaagaatcaagcccatcatgagtagcccacatggttgctgttcaaaggtactgaaaagggaggcatttggtcaccattacccatcaaggaactctttacaaggataggttccaagtccttcgtgctgctcttggtcattcagtgactgcagttttggcccagaagccatccaagatgagcaagtgctgagccatccttaactcatacctagatgaaacaacttgcgcagaaacgctggtcctccccagtaaccccttagcatcatattccaatacaggaaaggcatcaggtcagctttcatgagatacatggaaaggcgctctttgctttgatcaaaggggaaggtttctagcggctctgctttgtagtcaaactcagcaagaatcacacggttgtagccggtcaccagtggacatgatgtgtagccatcatacttctttgttggtgtttgattcttcataattacagaaattgtcctatcaagtattcctgactgggcagctactgcagcagcggtctttgacgtaggaaggttggtgcagtccccaatcccaaacacatttgggtacctcctgtgttgcagagtttctttatccacatccacccaaccagcagcatcagccacaggactggtcttgaggacatctggtgggctcattggaggtgtgacatgaagcatttcatatgaaatcacttgggtctctcctggtttgtccaggttctcaaatacagcctcttgtttatcggctcggacttcaatgaggtttttcttgtagttaacagtgaggttccgctcctggatgatctcctgcagggcatctgcatacttcttaaccccgaaaatggctccaagagaagtgttgaaaatgatattggccttggatcgcttccctgtcttcctgaagtaggcttctgataagtacatgatcttctgaggggctccagcacacttcactggagtatttgggaaggtgaagatggcattgccctctttgaagtcctgcagagctttccatgtcttctctacagtcttaactgaataattcgaccctattttgggatgagcgaaaccttcaggtaggcctttaatcttctcatagtccagctggattccgagagcaataataagatatcggtaggagatcttctcgtcgtcatctgtgtgaatgcagttcttgtctgggttcaactcagtcactctagctttgatccattctacaccagatggaatcacacttgccgtgggacgaccagatgaggacaattgtttggcaccagcacccaccagtgtccagattggctggtagaaatgtctctcactgggctcaacaatggccacattctctgcacccactttcctcttcatgcgggcagccatggtgattccgccactgcccccacccagcaccagcacctcataatggttcctggccgcatggctggccccggtgtgcagctgaagggggccgacctgctgagtgcccagcctgagcaggcaggcaaagagctgggcacggggccctgataccacagccaccagtggcaccatcttcaggcaggatcaggccgggcgtgagcggagccttcggtcactgcgttggcgcagcaaaaaccttcgctcccttctgggtctcaaggcctg

SEQ ID NO: 314405 - DNA, 453 bp, Homo Sapiens
cccaatacaggacaaggccatcaggtcaacctttccagaagaataacatggaaagggcgcctcctttgcctttgaatccaaaggggaaaggtttccttagcgggctctgcctttggtagtcaaaactccagcaaagaatcaacacggttgtagccggtccacccgtggacatgaatgtgtagcccatcatacttcctttgttggtgtttgattccttcataattacagaaattgtcctatcaagtattcctgactgggcagctactgcagcagcggtctttgacgtaggaaggttggtgcagtccccaatcccaaacacatttgggtacctcctgtgttgcagagtttctttatccacatccacccaaccagcagcatcagccacaggactggtcttgaggacatctggtgggctcattggaggtgtgacatgaagcatttcatatgaaatca

SEQ ID NO: 314406 - DNA, 368 bp, Homo Sapiens
  misc_feature (336)..(336): n is a, c, g, or t
acttttattcagaaaataaaagtattatttcattttattattcccaaagaatcaagcccatcatgagtagcccacatggttgctgttcaaaggtactgaaaagggaggcatttggtcaccattacccatcaaggaactctttacaaggataggttccaagtccttcgtgctgctcttggtcattcagtgactgcagttttggcccagaagccatccaagatgagcaagtgctgagccatccttaactcatacctaggatgaaacaacttgcgcaggaaacgctgggtccctcccccagttaacccctttaggcatcatatttcccaattacagggnaagggcattcagggtcagctttttcatggagg

SEQ ID NO: 314407 - DNA, 1370 bp, Homo Sapiens
  misc_feature (585)..(620): n is a, c, g, or t
aacaccaaaagttcaaatgctgcaaccatgacaagtcagcatcattagggcatcctcgtgtccccagagacatctcatcaaaattgcaccacgtcaaaggagcttcctcaccatcaactgtggcaggtggcattcctttttcagtatgcaaatgcattatttacaaacagctaatgcatggaaccacagaccaacacgtaggattccagaacaaatggaagacagagcattaacaacattgggagtgcctgtgcacttccactggaggcctggccagagaagtaataacatcatagtgggctgcagtccacaaacccaaggtgtcctgtcccagagctcaatgtcaaaaatacttctccagaagactacatggctaaagagttgggggtaggtaacatgggaagtatatggcacagagaagtggctaacaggcattaggtttcaaagcccacaatttaatacatggtaataattaaaaccaattaccggtatttaccttaaaaaacataaaccccagacattcgtctcatttcttggccttatgttagaattctattgcttcatttacatgtagatgattaaaannnnnnnnnnnnnnnnnnnnnnnnnnnnnnnnnnnntttgattatgtacataaagcagattcaagggttaaaataaaaacagaattttggagtgtggtcaaataaggtgcacagattccagaaccctcagagggcctgctggccctctcccagacattctgtgtccgtggtgcaggagctgggcccgtccctaacagctccgcactggcttagtgcagtggtgctcacagtttcaggaactactaggtgaagtgtctggctcaagtctgccaagtgtcttcactccatcgtcagaagtggagcactatccctaggttcgattcccatgaaatattttatgatttccatcctctttgcccgctcttccaaataaggccctgtgatgccaacgaagggggcatggttgagggtctaaggctctcattagggcctaattctgtgtggatatcaacacatgacagacacttgactgcaacattcaagacatttaaggcagtgggttcatttaatgactacttttccaaataaatatttgtggcatgggcagttctaccatgtaactgtcattatctgtggtaatatctagcaaggggctgttctatttgaattggcatgtggattactggtttggaacactcagaatgctgggagacctgtttaccccctgaatacttacttcccttctgaatattcacacagcagtccacagaccaaagtgctgttgggaggatgtaattggcagctggcttcattactttgtgaatgaaagcaaaacaaagatatttt

SEQ ID NO: 314408 - DNA, 1138 bp, Homo Sapiens
ggaggtgtttgggcttcaagtctgtcccgagtgttttcccactcccttggtcagaaaggggaggcgttttcccctgggttcggattccccctgaaaatattttagggattccctgcctctttgcccgctctttccaaattaaggccttgggatgccaacgaagggggcatgggtgaagggtttaagcctttcattagggcctaattcggtgtgggatatcaacccatgacagacacttgactgcaacattcaagacatttaaggcagggggttcatttaatgactactcttccaaataaatatttgtggcatgggcagttctaccatgtaactgtcatttatctgtggtaaatatctagcaaggggctgttctatttgaattggcatgtggattactggtttggaacactcagaatggtgggagacctgtttaccccctgaatacttacttcccttgtgaatattcacacagcagtccacagaccaaaggtgctgttgggaggatgtaattggcagctggcttcattactttgtgaatgaaagcaaaccaaagatattttactttgacccccgatttccagtcttgttaatgccagtcactcccaccagaatgctggctgaagaccaacccacagaggactaaggcaatggtgccaatatgaaagggttctttttaattgtttttaagagcaatactttacagactgtcttgttgtcaaacaaggaacatggcactgcttaaacaccaaactgggaaaggctgcaaagagagcctgggctctccctgtggagctcttcctctccctggtttggggcaatgagtcccacatctagacaggcttccccaacccttggctcagaaataggctgtgcttcaaaggagaagaccaagagatggacttgggccacatcagcttggtggctggttgaggccacaggttctcaagagagaacagtcagcttatttatcaaacaggatctgatactgactgcagtttaaaatccatgctacacctaagtggtgctgtggcccttttgcctttgtacccttcagtggccaatgacaggaaggggttacaggtggtggaggctgcaatgggatgggacactctgtttctgaccctgtccgagtttgtag

SEQ ID NO: 314409 - DNA, 342 bp, Homo Sapiens
ccctcttccaaccccacccaccaataaaaagagatttccaaatgcatcatatagtcatcaagacatggtaaagtctgtttcaaaattgtattcattctagttggtgtttagaggcatcttattatggttttaatttgcattcctttgatgactgatgatgttgagcatcttttcacgtgcttattgccattcctatatcctctttcatgaaatgtttttttctattttgcccatttaatttgggttatgtcttatcattaagctgttaagagtgtctcacatattctagattacattttcactctcctagtggtgcctttccaagagcagcttttagttttg

SEQ ID NO: 314410 - DNA, 1336 bp, Homo Sapiens
  misc_feature (1077)..(1118): n is a, c, g, or t
aactagaaccctgtgtgcataggcctgagggtgatgtcggcagtacagggtggccagaggcaaggggtgagggatcaggggcagtggtcacttagcagttccagggtaacagggcctttctcccaagtaccctgcacaggctcagtggcagcactggccacttgccttcccaggagggtcccaaaccccaacagagtgcctcagagtagagagggttcagaccatgagccaccggttggaggtgacagactggaagtacttgaggatctctgaatgggcggcctcaacgtccagctgggctcctagcacgttctcgtcgatcctctgaatggtttcctcctgttccttaacccatgtgtgccaactgctgaaagatggagcccaatctcaacaattgtcgactcaatgttctgcatggtgtctgcccgactctggatgtaggaatcctgctcgtcaatgagctgcagctgctggctggtccgagagtccatcatgtcgatggcgacatctttggaggcatgggactctgcccccagaaccacagcaccaccgcccaggtggttaggggcaaggggcagggctgacacaggtgcccgggagaactgctctctccggctcctctgctgcttcaggttctctgtcctcacttctaaaaccgatttgaagtcattggacatagaagccagtttcgactgcaaggagaccacaatggtgttggagtgggtctgcaggtgccggccactctggctgcccttggccctcacgaaatcctggagctgagcaatttgtttgttgaggctattgatgtcctgtttgatgatatatgttagctcttcaatttccactgctttatcatcaaagagggacttgcgctttgccaagattgtcagcttctccagcttggcaaatgtgttgctaaggtctttcccaatgcgcttggccatgagggtgaattcactgcgttgtcggacagcacgcaaagctggcttatttgtctggattccattctgacgggtctgcagcgacttgcaggcagacagaaactcctgggtccgatcccggcaggacatggtgtcnnnnnnnnnnnnnnnnnnnnnnnnnnnnnnnnnnnnnnnnnngatgtcgctgctgctactgccagcagttgcaggggacaggacctgtgtctttgagagacccaggtagacaccctgatccgtgttcttagacccgtagcgtttccgcgggatcattgagacgcataacctcggactcccctctgccgcctgccgccgccgccacttccaatctcaccggccgtcactgcctcctccccgagcactgaagccgccgaaac

SEQ ID NO: 314411 - DNA, 1383 bp, Homo Sapiens
  misc_feature (1208)..(1208): n is a, c, g, or t
agtaaaatccattgtagttgcatctggattgaagagctttaatcaaaaagtgtattgcaccacagatgaatttgctacagcagttttcaagaatacaatccctatttacaacatggaaggagagctcaagatccatcgctcgtataaagggctatagataccgtcgctaacacagaaagttttatacaagtcaaagtgcattaaatcacttagaatatttattccactcttcctcttaaagctgaaggaaattcaacatgcaggaggaaagcctagtcagtgaagcctccctaaagtgagtacagacctaggaacggggccccacagctacacctgaaactgccgaggagtggggcctggggtgcgtgtgggaccagttcaatggctggagaagccacggaggcagcggacgggcttctgtggaaatggtagctgccttgggctggctgtgagctacccagtcttagagattctttcctggaacagttgaaaaaggaaatcctactttgaaaaaaggctacctcttacccatcaaacttgcagaacagaagagactcctgtttcgtgttcccaccaggtaaatggaaattcgtgttctaaacaagggataactgtctgcaagtaggagccagaggaggaggttagtcactggagaagcggcctctggaaggcagagagcctgagctgggactaaggagatgctgccctgacttggttcttcatggaaatttcgttaggttaacgttgcaaatgcgtgtttttctgtgacacattttatatacctattttggccctaagcatgattgagaaatacaactttccatcactggataatggataataaatttagaggctccagttattaatttagttttttatttaaccagtgaaactttcatcaaacaataaacggtttccttttagattcaatattgtggcttttccagaaccagcatgttccctttcctcagtaaacgaggaatccataaaacaagtttttgttggttactaccagagtcatgtgcatgctacaagtgctgcagccagctgggcgccgtctgggtgtagtgtcattttaaggtatttgggggtggggatgaggggagagagaggcagctccacagacaagggcaggactgcccccaggtgtctccatcgagggctggggggacagctgctgccccccactgggagacagccggactgtnccttcagtagaagacaggtggtctgcagtcgcccagcggcagcgcagcacagaatcaagacaaagcacacgagatcccactgcacttcagagggagcagtgccagagtgcgagtgagaagacaaaggaacaggaatcctagttttaggaagaatttcctctggacgctctgattt

SEQ ID NO: 314412 - DNA, 926 bp, Homo Sapiens
tcaccgagggagatttatttggaggtgggtccccaacctagggggcctggacttctgaaatctaaactcccccactttccctcattttgtgacttaggtgggggcatggttcagtcagaaactggtgtctccttattggatcgtgcagaaggaggacctaggcacacacatatggtggccacacccaggaggggttgattggcaggctggaagacaaaagtctcccaataaaggcacttttacctcaaagagggggtgggagttggtctgctgggaatgttgttgttggggtggggaggagttatttcaatggaggagttatttgcagattgcagagagaaatgagggaagttcgcctacaccgggccatctgcggggtcagtgggggctgctgtatgtcttggctgccgaacggggaaggtgacataggcatcatagccaaagaggcacgtagcgattaggcccagtacccctgcgacgattttggagtggtttcctctctcaacaaggacaacaatggaggtgatcaggtagaggattgccgctatgagggttcggaagaaatcactccagggccagttgatgaatggtatcttggtgtgcaggtcacacatgtagacaacaaagaaaatagcagcaaggatcatctcaatcaccgacagggaggagtagcctggtgtggaggcactgaagcagatcaggatcaccaggcataatataatctcagcaaacaggaggattccctttcgagtgcgcgagaagttggtgcaggcggcccagcagccaggagccgagaggcgctcagaatccgccatggcatgggctggagtccctggtgcctcggaggatctgctcacttgctcgtggtttcgaggacgctgtacacccagctgtcttgcccgccgtctggccgggaagggggcccc

SEQ ID NO: 314413 - DNA, 1414 bp, Homo Sapiens
  misc_feature (224)..(246): n is a, c, g, or t
  misc_feature (466)..(480): n is a, c, g, or t
  misc_feature (518)..(526): n is a, c, g, or t
  misc_feature (540)..(573): n is a, c, g, or t
  misc_feature (780)..(796): n is a, c, g, or t
  misc_feature (807)..(922): n is a, c, g, or t
gcggaggcggtcggtcttttcggggaagaaaaaaagaccgcggccacctcgatttctctcctatcaagaggggggtgtatatgagcgagaagaaaaggtttcgtttctgttttgcccaacaccacaacaaccaccctgggtgaggagggttgttctcccaccgatgtttgtgtgtttataaagccctggggccccacaatgagggacaaccactttttttctannnnnnnnnnnnnnnnnnnnnnntgggggggacatatatttttattcctccaagagcggcgccccacaaggtgtggggaggtacgcccccgttgggggaaattataagggggtgcacaccaaaaaaacgccgtttgtggggagagggggtttttccacgctctccggcggcagaaaaaggaccttgtaacagggaatatatcgcgacccaacgtttccttctcgatatgtatgttggccagcnnnnnnnnnnnnnnnaaaaaaatttataattgaagaacctcgccgcgcggggnnnnnnnnntttcgctagagaannnnnnnnnnnnnnnnnnnnnnnnnnnnnnnnnntttgcagaagtttttttcagaaacagcgtcggggtttagcccccggggcggttgttttttattgtggtggggaaagatcccacacccccgtgttcttatggccccgggtttttcctttttgagaaacaccgttaggcgccaatgttcccctgcccgacgaggggggccccggcgccccaaagaaaagggtttagaaaaaattttttnnnnnnnnnnnnnnnnnccccaagaaannnnnnnnnnnnnnnnnnnnnnnnnnnnnnnnnnnnnnnnnnnnnnnnnnnnnnnnnnnnnnnnnnnnnnnnnnnnnnnnnnnnnnnnnnnnnnnnnnnnnnnnnnnnnnnnnnnngtggattttgttggttggggatattttaacaatgtttattattcatttatccctctatagaaccaccacccacaccgaggagattatttggagtgggtcccaacctagggcctggactctgaaatctaactccccacttccctcattttgtgacttaggtgggggcatggttcagtcagaactggtgtctcctattggatcgtgcagaaggaggacctaggcacacacatatggtggccacacccagggagggttgattggcaggctggaagacaaaagtctcccaataaaggcacttttacctcaaagagggggtgggagttggtctgctgggaatgttgttgttggggtggggaggagttatttcaatgggaggagttatttgcagattgcagagagaaatgaggggaagttcgcctacaccgggccttctgcggggtcagtggggggctgctgtatgtcttggctgccgaacggggaagggggcatagg

SEQ ID NO: 314414 - DNA, 816 bp, Homo Sapiens
  misc_feature (30)..(30): n is a, c, g, or t
  misc_feature (63)..(63): n is a, c, g, or t
  misc_feature (432)..(540): n is a, c, g, or t
cttcctgaggtgcccatctcatcctcaagnctgtacatcaggtacgcttccatggtcccaacnagccagtggggctccttggtgaaaggcatctccatgccatgaaattgcgccatcttcgtggcaatggctgctgacaacactggctctcgaagctcttgagttttcaatggccgacttgggatgtactgttccagccggccctctgggaagactccgtacagctggggccccagcgaccgctccgcaagtatggcgaacatcacgctttctagcaccagggagtccacgccctgaaaaaggatggacagcaaaggggccaaggcaaagtggcacagggacacacatgagggctcgccttcctcccaccagagctgcgacttctgatccaattgcctggaggctctggagcacaggctttagcgttggtcnnnnnnnnnnnnnnnnnnnnnnnnnnnnnnnnnnnnnnnnnnnnnnnnnnnnnnnnnnnnnnnnnnnnnnnnnnnnnnnnnnnnnnnnnnnnnnnnnnnnnnnnnnnnnccaggcttcggtgtaatgaggtgttactcagaccgtgaacctcggtgtcctcaactgcgcaacgggaccaatactacccgcatcgcgtaagcgacaggccctaaagccactggtgctgcggcgctcacaaccccctcacctgcaagatggctccgtacagccgcagaagcacctcccggggctcctcgccaacgctgggcaggtggtccgggagcgagcagcggaagagcaggttgctgaggcctccgctgcagacccacaccaggcgcgctcagc

SEQ ID NO: 314415 - DNA, 364 bp, Homo Sapiens
aaacagcacaaagtatatcatatttttacacatcagacaccttcaggaagaaaggacatttctcatcttagtgtgacagactctggccaatatcccctttgaacatctgctttcgctggttggtaaaaaagtgtcattttaaatttagtgttactccttcaggctattccctctctcttcttacttgcagggccaaagcaacgtctctttccaccttggtcaccttccaacaacgatttcttcggacgcctttgttaatcattccgtccccactgaaccaccacttgactcgtgcgcacccctaaaacctctgcgcggctccgcggaatcgtcccagtactcctaacatggcggccgagtcccc

SEQ ID NO: 314416 - DNA, 357 bp, Homo Sapiens
ctccagaagcaggaaaccagacagtgtcagagcctctgacctgcaggcgggaggccggtggtcagtctgcacagtaccccttgggaagccggagttccggaagcaaagcgcttggagcccgccctgcacgcaaagcatgcgggcagcggctaaaggaatcccagcagctcccacggcatgtcgggcagagcccgtgcaggtcgagtgaagtcccaaacatcccagaaagagagggaaggctgcatagttatacaaagaaaatgagagagcggcgagagagaggcatttgtgatgctctgtaaacatcccgaacaccgtgacgcagaccttcactcgtgccgaattcctcagcccggg

SEQ ID NO: 314417 - DNA, 865 bp, Homo Sapiens
cataaatacacagttttgtttgctattttcaggggaaacttaggcattaaactgtaagctgataaaatacgatacctaaaaaagtataaaagtataaatatccccttagaataaattttagtgaattaagtcttaatatctttaaattaaaaaaaccacaagcctatctactatgtcaaggtcaaaaatcaaacaacgctaagcggccagcagctccccagagaggatgcccaggagccccagcggccgccttcctcccaggctctgctggggctaagtctgccttctagaaaggcttttataaattgtttaagccaaacatttaacaacatacaagagaccttacaaaaagaaggaggtaagtcctaatgctggagaattggttaatcaggtgactggcaaagaggaggatgaggcctaggcaggaagtctccagaagcattggaaaccagacagtgtcagagcctctgacctgcaggtgggcggctggtggtcagtctgcacagtgccccttgggaagccggagttccggaagcaaagcgcttggagcccgccctgcacgccgagtccccagactctgacaggtccccacagccagctgagaaaggtctgttttcaaagcatgcgggcagcggtttctaaaggaatcccagcagctcccacggcatgtcgggcagagcccgtgcaggtcgagtgaagtcccaaacatcccagaaagagagggaaggctgcatagttatacaaagaaaatgagagagcggcgagagagaggcatttgtgatgctctgtaaacatcccgaattttcaccgtgacgcagaccttcagctccagaagccagtggacaggcctccagcccaacctccc

SEQ ID NO: 314418 - DNA, 353 bp, Homo Sapiens
gggaagaagaggtgtcactgaaggaagcagaggattagggaatggactctaggagagtgagtgtattcagcaaatttctgggccaaaaagcctcccctgaatccatcacagaactcgagatggtcccaataaactggatactgcaaagcgataacccggtaaccccatccagtcagagccaaaatctgccggaaaaagacatctgcagttccactgacagggggcaggaatatgagaggacacctgatacttcgggggcccgcgtcatagagcgaccatatcttactgtcatcatcatccacaataatctaaggggaactgtacctctaaaccagttataatcaggagagact

SEQ ID NO: 314419 - DNA, 1781 bp, Homo Sapiens
  misc_feature (224)..(265): n is a, c, g, or t
cagtgaaattgaatttttattccaaatgactaatatctagaaaggcagtagctaacactcaaaacaatttgtttaagtgtaaattaaaagcagttgatttgcaggagagcaaacagtggggtagtggccatggcactctgatcatggttatatccaagaaagcataaaataaccaatgtcctgatatgcaatctggatgtgcagcatttacagcaaacaacatnnnnnnnnnnnnnnnnnnnnnnnnnnnnnnnnnnnnnnnnnnccaccacaaagtcccaaacctcagaaattaacattcacttaagaacacagtggtgaagacttttggtagcaaaatttgcacggttcttaaaatgggagtcttcaaaagtacttcttcaaattcaaaagctaagaaaaccaaagagggaacagttacacaggcttagtggagatgccgcctgtcatgaagatgaccatcagtcctacttcccagacacagtgagaaccggtgagcctgacgaacctgaaggaaaaggccggctgacgggtgctgatgccactgactatacaagaacacaccgggtcaactcatcattgacagcgagagacacactactgctcctcctggctgatgccaaggctgcctttctgcacctcaagctcctcggcactgaccattgatgggtcaatggccgcgtatttggttccatggaattgcagcaaatgtatctgtacataaagattgaccctctgcacttctgcacaggtatgggaaattgcctcctgttttcagatgagctcttcgggcattaggatacagcttgtacatttcttctttagcttcagttgaaagcgcactctgatcaaacacatcccataatagttacaggtatgtcccgaattttatgaggttccacataagaattttgacaattcaaggtaagtcttgaagccagttcactctgacccaaactttctagcctgtctaccatgaaatcaatggcatcagccatcatagggtccaccgggccagatgaaaaatttccaagaactatttttttgagcataaatgcaggcatcagccaaaagctgtttgcagtccaagtttggttgaagatagaggtgtcactgaaggaattgcagaggattagggaatggactctaggagatttgtgagtgtattcagcaaatttctgggccaaaaagcctcccaaagaagcgccaaaaagatgaactttatccaattgtaaatggtctaaaagttttctgaatccatcacagaactcgagatggtcccaataaactggatactgcaaagcgataacccggtaaccccatccagtcagagccaaaatctgccggaaaaagacatctgcagttccactgacagggggcaggaatatgagaggacacctgatacttcgggggcccgcgtcatagagcgaccatatcttactgtcatcatcatccacaataatctttttaaggggaactgtacctctaaaccagttataatcaggagagactttaatctctcccatgattagctgaaatggaggttaatcctgccgtggccgcccccacgtcccttcccctccttcaggaggccgctcttcgctccagtacgagcgcgggccgtggaggcggctgggcccgggtcggggcgggcggcggagcactcgggacccacgggcacagcaggctgcgcggtgcgtgcgggaggccggcctctgagggggcggggcgcgtggccaagcgagcttgggccgccgcgctccccccgcccgaccgccccc

SEQ ID NO: 314420 - DNA, 455 bp, Homo Sapiens
  misc_feature (364)..(364): n is a, c, g, or t
  misc_feature (378)..(378): n is a, c, g, or t
  misc_feature (423)..(423): n is a, c, g, or t
  misc_feature (441)..(441): n is a, c, g, or t
gatggattcagaaaacttttagaccatttacaattggataaagttcatctttttggcgcttctttgggaggctttttggcccagaaatttgctgaatacactcacaaatctcctagagtccattccctaatcctctgcaattccttcagtgacacctctatcttcaaccaaacttgggactgcaaacagcttttggctgatgcctgcatttatgcttcaaaaaaatagttcttgggaaatttttcatctgggcccggtgggaccctattgatgggctggatggcatttggattttcatgggtaggacagggcttaggaaagttttggggtccaggagttgaacttggcttttcaaggactttanccttggaatttgtncaaaaattccttaatggttgggggacccctccattaaaaatttcngggggacaaaccccgttnacccttttttgggg

SEQ ID NO: 314421 - DNA, 609 bp, Homo Sapiens
ggaccctcagattatggaaagagggagaattctaactaatagttaaaggcttgataattgatagcaaaatcactatcctatctttcagttttaatcatttaacaaatatttatcaagtgcccactgcataccaggtactgagaattcagtggggaacaagacggacatggtccttacccctatggagcttatactcgaatagaggagacaaaataattaattaagaaaataggtgaggtattttggaatactgataaatactattttgaaaataaaacagcaagatgtgataaagagggcttgaggactgctttccatggtcaggaaagtaatcttttccaagagggtaatcaggtggtcaggaaagtaatcttttccaagagggtgacacttgagctgaatactgaaaggcaagaactatccaccatatggagtttcagaagagagttcttggtgggagaatccatgcatttgaccagagctgttttcaagctaattcactgccccaacgtctttggtttggaatctgtaaaggcctgtttttcctaacacctttcttctttcatttgctacagtatagagtagtgttcttttggcatttagtggctg

SEQ ID NO: 314422 - DNA, 605 bp, Homo Sapiens
  misc_feature (27)..(27): n is a, c, g, or t
  misc_feature (35)..(35): n is a, c, g, or t
  misc_feature (563)..(563): n is a, c, g, or t
ggggagccaggccagctgccgcctccnccactatngtagcatctgattcgtcatctctcatgaaggcgatttggttcataactctgaaactctgaaaaaggtcaaaagaagcagagaggccctcggtggatatgccagcttttctgccggtgctttctcccactactctgggtggtctgctctcctcttcaaacctcagctcgcagggagggcctgaatctgccagcccctcaggatctccttccctctgggccctccccagccttaaggagcctcccagacagaagggtggacagagccacctgggcagcccgagagacacacgggggtcctccctgtggacagccctgccagcttccgcccagccctgagcttcatttgcatcttgaggagtaaggggtggtgaaatgggaatgctggtctggctcagctggtcgtgggcataagtgcccgctgaatggatggcatctctccctcctgtcttatgttctggggtccaggtgcttcccagggccatgcccctgctgctaatgcttgccctaacccttaccctaaccagcgtncagcgtcgtctcaccgagccgtagataaatcaacatgatcgc

SEQ ID NO: 314423 - DNA, 391 bp, Homo Sapiens
cgtccaccaccgctgtagctcccagcatccttcacaaactcctgcaggctcagcgcacactgcacgcctgtctcatctccgtaggctgagtagagcagctccatctcgtccgacttcaagtcgccaaatactgaattattctgcatcgaaagcgcagtagtggcactggagagaaaggtgactttgtttcttctctcgtctttgaagcccagcgtggtgaagcctgggagtagcttactggagagcgagctcaagtccaccgggtgggtctcctcctcatcagcgtccggctcggccgtgttgaccacgctgtagagcaggctcccgtccccgttcctcttcagatagcccatctgcaaggattaatgtcacctgcattgctctacttctc

SEQ ID NO: 314424 - DNA, 1295 bp, Homo Sapiens
  misc_feature (196)..(225): n is a, c, g, or t
accggaatggcccaatatgggcctttgcgggtaatgacttccactcccttcagggtttggggggggcttggaagattctggttgccatgaatccccccaggccattcatttccctccccggcggttgctttcccggatgcccaaaggggacaggattcaaagtccttgtctgatgccaaaaacttctacacgtgcnnnnnnnnnnnnnnnnnnnnnnnnnnnnnngagctgaaggtggtctagagttaggtcttggcagaggccgcaggctctggagactgaagaaactcataggggtcgtgggtgacgtctggctgctccccgacactcaggcgagaagggcttcccaggtggtgctggtccctctcggaggcgttggacagggagctgaggttggacgacggccgagagccgccgcgctccgcctgtgcttcgtgcaggtcctgcaggagcttcgtcgtctcatccaagttcaaatggctgtcgtcagggtccagctccttcttcaccttccccagagagctgagcatggagatatccacagaaacgtcgggataggacttcatcgacatgaactccagaacagagctgctgctgtctcctagggtgtccccaaccttggcttcatctggaggcttcatgggaacatttcttctctgcttcagctggaagagcgtcctagagtggtctccgcctgtgatctggtccaggaggtcgtccaccactttcttgctgtagctcccagcatccttcacaaactcctgcaggctcagcgcacactgcacgcctgtctcatctccgtaggctgagtagagcagctccatctcgtccgacttcaagtcgccaaatactgaattattctgcatcgaaagcgcagtagtggcactggagagaaaggtgactttgtttcttctctcgtctttgaagcccagcgtggtgaagcctgggagtagcttactggagagcgagctcaagtccaccgggtgggtctcctcctcatcagcgtccggctcggccgtgttgaccacgctgtagagcaggctcccgtccccgttcctcttcagatagcccatcttgccgcctgggaggaaccggttgatcctgtcccgagcttcgtcagctgcgtgctccaccagcgccagcacgtgctcctctgcggtactgtccgtcaagctgcaggcattcccttcaggctcaaacatgcagctgataacttctctactcggctttttggatttcttggcagtttctacttgtactggtacaaccctcgtgccgaattcgccacccaggcc

SEQ ID NO: 314425 - DNA, 355 bp, Homo Sapiens
aagagatgtaacaaagatctaaagaactcttctcttagagaatacatgcaaacaagtaaacttaaaacttcaatgcaatgctcttatcccatagctctggttcttgtcgtaattgatgcctcctgagctgactgctggcctcggtgtgctcctgcttgagagctgtctgccgggggaggagaatgcccagctctaatagttacatcttcaaaaaggccacctgaaaggaattcacacggcgaagggatgaaggcagattggcattactctttgacaatatcaacagcagctccaagcaggttgcagagggcagggttagcgggtggacgctgatgtcactttcccacaagctgac

SEQ ID NO: 314426 - DNA, 649 bp, Homo Sapiens
  misc_feature (434)..(434): n is a, c, g, or t
catatggtttctgttacatatttgttttttaaacaacgtttttataaggtcaaaatcattcttagtttttgagccaattggatttggcctgctgttcatagcttaccaccccctgatgtattatttgttattcagagaaaatttctgaatactactagtttccttttctgtgcctgtccctgtgctaggcactaaaaatgcaatgattattgatatctaggtgacctgaaaaaaaatagtgaatgtgctttgtaaactgtaaagcacttgtattctactgtgataagcgttgtggatacacaagaaaggagccagcgttaaaaagtgctctttcaaaaggatatagtactatgcagacacaaggaattgtttgataaatgagataaattatatgtatatttgaggccaatttgtggttgctgctctgtgaattntgagtaaaaatgcagtattccaggtgtcagaaacgaaaacacatgtgaactgcgtttaactctaaaatatactgggaacataagggactcagcttgttgtggtcacctataatgtgccagataccatgctgtgtgctagagctaccacagggggagaagtgttctcatagaacacatgggctcatattatgaaatgatgaatggtgaatgatatt

SEQ ID NO: 314427 - DNA, 741 bp, Homo Sapiens
  misc_feature (528)..(528): n is a, c, g, or t
  misc_feature (540)..(540): n is a, c, g, or t
  misc_feature (551)..(551): n is a, c, g, or t
  misc_feature (561)..(561): n is a, c, g, or t
  misc_feature (646)..(646): n is a, c, g, or t
gcacgagaagccatctgtgaagggaatcacttttcttttctggacttgtttccaggtgcagctgcaggggatgacaccgaagatacaagcactgagttcactgacagtattgaggaggaggctgcacaccatagtcaccagcaagtaagtcagtgtcagggtctgggacttccagggtggacagcacacagcccttctgaggtctgatagtctcctgcagcccttgcggacttagtgagaagatatctttttacataaactacttctcagtcatctacctgttctccttgaacttcccagctgcctttccaacccatatcttcactccatttttctctccaatccaccctttggttggtattgtatctctttcttctgcttccttgcccctcctacccacctttgcccctatttattctctgtagctatagcttcagaagcatttttacttgcaagacgatggacacattgcgcttgggctttttgaactgtgaccacagaagacaggagtcatcgaaggctgctcgngaggtgcaggcngaggactgctnggagaactcnagagatggatgcttcaagcagatcttctagtgaattatatccaaggacctatgcactgcaacactgagcatgtactagtgtcagnatggactcacagcatccttgcaacctagactgagctgactatcttcacacataggagatgactgctgtcagatgatatctgactgatagcactgg

SEQ ID NO: 314428 - DNA, 1225 bp, Homo Sapiens
  misc_feature (57)..(57): n is a, c, g, or t
  misc_feature (78)..(78): n is a, c, g, or t
  misc_feature (89)..(89): n is a, c, g, or t
  misc_feature (386)..(386): n is a, c, g, or t
tttttttgcattatagttttataacttgggggatggggcaaaaaggagggagaagtntaaaaaacaaatggagtgggncacaggaattntcagaaatggaggcttaggctgtccatacaggattcagcaagtacttggggactgcgactagaagaagccagggtggggaataagtagctgaggaggagagggagctgatgtggaggagagcaagggcaacttcaaggaacaaaagggaagctgcaaggcaccagctccattaattcagcaaacattccttgtctgtatgccatgccagggtccttgttctatggttctctcagtggggtagctagaaacttgcccaacagacaggaacagacagaagccaaagcaaagaattcctngaaggtagccggcctgctgccaaacctggggacaaactttatggaggcgcagcgtgtgtagccagaacccgagttaaaacgtaggtcccaccctggcctggtctgactccacggcttctaggggttggttgtgcgaatgctgttgagggctgaaggcgctaaccatcaaaagatggaggtcgggtggcagaagatggggtgggcggcagagagtgagtacagcgaagccgccctcaactgtataagaaaactccagacttgcgggaaaggcatgagctcgcattgcacgctctggggtgccacagtcggacactgccgggagacctccgcctctccgcgcggaagaagagtctgcagacgccgaagaagagctcgagtgcgtggggcactgatggggatcggggtgggcacacagcagacggcctgggtacgcttctttcctgacatggtctccaaggttagcagagcttccaaacgtttccaggcctccagcgtggaatgcctctccccgcgctccccgacctcttccaggaacaccccagctcagggctccccactccccttcctgcgaattgaagctctgtggtctctgcggtccgggcggacgagtacctggcggccggggctgttctccaggagtttctgcgcgaaaagtttcgccttgagcccgagcagcgcgaaaggcgctcaggccggatctggggtggggcccagccgagccttggtcttgtctgtcagcagcggcagctgcactgcgtctcccaaggtggctgaagctggccagctgcgggctccgcgccgctcgtcccgggtctatgggtccattccccacgcccacc

SEQ ID NO: 314429 - DNA, 1075 bp, Homo Sapiens
  misc_feature (55)..(55): n is a, c, g, or t
  misc_feature (70)..(71): n is a, c, g, or t
  misc_feature (158)..(159): n is a, c, g, or t
ccccaaaacgcaaaaggatttcccttaaaggttaaaccggcctgtttcccaaaanctttgggcacaaaanncttatgaaaggcgcagcgtgttagcccaggaccccgaggtttaaaacctctagtcccccaccctggcgggttttgctccacggcttnntagggtttgttgtgcgaagctgttgaggggctgaaggcgctaaccatcaaagaatggaaagtcgggtggcagaagatggggtgggaggcagagagtgagtacagcgaaggcggcttcaactggataagaaaactccagacttggcgggaaaggcctgagctcgcattggacgctctggggtgccacagtcggacactgtttccgggagacctccgcctctccgcgcggatgaagaggctgcagacgccgaagaagagctcgagtgcgtggggcactgatggggatcggggtgggcacacagcagacggcctgggtacgcttctttcctgacatggtctccaaggttagcaaagcttccaaacgtttccaggcctccagcctggaatgcctctccccccgctccccgacctcttccaggaacaccccagctcagggctccccactccccttcctgcgaattgaagctctgtgggctttgcggtccgggcgggcgagtacctggcggccggggctgttctccaggagtttctgcgcgaaaagtttcctaggagtgacgggatggcgtgggctcaggggagagtagaaacgctcccgggggctttgcagggaccgagcagctgcgggagctggggagcagtctgactgggactccctggaaggccctgccattggggctgggcggcagctcggcgtcgaaaaagccgggtctgaagattaatgtgccgaggccggagaccctgaggaccaagtcacgggacttgcccttggtgactcacgccttgaggccgagcagcgcggaaggcgctcaggccggatctggggtggggcccagccgagccttggtcttgtctgtcagcagcggcagctgcactgcgtctccccaaggtggcctcgtgccgaattcgccacccaggcc

SEQ ID NO: 314430 - DNA, 861 bp, Homo Sapiens
  misc_feature (681)..(681): n is a, c, g, or t
ggtgaatggagatcgaggaagctcgggacaagggaggggtgggctgcctgattttgtccagctttccaaatatccacgcagcgaactggagtatcctaaacatgagaatgtacagctgacagttgtaaaaactagggatctgtagtgaatgctgtgcagccccatatctcatttgggggtaggaaaatagctgaagattcatgtgcattatttgacatttcctttgtcatctgctttttaagcaaaaaagggttttgtgttagaaattctacttgagcagattataaagagctttaaaaaacaactttcggttgccaaaagtttgagcatttgatttcattacctgtgtctccctcactggtgtccagacggtcaactgaatactcctgaaacccagggagcaggtgacttcctggagtgctttgtccccagagtcagccactgcttcctctgtgggggtggagagtttgtctttggccatgcagtgtgcgacagttcaggacgggtagggatgggtcccattctgtctgggtcaagggctctatcagcttcttccatgtgcctttgggaagaaatctcgttactttaagtttgctttcctgttatcttgatgaagtgcccattttagcagacacttgtagtgctgaccacttagggaatgtacaaactcctaagcttctnaaagggagggcatgggcaaaaacgttggggtcaggatgttctctcacgttgctcatgttaatactattaacacatgatttgaggaataagttttctctaaaatgcatattttgccgccacacactgaacaatattatttccagtgaagtttgatgcctgttcttacgttgtgttcacctg

SEQ ID NO: 314431 - DNA, 846 bp, Homo Sapiens
ggacaaagcacccaggaagtcacctgctccctgggcaggagtacagttgaccggcaaccgaaagttgttaaagctctttataatctgctcaagtagaatttctaacacaaaacccttttttgcttaaaaagcagatgacaaaggaaatgtcaaataatgcacatgaatcttcagctattttcctacccccaaatgagatatggggctgcacagcattcattacagatccctagtttttacaactgtcaactgtacattctcatgtttaggatactccagttcactgcgtggatatttggaaaactggacaaaatcaggcagcccacccctcccttgtcccgagcttcctcgatctccattcaccatgaccaattttttcccccacaaaagcactatcacctctaatagtagctggaaacacctatcagatattctaaacagcatgtatttttaccaggtagatgatttctgaagatcacaggaagtctaccactctcttcccagttctgaactcctctggttacgcttcattttaaatcgggtgcttctttcccgcccaaaatattctatttggcctgccccagtggttcccaagctgcctggtgatcagaatcccttgggaaatgttgaacacacagcttcccaggctttctggaaaactagttagatctgtctgacaatctgtaagctgaggcgattcttccacagctgacccagcgctaatctagcatttggcaaccaaatgtctgtacctcaccagtcacacaaggctcacaatatgctgggagcatttgaatgatagctcaagaattattctttcactccatattcttctctctcaagaag

SEQ ID NO: 314432 - DNA, 1091 bp, Homo Sapiens
  misc_feature (280)..(280): n is a, c, g, or t
ccacaaaatacaagatactacacaacctgttatagagaccgctaggaagaaacatgtagttgaaaacccatagttaaaaggaggattcaaaatcacagtaccaattttcctaaacatgttttgataaaggccattggaacacctgtcacactgttcaaatgcccaatggtaagacttctgatgagaccaaacaggtcacattaaatcaatagaatatcttagaaataaagccaatatgactaaatccaaaacatatcacatgaagtacctcatgtacaantacaaacctagtttaataaataaaagaaacataggtgactgcgctctgggagaacatccagttcctgatggcctcttcacagtcttctttgagactccactgccacttccactcgggccaagcctaatggtgcggccatgaagtttgtagccatcttgtcttactaatgccacggtgccaaggctgcacccccaacaccagctggcacatgacagatgagttcatgctcatgggggtcatatttgtcaccaatgggtgtcagtttctccaggccatgcttggcaaacacacttttcagctttgcttctaaaagcaacacccctcggaagaccttctccagagtgagcttttggtcctcaggctccgattcttcagaaatgcactctgtagtcttctccaaaatgtcagccacctccaccaagtccttacagaaactctggattccaaatatcttggcgtcttccacacatctctgggttcgcctccttatgttttcacaatcagctatagctctctggtatctcactgttaaatcttggacttctttctccagtttaacagcttttacccttaaggctcgttcagcaagagggggcccaagctcatcaggagggtcctcagaacggcagtcctcaccagcagttctctgggtggcagtgctgaatggaagcggccatcccttgctctcccacgcggcactccaggccagtaggcgctgcacccgcagccggcccgcccacagcgaccgtacggccatgtttccaatttgggctgagaggcagcgcacgcgcacttgctgcgagtgaagacc

SEQ ID NO: 314433 - DNA, 630 bp, Homo Sapiens
acggcggccaggattttcacagcggtgtgctttcatcttttaatggccgtgtgcggtacagttagtggacagacggggtatgggacacagcaggggtgaaacagggcagtcacagccggggccggggatctggaagcgggggcgttcctccccctggaaacaccgtctctggaaggacacccttaggatcccctgacctcagggtgccacccacacgggcctggtgttctgggaggcccgggctggagtgacccccagcccctccctacgttccagggacccttgggtctgtcgagtcccttgctggatgagggtcaagacctaggtcaagctgacttcagccagggtgtgggggcccggcttcgtagcccccagacttacctcccctcttctatcccgggccaggaaggcaatgggagggctccctagtcaggcacagccccctgacctgtggcatcgtgtgggtgtgtggggaggtcctgacgtgcccagctggcatcactgctgtggcccagaggctgatgcagaccgcaggcgggtccattcggacccagggctccgactccttcatggctaacgcgttatgtttgggagaagcagtctctaagaatgaggacagctcgtgccaat

SEQ ID NO: 314434 - DNA, 360 bp, Homo Sapiens
gggctgcaggcgccgctgaggaaggctgtagtgtcggggccgaagcggacagggaattggaggagcttctggaaagtgctcttgatgatttcgataaagccaaaccctccccagcacccccttctaccaccacggcccctgatgcttcggggccccagaagagatcgccaggagacactgccaaagatgccctcttcgcttcccaagagaagtttttccaggaactattcgacagtgaactggcttcccaagccactgcggagttcgagaaggcaatgaaggagttggctgaggaagaaccccacctggtggagcagttccaattcacttcttgcctaatggcactccggattacgccct

SEQ ID NO: 314435 - DNA, 868 bp, Homo Sapiens
gggtgcacatgatcagacactgttcaccactggcacctggtgggcccgaaagattgggaggatagcctaaatcttgtagctgctgcataagatccagcaccatctcaaaacgagccgagtggtttcactgtctgtgggggtctctgcctcaaactgctcacatattttgcacatgacgctgtgctgctcctgatatttttcaaactgctctggaggtagagattcccgatgactctgcaaccattctggatactttcctgtgatctccttcagtgatgggtacagcacatccttggagagtaggttctgcataatactctgcatgatggggaggatgttcccttccccatccccttcgtccatgcctagcccctccatggccttggtcagctcttcttccgacatgctggagttctgaaggtcagtggcatttttggctaatccacttagtgtttcctttaggcaagaagtgaattcttgttgggaggtcatatcactgcccactctccctgcagcctctgagagcttttggaactgctccaccaggtggggttcttcctcagccaactccttcattgccttctcgaactccgcagtggcttgggaagccagttcactgtcgaatagttcctggaaaaacttctcttgggaagcgaagagggcatctttggcagtgtctcctggcgatctcttctggggccccgaagcatcaggggccgtggtggtagaagggggtgctggggagggtttggctttatcgaaatcatcaagagcactttccagaagctcctccaattccctgtccgcttcggccccgacactacagccttcctcagcggcggccatcttgctacctccgacttgccgt

SEQ ID NO: 314436 - DNA, 721 bp, Homo Sapiens
  misc_feature (45)..(45): n is a, c, g, or t
  misc_feature (53)..(53): n is a, c, g, or t
ccagccacgcacgcgcctacgctctgcagcaccgtctccacgccnccggtgtntcaagatgtcctcctctgaagccgcttggaaaaatgtcttctgctccgggtcaaacagcccatggctgttcagccacaggcccttctccttccggctgaagcggcgcagctccggctggaaaagcttggagccagtccaaccgagcagggcgaaagggaactggctgacgggtgcaactaccaagtccactctcacggccttccaggatgggcagggcctcgtggatccccccacagcagcccctggaggttgtggtaggcggaaaatgcagaaacttctctcaaaagcgtccatgtggctctgttgggccaggcgggtaggggactcacagcagctgtgctggtgctggtggtacaggatgaggccctggtcctgcaggcggcacatcactctaggcagcagccccgcctcctgaccctccttggggtgggtgatgaggaagtccacgtcatggccctgcaacttccccctgagggcgtcagtctgactctgactcagggacacggcctgctcactccagccccaggccacatcccttccaacgagtgggcccgcttcagggtccccgactcaggtcccttcactggggaggggtctgaagccaagccagaggggcacgtcgggccttcttacctgcggaagccgccggtcagcgtgacctcgtgcc

SEQ ID NO: 314437 - DNA, 947 bp, Homo Sapiens
  misc_feature (137)..(137): n is a, c, g, or t
gcattcctttcccggtaccccacggttcaggcatttttcaccaccgacccccgaaagatttggggtaagagctgtggggaaaggagcgtagccccggttggggcagagctctacatggctagactcgggatgatcancccgctcccgggacggtgtggcccatggagcaccatgcaccaggcaggcgcgttccccactcgcaacccttcatggtctggtacctctctgagcgccgaactctttccacctcctcacacactccatgctccagcagctcctggacaaccctagaggagtgttctccaaagtggggaagcccctgcagctggctcagggttgtgacagggctgggaagggccttgagcaccgaggctgctctgcagaaggtgaggaggcggccctcactgccttcaaagcctgctgcctcggccagtatctccagagcctcggagaggccagtgttgtggtgtgtgaggggcgtagggcgctggcaggcataggcaggcatccctgctgggttcagagggccctttccttggcccagccacttccaggcggtgccggcactccacaggtacaggctgcccagctcccaggctctctgttacccagcttatgtccagcagagctgggggggtgcaacccgggggagcagctgccatcctgcgctcctgccagctgacggcctcctctgctgaggtctcttccatcacaacatgtgtcgcttcggagctgcaggcgtcaaggacgcggaagcctttggagcgcgccaggcctgtgaggaaggcccggcggctgcgacccatgcgaggctcgaccaggtagatggcgactcccgggaagcgcgtcgagggcggcgtggaggaagcggcatcgccgctaggggacccgacccgcgctcgccgccgtttggggagcattgggacgacagcctccagcagcgcgga

SEQ ID NO: 314438 - DNA, 970 bp, Homo Sapiens
  misc_feature (873)..(873): n is a, c, g, or t
  misc_feature (885)..(885): n is a, c, g, or t
  misc_feature (900)..(900): n is a, c, g, or t
  misc_feature (911)..(911): n is a, c, g, or t
  misc_feature (915)..(915): n is a, c, g, or t
  misc_feature (934)..(935): n is a, c, g, or t
  misc_feature (945)..(946): n is a, c, g, or t
  misc_feature (950)..(950): n is a, c, g, or t
  misc_feature (958)..(958): n is a, c, g, or t
  misc_feature (960)..(960): n is a, c, g, or t
  misc_feature (965)..(965): n is a, c, g, or t
gcttgtctgaaactttttccttttaatatggtttacattctatctccagagaaaacacacttaacagaagacagaaaacatttaacaaatccaaagcaattaaaaatagccacaaaaaaagagaataacctagactgacagctcacagagcaaggaggtggcagagacctgcccaggtgagcttggctgttgcccccagctcaatcttcctcctctcctctctctgtcccttcacctctgatcagtcccagcctgattcccgttccctgatgcctcaccttcttgctgccagatgcctctaggaactagggtccttcagactccagatgccctggcctgggccttaggacatcttggacttccccagtggacagctggacagtgccctgctctcacccacagctgggaccctggaccatgccatgaggcccctgtgtggaagtggtgtaggggtggggatggtagcactgagtggtacagattctatcttggccctcatcatgggggaactctcccaatgccaccacaggacgtatgagttgtagccagcagagtgccccagtggtgccaggtgacagtcccccggaatacattagtgcatttgctaagactccatgtgttctcttgggcctcacagaacatgggctttgagggtgggagccaagaggcagacttgggagtgcccgaggccttgttctgaaacacctggggggctgacacccccactaccctcacacccctaccaccagtttccccaccagcgatgatggtagctactcagccagtgggctcctatatgcggttacacgtcagaatggcctgggaggcaggtgccagtaattatccctatattacccatgagaaactgagganacagatgttaantagttgctcaaggtntcagccacaanggtnagacgaacgggattgtaannctcctctgtnnacangctgttananatcanagggg

SEQ ID NO: 314439 - DNA, 1252 bp, Homo Sapiens
  misc_feature (91)..(182): n is a, c, g, or t
acacccctaccaccagtttccccaccagcgatgatggtagctactcagccagtgggctcctatatgcggttacacgtcagaatggcctggnnnnnnnnnnnnnnnnnnnnnnnnnnnnnnnnnnnnnnnnnnnnnnnnnnnnnnnnnnnnnnnnnnnnnnnnnnnnnnnnnnnnnnnnnnnnggtcagagcgaacggattggtaacatctcctcatgtgaaacaggctgttatcatattcagagggggtcggtctcactgtgaactgcccaagcaggggcctctgcagaaaaggctttcccttttcagagacctgccagtgggcagtgaccaccatggaggagacgagaggagatgcagacccagcatgctctctacagaagcctttactggggaggggtcagagttcatggatcaccgggaggtgcgagtagagtgttctgaggacactgctggggcgggggcggtggcgggaggccatggcttgggcagactgcccaaaagtccagcttcttaggtcagagctctgctgcccatcctgcggtggtcttgccagggaatgcccaggcatcctggcttcacagagcctccctctgggggcccccatgggcttgctgctgtccatctgtctatgtggaccccagaggccagcagaggggccagtcctccttggcaggtccctctggcttggctgcttttcctgggactccccaaaaagccagtccagggggtccacagtatcagccatgggcagtgtgggctgctggccactgaaacgtgcggtgatgtctcgcagggacacagcagggcggcccttccggcaggcctgggctggcctgtggggtggcctgggttggccctgggccgtggccttgtccagcacagaggtgggctgtgccagtcgagatatagacctcacgtagtcatccaggctaggagagggtgggggctcctgtccaggacccccaagcagcatctcctccgtggtctcccgaattgtgggcagatgggccacggagagcagaagccgggacctcatcactctggcgagaggaggtggcaacctggagctgaggaggtctgggggtggcaggagaatggatgagcagggacagtccagtccaaaggaagcccctgggaagcttgggggccgaagggtggagggtccggcagggggtccagcgtggggtcgctgggaggaggacagtgcactgagtctcacagtccaccgtagcaggctcttccctgagcag

SEQ ID NO: 314440 - DNA, 1222 bp, Homo Sapiens
  misc_feature (490)..(499): n is a, c, g, or t
  misc_feature (515)..(515): n is a, c, g, or t
  misc_feature (552)..(613): n is a, c, g, or t
  misc_feature (747)..(749): n is a, c, g, or t
  misc_feature (760)..(762): n is a, c, g, or t
  misc_feature (768)..(769): n is a, c, g, or t
  misc_feature (771)..(777): n is a, c, g, or t
  misc_feature (779)..(780): n is a, c, g, or t
  misc_feature (782)..(782): n is a, c, g, or t
  misc_feature (786)..(807): n is a, c, g, or t
  misc_feature (809)..(818): n is a, c, g, or t
  misc_feature (820)..(828): n is a, c, g, or t
  misc_feature (933)..(1024): n is a, c, g, or t
cgacatagagaggtggggcgcgagggcggttggcgtgtaatagagcaaacacacaaagggcggcgcgagtgacaaacgcgcggcgaataataagaaggggccgggtgggagtacaataaagagtggcagaccagcaagttggctatagaggcgggcgcgagaggaactaagagagcgggcgagacagatcgcgggtggcgagggaatagaacgagcgccgcgcggcattaattacatagctggtacatcgtggaggacaacacagagcaaagagaagattgccgccggatagggtggtgtgtaacggacacagtgagggataaatcgtggatatcgcaggacaaggcggcggggataagcggaataggaagtgggggattaaggatataatagagggggcagcggcgggataaacacgggggcggaataacaaaaccgagaaaaaggggcgagggatcggggcgcgcgaaaaacggtggagcgcgcgagnnnnnnnnnngagggcggacggcggncggcaccccaacagcaaaagggaggcccggaggagannnnnnnnnnnnnnnnnnnnnnnnnnnnnnnnnnnnnnnnnnnnnnnnnnnnnnnnnnnnnncgacgggcaaagggaagaaccaaagagggcgcggacgggaaggaagaaaagaaggggcaaagcgccgggaaggaaaaacagcggcaaaaccccaaagggggcagggaggcgaaaaaggggcgacgggagggagnnngggctgggagnnngggggnngnnnnnnngnngngggnnnnnnnnnnnnnnnnnnnnnngnnnnnnnnnngnnnnnnnnnccccactacccctcacacccctaccaccagtttccccaccagcgatgatggtagctactcagccagtgggctcctatatgcggttacacgtcagaatggcctggnnnnnnnnnnnnnnnnnnnnnnnnnnnnnnnnnnnnnnnnnnnnnnnnnnnnnnnnnnnnnnnnnnnnnnnnnnnnnnnnnnnnnnnnnnnnggtcagagcgaacgggattggtaacatctcctcatgtgaaacaggctgttatcatattcagagggggtcggtctcactgtgaactgcccaagcaggggcctctgcagaaaagcatttccctttcagagtcctgccaggggcagtgaccaccatggaggagacgagcctcgtgccgattcgccacccaggcctcgctac

SEQ ID NO: 314441 - DNA, 401 bp, Homo Sapiens
ctgaaactttttccttttaatatggtttacattctatctccagagaaaacacacttaacagaagacagaaaacatttaacaaatccaaagcaattaaaaatagccacaaaaaaagagaataacctagactgacagctcacagagcaaggaggtggcagagacctgcccagggtgagcttggctgttgccccagctcaatcttcctcctctcctctctctgtcccttcacctctgatcagtcccagcctggattcccgttccctgatgcctcaccttcttgctgccaggatgcctctaggggaactaggggtccttcaggactccaggatgccctggggctgggggctttagggaccatctttggactttccccagtgggacagctgggacaggtgccctgc

SEQ ID NO: 314442 - DNA, 1279 bp, Homo Sapiens
aatttcaagaaagcgagttttaaagtggagttaacttcagagagaggtgaagatgatgtcccgacattagaaggtttttctgtggatggatcgggcaccgtcttcctcatattcctttttggagacccacatcttcttaaaggtgtccagggaggcaaggatggagcccccaatccacgtggaatacagtctctcctgaggtgcagatatcctgatcttcacatcttttggagctagtttcttcacttcactcaggagcctgtcaccaaaacctttgaacagggtagagcctcctgagaggacaatgttagagaaaagcgtgcgccgcaggtccatgtctgacttctgaatggcgaacaccaggacctcgtggatgccttcactctcctctccaatcaaatctggcctgaagagcaactcaggggcccggaatcgggaaggaccaatctcaatggtgctgccatcaggcaggtagtactgagctttctctgtctctagcgtctcatccttttgggggtttatggataggtaacaggctctttcttttatggccttgacaatctcaaactcagaggatgagtggaagtcgtagccctccttacgcaggtagaggcgcaggaagcgagagacgtcccggcccgcgatgtcgatgcgcatgatggagtggggcatggcaaagccctcatagatgggcacagcatgggtgactccatccccagaatccagcaccacccctgtggtcctgcctgtagcgtaaaggctgagtacagcttgcatggagatgaaaagagcgggcacattgaaggtctcgaagaaaacttcggcagctcgttcccggttttttcgtgggtttaaaggcgcctcagtcaggagcacaggatgctcctctgagaaagtctgcagctggtccttagaatagacatattgccaaatgcgttccatgtcgttccaatccttgacgatgccatgctccatgggatagcggattgaaagcagccctcggtgctcctcagctttggggccaatgaagatgtcgccttcaagggctcctgccatgacacgaacgtgcttgggtcggcccacatagtttggaaagcagtatttggggatctgatcaccagcaaaaccagctttaatcacaccggatccgttgtcgatcacgacaggctggttggcgatcacatcgtaggactccatggcagaggaatctctccttctggggaaggaactgcccagccgggtccgccgctagcgccactgacacgcatgcgcagtctat

SEQ ID NO: 314443 - DNA, 2095 bp, Homo Sapiens
  misc_feature (1470)..(1470): n is a, c, g, or t
gtctatcggaacgactttatttcagtacactgggccccaccaggcaatgtggtttgtgcgaggctgtgcgagggacaggcttgggctaagagaagggaggtgagttggttaagcgcactgcagtccgcggggcgctacgttgctttcacacatacctgctgctgtggcccacacctggcaggggcctttggtcataggacggcgtgggggagaatactgtgtgaagtctgggattggggtgggtcttggtgtcacaggtgagggtgccggtgaagacaggctggccccagctttgcaccatctaggctgaaggcctttggaccactcctaggagtcaggcctggctccattagctcctggcactctggtctggcccactccctccttaaccaagcaggtccaaggtcaagaatggcacaagatcagcccagagggggccttcccacctctacaacctagtcccctggtcagctacagtggcaaaaggcaacttggtaaattgcagctttctccagtcttaagggcactggctctccaacacccctcccttgcttaggggcctctgccaaagaaaaattttacctcctgtttcagaaaatctaaccagcaaccagcctgttgattccagggcagtgagcaagaggaaaagggagaaagagcctggtgggagtgtctttgagtgtagcttccaatctcaaatggtcctggaacctgtggacactgtcagctcaccatcagctgggagaggtggggccctggaggctaagcttaggtgctgtaaacattagtgtagcaaggcaggaggcagcaagctccctctctccagcccctaactgaacaaacacttcaataaataaaacggtttgaagatggcattgcaacaagaacagatggaaagcgaggtcctggaaccagcaggtgccttaaactctcccaaggcccccgaaaggggactgggctgggaacattaactctgcagccattcagagggaggactgctcctgccctccttcagtggccggtgtggtcctgttccctggtgaacatgagggcctcctgctctctcctgactccagtctctgtaatagctcttggggtgcttttccagcctcccaaaccaaaatggcaacaaaaccagacagaactcaaccccagtcccagtcctcagtgtgcagtcaggaggcatcgatagtggaggcagcagctgcctggggcctcagggcaccctgggggtgggggtgagggtggggccagcccagcctaggatggtcagcagcaaggtctcccgggggatggcttacctccctctgtctccctgtggtagtaaaacggagtccccccacagcccagccagaggcccacctgaggagggagcacagcctctgccagcgctcttccctgtcaggagccagttagtggtcaacccccaggcctcaggccatcaccactgcgggtagttcatcgtccttntctgggcccagggtcccagggccacacggcactcgcatgtgcgcacacactcatatccacacacgcactcacacacaggcagttcctcgcaaacactccgactcaagaaagcgagttttaaagtggagttaacttcagagagaggtgaagatgatgtcccgacattagaaggtttttctgtggatggatcgggcaccgtcttcctcatattcctttttggagacccacatcttcttaaaggtgtccagggaggcaaggatggagcccccaatccacgtggaatacagtctctcctgaggtgcagatatctcaatggtgctgccatcaggcaggtatgtactgagctttctctgtctctaagcgtctcatccttttggggggtttatggataggtaacaggctctttcttttatggccttgacaatctcaaactcagagggatgagtggaagtccgtagccctcccttacgcaggtatagggcgcaggaaagcgagagacgtcccggcccgcgatgttcgatgcgcatgatggagtggggcatggcaaagccctcatagatgggcacagcatgggtgactccatccccagaatccagcaccacccctgtggtcctgcctgtagcgt

SEQ ID NO: 314444 - DNA, 867 bp, Homo Sapiens
cttgcatataaaatgatgcccatgtgcaaagagataaattaccaggcacctgatttaccaccccaatttatcttgatcatataatcttttaacaaaaagaaaaatggcaatatctggtgacagtattaaaaagacaatgttgagattggcatcagaaaaactccaaaagtgcaccttataaaaaggacacctcactgtagaaacatctatgcacttagtaagccctactcatgcacaaacaagcagttgctgggaacttgtcgaagtttactttttcagaaagttgaagtatataaaaaaagtacaagttgtgacattcgttcaagttgctgctacatgggtattctgagctggctaccaggaaggactcctgcgtttccgagagccaggtcagcgtctctaggagccgtggtgcaggtgcatggtgcccagcacggcactgtcgtaccgctcctgcaccttcacggacttggaatgctcgaccacactgttcagttctgggatgctttcagcagtgtccccaaacccgtggtagtgtccatagtacaggttatccccaatgtcttccacccaggaaggcctactggctatgcagctacttggactcccgttcaggtgcagagaaccgcacaactcagggttagctctcagggtcttctctggctcctcagtcccactaatgcagagagaaccctggctactcggaaacggctgtcctggggctaatccactgctaattccgttagttcctgtcaagcactggccattcctgctttccatcccactgagcggggtcgtggaggggaagtccaaattcatatctgttacaacagcaaactccctatcaacgtgcagtcagcatcgtct

SEQ ID NO: 314445 - DNA, 1140 bp, Homo Sapiens
  misc_feature (999)..(1015): n is a, c, g, or t
ttttttagagtcaagatcttttatttcctgattttaaaaatcgtcaccatcatagacctcctggcttctcttgtatctgtgttctaatggctcccagcagtgccttcacacagcccctttattccccttcttgtgcctgcccatgagcctgagtgtgacagatcaattagctttgtccctccaaactgtgggagcaggactagactcttctggcaggcagagagctcctcctcggccagtgttcgagcctggtccaccactcctcagttcttcttgctcttggcttttgtggccttggcatccagcgtgctctgggcatgagtgaggtgcttcacagcatcaagcacaaggactccaggcagcaccagccacagggcattcatgaagacaaagtaaaaccagaagtagagagggtggcccagctctccgtgctggaatccgtcgcggtgctctgtcaggaagtagagcacatccccatagatctggcccacagagaccacaagctgtagaatgaagcggaggggatgctggcggagaaaggcgatcaccacccacaggctgagtggtccccacaggcaagctgtgatggtttccatgcacactgtgaagttgtcacccaggatgtatcggctgtctcccttggcatactctttccagagttgagataagaaggcttggtctccaagcaggtcttcgtagtagagaacgaaccagccctcgatcaccaggtgaatgaacccacacactgcaaaccagcacagggacagtcgccgccaagtccccaatgggacaaccgcagcacgacctgacaacagccatgtggtcacgactaagacccctgtgacagagaagaggccagccagtatatgccaggtggggcggtcattaggtacaaagttgtccagtcttaggtgctgaggccagtatgggtgcaaggggcccgcgttggtagtcatgtctttgtgggctgatggctgcgtgtgtataggcaggaagttnnnnnnnnnnnnnnnnnggaacagaaaaaccaaggcgcgcgacggcagcggcctcccacgctggctccgggctctctttaggctgggtctcgcgctctgtcacatccctagttcgggctcatcccctagtgggttctcttgc

SEQ ID NO: 314446 - DNA, 524 bp, Homo Sapiens
  misc_feature (65)..(81): n is a, c, g, or t
ctaaagagagcccggagccagcgtgggaggccgctgccgtcgcgcgccttggtttttctgttccnnnnnnnnnnnnnnnnnaacttcctgcctatacacacgcagccatcagcccacaaagacatgactaccaacgctggccccttgcacccatactggcctcagcacctaagactggacaactttgtacctaatgaccgccccacctggcatatactggctggcctcttctctgtcacaggggtcttagtcgtgaccacatggctgttgtcaggtcgtgctgcggttgtcccattggggacttggcggcgactgtccctgtgctggtttgcagtgtgtgggttcattcacctggtgatcgagggctggttcgttctctactacgaagacctgcttggagaccaagccttcttatctcaactctggaaagagtatgccaagggagacagccgatacatcctgggtgacaacttcacagtgtgcatggaaaccatcacagcttgcctgtggggaccactcagcct

SEQ ID NO: 314447 - DNA, 817 bp, Homo Sapiens
  misc_feature (460)..(460): n is a, c, g, or t
caggcaagggcctttcaccccaggcccctttaattcccctttctgttggcctgcccctgaggcctggagggggaccagatccaattagctttgtcccttcccaaactgtgggagccagggcctagactttttttggccaggccagaagagttcctcctcgggcccggggttcgagcctgggtcccacattcctcaagtttttctggctctggggcttttgtggccctggcatccagcgtgctctgggcatgagtgaggtgcttcacagcatcaagcacaaggactccaggcagcaccagccacagggcattcatgaagacaaagtaaacccagaagtagagagggtggcccagctctccgtgctggaatccgttgcggtgctctttcagggaattagagcacatcccccatagatctggccccacagagaccacaagctgtaagaatgaagcggaggggnatgctggcggagaaaggcgatcaccacccacaggctgagtggttcccccacaggcaagctgtgatggtttccatgcacactgtgaagttgtcacccaggatgtatcggctgtctcccttggcatactctttccagagttgagataagaaggcttggtctccaagcaggtcttcgtagtagagaacgaaccagccctcgatcaccaggtgaatgaacccacacactgcaaaccagcacagggacagtcgccgccaaagtcccaatgggacaaccgcagcacgaccaaggcgcgcgacggcagcggcctcccacgctggctccgggctctctttaggctgggtctcgcgctctgtcccc

SEQ ID NO: 314448 - DNA, 544 bp, Homo Sapiens
atcttgtttgctacctgtttacaaaattcggctgactcaagatcagccacacaatatgaactttgagaaacgtcagtcacagtgtatgttaaagtacaatgcagtcttgcaaactgagtaatatgataagagacctcatgaaccgactcagcctccagagatgtgtaccaaatggcctcaagtgatcttctccatgaacgcacatgaaatctggatgtggaaaaggtatgaagaaattctggaacaaccaaaattgatcagaagaagcacatgattttggacaaaatgcaaaatcttttttaaaaaatctctctcaatattccatagcaggcaaggcccaggtcctagtcctggcttctggaagtggagcagggtccgccccggaggcgggctggctggagtggcccaagcgcccagttgcactggcccttcccttccatcttctctcactctttcagcaagcctcttgggaaaaacatctctttcaaaataaaggcacgagaatcacgttctgtcagcgcagtcgccactgtccggactgctg

SEQ ID NO: 314449 - DNA, 356 bp, Homo Sapiens
ataagagacctcatgaaccgactcagcctccagagatgtgtaccaaatggcctcaagtgatcctccatgaacgcacatgaaatctggatgtggaaaaggacaaaatgcaaaatcttaaaaaatctctctcaatattccatagcaggcaaggcccaggtcctagtcctggcttctggaagtggagcagggtccgccccggaggcgggctggctggagtggcccaagcgcccagttgcactggcccttcccttccatcttctctcactccagcaagcctcttgggaaaaacatctctttcaaaataaaggcacgagaatcacgttctgtcagcgcagtcgccactgtccggactgctg

SEQ ID NO: 314450 - DNA, 382 bp, Homo Sapiens
attccaaaggctttcattcaaacagttgctgcattgtaatgttaagtatgagatactaattcataaaaatttaccaccatagtaaatctccctgataccatcactcttaaacctttagaaatgctacagcatctagcttctctagatcaataatcacagaggcttaagtgctgacctcataaagataaagagttcccatgatttacacattacgtgctttcataaatatctatatataaaagcctattttcctcttggactatattacaaaagtaagtatgcattttcataagattcaaacccagctctaaatgtaagaagccaaattaagaatgtagcaatgtatgaatgaggaaggaagccattactaacccctctgtgc

SEQ ID NO: 314451 - DNA, 809 bp, Homo Sapiens
  misc_feature (673)..(693): n is a, c, g, or t
  misc_feature (700)..(712): n is a, c, g, or t
  misc_feature (720)..(720): n is a, c, g, or t
  misc_feature (752)..(752): n is a, c, g, or t
  misc_feature (790)..(790): n is a, c, g, or t
tggggaagctttttatatatgcatacattacatacctatatataaacttgtggtataaccatagaccatagctgcaggttaaccaattagttactatcgtagagtaatatatattcagaataataaactcaagctggagaaatgagtcctgatagactgaaaattgagcaaatggaagaagatacagtattgtttagatcagaatcattaaaaaatatttttgtttagtaagtttgaagatttctggcttttaggccttttctattttgttccatttatttttgcaggcaatcttttccatggagggcagggtatccattctttaccatgggtgtacctgcttaggttaaaaatcataccaaggcctcatacttccaggtttcatgttgcgtcttgttgagggagggagagcaggttacttggcaaccatattgtcacctgtacctgtcacacatcttgaaaaataaaacgataatagaactagtgactaattttcccttacagttcctgcttggtcccacccactgaagtagctcatcgtagtgcgggccgtattagaggcagtggggtacgttagactcagatgggaaaagtattctaggtgccagtgttaggatgtcagttttacaaaaataatgaaagcaattagctatgtgattgagagttattgttnnnnnnnnnnnnnnnnnnnnnttttgcnnnnnnnnnnnnnagactggnttaataaacatacaacacaagctggcccttgnggttgctggttcctattcagtatttcctgggggattgnttgctttttaagtaaaaca

SEQ ID NO: 314452 - DNA, 1446 bp, Homo Sapiens
  misc_feature (209)..(217): n is a, c, g, or t
  misc_feature (257)..(329): n is a, c, g, or t
  misc_feature (376)..(414): n is a, c, g, or t
  misc_feature (423)..(441): n is a, c, g, or t
  misc_feature (976)..(986): n is a, c, g, or t
tggaaaccagttaatttggggtaattctggccggttctgtgcttgaaaagcccaaggttaccttttcggaaaaaaaggaggtggggtaagctctttgatccgggccaaacaaaacccacccgctgtaaccggggggtttttttggttgccaaggcagcagattactttgcagaaaaaaaaggatttcaagaaagatcctttggatcacnnnnnnnnngcccgctcattaggcggggttaaattcccgggtactgcannnnnnnnnnnnnnnnnnnnnnnnnnnnnnnnnnnnnnnnnnnnnnnnnnnnnnnnnnnnnnnnnnnnnnnnnaccactttgtacaagaaagctgggtcaggaaacagctatgaccatgnnnnnnnnnnnnnnnnnnnnnnnnnnnnnnnnnnnnnnngcctcgagnnnnnnnnnnnnnnnnnnncataaataagtattataactttattaaaatgaaaagacaatattcaaaataatgcaacaaaatgaataaaatcctttgtccaatactgtacacataatgcagaaatcagtgcatttttcttaagcatgttttaaccttcatttagttcatactaaaatataataagctttaaatagctcaaataatattcagcagtttaaactgtaaacagcttgtttaactgttaagagaacattgcagtaatgtacctctgttagtgagcaccttctcttctgtgcttatctcttcaagataaatacatggaaggatgtgaaaatcggaacaccaactatgtgtctcactgcatctaagtgaagcagccacagctgtgagagttttcaaagcagaaagatgctgatgtgacctctggaattcagacatactgagctatgggtcagaagtgttttacttaaaaagcaaacaatccccaggaaatactgaataggaaccagcaacacaaggccagcttgtgttgtatgtttattaatacagtctnnnnnnnnnnngcaaaaccacaacacacatccccaaacaataactctcaatcacatagctaattgcttcattattttgtaaaactgacatcctaacactggcacctagaatacttttccatctgagtctaacgtaccccactgcttctaatacggcccgcactacgatgagctacttcagtgggtgggaccaagcaggaactgtaagggaaaattagtcactagttctattatcgttttatttttcaagatgtgtgacaggtacaggtgacaatatggttgccaagtaacctgctctccctccctcaacaagacgcaacatgaaacctggaagtatgaggccttggtatgatttttaacctaagcaggtacacccatggtaaagaatggataccctgccctccatggaaaagattgcctgcaaaaataaatggaacaaaatagaaaaggcctaaaagccagaaatcttcaa

SEQ ID NO: 314453 - DNA, 2009 bp, Homo Sapiens
  misc_feature (140)..(140): n is a, c, g, or t
  misc_feature (658)..(730): n is a, c, g, or t
  misc_feature (820)..(837): n is a, c, g, or t
  misc_feature (975)..(995): n is a, c, g, or t
ggcttctgcggtctcccgcgcgccgcgcattgccgtacctgccacaagacgataggacgcgcgtcgttcgaccgacgaccggctgcctgcggtgcgcgccgccccgcccgttacactccccgtcggcaggaggcgcgcanatagcggctatctgtagcgccacggcgcggcgcgccgacacctacgcggtggcgatgagatactgccacagggtctggtggcggggaggcggcggaggtctgacacacgtcacgggtccggcgctgaggtgtgtagaagggggcgctttccgccgtgtcgggtggggcagtgtagatacagcccctcgtccccgcccatcgtgcggcgcgtcggcgccgtgtgagcgggcgcgcgggcggaaagctgtgcaccatgcagcgcgccggggagagtgcatgaaaattgtgtggggtataattggcgaggagagcgcgctacgcggatggcgagcttgcacgggaagtggagcaaacaaatctcgcgggttcaagaggaggacctgtggggagggggtcccgcgtgaaaaagaaagtttggttggcacccaaccaccgtgcccggtttggcaccgccccggcgcgtggtgttgtgatgtggtggggggaaggcgcaaggcgggctcggcgcatgggccgcnnnnnnnnnnnnnnnnnnnnnnnnnnnnnnnnnnnnnnnnnnnnnnnnnnnnnnnnnnnnnnnnnnnnnnnnngaaaagaaatgtgtttgagaaaactttctccgggggcgggagggggccggacaagcaacgctcgcggtgctggggccgcttatttccccnnnnnnnnnnnnnnnnnntattgtggtgttttcaagtttcaatcatttaattaacatctttaaatgaaacacagttttcttcatgtgtctcactcaggcttcagggcagagggaatggatttttagacatatcaaagactcaaaaatttaaagaannnnnnnnnnnnnnnnnnnnncttctaacattttatggaaattaaaaatcagaggcttttggtctctccatttactctaggtcaagctcatttaccccagaggacaaagaagggctgcctcttctagaccctcccttctcctttgtcctctgtcccacccagcagggaaacaagctcagaagatcctaacaggatagagttccagtaatgttggaggagggagagggaaagagaagtcaggttctctcccacctccagccattcccaggttgctgccagggcctggtttcatgcagctttgacccagtcctggatcctagggggtggggtagatcaggagctctgagcagaacagtgctcactgattatcctctttccccaactcagtgggcaggtgcagcgtacacccagcagcactctccactgcccacaggcaagggaagaatattgattgattagctacaaggagaagacagtagtgactagtggaaaacaccctggagagggccagaggaacctggctctcaccacatcccctctgttcccagccttggtgagggggcggggaggtcatgtcaacctctctccttggtggtgaagctaaaagcaaggttccttgccagactcaagcccaagtcactgttaaggaaagaggatcaagaaagaagcggtggcctggggggcagccacgctgctgtggacccacaggggccaatggggaagccagcttgcctagacaggtggcacaggctgaaaatagaaaggttaacattcccggagagtacagtaagagaggctgatacctaggggaccaccacccagcctgccctagaagcactgggtgcccctcattgactagagaagacttgagtaaaatgcacctgtggcttcccatccttgtcactcagcgttagctgcccccagtggaaccacctgtgctgaaaggcagctgcagaaaggacatgcaccgaaatgaggagagagaaaggtcagagaatgaagtgtggagggccaggcctgggcccactgctcaag

SEQ ID NO: 314454 - DNA, 1491 bp, Homo Sapiens
  misc_feature (886)..(886): n is a, c, g, or t
  misc_feature (1005)..(1005): n is a, c, g, or t
  misc_feature (1096)..(1096): n is a, c, g, or t
  misc_feature (1159)..(1159): n is a, c, g, or t
  misc_feature (1185)..(1185): n is a, c, g, or t
  misc_feature (1234)..(1234): n is a, c, g, or t
  misc_feature (1279)..(1279): n is a, c, g, or t
  misc_feature (1285)..(1285): n is a, c, g, or t
  misc_feature (1294)..(1294): n is a, c, g, or t
  misc_feature (1307)..(1307): n is a, c, g, or t
  misc_feature (1335)..(1335): n is a, c, g, or t
  misc_feature (1342)..(1342): n is a, c, g, or t
  misc_feature (1358)..(1358): n is a, c, g, or t
  misc_feature (1414)..(1414): n is a, c, g, or t
acctttttaaagtaacatttaaaattacttcctttaatataaaagaaacacacaagacacaaagaaagcccaataaagctgtgagtcccagtttggtagctgaggaggagtctaagaaaacaagccattcctcagtatccctgggaaagaaggggtgagaggacacagatatcaccaggccctgggtgactgcattgctggggccatgcagggcctagctctccaccaagggaaagtgctgattttccttgtcatggtcctggccttgctcccatgctcgtcctccagttttcagaagtcgtccagttccaagaatggctccttcctttagttcactaacattttcacttaggggtgaaggccgcttaccctgtcgtagtgtcagggtgccaggggagttgtcatcctgcaggatggtgaggggggatctccctagtaccttgctgctgtttggtttccatctattgcgcatagaacctggggtgggtaaggcgttaaagcaaggacccaaaactaggacttacagtttattcctcccacactcacccatggaccttatcccaaaacattatgctagtttatcttccctgcatcttgccttagattctgtacctgaagatctgggagtcctcagggtcccttgagggcttgtcggagctctggctggccacaggggtttctgtgggctgtcttgctttctccttggaaaacacctgtttggaggggaactcagtctggttccaaggtggcttctgttgctcaacagataactgggtacccagaggcaagtgcaattcagaagataagggtgcctctgggggcagaacaggctctgggggaagatttgatttagagtcttcagtttcaaatacttcactcagctgtntcaccagtgggcttggggggtctccactggtggtcttcataggtgtccgtgcaataccaagagtaggagagcggggatctgagtcctgggcatgtttaagaccctccagttgctccccngctggtaggcctggctgtggagagctctccacctgtcaagaccataggctagaacaagtctgggccctgactcttctctcctctcctcccnatattccaggaaggaattgccaaggccctcagatatccagcctaccccacacagattgagatngcagaaaataaggctaggataagggnggggtcatgacggctctctcaaaatcaggttaggaagagacccaagaantcagacattctctgcctttcccacgctggcccagagtacctggangggagngcgcaggangccagcactaggngaacgggggtccgccactcgagccagangcttgtngtgcggcggaggccgngctggtgtgactgggacgctcttggctgagcccatctcaaccaggagttgcagggngggggcaagggccagcccgggacgaggagggaatgccgggccccaattccacctctggatgcacaacagctcgtggc

SEQ ID NO: 314455 - DNA, 566 bp, Homo Sapiens
cacacagattgagattgcagaaaataaggctaggataagggtggggtcatgacggctctctcaaaatcaggttaggaagagacccaagaattcagacattctctgcctttcccacgctggcccagagtacctggatgggagtgcgcaggatgccagcactaggtgaacgggggtccgccactcgagccagatgcgttgtgcggcggaggccgcgctggtgtgactgggacgctcttggctgagcccatctcaaccaggagttgcagggtgggggcaagggccagcccgggacgaggagggaatgcctgtgagaagtgactcaggtctcagcccttatctcttccacgtcggaccttcaaccctaaaccaccctgtcttcccagccagtgaagaaacttcctggcgagggaccagaggcctctgcggagttaatgactgctgcagctgacaaaatggctcgttctgggcctgctgagccctctaacttatttattaaattattcaaatcacttaccgggccccaattccacctctggatgcacaacagctcgtggctcaactcccga

SEQ ID NO: 314456 - DNA, 910 bp, Homo Sapiens
caccaagggaagtgctgattttccttgtcatggtccttgcctggtccaatgctcgtcctccagttttcagaagtcgtccagttccaagaatggctccttcctttagttcacttacattttcacttaggggtgaaggccgcttaccctgtcgtagtgtcagggtgccaggggagttgtcatcctgcaggatggtgaggggggatctccctagtaccttgctgctgtttggtttccatctattgcgcatagaacctgaagatctgggagtctcagggtcccttgagggcttgtcggagctctggctggccacaggggtttctgtgggctgtcttgcttcctccttggaaaacacctgtttggaggggaactcagtctggttccaaggtggcatctgttcctcaacagataactgggtacccagaggcaagtccaattcagaagataaaggtgcctctgggggcagaacaggctctgggggaagatttgatttagagtcttcagtttcaaatacttcactcagctgtttcaccagtgggcttggggggtctccactgctggtcttcataggtgtccgtgcaataccaagagtaggagagcggggatctgagtcctgggcatgtttaagaccctccagttgctcccctgctggtaggcctggctgtggagagctctccacctggatgggagtgcgcaggatgccagcactaggtgaacgggggtccgccactcgagccagatgcttgttgtgcggcggaggccgcgctggtgtgactgggacgctcttggctgagcccatctcaaccaggagttgcagggtgggggcaagggccagcccgggacgaggagggaatgccgggccccaattccacctctggatgcacaacagctcgtggctcaactcccgaagtta

SEQ ID NO: 314457 - DNA, 447 bp, Homo Sapiens
cgcatcatcatcagatcccttctccctttggatgtcttctcctctcttctttctctcaccaccctcctcatcttcaccttcttgttcactgccactaccctttcttctcttcttctggatataggtaggtcatcatcagtgtcatcattgacaaattcatcaaactctcctcccttcttagaacgccgtccaccaccaccacctcttttcttctcttttgttgcttcagtctcaccagtaaacataagaatatttttggtcttctccacatactgggcccgctgttccaaaagtttcttttgctcttccttttctctgagacgtttctcttcctgttctttaagaagtttctgccttaacagctccttttcttgctcttgcttggcccgcagctcccgctcttcttcatcttgtttgcgtgcccgctcgtgccgaattcctgcagcc

SEQ ID NO: 314458 - DNA, 1070 bp, Homo Sapiens
  misc_feature (4)..(4): n is a, c, g, or t
  misc_feature (28)..(28): n is a, c, g, or t
  misc_feature (51)..(51): n is a, c, g, or t
  misc_feature (79)..(79): n is a, c, g, or t
  misc_feature (85)..(86): n is a, c, g, or t
  misc_feature (92)..(92): n is a, c, g, or t
  misc_feature (94)..(94): n is a, c, g, or t
  misc_feature (106)..(106): n is a, c, g, or t
  misc_feature (158)..(158): n is a, c, g, or t
  misc_feature (165)..(165): n is a, c, g, or t
  misc_feature (176)..(176): n is a, c, g, or t
  misc_feature (178)..(178): n is a, c, g, or t
  misc_feature (994)..(1009): n is a, c, g, or t
gtanaaaggcctgtgagcacagtttgantgggcaaacacatgatggtgagnacgccgggctcatccatccactctggcntcgcgnngccgananttctcagaaccnagactcctaacactctctatactctcgctcctatgctcgggactccggctgngctcacnactacctcttngncaggacccttgaccagccagcctgaaggaagactgcggatggacaggagcgggcaggcccgcacatatccacttgctggagcccatgtttacagacagggacatacaccatgcagatcctgagttcctgctgtatgagcagggatatccatgcttatgtatccaaacacagagacccatgggaacaaatgagacacatatagatactgagacctgtgtgtacagtaggaccatgcactcacacccatctggagagggagcccccggtataccaagggagccagttgtgttcagacacacacatcacagcttgactcactaactgaggcctttccatagctccacagcttcccacctcctccccaccaaaccggggttctagagttaaggatgggggagggtattatactgcctcagtctgactcctcaacccagcagcaatttgaggggatgagggggaagaggagctgccttttggaggcccccttcacctgcagctatgatgcccttccccttctcccctgtcctcaccatatgccttatccccattctactcccctgctatgcaagtgcccctgtggcttgtccccaaccccctcagcaacaaagctcagctggggaacgagagtaatttgaagaatgcttgaagtcagcgtcttccattccagaaagacccccattcttcctttgggggtatgatgtggaagctggtttcagcccaggacccaccactgaggagaggatctagacaggtgggcctaattccaaggggcccctttctggcctgtagaaggccttttacaaacacacaaaacannnnnnnnnnnnnnnncacacacatatcacagttttcacacagcccctgctgcattctctgtccatctgtctgtttc

SEQ ID NO: 314459 - DNA, 1638 bp, Homo Sapiens
  misc_feature (32)..(32): n is a, c, g, or t
  misc_feature (48)..(86): n is a, c, g, or t
gacagatggacagagaatgcagcaggggctgngtgaaaactgtgatannnnnnnnnnnnnnnnnnnnnnnnnnnnnnnnnnnnnnnaaaggccttctccaggccaggaagggccccttggaattaggcccacctgtctagatcctctcctcagtggtgggtcctgggctgaaaccagcttccacatcatccccccaaaggaagaatgggggtctttctggaatggaagacgctgacttcaagcattcttcaaattactctcgttccccagctgagctttgttgctgagggggttggggacaagccacaggggcacttgcatagcaggggagtagaatggggataaggcatatggtgaggacaggggagaaggggaagggcatcatagctgcaggtgaagggggcctccaaaaggcagctcctcttccccctcatcccctcaaattgctgctgggttgaggagtcagactgaggcagtataataccctcccccatccttaactctagaaccccggtttggtggggaggaggtgggaagctgtggagctatggaaaggcctcagttagtgagtcaagctgtgatgtgtgtgtctgaacacaactggctcccttggtataccgggggctccctctccagatgggtgtgagtgcatggtcctactgtacacacaggtctcagtatctatatgtgtctcatttgttcccatgggtctctgtgtttggatacataagcatggatatccctgctcatacagcaggaactcaggatctgcatggtgtatgtccctgtctgtaaacatgggctccagcaagtggatatgtgcgggcctgcccgctcctgtccatccgcaggtcttccttcaggcctggctggtcaagggtcctggccaaagaggtaggtggtgagctcaagccggaggccccgagcataggagcgaagagtatagaagagggtgaggaagtcctgggtgctgaagacagtgtcggccagcgcgaaggccagggtggatgggatgacgccccggccgtactccaccatccatgtgtttggcccccactccacagctgttgcctcaccaggcccgtgtactaccgtctcccctgggtagaagacctcacttttggtggtgccctctctccactggtggaaggtgccagagatgatggtatccgagatctcagcccagtagcgccccgagtggccgcgggagcccaaggcggtgccgaagagcagcacatactcggacagcgaggcgtgcagaaggcacatggcgcccatccagccacccgcattcacgaacacccactgcagctcctcgtcgggcagcacgtggcctgggtgcagccgccgcagctccacgatcagacgagagaaggccagctcgtggtccagcccagcgtactgccgcgccaactgcgctatctcttcgcgctggaagacgaagctctgcgtacccagccagagccagacgacctgggtcagcaccgctgcgacagccaggagcagcgcggcccacgcccaccgccggcccacggcccactgcatcccggcgggcggcctggcacggcgcagctcaggagggagccggggcctgaggctttgcgctcacggcctcggagcccgccggcatcccgggaa

SEQ ID NO: 314460 - DNA, 1584 bp, Homo Sapiens
  misc_feature (9)..(9): n is a, c, g, or t
  misc_feature (11)..(11): n is a, c, g, or t
  misc_feature (64)..(104): n is a, c, g, or t
  misc_feature (384)..(384): n is a, c, g, or t
tttatgtantncaacagacagatggacagagaatgcagctggggctgtgtgaaaactgtgatannnnnnnnnnnnnnnnnnnnnnnnnnnnnnnnnnnnnnnnnaaaggccttctccaggccaggaagggccccttggaattaggcccacctgtctagatcctctcctcagtggtgggtcctgggctgaaaccagcttccacatcatacccccaaaggaagaatgggggtctttctggaatggaagacgctgacttcaagcattcttcaaattactctcgttccccagctgagctttgttgctgagggggttggggacaagccacaggggcacttgcatagcaggggagtagaatggggataaggcatatggtgaggacagggnagaaggggaagggcatcatagctgcaggtgaagggggcctccaaaaggcagctcctcttccccctcatcccctcaaattgctgctgggttgaggagtcagactgaggcagtataataccctcccccatccttaactctagaaccccggtttggtggggaggaggtgggaagctgtggagctatggaaaggcctcagttagtgagtcaagctgtgatgtgtgtgtctgaacacaactggctcccttggtataccgggggctccctctccagatgggtgtgagtgcatggtcctactgtacacacaggtctcagtatctatatgtgtctcatttgttcccatgggtctctgtgtttggatacataagcatggatatccctgctcatacagcaggaactcaggatctgcatggtgtatgtccctgtctgtaaacatgggctccagcaagtggatatgtgcgggcctgcccgctcctgtccatccgcaggtcttccttcaggcctggctggtcaagggtcctggccaaagaggtaggtggtgagctcaagccggaggccccgagcataggagcgaagagtatagaagagggtgaggaagtcctgggtgctgaagacagtgtcggccagcgcgaaggccagggtggatgggatgacgccccggccgtactccaccatccatgtgtttggcccccactccacagctgttgcctcaccaggcccgtgtactaccgtctcccctgggtagaagacctcacttttggtggtgccctctctccactggtggaaggtgccagagatgatggtatccgagatctcagcccagtagcgcctcggacagcgaggcgtgcagaaggcacatggcgcccatccagccacccgcattcacgaacacccactgcagctcctcgtcgggcagcacgtggcctgggtgcagccgccgcagctccacgatcagacgagagaaggccagctcgtggtccagcccagcgtactgccgcgccaactgcgctatctcttcgcgctggaagacgaagctctgcgtacccagccagagccagacgacctgggtcagcaccgctgcgacagccaggagcagcgcggcccacgcccaccgccggcccacggcccacggcatcccggcgggcggcctggcacggcgcagctcaggagggagccggggcctgaggctttgcgctcacggcc

SEQ ID NO: 314461 - DNA, 927 bp, Homo Sapiens
  misc_feature (167)..(232): n is a, c, g, or t
  misc_feature (340)..(344): n is a, c, g, or t
  misc_feature (346)..(346): n is a, c, g, or t
  misc_feature (350)..(350): n is a, c, g, or t
  misc_feature (379)..(450): n is a, c, g, or t
  misc_feature (532)..(571): n is a, c, g, or t
atatgtatggagggctctcccccgctctgggagggcgccccccgcgtgtgttgtaagggaggtcccccccggtataaaaggccccctccgaaaaaactcccccccctttggggggtttttgtgtttcaaaaaaccccctctttgggttttcccccccgcggcggggnnnnnnnnnnnnnnnnnnnnnnnnnnnnnnnnnnnnnnnnnnnnnnnnnnnnnnnnnnnnnnnnnngggaacaacacttagggccccatttcccctttcccctggggggcccgggccccccaaaggaaggggttttgaaaaattttttgggggccgggggcgggcggccaagannnnntntttntttgtatttctttttttagttaaagatannnnnnnnnnnnnnnnnnnnnnnnnnnnnnnnnnnnnnnnnnnnnnnnnnnnnnnnnnnnnnnnnnnnnnnnggaacagatcaacaaatctttattaatagaaacagacagatggacagagaatgcagcaggggctgtgtgaaaactgtgatannnnnnnnnnnnnnnnnnnnnnnnnnnnnnnnnnnnnnnnaaaaggccttctccaggccaggaagggccccttggaattaggcccacctgtctagatcctctcctcagtggtgggtcctgggctgaaaccagcttccacatcatacccccaaaggaagaatgggggtctttctggaatggaagacgctgacttcaagcattcttcaaattactctcgttccccagctgagctttgttgctgagggggttggggacaagccacaggggcacttgcatagcaggggagtagaatggggataaggcatatggtgaggacaggggagaaggggaagggcatcataagctgcaggtgaaaggggcctccaaaaagcagctcctctttcccctcatccccct

SEQ ID NO: 314462 - DNA, 376 bp, Homo Sapiens
  misc_feature (62)..(119): n is a, c, g, or t
aacagatcaacaaatctttattaatagaaacagacagatggacagagaatgcagcaggggcnnnnnnnnnnnnnnnnnnnnnnnnnnnnnnnnnnnnnnnnnnnnnnnnnnnnnnnnnnaaaaggccttctccaggccaggaagggcccttggaattaggcccacctgtctagatcctctcctcagtggtgggtcctgggctgaaaccagcttccacatcatacccccaaaggaagaatgggggtctttctggaatggaagacgctgacttcaagcattcttcaaattactctcgttccccagctgagctttgttgctgagggggttggggacaagccacaggggcacttgcatagcaggggagtagaatggggat

SEQ ID NO: 314463 - DNA, 387 bp, Homo Sapiens
tggacacgggccgagtgtgtgtggcccatgatgccctccccaggcagattctggttcacgaggacatggttatctgggaggcctccatagagtttgagggactctttgtccacgtagcgctggagccttgtgggcagcctctcaggacccatccctcgggtatgaggaagcccacgccagttctgtacctttctcccagagagctgggtccactttggctttggggcattaacaccctgtcgaagcaaatactcctcctcttctttggagatgaagtcagggacatagtagattacaggtggtgcttgctccactctgcgcggttccagggctgggactctggcgtcgtgctcctccatcaacacccactccgtgcacactatccgt

SEQ ID NO: 314464 - DNA, 823 bp, Homo Sapiens
  misc_feature (161)..(198): n is a, c, g, or t
gatgttgaatttggaaattggaggggacgctggtggacggattgggtgcaaggagttggtgttgatggaggagcaggacgccagagtcccagccctggaaccgttcagagtggagcaggcaccacctgtaatctactatgtccctgacttcatctccaaannnnnnnnnnnnnnnnnnnnnnnnnnnnnnnnnnnnnncccaaagccaaagtggacccggctctctgggagaaagttacagaactggggtgggcttcctcatccccgagggatggttcctgagcggctgcccccatggctccggcgctacgtggacaaagtgtcaaacctcagcctctttggaggcctcccagctaaccatgtcctcgtgaaccagtatctgcctggggagggcatcatgccccacgaggacggaccactgtactacccgactgtcagcaccatcagcctgggctcccacaccgtgctggacttctacgagccgcggcggccagaggacgatgaccctacagaacagcctcggcctccgccccggcccaccacctcgctactgctggaaccgcgcagcctgctggtgctccgcggccccgcctacacgcgtcttctccacggcatcgccgccgcccgcgtagacgcgctggacgccgcctcctcgccgcccaatgcggcagcctgcccgtcggcgcggccgggagcctgcctggtgcgcggcacccgggtctcgctgaccatccgccgcgtgccccgcgtgctgcgcgccggcctcctgctgggcaagtgaccgccagggccgggacccctcggattcccaggttcctgcccc

SEQ ID NO: 314465 - DNA, 360 bp, Homo Sapiens
ggcacgagaagaaatatttcacacaatgaagagacacagagggccaacatattcagcatatgacattatattaatggaggaaaagtcagcatgtttgggaaatgtggagttcaggttagtgaagggctggatctttgtaggcagagataaaatgggcaaggaacatttgcatgaagtaattttatttaattaggagcattatgaggaatcacagcaattatttgaaagagtaatgatatgatcaaagttaattgttatgatcttcagattaatctggcactgtgtacagaatagattggaatctttgctgagcactaagtatgtgatagatattcttaatcagtccttatcacgcctatg

SEQ ID NO: 314466 - DNA, 2212 bp, Homo Sapiens
tcaatttgctatgtatatacgtgtttattatatgcttattacaaaagaaaaagtcttttgccttattttagggcttccatgtaaaacctagttaaaatacaaaaagtaaattagagaaaaattctgcttaggtagtgaaaattgatagcaacttataagctgtatccttaaaaacctagtcacagatatagaattacgtaaagataaaatgataagcctacttattggcaagaaacaggttaggccacttaagcagcatgtttctaccactatacaaatacatcggcaggtccaaacattaaaccaccattcgattgacaaccttttatttttcaacttaggtaacagtccaaaatcagtgtagattggcgaaaaactaggcaaaaatagcaaaaagtgcagtttaatttagcaaaggctcaagacagtatgtggaaggaaggtgagatttccctcctactgcggcaaggcaagcggcagttactgcccgacagtaacgatggtgtgcgcacccccgatgagaatgctgctgcaacacagactgggacgccgcctcccccattagacctgccagctcattcgtgaaaatctaccaggaacacatcaatgaaaaaaatatgtcaaatatgagttctctgttataagcaataaaatcacaaaatcaactcagatttggaaatttagggtaagctaggacaatttcctactttttaatatatagatattttagatttgacaatcgtttccacatacactcagacaggcttacagaagaatttcaaatatcaaatagagaagctgttaattcacgcacgttatgacttcagttaattcttccagtgtttagacttcagagctgctaataacactaaactcaataccgtgtttgttgagtctgtcaatcaactttgttttggaaaaagctgctccaggtgtgaagaccccgcccgccttaggcagatgagaagcatcacttagaagagtcatggctgcctgaaccatagctatgggggtagccacatagccagcctctggtcctttcacctgagtacaaattttgatatttggtttgttcttatctgtaccagtgccttggctgtatccttgaccaaagaatgtcagcgtgaatgaggcagcatcaatctgtttttgtgttgggccttgttttgaaaaatagccaaaggagaagaaccatgggaattttatgagaagttgccttccaattccaaacctcacaaagaacaaaaagaaaagtcctgcaaacatcagcttaataacagaggtgatgcctcccacagttacatacgcagcatactgaactggtgattcctctaaattttcatacaagtaacgttgagtcctccttacaacagacacatcagatcccataaaaggaatggaataacctttgagttcccgacaataagaaattggccaccttctcttcaattttggaccaatgagcgggacaggtttcagatttgatacatttcttagttttctcaaattactctgatctccaaaaccataaattgctgacttccaggtaccatcatgaatgctcaacccctcaggtcctgaatgtatagtcaggaaactttccacagcagtcaaagtaccattcattttatttctggtatatattactcccagatctgctggaatggagtcaaagccgctgcttccaatgatataaacccctttgtctgcagctttctcatgatacttcagttgcattagttccagaaactgaggttctccactgatgtcgatacaactggctccattttcaatacatgcttttattacaggttctccataaaaccgatatggtcctacgcaattgaggacaactgttgcctgtttagccatttcatcaagcgaggctggattagcaatatcacagatgatgattccaacttcagatgacagtgttggtcttcccagcttcagggccgccttctccagcacccgctgcagcttctcccgggagcggcccgccacggcccagggcaggcgggagctccgctccgggtccacctgctcccgggccacctcctcggtcacgaactggccggtgaagccagacgcgccgaacaccaccaggtggaaaggcctctgctcggtcgccatgacgagtccacagcgagcccaggccccggggcgggtggagtccacggcgcctgcgcctcaggcagcgaccccatcccgg

SEQ ID NO: 314467 - DNA, 371 bp, Homo Sapiens
aattcgcacgagaggctgtacgagaccacgagccaggtggccaagcagcgcaaaccgtggatgtgcaagaaacaccgcaacaagatgtacaaggacaagtatagaagaagagcgaccaggccctgaactgcggtgggactgcctcgactggcagcgcgggaaacgtcaaactcgaggaaagtgcagataacatactctccattgttaaacaaagaacaggatcttttggggatcgtcctgcaagacctactcttttagaacaagtgttaaatcaacaacagctattaaatcagcaagttttggagcgacaacagcagtttccaggaacatcaatgtgagggaacttaccaagcatctacatggttttttct

SEQ ID NO: 314468 - DNA, 365 bp, Homo Sapiens
gaaagattaacattatacatttatttcactttgtgttatggaggagccaggatttagagatgtgcggtcttcctacccctccacatttcttaccagttaatcgtattgttcatgtatacagcttatggagcttataaggacattggacacccacatttatagccaggccctttgattctcggcagataatgggctcaggaagggcagcagtgggtggagacattttactagaattagtctgccgctttgaatacaatctggatttcttgctatttcttgtgcaacctgtacgccatttcctctgaacttgctagtgctctggagacttggttgtttggccaaggtatcccctagcaggagggctc

SEQ ID NO: 314469 - DNA, 586 bp, Homo Sapiens
  misc_feature (53)..(53): n is a, c, g, or t
  misc_feature (60)..(60): n is a, c, g, or t
  misc_feature (85)..(85): n is a, c, g, or t
cccctggctccctccaagcatacctgagctgatggcccgacccccaacccccnactcacncagcagagcggttctggtcaacatntattgatcatctactgtgtgtgggcaagggcggtactggggatacaaaccaagaaagatgcagcttctgccctcagctcaaggggaagattggtgtatgaacaaatcactagtgtagaatgtgcaaaacatccggcctgtaggaagtcagggaagcccgaggaagtgacaggggatcagagttctgaaggacggtcaaggtagctgtgtggaccgggatggaggtggtgaagtccaggaggaaggacggcctgatgcaggggccctggggcaggagcgggacggtgagtctgggaaatgataggtgggtcagtgttgctgtggtaagagacacaggggtgggagagaggaagagatggtcaggggcctgtgacagggccttggggtcattccttgcaactggtaggagtcgccgaatgcctcaggcagggaatgtcctgacagacctgcatgctgaaggctgccctggctgctgtgggagaatggagtgagaagatggagg

SEQ ID NO: 314470 - DNA, 501 bp, Homo Sapiens
gccagagaaagatacatattcaagtccagtgacgatggcgctctagttaacttcttttccaaagttggtaagagactctttttggtctgtttctcattttgggactcctctttgcgtaatcctccttttgatgaatttccatcgaatgactctgtttctgaaacccgactaattgattcactggtaaaactgattgacttggataatttttcatctctctccccagagtcatccaagctgcttcttcctggacttcttggctgcacatcctcaatcgacagtgacaagttttccatctcctcagcatttaaacctagctcagtgccatagttctgctggagcagttgccagaattcctgtctagtcaggctctgcaaaccaaggagagtctctccctttcagcccacagagtagtttcacaaaataaatatgaccaacgcagtactcatataaggctcaagagtcagaagctcaatttctggcccagaaagctgtgtattc

SEQ ID NO: 314471 - DNA, 600 bp, Homo Sapiens
caagcaagccatgaataaaccagagcagtggcattagagaacatgggctgccatacaaacagttcatgaacctggttatctggcaagagggtcgcaataacgaaccagacacatacctgttaatgcttgtgttcagtagcaattcagtcagcgataaggtgcacatatgacaccgggaatgcgccgcgaccaggatctccatcaatgtggccaatccaccactcctggtcctcctcgccgtccacgatgatcacatccccctcggagaaggtgagctcatcggggttgtcagccacacagttatagagcgctttcacccgcttaggcttcaacttggttgcctgcgacttcctaggcatgggtgcagggggctgcaggaccatagcattggacagaggacccagagcttccgttgcagagagatccacaggtcctctcggttggcctttgttggtcagtggggtggacttgtcagcccccggcgcaggcttcttctgcgggaggcggctgggcggctgtgggggcagaggtgggggcctgatctgtgagatcccaggcggggcaggcttgctcggctggctcaaggctatacattacgca

SEQ ID NO: 314472 - DNA, 367 bp, Homo Sapiens
gcacgagagcaaacacttttacaattaattacttcccttaccctggaaaatctaaacaaatgcttcattatatatttttaataaatcgtttgtgtttatgggggttgtggttggagatggagagctttggggagttaaattcattttgtaatattgtctcagtttggattcttgcattctgaaattttatcctggtttgaaagacaaactcttatctttataacaggtgaataacaataaggcaatgtagaagaaagcaagtcccatcaaagggagctccagtctctatagactgataggagcctcagaacttaaacctctggatcaggagaatcaacactttctatacttccggcagagtctgctt

SEQ ID NO: 314473 - DNA, 623 bp, Homo Sapiens
gggagggatattatttttggcgttacaagaagttttattaacatattctctaataatcacagacctacacagcgatgttcagtattttcaaggagagtgacttcttacaaaacgtttatagccaatcatgggattgtgctagaaaacgatggcatatgcaatgacagatttgacagtttaatcagaaaaatggaatgatagaaatgaagcagactccccacgtactgtgctaactgggtatgcaacagtttaatgaaataccataagccttagttggagactgtgatggaacagcgtagaggccatccgtttccaggccattctgagatccaagatgccaactccttgtttctatgaaacttcacgagatgtgccagtcagaaatggcatgctgaacattctgcagagctgcagcactggcctggtcagccagggctaccacactggtgacagtgctgctggtacctgtgatggctcttctggtatccatatcttatacacaacacctatccgtaggaagaacttccgcagaactgctcggagctcagggatcaggtcaaactgcataatttcacacaagtaggggtagtacattgaagcatgtgctttgaacttgaggtggg

SEQ ID NO: 314474 - DNA, 420 bp, Homo Sapiens
gggagcacagcagtccgcgtgacaacagcgactcggagatcagcacccgtcgggaaagccgcgtacccggaagctggcgtcacgcccaaaggaacaaacgccagagcgtgtgtcctgggcaaaggcggcccgccgctccggtccccgggcagcagcggccggcgtcaggccgcaaggcgaggggcggggacaggactctacccggcagcccaccgccgagcgcccgcgccactccggccttgcgccattccggccccacgacggccggcggcggcagcgcggctgggctcagcggctcgcagcccgggcgccccccctgccggccgctcgctagctcagcctcacccgcagtcttgtccgctggctcgctcgcccgcctacaggtcgacagggcccaacgacccggcgagcaacttcacg

SEQ ID NO: 314475 - DNA, 484 bp, Homo Sapiens
taattggcgtcattcacatttcattcttgggcaaattagtttcccatatttacctcaaacctttcacctttatgtgtgtaacttctacccaagacattcatgaccctattcatacttgaagctcatcccttcctcctttttggaagccttcctgtgatgaccttcccgcaaggtgccatcctaggttgagggccctagccctccttttccagttccttcctgtcctatgaatgaatctgcctataagtctctgagtccctgcgtatggccacctgtgatcctctgtgtctctccctgtgtcctggatgagtgtgtctctgccctgaaagacaatgttccaagactggccctggattcttagtctctacatctcggaggggtatttcttcataggtgcgggaaggcagaagaatgggcctactctctttctctttgtctcataggatgcaagaagccagtgtctgcctcagggggagatggattg

SEQ ID NO: 314476 - DNA, 639 bp, Homo Sapiens
ctcaccaacgtgcctctcacgcctctaacgtgctcgagccatccttgtgttctaaataattcttcctccctccctcccttctccacctcttgaggcgcagcctattggccagtatgtaactgggagcaaggcgtggaccttcagtgcaggggaccccattctctaaggcctctgagttctaggcctggagtaggagagggtgctgttgtcaaggttaagtgcaaacttgagattttaaaaagacaggattgggaaagggggattgcatgctaatcccaaccttataggcaggctgggatcaagaccttggaaggtagggctctccacccagtctgtaagcaccagtgtgcccaccttatggcctggggacccaggtttgcaggagggaagttaacagtggggctgtttttccccaaagctgtgggtcactgatcctgtcttctcactggctctgatcatgcagcttgggaaccacagagacatgagactgcaccaaacagggctgatgatttagccagaaactcaggaaggtctagcacagccctccacacacttcccaggaagtgtttggtctggccctgcagttgggactaaacttatatgcacctgcaggtcttgttgggtgcaccgtgagcaagt

SEQ ID NO: 314477 - DNA, 527 bp, Homo Sapiens
  misc_feature (435)..(435): n is a, c, g, or t
  misc_feature (450)..(450): n is a, c, g, or t
  misc_feature (463)..(463): n is a, c, g, or t
  misc_feature (485)..(485): n is a, c, g, or t
  misc_feature (511)..(511): n is a, c, g, or t
aactttacagaaatcaagcgaattagaaggcctgtaagagtaaggtttgctaaaacgtgaaacactgtaacacttttaaccactgagcattccacagtgaaatgttatttctatgctcttatttaatgtaatgtttctcctgtcatttttgaagttgagtttggagtagattggttgcttctgagaacacattctgccttcctggggaagtcggggtgtcatcctttcctctgtttgatgtgaggtagtttaaagatacaaggactttgtgtgaagctccagcatctgtgccccttgaattgcttagggtgcagacagttctaaagcaaggagctgcagcatttcttcatccataggatacggtgcagtatccttttaatgagtatcttcatgggtatggatagtgtgtgttttgtggagtgcgaagtaccccanttaagggtgtccttnaaatttggccgcntaggagggaggagagggaaccncgagggattagtgtttcccccccgantgagggttcaggtcac

SEQ ID NO: 314478 - DNA, 408 bp, Homo Sapiens
  misc_feature (186)..(296): n is a, c, g, or t
ggcaacaagcaggacgccatctgtacaaaataatacaaaggaggctggtgggagaactgcgagccccagaggaggttacagtgagctatgatcacatcactgcatcccaggcctgggcgatggagcgaaactgtctcttaaaaaatggcagggagttggggagctgggcaggtgcagtggctcatnnnnnnnnnnnnnnnnnnnnnnnnnnnnnnnnnnnnnnnnnnnnnnnnnnnnnnnnnnnnnnnnnnnnnnnnnnnnnnnnnnnnnnnnnnnnnnnnnnnnnnnnnnnnnnntagtcatgcgtagtggtgcatgcctgtggtcccaactacttgggaggctgaggtgcaaggatagcttgagcctgggaggacaaggctgcagtgagctgtgattgcaccactg

SEQ ID NO: 314479 - DNA, 1349 bp, Homo Sapiens
  misc_feature (29)..(29): n is a, c, g, or t
  misc_feature (34)..(34): n is a, c, g, or t
  misc_feature (36)..(36): n is a, c, g, or t
  misc_feature (1092)..(1198): n is a, c, g, or t
ccagatatttgatgttacaaactttaggntcctngncagagttggtatcacaaaattgtttaataaaatttataaaaatgcatctttgagaatacttttctcagcttgaattgttttccttttccacccccaaagaaaatacacaattatcagcacccacacatgtatacactcaaaactacagtgacattctctacacagaactatattcgatatagcttgaactgccgaaaaatcaagacaattccaaaaagtgattgcagggttgatttttttctccaaaacacttgagaaacagtaaagctatttcaacaaaagtcttttctttgattgtcaaaagttgaaattcacatttaaataaaaagagatccaaatcaagatcctcactaccccctacccctcaactaaccccctttagggccacattttcttcttgctcctaagaaaaaaatttggaattttgaatattctcggttttctgtgcacacctggaattgggcaaatgtgttcagctcagccagcattttctgtagacatcatcaaaagcaggcacttggggattctgggctttgagtacaaaccacggatcttgtgtcagaaacacatgttgagactcctccattccttccagaattttcagagatgaggtagacccacctcaatcatcctcagcatcagtttgctaaattgccaggctcaatgacaagctctcctgccatctccaagcccacttttcatagttccgctctgtctttggctgcagcactttaggcactattctaagtcctggagtatatcactcttgcttcagagctaaataaacattaatgaacacacttactcagaacaagtcactggatagctgcccattgcaagttacatactcaggagatgaaagagggaagccattaaaggtcttcagagtagacaatacctagtcaagatgtggccagacaaagacacaaacttcttaccctaaaagagcccaataatttctgcatcagagaactcctatcttgggcaaagcaactgaattcaggagtgagagttgatattaaaacatggaggctgggcacagcagctcatgcccannnnnnnnnnnnnnnnnnnnnnnnnnnnnnnnnnnnnnnnnnnnnnnnnnnnnnnnnnnnnnnnnnnnnnnnnnnnnnnnnnnnnnnnnnnnnnnnnnnnnnnnnnnggaggctggtgggagaactgcttgagccccagagtttgaggttacagtgagctatgatcacatcactgcatcccaggcctgggcgatggagcgaaactgtctcttaaaaaatggcagggagttggggagctgggcaggtgcagtggctcat

SEQ ID NO: 314480 - DNA, 373 bp, Homo Sapiens
cagaaagttagtagtaatctgtgctgtaactgttttcttcccattccaagtgtagcatttcttttatgatatattacctcccccaaattgatttttattttaaatatatactagtgtgatttgacactgaagtttacaatgtaattgctaactatatttataaatcaatttgggttctaactgcctaataaatgttaaccatctttatgtaaaggaatttttctttaatgatggagggaatagggaagtatattgtatctaaggagacagtgtcagcttattaaatctaactgaagaaagtatatttttactgttaccttccaccttacttttattgaactctcatctcagaagagtgacttgacagggagct

SEQ ID NO: 314481 - DNA, 599 bp, Homo Sapiens
  misc_feature (455)..(455): n is a, c, g, or t
  misc_feature (526)..(526): n is a, c, g, or t
cataaatggaagacatcacacactcacagagaaaccacactgttatcccccccatgcttgtggggatcatggaggaaggagaacttacacctctgagcattttgtacttttactgcattgactgattcccaggtaaggctgagcagatatctatgcccagtgattgacaggaaattcctctgaaatagctgcaagtctggagtttcttctcataggtaagtttccctttcatagatgttttttccttcaacttcctgcaattcagtagctatttgtttttcttacatttgtgtatttgatgcaccaagaagtccacctttttgtgtatcttgtccatttttcttgtcttattaactaaagttacacttggatttggatttcattggttttccccaaatgacctttttctgttccaagatccatgccaagctactactttacactacattacattntgtcatgatgtctcctcagggtcctctaggctgtctaagattttcctttttcttgagaactttgatagttntgggtagcgcttgctgagatttttatagaatgttcctattttggtttgtctgattttttttttgatgtttgtt

SEQ ID NO: 314482 - DNA, 754 bp, Homo Sapiens
gaaggtacttctccctctacggctctgcgctggggcctatggtagtaaagttgtttactgtcctttttctgcttcccctggaaatgacaggcattactctcccattggcctcccttccctttatagaaagaccaagcaggccccactggccaagaggtacggtatttggcagtctgagttctcagtaatttggaaagttaaggagttggttcctgtgtcacctttcagttagtgtgggaaaggaagacttctgttttcctggagatcagtgcagtctcaggcctttggcagggctcatggatcagagctgagactgagggagaggcatttcgggtagcctaggagggcgactggcggcagcagaaccgaggaaggcaaggttgtttcccccacgctgtgtcctgtgttcaggtgcgacacacaatcctcatgggaacaggatcacccatgcgctgcccttgatgatcaaggttggggcttaagtggataagggaggcaagttctgggttccttgccttttcagagcatgaggtcaggctctgtatccctccttttcctagctgatattctaactagaagcatttgtcaattcctttgcctcccaactgacaacacacgttcattttccaaccttcctaacatcttcctttcttctgggagaactagaagacagaatttgctttgattctctcaggcgctgtgcacgccaggtcttctgttttctctttcttactctacccacttcttgccttct

SEQ ID NO: 314483 - DNA, 612 bp, Homo Sapiens
aggcagcttgagcaatacgcatgatgtcttgtgaagcgaatgtcacagcgcacaccatgtgttggtatagtcagatcaagaacccaggaagttggggacactgacctttaggatatagtttccaggtttcacatctgtaatatcaatccactggcagtctatgtctgcaccataggtatcataccagccaggactcaatccctgtgtgtgtgcagtacatgcaaatcgcctgtggtagccatagtcacaggatgtgtcttcaagacagaaacttgctatgtggccttcagccactctcctctgggtgttggcatcaagcaggtcatagtggctaaactcatccatactgtggtaatgttgatgacaactgtgcctcactctttggggaaatctgagcagcaccctgtgatcataatctctgacatctgccctgtatgctgtactggccagacagcctccgccgcgcatctcaggttgtacatggacatcttctgcacgtacgtggacgcctggatgtagtaggggtcggccaccaggtctgggagaccgtactggaagtagccagtgccgtatccgggccggtacctgcccccaggtctgggccctcgtgcc

SEQ ID NO: 314484 - DNA, 197 bp, Homo Sapiens
caaaatcacagtacagcatacagggcagatgtcagagattatgatcacagggtgctgctcagatttccccaaagagtgaaaaaccaagggacatcagatttcttacccagccgaccaagatattcctgggaatggcacagttgtcatcagtaagtaaatgggcctcctgggtacttttgggttgcttttcatttctc

SEQ ID NO: 314485 - DNA, 478 bp, Homo Sapiens
  misc_feature (434)..(434): n is a, c, g, or t
  misc_feature (467)..(467): n is a, c, g, or t
aagaaacattgcctcagttttaaatatttatttaaaatccagaggggaaaaggagaaacggaacccattggggttttaatacactgacatgtggacagagacgtaaacgaagacagcaggaaaacccaagaatgagacagaggccagtggattctggcagcaggagggatccgagcgctgagatgaggcccgagctgctacaaacacgcacttccacgcagagctccaggctggggcggcagggcgaggatacagaagtgttgggaggggggacgggccaaagtgaggtattaaataataaaaatcaaatccaattcccaaagagacacaactttaggagagaaatacacaaatagagactttcacatacattttccccttctataaaaataattccatggttaaaataacctcaaaatccaattcaagcggcngactttgttcgctgatggtagcacaattcaggngacgcttgaag

SEQ ID NO: 314486 - DNA, 2087 bp, Homo Sapiens
  misc_feature (98)..(98): n is a, c, g, or t
  misc_feature (274)..(274): n is a, c, g, or t
  misc_feature (491)..(491): n is a, c, g, or t
  misc_feature (545)..(545): n is a, c, g, or t
  misc_feature (811)..(861): n is a, c, g, or t
  misc_feature (954)..(1018): n is a, c, g, or t
  misc_feature (1544)..(1544): n is a, c, g, or t
aaaagctcggtgggcgggagcgattgagagactgtagcaacactcaagacagaaacaattacatacatctccgccagtgcgtctactgtcagtccagncggcggcacatcctccgcgagtgacgcgggtcaccgcaccatagacggccgttcctggcactgggccgcctcaaccatgcgcgccgtggggggcgtccttcacccaatctcattatcacaccggcccggcggggggcgcgcgtcggcgccgccgacgctcagatgggtggggaggngggggtacaaatactcagcaccgggcgggaccttcagcgcatggcgttacactggcggcggcggtggaacataagaacacatatatggtgcacactcacgacccgcgccgggaaggccgccggcgggcgcacctggacaccccacctcctacaattccgcgtgtagccgttccgcccacgtcagatctccgttacaatgccccgcccgtaggtatangtcttgcgtgccgacaaaacagaagagacgcgggggcgttgctagttcgcgcancacacgtagatggtcagcgcgcgcggacacacacgttcgacgcggtgcgctaccaatggggagctaacaatctgcaggctgtgcggtgcgagacgagcgtcggtgactggcgccgctctcagcgcgggcgccgcgtgagattcattatagtgggcggcaggccgttcctgctacaccttcccggcggtgccagtgcgggataatactcggccacggcggcaagcggcttcgaaatcggaccccgtgcggggggtctgctttctcannnnnnnnnnnnnnnnnnnnnnnnnnnnnnnnnnnnnnnnnnnnnnnnnnnaaaccaaaaggcgaaagggtacaaggggcctcccgcctttgctcctaaagcaccactgcccccaggggacggcggcccacaacaatcttggcnnnnnnnnnnnnnnnnnnnnnnnnnnnnnnnnnnnnnnnnnnnnnnnnnnnnnnnnnnnnnnnnnaaaggcggcaaaaagggatagcaaagcacgagacacccgacattcgggtttcctagaaggtggggtcgggggggatccggcacagcggcaggggaggggaaggggatagggcttccaggagataaaaaacatttattttaatgcacaactatagcattcatatgcctcagcccagggcaggggttgggagttaggtaagaagggatgcatttagtttgccctgtccccaaagagcgggtaaatagctaagccactcttcactcccagcacagaccttcagaagccccagatatcaggatgtaatggtagggctcactgctctaaaacagctcaaacaacctgctcccaggaaggcaagccttctgctccttggtctcctgcctaccattaggacacaatgttcttcgtctggccagacatctgttgaaaggctggatacaggacaacgtacccatctttccatctatatcaactatcctaggtctctgataccccattttggagcactgttgaagtcagtctctgnaggtagtgctgacgcagagggggcaactgagaatagagctcaaagccctctgggagcgtggaattgggaagctgcagcatactcctgcgggcagctttgacctcatctgagctctgtgggtcctgagagaagatgaagctattgacatgagccacagccacagcatagagcacggggcaccaacgtgggcggagcgcaccagtaaccagggtccggaagtagagctgaaggagggccaggttgtcttcaggaggcactgtgtaacactccagggacacaggcaactgggtcagaggcaggctcagagctcgcaaggctcccacgtgttccccaaagagggcaaggcgcaaggtgacactgaaccgacgctgcaggggcaggaggaccagggccccaaagaggtggtccccaaaagagacagcctcaaaatgatccaggaagttggcatagaggtcagggaaagacgtcaggccagggagtcggcagtccaggttgaggtttggcaagacttgaggctgacctcgtgccgaatcctgcagcccg

SEQ ID NO: 314487 - DNA, 731 bp, Homo Sapiens
ttgagtacgatgtgacagattcccacagctgctcccttgagaagggagatctggtcttcaatgggcagggaacggaagacgggcaggtccttagtaaacttgatgacttgcagtaccatgaaagtgttgatgtctgcaaagtgtgtgaccagaggcagcacaggggccagggtgggcaagggctggtgatggatgaccagatgagctggaggcttaaactgcacaaactgttcaaacatggtgcccatgtggcgggtgtgggcccccaggagtgtccggatcagctcttcttgctccttactcagttgcacaggtgtttgctgtgcccgccgctgggcctgctttgctcgccgcaatgccagggcttctgccgacagtatcatgtctttcctcatgccagcatctaagcacttctgcaacctgcaggctgggcagtggcgcctctggctgactgttctcctgaagaaacccttgcagccctcacaagtcagcgcattaaagtggtagcctgtggcttggtccccacataccacacagttcctcagctcatcttccctactggccatgacgtcacgtgttggggtggctgtcacagactcctgcttctcttaggcagcatgtcacctgcaggccacagaatctggtatggaatgcctctccccaaactcccacgctgttgctggcctctgatctcaggagttgccagtgattggagttagggattatgaccc

SEQ ID NO: 314488 - DNA, 610 bp, Homo Sapiens
  misc_feature (102)..(102): n is a, c, g, or t
  misc_feature (275)..(275): n is a, c, g, or t
ataaaacagacatctcttgttttccagatactacgggtcataatccctaactccaatcactggcaactcctgagatcagaggaaaaccagcaacagcgtggngagtttggggagaggcattccataccagattctgtggcctgcaggtgacatgctgcctaagagaagcaggagtctgtgacagccaccccaacacgtgacgtcatggccagtagggaagatgagctgaggaactgtgtgggtatgtggggaccaagccacaggttaccactttnaatgcgctgactttgtgagggctgcaagggtttcttcaggagaacagtcagcaaaagcattggtcccacctgcccctttgctggaagctgtgaagtcagcaagactcagaggcgccactgcccagcctgcaggttgcagaagtgcttagatgctggcatgaggaaagacatgatactgtcggcagaagccctggcattgcggcgagcaaagcaggcccagcggcgggcacagcaaacacctgtgcaactgagtaaggagcaagaagagctgatccggacactcctgggggcccacacccgccacatgggcaccatgtttgaacagtttgtgcagt

SEQ ID NO: 314489 - DNA, 677 bp, Homo Sapiens
  misc_feature (628)..(628): n is a, c, g, or t
aagaccatcgcacgagtggcaagccactgcactggacccatctctgctactctgccactttcaaggatgacctcacttctgcaatggttttgaagaaattcagtgaagtaacaaattgtgtgatggaaacatatttcagatgggtaaaccacaagaaccttaatggggggcagtagtgtggtggtagaaaaggaagtcttcttgatcctttcgtgcctccacattagatagatccctgccaccagcacccatgtggccaccagcagagacagcaggaggagaggcagccagcctcccggcttgcttttgttgttatccagagggaaagggacgcctgtttgtgggcagagcacaactgttcctttatgtcggatgcagtcgctgccacaagtaggaaaatatggagtcatctggcttcgcccctagctctagtgttgtcatgcacattttccccttggtcacacatctgtaacaaagccctaaagtcaaaaccagtgacccgagacccacatgcccaagactcccggggtctgaacctaaactttgtacacgttactaacataccagttcgcttacctaaaagggctaggtcatatcttaccacgtagacaaacatttcctctagaanaaaggagcagcagtgatcctcttggcttccttcagccagtgctcgtgcc

SEQ ID NO: 314490 - DNA, 1052 bp, Homo Sapiens
  misc_feature (45)..(45): n is a, c, g, or t
  misc_feature (763)..(948): n is a, c, g, or t
tataaataagaaaaatttgaatttaaatatctcatgaaaatagancccataaaatattttaggttgagtatgacaaaaggaagtgtttagaagatttttttattgacaaatttattttgaattttcttctaagaacccaagatatattttcctttagagaaaatgatctgaggcatgctagagggtatgtattgacagctgtcctaaactattttcctattaaatctctatgggttaaaataaatcaacactctatcaggtgttataatgttgaagtatgagctcatttccttgtaaagtgcaactcttagattgtcagactggctttttatataggaagaggaacccattttctccatcttactcagtatgtcctcatgtatctgagtttgtggattctttcacctttggctcttggcttcctggctttgatcaatgtgttttgatctcagttggaaatcaaaatgtggaaagaacaatggatggctcctctctctctcatacccaagaattggagttagagaacacagatcgcatcttaagaaataatcatttcaaatgttagccattcctagatttctgcccagatattagccatgtagaaaactgacgctatttgttgttttatctaaattttcgttttttaaaatgcatcttaagatgtaaagtactactatttatgggcaaaaaatatcgggtttatttgagaattctttaatgcgccactcaaatgcttgtttgacccaaatccattttcttacannnnnnnnnnnnnnnnnnnnnnnnnnnnnnnnnnnnnnnnnnnnnnnnnnnnnnnnnnnnnnnnnnnnnnnnnnnnnnnnnnnnnnnnnnnnnnnnnnnnnnnnnnnnnnnnnnnnnnnnnnnnnnnnnnnnnnnnnnnnnnnnnnnnnnnnnnnnnnnnnnnnnnnnnnnnnnnnnnnnnnnnnntaaactaggtgtgggcaggttattaccatccataggtctgaaggggcaagggtcaagagcatggagaagacgttacttgataagaagagtagccttcagtagag

SEQ ID NO: 314491 - DNA, 1194 bp, Homo Sapiens
  misc_feature (770)..(770): n is a, c, g, or t
  misc_feature (778)..(787): n is a, c, g, or t
cgagtacctgatcactgagggaaaatgcacactggagactagtaaccagcttctaaagaaaggtattgaggctctgaaacaagtaactaagagatatgcccggaaacaaaaccgatgggttaaaaaccgttttttgagcagacctggtcccattgtcccccctgtctatggcttagaggtatctgatgtctcgaagtgggaagagtctgttcttgaacctgctcttgaaatcgtgcaaagtttcatccagggccacaagcctacagccactccaataaagatgccatacaatgaagctgagaacaagagaagttatcacctgtgtgacccctgtgatcgaatcatcattggggatcgcgaatgggcagcgcacataaaatccaaatcccacttgaaccaactgaagaaaagaagaagattggactcagatgctgtcaacaccatagaaagtcagagtgtttccccagaccataacaaagaaccttaagagaagggatcctcagggcagaatgatcaagagctgaaatgcagcgtttaagagacatgtccagtggcctttggaaaggttgttgggattcagttcaggagggaggggtatgtttgtctcccagtcttggcaaaggagtgctatgcggaattctctgcatagcagaaaagctcccaccattttcttttgatgtggttttaaagtctcacgttctctataatagaaacagcaggtcttgtcagctccttgtgtggctgatgtgtctggaaatgatgtagttcangaaagcannnnnnnnnnctttgaaccttaaaggttctattattaaaagcagcacagattccacatttttatacatgaggatcttctttgtggtgaataccaggattgactgcatccctttaaagaagttttatgtccctgactctggctaaaattatctaatttccagatgcttttgtagatgactgaagtatttgtgagccacatattgggagttctagatttgagtgaatggcaggaaaggggccatctccattggagatgattaagtgaacccaaactagttctcggaattctacagagaaggagggaatcagactgaggaagctgtgacataggacttgaagaccaaagactttgaaatttgcgagctgctcatgtgtgagttattatcactgctgtctttctattgagttacaaatctg

SEQ ID NO: 314492 - DNA, 1143 bp, Homo Sapiens
  misc_feature (527)..(552): n is a, c, g, or t
  misc_feature (852)..(896): n is a, c, g, or t
ccaaatggtgctatttttctaaggaaattaaataattttaaactcactcgttaaagttatacaatgcaaacaaagacaaaaaatatattgaaactcatgcatttctgtagcgttaatatttacttttcaagactcacctaagagcatcaacacaacctgtcaagttctttgacacccccccagcccatgtaatcaattgcagtatacaatagcagtaattcacataaacaccacagttcaacactgctgaagctgcaatatcctttttcatcccaagcaaaccttcataagacagtgtcccagtgatcccagtgtactttcagcatttctctcactgggaactgtcagaaaaccagaagttgccacagaaagttttaagtcaactgcttgtttaaaaatagataatccagcatttcagaaattttccatttgggtctaagagcattcaggtttccaacagccagaaaaaattcatgcaatttgagacatataaagaggctaataaaactggagggaatttctacttnnnnnnnnnnnnnnnnnnnnnnnnnntctttgttgggggggaaaaaagagctcaaaagacaatgcagtgttgacaaaattaagccatatgagagcattttgtgacaggacgatttgtttaaaaggttcttattggcttacttcccctatcccctcaaaggaaaaacacctctctattctgacttgctctagagtttcttttatcagaatgctaaattagtgagattctcatgctattctaaagtgcaaaaacgagttaatatcccaactttttatttccaggaaacaagactgcttttagaccgtaccacaactatatagagatcnnnnnnnnnnnnnnnnnnnnnnnnnnnnnnnnnnnnnnnnnnnnnaaattatttccaaagttcttgagagctatcttctaaggtccagtctctgacagtaggcaagctcagtgcttcgcttttgaccgacaaggagttcaccaactcacagtggaacttgcgaatgtgtctgtacaggtccccggactgcgtgaacctgcgctcgcaccacttgcaggcgtgcggcttctcgcgggtgtgcaccacggcatggcggctcaggttgtgcgagtactggaagctcttgccgctc

SEQ ID NO: 314493 - DNA, 1114 bp, Homo Sapiens
ggggcagtggctcgtgggagccaagatggcggcggcggcggcagcgacagcagcagcagcagccagtattcgggaaaggcagacagtggctttgaagcgtatgttgaatttcaatgtgcctcatattaaaaacagcacaggagaaccagtatggaaggtactcatttatgacagatttggccaagatataatctctcctctgctatctgtgagggagctaagagacatgggaatcactctgcatctgcttttacactctgatcgagatcctattccagatgttcctgcagtatactttgtaatgccaactgaagaaaatattgacagaatgtgccaggatcttcgaaatcaactatatgaatcatattatttaaattttatttctgctatttcaagaagtaaactggaagatattgcaaatgcagcgttagcagctagtgcagtaacacaagtagccaaggtttttgaccaatatctcaattttattactttggaagatgatatgtttgtattatgtaatccggatatggaaactgtttcatatcgttgccagactgttctgatttttgatactcgggagttgttcctgttatggacactatagttgacagcctcttctgcttttttgttactctgggtgctgttcctataatcagatgttcaagaggaacagcagcagaaatggtagcagtgaaactagacaagaaacttcgagaaaatctaagagatgcaagaaacagtctttttacaggtgatacacttggagctggccaattcagcttccagaggcccttattagtccttgttgacagaaacatagatttggcaactccctttacatcatacttggacatatcaagcattggtgcacgatgtactggatttccattttaacagggttaatttggaagaatcttcaggagtggaaaactctccagctggtgctagaccaaagagaaaaaacaagaagtcttatgatttaactccggttgataaattttggcaaaaacataaaggaagtccatccccagaagttgcagaatcagttcagcaggaactagaatcttacagagcacaggaagatgaggtccaacgacttaaaagcattatggga

SEQ ID NO: 314494 - DNA, 1628 bp, Homo Sapiens
  misc_feature (1217)..(1217): n is a, c, g, or t
ttaaaccactactttttaaaaaaacttctaatgctcaccttgaatcctttattacacatttcaaagtcaaagctaacaacaataaaaaaaggttacagcccaaatcaaatcacttttaaaaaacagcggtctaaagttgcataggatgaagataagaacggagaatgtagaatgagcactccatagactcatgtgaaccataacaaagaaggaaagaatcaccaggaaagaatgatgcagggtttcctgggagatgcgcccacctgctctggcttcaaatctccctttgcctggcctggcttgacacctccaccctccagccccagctttgatcccaaagccaaatgaaatctggtctttctttgggcaaagcatttagtggcaaagaggagactgcctgacctgttctgattcccactggaagccactggaagaggaagataacctcaagggccatggagagtttgttgttggttttgtactcttttccttaatttgaagtagtctgctctgaacagaaaacaaagggtgaatcggtatgttctacgtcagagagagcaggggcagcctactgaccagatttcactataccattgaagacatatatgaattggttgccactatttacaaatcaaaagacttttgattaaaaatataggttctaatttcttttgaaaaactggcaaatgtgctagcaatcagcctgtgatcctacacgacaatgattagccagaataaatcacagttgtcccttcagagagtgcacactggccccagtatgcccctggtccggcaggccccagggtggcccagctctcaaattttttgctacaatcttgtaccctcctctgagccagagccgtcatgagtggggtagggaaagacctgccctttttacaaggagataaatatctccaccaaaaagcaaccaaggggtacagggtacccggtacaaaaggcaacacaagcaccagtggtcccgatttagttatctggctcagtccagggacttctaccaggcaagtcctgataaggggtcacctgccactgggagtcaacaacctcagaggatccctgccctcagcaagcccacctggccttgagagtctaacctcatgccccgctccaagctgctcctcttcatccttcctttcccaggcccaaatcttggctcatgagaactcccatttaccgcccacattttcgtgttctagccnccagtgatggaaaaagtagccaaatgtctctatgcagaggaagaatcaggaaaaggcgtgcatgggggaaaagcctagtttccacagatggtgacactgtagctgtcctttgtggtctggtgttcacttgccctgtctcggagcttctctgggatgatccaacacagcttcaccatgaaacgccatcagttgtgctatttttacaatatgaaagggagctctaggtatggaactccatccagaataattgccttggaggaaataaaagtttaatttaaaaaaaggataaagatagcaaccaacttccttttgggaaacaaagaaattcagcctaaaatgctacctcttccacagagctctacctcacggaggggggcatactaggtaagagcctgcgctctccagtcacta

SEQ ID NO: 314495 - DNA, 1329 bp, Homo Sapiens
  misc_feature (1146)..(1196): n is a, c, g, or t
ctggatttcccatcatagggcctttgtattcacttatttaataatagttcagaagaagctatctcagctgtacaagaagtaattcagtttcagaacatttctcactccaacaaggtgcattttcccctctggcgctcagttgtataaatctgacctctttccctctcactcagagatctcttttatgtatttcacaggttggctggcatagtcaccttagaatagcccccaaatgtggaaattctgttgtcaggagtcatcatttccagtaagaaactcactgagtgacagaaaatgaagactaaagatcaaagattactaaattaatttgcctaaaaccaattcacctaaaaccaattagtctaaaataaatatttatcaaatctgcagcatttcaaaaggatttagcagattcacccttttagttattactgttgtctgtataacttttcattgtaagtcaactgaatatgcctcatgcctattcatttgtttaagatatactggcctttttaacagtaggaatgtagaagttagacccaaagcatcaaaatcacattgaactcccattatatttttcaaggcatttaatttgtaaagtaatattgtattaagaaacaaaaataatgatacacaaaatgtctgtaccaattgtatttattgctagaaactttaaactttttaaaaaagtttttgaatggtagataacatagaaaaagacatccataaaggtaggaagcaatctcatcatttacaaagtgctgcaaatttgataaatttatgttgctgataatagctcagaagtactcttggatgaatagatataaatccttgaaatatccaaagcatgacaaaaaagaataggacacctaaatggatataaacacaccaaaataggaattgagcttttggcaaattagtcattaagtcattaactttaagcaaacaagttttcagtaaattggttttaagagatctagctttaggtgaactagtttcaagcaaactgactagtatcaaatcagtgttttgctccctccagttccccccaactctagttttgggattgtgatggatgcaatccgggacccctctgagaggtggcaagtgagcttctactaggaaaccaagtgtacaagtgacctnnnnnnnnnnnnnnnnnnnnnnnnnnnnnnnnnnnnnnnnnnnnnnnnnnntgtgtgtgtgcatgaacacacccacacatgcatacactgggctatatggctcagtgcacctaaacttgggaatgtggataagctgaagcttcctagacatccccccaacaagctccacacccacagagatctg

SEQ ID NO: 314496 - DNA, 1143 bp, Homo Sapiens
  misc_feature (150)..(150): n is a, c, g, or t
  misc_feature (189)..(213): n is a, c, g, or t
ttttcaaaatgggcagctgatatgtgaagaaatatctaacaacaattttaaggttgtaatttgaaactcagttctgctttcaatcatgacatttttaacagatgcatttcagctatactattttttcttgtgccccactccccaacattntagaatggaactaaaataaaattacttaatctttcaagnnnnnnnnnnnnnnnnnnnnnnnnnggccaacagtggcaagatactttcaactactcttgatgtcattgtccttctacaccaaagaacatctggaaaacatccccacatcctttggtgtttaagaactgatagagctgaccaaagtccatgtggtttcccctggctccattaacactgaacactttttcttcaaaaatggaaaatttcctttgtctttccgtttcatcatttgtaccatcaaaaggaatgtcttctcgatggcgaattaaaattctcttccagtttaattttctgagtcttgaccagaattcttcacaggcactttgtgggccttccacacaaacaacaccaggttttccaggcatgctaaacccagacagggaaagctcctttgcccactctagaatattctttcgcatttgttatagatatgatggctgtagatccagagtctcgtgaagatgaggtcaactgactggactgtgcttcctgtggtgggtgaagatgaagtatctctgctgacatagccagaggcgtgttctctaacccactctgtggcattcagtatacaaacatctccatgacaatgtttttgcaggaatgcagtcagatctgtgttcagctgagtctgctgggatctactcaataatactgatctgacagtaatttcaggcagaactgccgggtatttaaagggaagaatacaggccagagaaaacatcgccattttttcgtcagatacatccaggttcatattgatagtaaagtagacttttgaagatcgcccctccattgtcttcttttcaatacaatctttcagttctgctacagccagctggtcattcactatgagctcattctcaccagggaacatactggctagcaggtctaactcagcaagctgggcctccgcctgctccatctcaatcatttttggacatgtgtaagtttctc

SEQ ID NO: 314497 - DNA, 1675 bp, Homo Sapiens
  misc_feature (951)..(966): n is a, c, g, or t
  misc_feature (1630)..(1630): n is a, c, g, or t
  misc_feature (1657)..(1657): n is a, c, g, or t
aaagaaaggctttattgctgcaattagacatcccagtgtatagcacaaacccccctgtacagagaattattcaagtggtaatactgagaaacagtgaacacacacaaaagaatacaaaactagacatttagatcactagaaactttctaaggtaagaaaaatttcaaatgtgaagtgccttttagaaactacaccacacatgccagtgtaaatttggtttaacaatcaatttctataaacattgcatctaactgtgcactgatcaactgcacaacttcaacaattacttccaagacaaagataaatgcttttatttccctatgttttggtctttccttgggctagagacagaagctgcatgtttcaaaccagattcaaaagggaaagcacttcaaaacagaaagtacttcaattgtgtatttgccttcagccacatccagagacttgtggatctcacccggttggtcccagcccttctccaaccctgaagcccacagcaggggtgcagaggcagccccagatcgtgcagacatcacccgaggctcccaaactggcccagctgcctgaggcctgcatgcctgtggccaggtaggacacatgtgcaggtttgaaaactaggcctacaagactgaagagtggactgaagcaaaaaggggagaaacattagaggcctacagtaggaagagaccttttatagagttttcaggaaattctcacaataaacttgggcacaaagaccaaattgctgaggccagaagcctgcttatggtactgtgacttatggggagtagaggccaaatcagagagggctggctggtgataccccataccacttgcctcttccccttccctggcctacaaataccaggcctcctggccctgagacctcattctgggtttctatatgggtcaaccaaatgccatcctttcactaaacccatgtgcaaaatnnnnnnnnnnnnnnnnaagctggggagtacacagcacccaaaagaaccgagagagcaagttttccaaggctacaggaacattggcagagctggtggccacaccagatgggagtaccacatccccaccaggcttcatgcttcactgctagatgcagggggctagaagggtctgatgaatcaggagctgaactagaaccttcaagaaaagaaaaggcaagggggtggctctgtgccccgccaggagaggaaagaagaatgtgtgtggattgtccacagtgaggccagaaacgatgagatggtgttaggcagaaaagaagggagagggcttcccatgagaatctggctgggcatgggagggatacagggctcagttatcaaggcacctttgccatagtggggtgccagctacattgggtgggatgcccaggggctgtccctacctaagcactttcttgtctacaggaagtcttggtgcttttcaagttcagcataaggggttccatatgtgaagcggggattcacacttagaaaatctatcctggtcttcacctgaaacactcatctactgctgggtggcaggaacaagtatacaaaaccaggggccttgcctggggcagtttcctaagggacattgggcagggctgacctggggattcagctcccctgagtgggacagtctntgggttgcctgggggtccccaggttgnaggaaggggtatggggta

SEQ ID NO: 314498 - DNA, 365 bp, Homo Sapiens
gtgactgaggacactgtgatgaagattgctgactttgggctggcccgcggcgtccaccacattgactactataaggaccgggtgtacacacaccagagtgacgtgtggtcttttgggatcctgctatgggagatcttcaccctcgggggctccccgtatcctggcatcccggtggaggagctgttctcgctgctgcgggagggacatcggatggaccgacccccacactgtcccccagagctgtacgggctgatgcgtgagtgctggcacgcagcgcccttccagaggcctaccttcaagcagctggtggaggcgctggacggtcctgctggccgtctctgaggagtacctcgacctccgcctgc

SEQ ID NO: 314499 - DNA, 941 bp, Homo Sapiens
  misc_feature (13)..(13): n is a, c, g, or t
  misc_feature (712)..(712): n is a, c, g, or t
  misc_feature (807)..(807): n is a, c, g, or t
ggtttctttacgnctattccccaccccactctatcccaacccccaacaccgaggcctgggtggcgaattcggcacgaggggctggtgcttgggaagcccctaggcgagggctgctttggccaggtagtacgtgcagaggcctttggcatggaccctgcccggcctgaccaagccagcactgtggccgtcaagatgctcaaagacaacgcctctgacaaggacctggccgacctggtctcggagatggaggtgatgaagctgatcggccgacacaagaacatcatcaacctgcttggtgtctgcacccaggaagggcccctgtacgtgatcgtggagtgcgccgccaagggaaacctgcgggagttcctgcgggcccggcgccccccaggccccgacctcagccccgacggtcctcggagcagtgaggggccgctctccttcccagtcctggtctcctgcgcctaccaggtggcccgaggcatgcagtatctggagtcccggaagtgtatccaccgggacctggctgcccgcaatgtgctggtgactgaggacaatgtgatgaagattgctgactttgggctggcccgcggcgtccaccacattgactactataagaaaaccagcaacggccgcctgcctgtgaagtggatggcgcccgaggccttgtttgaccgggtgtacacacaccaggagtgacgtgtggtcttttggngatcctgctatggtagatcttcaccctctggggctccccgtatcctggcatcccggtggaggagctgttctcgctgctgcgggagggacatcggnatggacctacccccacactgccccccagagctgtacgtgctgatgcgtggagtgctggcacgcagcgccctcccagatggcctaccttcaagcagctggtggaggcgctggacaaggtcctgctggccgtctct

SEQ ID NO: 314500 - DNA, 1610 bp, Homo Sapiens
tcgggaaggcccaagaatgacgtgggagctccccgtagtgttgaagatctcccattagcaggattccctatagaccaacacgtcacttctggtgtggtgtacaccctggtcaaaacaaggccttcgggcggccatgccacttcacaggcagacggccggttgactggttttcttatagtagtcaatgtgttggacgccgcgggccagcccaaagtcagcaatcttcatcacattgtcctcagtcaccagcacaatgcgggcagccaggtcccggtggatacacttccgggactccagatactgcatgcctcagggccacctggtaggcgcaggagaccaggactgggaaggagagcggcccctcacgtgctcacgaggaccagtcggggctgaggtcggggccttggggggcgcccgggccccgcaggaactcccgcaggtttcccctggcgggcgcactccacgatcacgtacaggggcccttcctgggtgcagacaccaagcaggttgatgatgttcttgtgtcggccgatcagcttcatcacctccatctccgagaccaggtcggccaggtccttgtcagaggcgttgtctttgagcatcttgacggccacagtgctggcttggtcaggccgggcagggtccatgccaaaggcctctgcacgtactacctggccaaagcagccctcgcctaggggcttcccaagcaccagcctgtcccgggggaactcccatagtgggtcgagaggtagatctagactcacgaggccggcgagcaaggcggggccgctggaggagagacgcacgcctcgtaccagggatgagcttgacttgccggaagagcctgactccagggaaaactgtcgggccagagggaagcgggagagcttctgcacagtggcgggcgggcgggggtgccggccgtggagcgcctgccctcgatacagcctggccagcagcaggagcacagccaaggccagggagcccgacgcgtacaggatgatgtccgtatacctggcctcgggcgctgctgcggtccatgtggggtcctcctctggcagcaccgtgagccaggcagactggtaggagaggccgatggaattgcctgcgaggcaggtgtactcgcctgcgtcctcggctgacacgttccgcaggtacaggacctccacctctgagctattgatgtctgcagtctttaggacttgcacataggggaaaccgtcggctccgaagctgctgccgttgatgacgatgtgcttcagccactggatgtggggctgggcatcgctgtacaccttgcacagcagctccacgtcgctgcccaccacggctgtggtgttggccgggagcccggcctgcaggatgggccggtgcggggaccgctccagcacgtctagcaggtagttataacggatgctgcccacagcgttctctaccaggcaggtgtatgtgccgcggtccgagggcaccacgctctccatcacgagactccagtgctgatggcgcagccgaatgcctccaatgcggttctccccatgaaaggcctgtccatccttaagccagcggatggtgggcgtggggttgcctgcagctggacagcggaacttgac

SEQ ID NO: 314501 - DNA, 633 bp, Homo Sapiens
  misc_feature (566)..(566): n is a, c, g, or t
  misc_feature (616)..(616): n is a, c, g, or t
gacccaggcacacagagctttatttcaaaaaaataatttataaaacgccatttgctcctgttttcggcaggcttccagcttctctgggctcaggggccaatgctcccgtcaagacgctggggcagcagcagcagggggaggtgtggggaaagggggttcagaggcccagaacctcctgctggtattgggaggcaggaggtttagcatagcagctctccagccaggctcagccaaacccgggatggggactaagcgccaaggtccaagaagccgagcagaaccctgacatttgggccatcaggacacaggcacggcagctccaagggcaagggcacggcccttggacacggcacagcaactctgggccaggggccccatgctatcaaggtcgagcactgtgtcaggctgtggctgagccccaaggcccaaggccaccagcctatgtgcctgcacagccttgagccttgctcatgtctgcaccccagacccgaaggggaaggagctggatcccaatggcagggggtcgtggctgaagacagaatcgcttggaaggagcaggtgctgcntggcgtccccaccagagggggaatagggtccgaagttcaggcggaagtcnaagtactcctcaaaaac

SEQ ID NO: 314502 - DNA, 410 bp, Homo Sapiens
tttcggcacgaggtgggtctacctttatttaaatgatttttctgtgttctgaatattgtggagtcttctatttggaattattgttagaattctgaagtcccactttgggggaaaaaattattcattccagagccatatacaacctgtttctctttctgtgatttcttcccttcctacttcactttcatgagttcatcctatgtcatctttctgtccctcccaatgtcaaaggccctgaggaaagggcctggtgaaatggactctggagttagactgaggcccaacagcctaacaagccttaagtaaatgtgtgatctttctgcctgtttcatccaggtatcactaacttagtccatgttccagcgatgacctgttacttctacataacagataaccccaacttgtacatc

SEQ ID NO: 314503 - DNA, 628 bp, Homo Sapiens
ggcacgagctggtatcccttcctcttttaataagggcactaatcccaccaagggctccatcctcataatctcgctaaacctaattacttccccaaagcctcacctcctaataccatcacatgggggattagggcttctttaactttttaacttttaagttcagaagtacatgtgcaagtttcttatgtaggtcttgtgttgtggggtttgttgtacagattatttcattacacactcttaagcccagtacccattcgttattcttcctgatcctctttctctaccctccaataggccccagtgtctcttgttcccctctatgtgtccatgcgttctcatcatttagctcacacttgtaagtgagcacatgtggtatctagttttctgttccttcattagtttgttaaggataatagcctccagctccatccatgttcctgcaaaggacatgatctcattcttttttatggctgcatagtactccatggtgtatgtaccatattttattttctaccaatgatgggcatttaggttgatttcaagtatttgctatggcgaagagtgctgcagtgaacatacatgtgaatatatccttatgaatgaacgaattgtccctttgggatatccc

SEQ ID NO: 314504 - DNA, 910 bp, Homo Sapiens
cattcaattggaaatcggaattaccgattccccggaatttgccaatgtcgttgtttcatagcagatttccctttaatgtgagggatatttctacaaagtgccttttgaatccaagaatttccaagcaatcctttcagcccctggtgcagccttgatccaactatttcgatatttgattcccagggcatttctggtagttgtcccaatgctatattatggcttccatacggaagaggtttttttcgttttatccaagatacactcaaaatctactttgtggtaataaggcgtaagaaccgaggcttttacacaattgattcctcctagtacctctgctaacattttaaaaatctgctgttgtgttccatccatgccaccaatacctttattatattgttgacagaagcggtcatgaaaccatggaatctgaaactcagggcattccaagcagactgatctatttaactccataagatgaaactggactcttgcacttcgagatggagataaaatttcaagttgagaatccaatctagctaagaatttgatgttaaaaattgcctttagcagatcttctggaaaatattcaagtgtggccaaagagaaaccaagaaacactaatataaaaggatccaatatacctaagtaagaattaagatgttgcacgcaagttcccaaaaattcatccctttgaggtggatcatagttcaatacgctgaatggacgaataatagcagggattgtaaaaggatggatcttttcaatctgctgaacagccactgaggctatcctatctagtagcaaagtactgaggtaatcagtactagaaataaaagatgcaatctccccaacatttatgtaattaatatcatccatgaaatgctgtaaagtagcaatcatttcttcaaga

SEQ ID NO: 314505 - DNA, 1013 bp, Homo Sapiens
ttaaaaacattgtgtccagcgtttctgtgtgcaaaaacgtctttgcttccctatgtgatttggcgctccgaaaatttttgcgccggttttatctcaccctctttctctcttttccggattcacccccaccttgttgcgagattcagcccctgcgtgttgttggtgcccacactaaactgtttcacaacggctataatgggatttaatccttggaactaaagagctggacttttcaaattcttttcggaaggtcattaaccttcagtggtcttgggaatcaaggttaggaccaaatgggttagtttagaaatttctttagcttcaccatcatccttctcttcttcatcctgttctccatcagcctccttgcgttcacccctgaagcttctcgaccagctgctgcttgtatcctcggggagagggtttttcccactctgagcgggtgggaagggcaatgccaaacatccgggaaaaataaacccactgtctccacatgagctggaactggtacgccccttgtgggtctcctcagggcgatggtagcgaatctctgcaaaacggtaccattgtgtgcacacacttagatcaatgcctgtcagagccttacaacagcgaatagcagtcttaatcaacacagagggatctttttctgggtctggtccatccaacgaaggagaccagtggcctccaatggccatagcttcatccttgcctttcatgcccactaaaaacttaacaagtctagcaggatgttggaatccatctcgaagttcttgtgggtcctcagcaagagcacatgacttatgatataaatcttccatactagggctagccatcagcattacctttgcactgtataagtggtcagcatctggtggatcaagaatggccatatttttttctaaggactctacttctctgtgcattacataaaaattgcagtaatttcccagctgaaatggtcggacgcgtgggtcgacgatatcccggaaattccggaccgtaccgcctgc

SEQ ID NO: 314506 - DNA, 942 bp, Homo Sapiens
ttaaaattccttattttatttcaaaaaatgtaggggtggggaagtaacatgataaacattacgatcagctccctatgggttcattctgcctctgcgggggtcgggggcatacagtagctggggggcatgccattgccatggcaacccagatgcttagatgcaggtccctcctggctgcttagagctggggggactaggcgccctccccgaaagcccccattctgagttgttggtgcctgcccttcccctgaatctaagaactgattagtgggttagactgcaacagcagctcaggatcctcccaggacttccctccctcccctctcacttgcccgtcccctcagctaccagcacctccagcccccacctcctcctcttctcagctccaccctggtcctcatgaggtaccccctccccagcccctcagggcagcctcctcctgagactccctcccgctctgcctccctggccctccctgacagtcagggccaccgaggcaaggccatgtggtgaaaggcagattgtcacaaggcccagccctgccgccccctcctatcagaatgcatcctggagcaacaggttaaacacagtaagggcaggttcagacaggagagtgcctgaggcagcgccgtccacacagcagccccgagatggggagggctgggacgagacctcccagctccagtgccctcctgcagcctgcagggcccacgtcccctggggccaaatggccagggattggctggcactgcccagctgataacagagcctttggagaagggtcagattgctccagaatcttggacctcaggacaccctgaggaaaagctggagggtgggctgagcctccaggccagccggcccctccctgaacgtggccactgcctctgctcggacgcgtgggtcgacgatatcccggaaattccggaccgtaccgcctgc

SEQ ID NO: 314507 - DNA, 336 bp, Homo Sapiens
ggaacttgaatgccattctttccactctcatttgccacgtgattgttgggtggaatttttatcttttttctccctactgtgcatactgatttaattttaccaaatgtagacaaatttctttgcccaccattggtttgcccaccattggttcttccatccattttttttctggggtgagttttgatcttagtgaagcctagtccagtttatgggtcttactgtgtgatctgctgaccagagtatcagtatcgcctgagagcttgttggtgcaaggtttcaagttctaccccagacctactggattagcctctgggggtgggacacccgctttgtttt

SEQ ID NO: 314508 - DNA, 622 bp, Homo Sapiens
  misc_feature (94)..(94): n is a, c, g, or t
ccggggaaaggaaggtgcagaggaaggtcagcacacagagggttagagttcccggcacaatctcatatcattcagggaaaggatccaaagacanacatgtaaggtggaaatcacagttggtcagagtcactcttgagaatatctgtcaccacctgtcaggggcagccgttgcacttagaggccggctaggttcatgttccctcttggcagtgcctgtggtctgagggtcgtgggggctggtgcaggacagccaccccagctccagctccccacactgctgcgcacttctcgctgagcgcccgattggtttaagttaagtatgtgtatagtgcggtgtttaatggctctttcatgatttggctgggggtagctatttcccagaccgcagcacatgtctcccctgtctctggtgtcagcgggagtggggctcaccccatggctgctcttgggaccccccctgcccagtaagtgtctgccaggtgccgtgctctccagctggcatccatgaaactaggcattctgtgtatcccacccaggccgaagagcagactcagcaccccaagctgggacatgagattggggggtgggtaggaagggcaagtggaggtggggctgtgctgag

SEQ ID NO: 314509 - DNA, 2594 bp, Homo Sapiens
  misc_feature (61)..(69): n is a, c, g, or t
  misc_feature (73)..(73): n is a, c, g, or t
  misc_feature (124)..(133): n is a, c, g, or t
  misc_feature (156)..(169): n is a, c, g, or t
  misc_feature (183)..(334): n is a, c, g, or t
  misc_feature (403)..(417): n is a, c, g, or t
  misc_feature (424)..(526): n is a, c, g, or t
  misc_feature (597)..(621): n is a, c, g, or t
  misc_feature (1064)..(1134): n is a, c, g, or t
ccaccaagggggccaaaaggggttttgttccccccggggggggtatttcgggtgtttttannnnnnnnntttntggagggggttttccccattggggggggaaaaggggtttttaggaattttnnnnnnnnnnttctttctaataaaaattccccnnnnnnnnnnnnnntatttttttatttnnnnnnnnnnnnnnnnnnnnnnnnnnnnnnnnnnnnnnnnnnnnnnnnnnnnnnnnnnnnnnnnnnnnnnnnnnnnnnnnnnnnnnnnnnnnnnnnnnnnnnnnnnnnnnnnnnnnnnnnnnnnnnnnnnnnnnnnnnnnnnnnnnnnnnnnaaaactttggccccgtttcttttcctttgggggcccgcgccccaaaaaaagtttttaaaaaattttttnnnnnnnnnnnnnnncccaaannnnnnnnnnnnnnnnnnnnnnnnnnnnnnnnnnnnnnnnnnnnnnnnnnnnnnnnnnnnnnnnnnnnnnnnnnnnnnnnnnnnnnnnnnnnnnnnnnnnnnntaattttttcatttgctttaattaattcatgagttaagttaaaaagtcaagtcgaaaattttagctggtcnnnnnnnnnnnnnnnnnnnnnnnnnacaaaaatattacagcagtataagcaaaattggaaaggaagagatgggaaaaacaagtagatgctaaaatgggataggtgaacttcaggtcatcatggttattgaaggaactgtaaattcttaagcttctagattttaccgctcttcagaaaacatttaaggaggctgcctttccccatgaatgagaaatgaaacgttccctaagcatttgagtctaaagacaagaaagcattgcttttcctactggaaaatatctctttacttcccattgcactgccctctcccgtccccctcgtagctttatgggatcaaagagagagagaagccatgagtttccaccagcagcagagtgagtcctgagcacaacacagggctgtcagtgacattcagactcactggcaatgggtccaactcatcttgaataaaatacacaaagaaagaannnnnnnnnnnnnnnnnnnnnnnnnnnnnnnnnnnnnnnnnnnnnnnnnnnnnnnnnnnnnnnnnnnnnnnacccgagaaaccgaaaattgtttttttatggaaggtttaaacaaagtcctcaagatttctttatgtgccagaaagtacatttctggacttaatctctaggggggcaaaaaagaataaatagaaacaaatttaatgatcattctggaatcctgttctttactttgttcacacgctattaattctcataccttcacctctctaccacaaagcctagaaaatcaaatggtctcctattccatatttgcatagtattaataatactgtcaggaggtgaacttctagccccttgcttgcagccacattcctgaagagcactggtccaatctgacgtattcgaaaacaatacataagtgtctataggccaaaaattgggtcccatttagcagcaagctgttcaaattatttggaaacagtcttcttccaaggggtaagaaggttaggcagttttgtctgcattttcagatttttctctctgcatcatgcagcgacgaactatgctgtcaaaacttccaaggtaaaacaaagcaatagtgcggaaaaggcccatggtgaccacctgctggagcccctcagtaatagaagttactggagccatcccacaggtcagggccgagagcatgtacccatctgagccaagggaactgttgaaatttccttgtatggcatctttaacaatttgtttggccacctgttctggtttgcacacagatgtggtctctgaaataagtcgagtctccaaaggctttgttctgttttcttcggcaaagccaggtgtgtctgtgtctggtgggtaagcaactgtgatgtagacattatatggcttcacctccatctgcaaagcttctgccaatccccttatggcaaacttggatgcagagtaggctgtgaaaccgaataatcccaactgtcctgcctgggaggacacaaacacgatcctgcccacccggcgctccttcatggtggtgatcacggcccggctggggtacacgctgcccaggtaattgatgctcattaacctttcaaaggtactaacttcaagatcttcaaattttcctgacactgccattcctgcacaatttaccagcatgtccactggacccagtttctcctgtgcttgttttatgacattctctacttggttatagtcttgagatacatcaactgatatgcaaagcaccacctgtttgtcattaatagagtgcatttcaatttctttctttgcctgcagcagcttatcctcatttcgtgcaaccagagttataaaagctccttgtttatagcactcgatagcaatgcacttcccgatgccactggaacctcctgtaaccaccacatgcgccccgggcagggcgaggggcttggggctgatgagcggagacaccatgtacagcagcagcacgaaggccacgaggaaggcggcagccagcagcagcatcgctccgcggggccaggggcccgga

SEQ ID NO: 314510 - DNA, 557 bp, Homo Sapiens
  misc_feature (485)..(485): n is a, c, g, or t
  misc_feature (495)..(495): n is a, c, g, or t
  misc_feature (500)..(500): n is a, c, g, or t
  misc_feature (510)..(510): n is a, c, g, or t
  misc_feature (529)..(529): n is a, c, g, or t
  misc_feature (544)..(544): n is a, c, g, or t
taacttctattactgaggggctccagcaggtggtcaccatgggccttttccgcactattgctttgttttaccttggaagttttgacagcatagttcgtcgctgcatgatgcagagagaaaaatctgaaaatgcagacaaaactgcctaatcttcttaccccttggaagaagactgtttccaaataatttgaacagcttgctgctaaatgggacccaatttttggcctatagacacttatgtattgttttcgaatacgtcagattgggaccagtgctcttcagggaatgtgggctgcaagcaagggggctaggaagtttcacctcctgacagtattatttaatactatggcaaatatgggaatagggagacccattttgattttctagggctttgtgggtaggaggagggttgaagggtattgaggaatttaattaggcctgttgaaccaaaggttaaaggaaccgggatttcccggaatgattcntttaaatttngtttnccatttattnccttttttggccccccctngaggtttggtcccgnaaatgtacctttt

SEQ ID NO: 314511 - DNA, 677 bp, Homo Sapiens
  misc_feature (548)..(548): n is a, c, g, or t
acgagctcagcctctctgtccccacacgtgactgtccttagaatagcaactgggtcctcggattccagtaccccaccatgactgccgccagccactcctatgtcagtcttggctgtctgccaggcactgctgatgattgcccccagaaccgtactattaatcccattacacagatgagcaaactgagacccacagaggctgagtaacctgctatagtagtaagggtcagagcaaggctttcaacctgggcaacttgcattccaggccttcctcatagacagagtctgtgtctattaggggctacaaggagcaggtggcatgtgagccgccacggagcttggcttggggctttctaagtggctagggcagaggggtgcagtccaggcagatggagggttggggcagaagggacctgtgaagaagtcctcctgtactatgggatcctcccctccttatcagggctctggcctggagctcagttcaaaggcttatctatgcaggaatgaaggcaacattcttgatgtagagtctaagagtctgaaggtcanggaatcctttcttggatacccttctttctgcctacccagaaccctgtgtttccttgctgctgggaagcaagtggaacacagtagccagatcccaagaggaggagaggttggagggggacccacgttgct

SEQ ID NO: 314512 - DNA, 348 bp, Homo Sapiens
aaaggacatgatggagcaaaagagatacacatttagtagaaaccatacatcaagtatccatacaagcattcggccacttttcagtattcgataaattacacgagacattcaacactttattataaaataggctttgtgttagatgattttgttcatcaaccatatgataatgtaagtgttgtgagcacatttaagataggctaggctaagctacgatgttcagtaggttaggtgaattaaactcatttctgacatattttaaccaggtgggtttattgagacataacctcatcatgaattaaagagcatctgtatttctctttgcagttccagcatatattcagaaac

SEQ ID NO: 314513 - DNA, 788 bp, Homo Sapiens
  misc_feature (402)..(402): n is a, c, g, or t
tgcttttcagcttataatggggctacatcccaataaccccaacaaaagttggaaaataccgttaaagtggaaaaatgcatttaaatacaccctaggctaccttaaacctactcagatcacttacattagcctacagttgggcaaactcatctaacacaaagcctattttataataaagtgttgaatgtctcatgtaatttattgaatactgtactgattgtatggatacttgaagtactgtttctaccgaatgtgtatagcttttgcacaatcctaaagttgaaaaactggaagtcaaaccatcattatgttcaggcccatctgtatttctgaccccctactagactagctccttgagggaaagggccaaagccctcccagcatttaagcaccggccttgcnatatctaatagaggttcatagttcactgaaatggggttgggggcaagagtagccagaaattggccttttatttcctacttactgatcatgggtcagcttagctggggtgcaaaagtatagtatgtatttcactggaccatccttgaacttcccaaagccatgtcctgtttcctcttgtcttctctaagctaagcattcttagctccttcaagcttcttttccttgacacgatttgtcctctacatcttagccttcctctggcagaggactcatctgtcagggagctccggttgagcaccagaagggaacatggcaatgaggatcactgataggcacaggaagactgaaaggaccttccacactactcgtgccgctcgtgccgaatt

SEQ ID NO: 314514 - DNA, 456 bp, Homo Sapiens
  misc_feature (266)..(266): n is a, c, g, or t
  misc_feature (415)..(415): n is a, c, g, or t
ctctcacagcactccccacatttattatactacagatgcttttcagcttataatggggctacatcccaataaacccaacaaaagttgaaaataccgttaagtgaaaaatgcatttaatacacctaggctaccttaaacctactcagatcacttacattagcttacagttgggcaaactcatctaacacaaagcctattttataataaagtgttgaatgtctcatgtaatttattgaatactgtactgattgtatgggatacttganggtactgtttctaccgaatgtgtataggcttttgcacaatccctaaagttgaaaaactgggaagtcaaaccatcattatgtttcagggcccatctggtatttctggaccccctactaggactaggctccttgagggggaaggggccaangcctcccaggcatttaggcaccgggccttggcattatctaa

SEQ ID NO: 314515 - DNA, 378 bp, Homo Sapiens
caaacgcaaactaccctcaaggtgtcaagtgttcaggataagaagcaatgtgacccagaggaggcatcagccaagggaaacatgccaggagaggatcaaggtgtagctcctgtgttagcaccaggacaactaggaaaagtcaggtgcaaagagtagggcacaatcagcagatacacaaggataatttttgcttttcccttctcattcttcacagtgcataactcaagagctgccactgtgtaacagagacgactgccttcacagctcaaaataactcaatgtttgccaggaccgaacatcagcagagttttcctctgctcccaaaaatgtctcactccctagaactgttcccctaaactgaatattcaccaatgctgg

SEQ ID NO: 314516 - DNA, 1069 bp, Homo Sapiens
  misc_feature (47)..(47): n is a, c, g, or t
  misc_feature (523)..(531): n is a, c, g, or t
  misc_feature (919)..(968): n is a, c, g, or t
ttggcccctcgaggcccaagaattcggcacgagcttttgtttccttntttcacctaatatagagattttatttaaactgtatcgaatttttacagcacattgcatgtttgtcacaacgcaactgcacagtttggatttttggccacatcatgtcacttacacccacaacagctctgaaaggagtatttgatgaacacatctgagccaagagcccagagtctctctccaaggccatgcagtttgttcactgatgggacagtccctcaaaacagccacgctaagtagacagatacagtctccccaaatgttaccaatcttactccccttgaaaacaggcatagtgaagtgcaatgaaagacaagttaattaaaaagccactcacaactggcagtaaattttaatgattgataaaatgcttaaaataattttatgtatcagaaacaaggaacagcttgttactttttcaatgatctcaggaattttgcagacacaaaatctccattattcagctccatttaaatgnnnnnnnnngttccgctaggctgacctaaatatgccaaaactttttaggttacatctatggcaagtacaaaagaaccacagatgcgtctctgtaggactgaaaaggtcaggacaaataatgattcttgttctaaatacagatcctagttattttggaatgaaatgctgttttctagaaagcaacatgaaagtagcagtaagaaagatgactaccatcatttcaaaacaggataagcctaaatataatttaccatttatatgtcaacaaattaaggaaaactgtataaagtcctagtggtttcattataggccaaggagactgtatctgtcccacccacagtacatggctatatcactgtatcttttggttaagtgccgctggtacatattaagatgnnnnnnnnnnnnnnnnnnnnnnnnnnnnnnnnnnnnnnnnnnnnnnnnnncaacaacgtttggtccaaatggacacatgttctttcccaattttggtatcaaggctttattctcttctgtttgggttccattgttaagtgcacagaaatag

SEQ ID NO: 314517 - DNA, 1492 bp, Homo Sapiens
  misc_feature (167)..(175): n is a, c, g, or t
  misc_feature (563)..(612): n is a, c, g, or t
caagttaatttaaaaagcccactcacaactggcagtaaattttaatgattgataaaatgcttaaaataattttatgtatcagaaacaaggaacagcttgttactttttcaatgatctcaggaattttgcagacacaaaatctccattattcagctccatttaaatgnnnnnnnnngttccgctaggctgacctaaatatgccaaaactttttaggttacatctatggcaagtacaaaagaaccacagatgcgtctctgtaggactgaaaaggtcaggacaaataatgattcttgttctaaatgcagatcctagttattttggaatgaaatgctgttttctagaaagcaacatgaaagtagcagtaagaaagatgactaccatcatttcaaaacaggataagcctaaatataatttaccatttatatgtcaacaaattaaggaaacctgtataaagtcctagtggtttcattataggccaaggagactgtatctgtcccacccacagtacatggctatatcactgtatcttttggttaagtgccactggtacatattaagatgnnnnnnnnnnnnnnnnnnnnnnnnnnnnnnnnnnnnnnnnnnnnnnnnnncaacaacgtttggtccaaatggacacatgttctttcccaattttggtatcaaggctttattctcttctgtttgggttccattgttaagtgcacagaaatagacagcagcatttgtactgaaaccctcacataccaaacagcatatgctaggaggtaaaaaccaaacgctaaattctaccctcaaggtgtcaagtgttcaggataagaagcaatgtgacccagaggaggcatcagccaagggaaagacaacatgggggaaatgggcaatggaacaacaacaacgaaaacctttgttttattttcatgccaggagaggatcaaggtgtagctcctgtgttagcaccaggacaactaggaaaagtcaggtgcaaagagtagggcacaatcagcagatatttcacaaggataatttttgcttttcccttctcattcttcacagtgcataactcaagagctgccactgtgtaacagagacgactgccttcacagctcaaaataactcaatgtttgccaggaccgaacatcagcagagttttcctctgctcccaaaaatgtctcactccctagaactgttcccctaaactgaatattcaccaatgctggctgatgagccaactgaaaaatacattgaaacctccacttgctgagccagtcttcaaaccaaactccacagaaagacagtactaatgcaactagaaggagtgcctctaaaggctgagccttcatgcagacacagagcacagaggtacaggatatagttcatctcaaataggacaggaattcctaccttgtatactataatctgcttttgtcaaggtggaggagagatgggtctggttatcacttggagtttggttatacatatgcctttctattgctg

SEQ ID NO: 314518 - DNA, 787 bp, Homo Sapiens
  misc_feature (538)..(538): n is a, c, g, or t
ggctgggaacctgttgataagaaagagactgaggtgactcgctgggttccagaccatatggcatcacactgctataactgtgactgtgaattctggttggccaaacgaagacaccattgcagaaattgtgggaatgtattttgtgctggatgctgccacctgaagctgcccattcctgatcagcaactctatgacccagttctcgtctgtaactcatgttacgaacacattcaagtctctcgtgccagggaactcatgagccaacagctgaagaaacccattgctacagcttccagttgaatgccggggagaaacctgtccaattttagcaggtttgaagggaggatcttcttcagttgtagtttggaaggttccttggtgtggctcatgaaatcacagagctcagagataccatcttgagaaatcctccttggtatcatgaaactggagcagaggaattgcaatttagcaggaggtcctctactggtgataccctcaccttggggtaatggtcctaacccagacccagggtctgganagcttaatgttgagttggtgactccagcctctttctcctggaggtcacaagatgatgattgcgtagatgttgcctggtgcaaagtgccccaaacagcaatagaaaggcatatgtataaccaaactccaagtggataaccagacccatcctctcctccaccttggacaaaagcagatttatagttatacaaggtagggaattcctgttcctatttggaggatggaactatatccctggtaccctcttgga

SEQ ID NO: 314519 - DNA, 357 bp, Homo Sapiens
gcagcagaaatagtgaccccaccgaagcctgaagtctattctgatcttgtgtttaattgatatcctagcctgaatagagtattatggtattaataataccaaatagcagcaaaagctattgcagcataaatttacataatactaaaagatctaaccaaaatcctcggcaaaacaaaaatcaaacatgaaggaaaaataaaagatccagcttatgaggtatccttacaagtcaaaatagagagcaactaaaggcttattttcatgaagggttatccttactctaagtgacccgagctaatgattgctgaattgttgtgaagtttttgctacatctgccacctactcacgagtattacc

SEQ ID NO: 314520 - DNA, 426 bp, Homo Sapiens
accgacagggtggcagagggcaagtgctctgaggtgcggaggagggtctcttctccatccagttagtatgggcgtctgctgtcactaagcttggggaaggtggttgatgaaggaagagcagagtctgaaggtgtaggcccagagcggggcttctcccttcctccagcaggggagggggctggccagtcagaagcaggtttctggtacctacgggaagccagtcgggaagagtctgagggtctggctctcattggtgggcagcggagatcggtagccatcaaagtttcttggtatgctgccgctggtggagcttgagctgttactcagagtctcgatgcttccctctcgccgaagttcttcctccatcgcgagcgcatgctttgttactgttgggttgctcgcggactctggtctgttggcagtgct

SEQ ID NO: 314521 - DNA, 1720 bp, Homo Sapiens
  misc_feature (80)..(80): n is a, c, g, or t
  misc_feature (83)..(83): n is a, c, g, or t
  misc_feature (136)..(136): n is a, c, g, or t
  misc_feature (154)..(154): n is a, c, g, or t
  misc_feature (410)..(436): n is a, c, g, or t
  misc_feature (591)..(746): n is a, c, g, or t
tagataaaaacacgcgcgcgcgggggcgaatgaattaggtgagggggggcgttataagaaatcacgtgggcgtttgtgtnatnaagagtgtgtgtctctccccgcccggtgcgggctggagggaagaaagatcctnttaaagagacggagatantacggccgccccgccgtgttttcgcgggggaacaaattggagttcaccccgggaggggggaggcagcgcggacaataatatgggtggtgtggtggaggagggcgcgtcccgtctgctgtggggcaacctccccgctggtgtgtgggaggatagaccccgcggcctagagagggcggcgcccctgatagagggtgcgcgccgcttgtgggggaggtgtgtgttgggaagagagcggccgtgggggatgcgccccccnnnnnnnnnnnnnnnnnnnnnnnnnnnagagtgccgaaccccccgttgttccgggccgggggtgttttctttttgaaaaacgagattgggcccattttcccctttctcatggggggcggccggcccaccacagaaggtgtttaaagaaattttctagggggcgggggccccccccaaaaaannnnnnnnnnnnnnnnnnnnnnnnnnnnnnnnnnnnnnnnnnnnnnnnnnnnnnnnnnnnnnnnnnnnnnnnnnnnnnnnnnnnnnnnnnnnnnnnnnnnnnnnnnnnnnnnnnnnnnnnnnnnnnnnnnnnnnnnnnnnnnnnnnnnnnnnnnnnggacaccaactgcagcgtgatttattggacaagacgtgcacttttcaacagggcctcagtaaccacggtttccttcactgatcagtacaggaccagggtaaaggggcttaaagataagaaagacaaactcttcccaggaacagatggggaaagaaaggaggaagaagaggcatgtcctcccttcctccttccctagtactctgggcctccgttcaccccgtgctggagtggggctgaccaagggaagctgggggcagtttttttcacagccagacatgagctgaggctgtgactgtccactcagggtcaaaatggccaggtggacgatcaactctgtccccactcaggcccccagatctggtcactgttccaggctccccccacccgccccaccgtgggtatggttaaaaaatacaaaagcggatccaatgcaggatgtcatatgcaaacatacacagggaccgagcttctacagtctctcctggccacagcctccaccgacaggtgtggcagagggcaagtgcgctgaggtgcttggagaagggtctcttctccatccaggtaggatgggcggctgctgtcactaagcttggggaaggtggttgatgaaggaagagcagagactgaagggtaggaccagagcggggcttctcccctcctccagcaggggagggggctggccagtcagaagcaggttgctggtacctacgggaagccagtcgggaagaggctgaggggctggctctcattggtgggcagcggagatcggtagccatcaaagtttcttggtattctgccgctggtggagcctgagctgttactcagagtctcgatgcttccctctcgctaaagttctgttccggatcccacgacgtcccggctaggtgactcggccatggcgtcggcaagtcgctccggaggccctcctccgtgtgctccatggaggacatgtgccgcagcccgaagccctcagg

SEQ ID NO: 314522 - DNA, 1210 bp, Homo Sapiens
  misc_feature (565)..(565): n is a, c, g, or t
  misc_feature (1054)..(1109): n is a, c, g, or t
gggagagtgattgatgaggtgtgaggaaagtgggttgagtcagtagtattgagaagtatgggagatgaaagtaagagaaaggatagtggatcaatattatggggtatttgggtatgcgtgtcgatgttgagtatttggggtagtggtagtggtggtatggactgagatggctgtaagtctagtgtgtgatgatgcatgggcgaggagggatcggctatagtgaaggatagtgtatatgctggtttggattgtggttcggggataggttgggagaaggtggtggattgggggggtgtgtgtctgagttgtgtttgagtaggggtgagtgaaggtgagagggatgaggttggaggtgtgtgtgttagggtggtggtggagggtgctgagggtagtctaggaagtgggtatgctaggggtgaggagagtgttgggtttcaggaatgggggacagtatgggcttgtgggtcgtgcaggtacgttcttgtgcttgcgctccctttgtttggcatttttgtcatcatgctaactggtgggtcttgcagtagagtaggtaggaatgggttgncggagtggtgggtggtgatgctgtactccaaatattttgtagctggaagttcctgggtatgatgcagggagaggtaccaccccttcctaagccaacagtctcactccctcctctcattgctccccattccagctcccacctcccaggattggtgtccagagagtgggctgtgggtgagtctactgcatgcctgcagcatgtgagtggatccatgggagtggatccaccagcacatgtggggtgttagcatgagatgatccacctgggcctgtgctatacggtatgtgggcacattgcctgtgccagtcttaggctatctgtgctttcatttttcttcacacggtggcaggtctacactgcacagccccaggggtgggccttcctcacctcttccctcttgattttcagtctcagctttccagtcccctcccccaaaccagcaatagcagaagcagctgtatacacatcttgatctacagacaccctatnnnnnnnnnnnnnnnnnnnnnnnnnnnnnnnnnnnnnnnnnnnnnnnnnnnnnnnngtaatcccaaacagagccacatgtgctcagacatacacagtcctgataggaactgccccttcgcctttctacagagacacacaactccgccccaccccaac

SEQ ID NO: 314523 - DNA, 769 bp, Homo Sapiens
  misc_feature (57)..(57): n is a, c, g, or t
  misc_feature (60)..(73): n is a, c, g, or t
ccacggatataacttagtttatgggtcaagccaatgcaatgcaaagttgtttctgtnccnnnnnnnnnnnnnnaaccaaaataaataaatcagatctgtccctgtgaaggtcagagtgataaatgaggggcagctggccccttggcatgggctggcccctcacccccagcccctcctctccctcttctgacctgctttggcacagcaaagaaaatgatgcatcagaaagtctccattgggttaaaggagaaagaaagagtggttggggtggggagggagtccaagagaggaggtggagggttaacaggaccaagacagagcagccagtgccccggcggtggctacctgagcggggcttcctggctacacacagactctgtgggctccaggtgctgcctgggcccaggaggggtgggtggggcatgcttgggcgccacacacagcctggaaccctcgaaggaacagcagataatggacactgcagagactgaagctgccctttctgtgccaggtcaggccaaggctctctcctgccagctgccccgggtcatcctcagttcacgccacggctggggcccaccctagaaacctctgccagccatggctagatccgactccaggctcctctacagattctaaggctcaggctcaagatgaagctatcctagtctcaaatacaggagcctgtgccttgctgggtgacagcggaagccagcacacaaggcccagttcctatcctagtgggtgagactggtgggcaggattgtgg

SEQ ID NO: 314524 - DNA, 562 bp, Homo Sapiens
  misc_feature (36)..(36): n is a, c, g, or t
  misc_feature (41)..(41): n is a, c, g, or t
  misc_feature (66)..(66): n is a, c, g, or t
  misc_feature (86)..(86): n is a, c, g, or t
attctgatggaaccttggaataaggccaaaatgcgntccancttctctctggtcacgtggtcaaangttgtcttctctaccagccncccgtctcacggaagtcatctgtaagctttgcccaggaggccacgcactgtgtaatccttggtaagatgagcattgtacatatcggtgaggagcctgcatcccatgtcccacgccgagcacaagtactccagaagcctgggcatccaaccgatgtcccacgccaaccttgagatgggcgaaatgctggtccacataccagtggatggttgatgaaagagggtacgctggtggctgtgagggtcagctccttctcttcgctgccttccatggggcccagcaagaagcgaacacgctgtttaggagcgggaggcttcctggcattgagacccttcagaagttgtagctccactgtatcccgcaggtgcttccattttagccccgggggcttatagaccgcgaaaagcccatgcagccgcgacaagccagcagaccccatacttgaagatcacagcacccgctggacctggacggaagt

SEQ ID NO: 314525 - DNA, 465 bp, Homo Sapiens
ctctcatagccatatttcccactctcatagcgtgtcttgatcacagtgataggtgacatacagacccctgcaacagagcgagagcccacccccagcatgactgactccagggcggttgggggatggcctcgcaagaaatactgcttcaaagagtagagagtgccaaagtagattccaacgccagggacacatctcacaatggaaggggacatccctttccaaaggcccaaaagcctctccgtgcgaaccaccttcaagagtacagccaacataaggagatccagaggttggaaaaggagggtagagcaggtcccactgatggagccacacaggaaagccttgatcaccgtatgtaacataagcgtttccaccgtgtctccgacatcttggggttgcagcagcgacggacgtgagttctgaatcattggagatgaggcccgcgagtcctctgggcccagggtgccg

SEQ ID NO: 314526 - DNA, 2175 bp, Homo Sapiens
  misc_feature (2022)..(2022): n is a, c, g, or t
  misc_feature (2024)..(2024): n is a, c, g, or t
gggacccggaagcgaaatctccccttctacagagttcctccggcgcttcctccaccccgggatacacagaacctcatctcctacggtgctgaagcctgcagcagggcaggatgggcaggagagcagagccgcggagtctgcggcgcgggtgaagagcggcgcgtaattcccgcagcaagattgttccgcgcccgcagcccctggactagcaggatccgaaccccggcggctgcgtgcttataggcgcagacgtcagagagcccgcggcttaaagcgcgtcgcctggctagcgccaccccctagccttcttcaaggcctccagggctgggcccaagcgcccgtcgacggcaccctgggcccagaggactcgcgggcctcatctccaatgattcagaactcacgtccgtcgctgctgcaaccccaagatgtcggagacacggtggaaacgcttatgttacatccggtgatcaaggctttcctgtgtggctccatcagtgggacctgctctaccctccttttccaacctctggatctccttaaaacacgcctgcaaaccctccagccctcagatcatgggtctagacgtgttgggatgttggctgtactcttgaaggtggttcgcacggagagtcttttgggcctttggaaagggatgtccccttccattgtgagatgtgtccctggcgttggaatctactttggcactctctactctttgaagcagtatttcttgcgaggccatcccccaaccgccctggagtcagtcatgctgggggtgggctctcgctctgttgcaggggtctgtatgtcacctatcactgtaatcaagacgcgctatgagagtgggaaatatggctatgagagtatctacgctgccctgaggagcatctatcacagtgaggggcaccggggcctcttcagtggcctgacagcaactctccttcgagatgcgcccttctcaggaatctacctgatgttttacaaccagaccaaaaatatagtgcctcatgaccaggtggatgcaacccttattcctattacaaatttcagctgtgggatatttgctggtattctggcctcactggtaactcaacctgcggatgttatcaaaactcatatgcagctttatccactgaagtttcaatggattggccaagcagtgacacttattttcaaagactatggactacgtggcttcttccaaggtggcatcccccgagccctccgcagaactctaatggcagcaatggcgtggacggtgtatgaagagatgatggccaagatgggcctgaagtcctgaccaagagaggactgggaacgggtgaaatctgttgccctgcttggtttctgccaagggctgctgcttcttactattctgcagtaagatgaagtcctacctggaaaaccaggcagaaattgtgttgcctttgccttcagtaatccccttaaggagaaaatatatggacctgatttcagccttcagaatctccaaaagaggagtcatcaattcatagagcacactagggtgttaggagagagctttgcatactctgagaggctacttggaaaggcattttcccaggagagctctgtcaggtgctgcgcttcagccccacccctacaccacagggtctccttgggtatgttcttgggcaagcaatcacaaagccagagaagctgtaagctgcctgccgggcctgaggagctccaaccagggaagactggatgtgaggagaggagtcactgtcaccaggtcacagactgactgaggtgatggtaggatgaggaggaacagatgcccttctttaattggttctcagttaacttctcagaggctctggagaacgggacagtggctttctagcctctgaatgttccaaataaaattttttggtcttggcccctgtactgttttacctctaaattctggcattttttttccctggcaataaaggggctgtaactttaattatttgaaactttatcccttgaaaggctgttttggaaaaaccgggaaaaacncncgtgctgccgtatattaaaaatatccgtggttcgggcccgcctctcgggccccttccaaaaaaactcttttccaacaacccatttccgtgtgggcgccgcgcggggcccccaggtagaggaaaagggaaaccctgtggtccttaactcttg

SEQ ID NO: 314527 - DNA, 475 bp, Homo Sapiens
  misc_feature (407)..(407): n is a, c, g, or t
  misc_feature (426)..(426): n is a, c, g, or t
  misc_feature (464)..(464): n is a, c, g, or t
tcaacctgcggatgttatcaaaactcatatgcagctttatccactgaagtttcaatggattggccaagcagtgacacttattttcaaagactatggactacgtggcttcttccaaggtggcatcccccgagccctccgcagaactctaatggcagcaatggcgtggacggtgtatgaagagatgatggccaagatgggcctgaagtcctgaccaagagaggactgggaacgggtgaaatctgttgccctgcttggtttctgccaagggctgctgcttcttactattctgcagtaagatgaagtcctacctgggaaaaccagggcagaaattgtgttgcctttgcctttcagtaatccccttaagggagataatatatgggacctgattttcagcctttcagaatctnccaaaagtgggagttcatncaattcattaggaggcacattaggggtttttagggagnagagcttttgc

SEQ ID NO: 314528 - DNA, 404 bp, Homo Sapiens
ttttgagagctgacttttagcaaattggctcttagcaatttacttttcagagaattgactcagtctttgaaagatgcgaatctgaaatttctccaaaagccccttgcttgcttaacgaaactctgcttgtggaaaggtccaccacctccaagtaatctgggtactgctcttggtcacttaaagcagttcctggcacactgtaatactctaaagctgctcagggctgttagagctcttttccgtctcttggcatgagacctcataaaaagaaatggactgtatcagagaggtctgagctatgagcgccttgctattgttcatattatgaaatattttttcacattatgaaatataatgaactcctcaccatattccactttgggctccaagtgagagttcaacac

SEQ ID NO: 314529 - DNA, 1839 bp, Homo Sapiens
  misc_feature (768)..(779): n is a, c, g, or t
  misc_feature (826)..(844): n is a, c, g, or t
  misc_feature (897)..(923): n is a, c, g, or t
  misc_feature (1307)..(1331): n is a, c, g, or t
  misc_feature (1771)..(1771): n is a, c, g, or t
ggaggcgcgcgacttgctttttttggccgcgccgcccctgtttgtccgcctcccgtgggcggccacgcatttatctccgcggcgcaaagatagaccacatgtaccccgcctgggagaggcccgcatagggggcgtccttacggcgtgtataaatagcgcggcccgcctcatctccctaaagagttcacccacagcatccggcccagggcacgggtcgtcaagaacaaatccagacacacccactgcccgcgcgaaacggcaggtggtccaaggggtggcgggggggcgcaacatgtcgagtactcgcgggcggcgttgcgccgtgagaaacctgcgccctaataaatcaggcgccccgcgcggcgagattaaaccctcccggcagcccccgctcttcttggaatcttgctcccgcggacacgcttaacggtgtgccccgcgcgggggcggcggttttttaatggggggaagaaatcccgcacgccggtggtctacggcccgaggggtctccctagggagaccagcgtttgggcccatggccccattacaatacatgggcccccccgcgcccaaaggaaatggtctggggaaaatttctcgggggggcccgaggcgggcccacaagttaggatcatatacggaatgggcctgggccccctgcgtcttgtgtactttattacgttcaagagtaacacccccggtaaagctcaaaaaagtccgatatttacgcaggaaaagagtccgaaattccccccaaagttcttcagnnnnnnnnnnnncagtttgtgtaaattacaaagtaataaaaagctttgctctttaattnnnnnnnnnnnnnnnnnnnggggaaccagaggtaaataaattaggaaaacacacacccggagaaagcaagcnnnnnnnnnnnnnnnnnnnnnnnnnnnggtgttaactaggaaggatgggttaatccaaaacccagccctgactccaggctcctcctcagaaaggtggaaccagggagaggggggaccccaggtgactgtcaggaccagggaagtaatttataactcagagccagatgccttctggaagcagtctccatggattctgccctaaaaccaggaatggaagatggagctgccaccggctgatgacgggctagggggggaccggtggcagcgaggaccctctgagctctgagggatgcggaggtcaccgcccacccccatgtccttgttagtagacacaggagaacgggaattcgggctggcaggcggggcgggccgtggcacctgctgtcttgggaaacacaggtcaatacatcnnnnnnnnnnnnnnnnnnnnnnnnngcaggggacgccggcccccaccacctccccacccactccatggagaggcagaggaggagcctggaggccagggggacaatggaaaagcccagcacgggaagtcagccactgtcatctcagagtgggtggggctgtgcgtatctcctggattctgaggctcggaaaactcggtgggaactgccttcaactgactacaccactccctgatgatgcttgagggccggctttggctctgggacctgtcacttctccgacacggacccgacccgttcctctccaggcaggtggtgggtgggggcaggaacaggaggccgggcaggccctggcgtctggctcctgtagcctggtgttgtcaggggagcatctggcagcctgaaggttgggggcagcgggcaccacaagggggcaagaatcctcagtgctgagggcatctcatcttncttgccattggcaaagaaatcccagaaacaaactccatcgtcggttttgtgctgggtttttttgttgt

SEQ ID NO: 314530 - DNA, 653 bp, Homo Sapiens
  misc_feature (35)..(35): n is a, c, g, or t
gcaacagccctgagtgacgagccgcatgtgactgnggttctgttaaaagggcaggctcctccttcctagccctgaagccccaggaacctgccttgaaagacaagctctctaatactcaacttgcagggtctcgccctaacatccaagacttggtagcatctccctcccaaaacccagctggaactcaactaatcctaaacgaaaactcaagaacagcacaccagatgccacctgcctctctaagggcacctgtctgaacttggagctgtgcttccactggtgcctcatggggcctgggcctactctccacctgaattcacacctctataaggtatcaggtggggaataagtccaagaaggtgacaagaggctcccgagcaacagagcttgctcattcctggcaggcatctcccacaatgccccagagggctggcgaggccgggacagcataaggacagagaaagggcagaggggtgcttggaagtgctcatcactcaggggagctggcaggcccgggatgacaggcagcctgaacagtgctggaacaaagacagccaccctgcgccccttgtcgagcagctgctggtgatgggaagcagcacgtcggcaccacctccttcgttgcaggaaatgttttgtatcgggccaatgac

SEQ ID NO: 314531 - DNA, 2574 bp, Homo Sapiens
  misc_feature (191)..(203): n is a, c, g, or t
  misc_feature (432)..(512): n is a, c, g, or t
gctgtccctgggcggagtctcttgttcattacctgcgccggccacttcttttgttgccccgtgccttcggccctcggcgcttctcgctctctccattcagctggccgctcgcgtggtgttgttgatgcgttcccccggtgtcgggggattcgcttcacgcctgggcgggtgaccctgcgtcgtttggtctnnnnnnnnnnnnnatcagggtgtggcgcctctccgctcgtgctcccgtgcgtccggcgcgctggttttgccgtctgcccggcgccgtgtttgtggtgtcacgctggagtgccccgcccgccgtttgtaattactcctccctctgctggctgtggccgcgtcttcgcttatttcaacaaccgtggtgcggcctgtgctgactggtggtttactggctctcgccgctgattggtgttttttttnnnnnnnnnnnnnnnnnnnnnnnnnnnnnnnnnnnnnnnnnnnnnnnnnnnnnnnnnnnnnnnnnnnnnnnnnnnnnnnnncctaaagcaagtaactttattatcattcctttaaaaagaaccaaggaaaattcacaacatatgtgaaacacaaacagctgtggtttaggaggtaaacaaaggaccaacatagccctgaaatgcaacagcctctgagtgacttgagccgcatgtgactggggttctgttaaaagggcaggctcctccctcctagccctgaagccccaggaacctgccttgaaagacaagctctctaatactcaacttgcagggtctcgccctaacatccaagacttggtagcatctcctttctcccaaaacccagctggaactcaactaatcctaaacgaaaactcaagaacagcacaccagatgccacctgttgtttgtcagggtctcaaactccagaggaaatgcatttgcctgtcatggttttcctctctaagggcacctgtctgaacttggagctgtgcttccactggtgcctcatggggcctgggcctactctccacctgaattcacacttttctctataaggtatcaggtggggaataagtccaagaaggtgacaagaggctcccgagcaacagagcttgctcattcctggcaggcatctcccacaatgccccagagggctggcgaggccgggacagcataaggacagagaaagggcagaggggtgcttggaagtgctcatcactcaggggagctggcaggcccgggatgacaggcagcctgaacagtgctggaacaaagacagccaccctgcgccccttgtcgagcagctgctggtgatgggaagcagcacgtcggcaccacctccttcgttgcaggaaatgttttgtatcgggccaatgacttcagttttccttgcctggagatgccttcatgaaggaaggggacagggaatacaggtgggcatgctgcagttggcatctctggggctgccaaatcttgagttcacttggggccaaggcactccacaatcccattccccttcatgccatcgaagaagaagaagttgttgtgaggagggtcccgctgagacagggccttcacaatttcctgtgccaaaatccctccaaccaccgcacacactggggccatctcggagaagcagtacctgacaaagtcctcaggaagcaggtcaggactaatacccagtgagtcaagcacatcatttcgtatctggagcaacaactcagaatcttcctcatatgtatcagaactgggatctcttcctttatctgtacggaactttaagagcacttgaaggagaaagtagtcggaggtcgtgcgcttcagagcagcctttgctttctcactgctccagtccacctccagggcttctttaacagggcagaagaccaccttctttttgaccatcgttgtctcagaagaatcaagttttgctctcttggtgtcgggcccatcttctactccttggctaactttggcaactttagttttctcctctacaaactcatgctctcctagattggcaaatgtgtatccatggtagccaaaaacatctcctgtaaagaacttgatgctatttttgtgacagatctggtcaactttaactatgacatccctggagcagcaagtcagacacacagcatcgaattgagtgaaaaatgactctggtttcttctctatatcctcagtgtccaccttcacatccaccatggggttgagattctgagctcgctccaaagaggcttcagccctatttcggccaacagacccagtacgaatcaagaactgagctccgggatcttctggagttacctgttcgtgatccagcatggtcagtcctttcactcctgccaagatgagattcttggcaatttcagccccaagtcctttcaagccgacaagaagcacccgagaggcccgcagccgtttctgggcctccagtccccacaggcggatctgccggtcatactgtgccgcctcctcctcgctaatgccgccgccagcctcctccttctccaccatggcgccggctcttcctgcctcagctccggtcccgctcaagccaaccgcccgccggaccctcgtgccgaattcgccacccagg

SEQ ID NO: 314532 - DNA, 890 bp, Homo Sapiens
ttcttgggttcacatttattgtaacttggaagcccacccttcttcctactcctggagctgtcgtccccaagggctcaggaattagccttgctccacagcaaacagcccagaggcccacctgggcaaaagcaaacaaaacagatacgttcctttccggcagtgcagatgctctgcccaggcctgcggaagcagctccggtctgtgtgtaaatcctccccaggacttccggcccaccagctccattccagcctccactcggctcagctccgcggcttcctcgagccaggctggtcctgcatcgccatctgctggccgcgcggcacggccggttcctggagccagcaggagtcggaggctgcagggcttgaaggcctcttcaccgtgccctccagggagcctagctgccgaagtattcctgctggaacttctggaagtcttcctcggtgaacacggtgccctcagccttcttcttcttggtcttggccacaggccggtcacaggccttgcggccccggttctggcgcaaaatctgctggctcacagactcagccacggtgcttctcgtcctggtcagaaacttcaggtttactctgaggtggtctcgacactctcgcttccggtactcgtccagtgccgacttgggcacctttcccttggccgagttccgcagtttctgggcctgaattgccttcgtcttccggggccgtttcaccggagcccctctcggcttggcctgacctggagggtcccggggggcctcggacgccgccagcagctccaggccccgccgcagcagggcggcggacatggcggcgcttggctccgcccacgagcctcacactacttccgacctggcagtccctgtcatcccgggaattccggaccggtac

SEQ ID NO: 314533 - DNA, 616 bp, Homo Sapiens
  misc_feature (589)..(589): n is a, c, g, or t
gcaggtcctcattcatgttgtaaatttttgcagcaagcagtcaacattccacaaacgaacaaacattatacctcttctgatagttttattaagcatggagaaattgccaatttttaaaaactgcagttttccaaacttttctgccaacctcttactctgaattcagtgctgctttgggacatatacttgacctagcttggtttaccagtgatgggtattttgatatcattaactttttcccacagtggataaatgttttttctgtattatgacagtattgttgtgatggccatctgctggctcctgaagagcattatgtattacagtgagcagttgtattgcctgtttggtgcccaatggttaagtcattgtcacttagctttatattgtcagtttgatatttattttaaattgtgagaactagatgcatatattcacatttgtggctttcctttgcatcttctcatacagtgagatcgatgggtctgttcctagaaagactgtgtaacgcattgtacgtcatgtcgctcatgtatcgtgagaccatgagttatatactgactgattggacagatgtctacgactgatncatactaatcttgcatggttagtatag

SEQ ID NO: 314534 - DNA, 647 bp, Homo Sapiens
ctacccccaccagcatctaaggagagtcttctttctgtttggagttctgtgataagacagatgactcacccagggggatggaggaggatgaccgagggcagttctctcagagagggagttctggctcttcagcttttgtgtcccgccccaccctcagggttcaagcctggccattccaaagcagttaagtttccccaagcatgctttcaagttttgacaattgctgttacctttgcctgagataccccttcttggttacttgaacttttacttgtccttcaagccctccagtacctcctcctccaggaagccttcccaacccaccctctgagctttttattggagcactgatgatcctgggtcaataatgcctgatacacatttgtcttccccatgagactgagccccatgggaacaaaggctatgtctgattcattctgtgttcccagttcccagcacccaggacagggcttggcacaaagaaagggaggccccagggaggccagcggattatgcctgtacagggatcatccagcccatcctcccatttctcattcctgactgagtctggaactattcctgggcatctcgcttcttggatactctggctgccgctagcagacgttgcacagagcctagttgggccc

SEQ ID NO: 314535 - DNA, 1294 bp, Homo Sapiens
  misc_feature (930)..(1174): n is a, c, g, or t
  misc_feature (1226)..(1226): n is a, c, g, or t
gaaaagtaagccatgaggagagcgatttaaccacctttaaaggacctaagatgtgctttttaagccagttgtggatcacagaaactcactaagacaggacttcagcagccttttgtgtttggacaagtcagcataaataaagaatgacaaggcagcagcaagagcttcaactacagagaagtgaaggcataagatactatgatgatagtgagcaactttccaaaagctagttaaatctgcttattacaactgaaatatcgaagaaagtctagcaggaaggagctcttcgccttttggaacatcaattgagagatagttgccacagttcactaggtcttagcctttaggacctgcaaggaaggggcaataagcattaggtaagggctttgaattttgatttttttcactaattaaagagtaattttttgtaaagcaaggtaagagtaatctttttgatttgcaggttgaatgagaaccctacttgcctaaatgaggaatgtctttcctaccatctaaaatacgaaggtttctggctgggtaaggtttgtagttgacagtaaaacctgatgacaccatttgtttccctgcaagtctacattacatatttcacaactttgtccctctctagtaggcacattggaaaaattcttcaactgaaaactaccttggtaccatgtcctacacgttttaaaccttagttttaaaaattcccctgcgaaatagccataagtattcatatcaagtcagttgtgactccttgtgtatacaattcattttttgtgtcttcagggtaaactcaatttttggtaaagtggtttcagcttttgtgaaaaccgtttttgtgtgtaagcatgacacacaacagactcagtaagctgcccatcctcatactaggaaaacaccttcaaaggaacattaaaagttaccagnnnnnnnnnnnnnnnnnnnnnnnnnnnnnnnnnnnnnnnnnnnnnnnnnnnnnnnnnnnnnnnnnnnnnnnnnnnnnnnnnnnnnnnnnnnnnnnnnnnnnnnnnnnnnnnnnnnnnnnnnnnnnnnnnnnnnnnnnnnnnnnnnnnnnnnnnnnnnnnnnnnnnnnnnnnnnnnnnnnnnnnnnnnnnnnnnnnnnnnnnnnnnnnnnnnnnnnnnnnnnnnnnnnnnnnnnnnnnnnnnnnnncccatctcaaagaagaaaagtttaccagatgttcatggggtaaaggttggtntttcaagtgggccttcattaagttgtctttgcattttaaattcagggaatttcattgggaccattagg

SEQ ID NO: 314536 - DNA, 650 bp, Homo Sapiens
  misc_feature (46)..(46): n is a, c, g, or t
  misc_feature (51)..(51): n is a, c, g, or t
  misc_feature (65)..(65): n is a, c, g, or t
  misc_feature (177)..(177): n is a, c, g, or t
  misc_feature (189)..(189): n is a, c, g, or t
caccgctggcaaaaaattattcattaaaaatagaatgaatggatgnatgcncagtgggttgaacnaagtgtgatatttaaatgctgtgtaataatgatttgaatagagtataaagagacatcagcaatactctttcctaagtgtttaggtgtcacaaaagctctgcctcatagttanttcttaaataanaactatacatggcctagaaaagataatcaccccttagtctggcaagcataacacacaggaaggagtccactgcttattcaaagagaactttggttaaattcctcgttagatcctgatagagcctggaaaactctgattctcagcataaatttaatgatcatttcggtactgtgattattatttaataactaatgttctcacaagataaatttgacatggtaacaaatgtaatagaaaagtacatttcacattgcaacaaatagattgtgtaatacttgcaaagctctcagaaaaagtcttcgtctgcaaaatgtcagcttgctgtttaatgttgctatcagagaccagaaaagaaattgcataataaactcaactcatataaagtaataacaggggatgggaaagcttacgctgaagctgaaaccaggttacaggtataatccactatgtttgccccccaa

SEQ ID NO: 314537 - DNA, 740 bp, Homo Sapiens
gtgcatattaaagtgctttgtaaactaaagcatgatacaaatgtcaatgggctacatatttatgaatgaatgaatggatgaatgaatattaagtgcctcttacataccagctattttgggtactgtaaaatacaagattaattctcctatgtaataagaggaaagtttatcctctatactattcagatgtaaggaatgatatattgcttaattttaaacaatcaagactttactggtgaggttaagttaaattattactgatacatttttccaggtaaccaggaaagagctagtatgaggaaatgaagtaatagatgtgagatccagaccgaaagtcacttaattcagcttgcgaatgtgctttctaaattataaagcacttgtaaatgaaaaatttgatgctttctgtatgaataaaactttctgtaagctaggtattgtctctacaaaattctcattttatagttaaaccacagtgagaagggttctataagtagttatacaaaccaagggtttaaatacctggttaaatagatcaattttgattgcctactatgtgaactcacttttaaaggcactgaaaatttatcatattttatttagccacagccaaaaataaggcaataccctatgttagcattttgtgaactttaaggcccatataatggaactggtgattttctaacttggggcggggactagttattaaaatggtgagtttttatttgggcgggggtttg

SEQ ID NO: 314538 - DNA, 639 bp, Homo Sapiens
  misc_feature (387)..(387): n is a, c, g, or t
  misc_feature (394)..(394): n is a, c, g, or t
cgaggttatatcatgttgtctagactgggagcacccttttttaatacccgaataatgattattgcacatatgtcccatgtatatttagccagtctccaggaggtgacttggagctttctataatcatgtagagtcattgatatcaagtcagaaaaattgctatggatttagaaacagaatagtcttatttacatattccctcgacttatcacaaaatagtttaaagttgtttctaacaattgtgcgtacaacacaatattataaacacatgagtagccaggagcagtgaaagtgaggcgccagtcctgcgacagagattaagcagatgaaggggctgggatggtggtggcaggaggcttaaggaacagaatccccaagtgatgtctntcatagnccattgccacggcaggccatgcaggctcttttcaactcactcttagcggtcttatacttcttgggtcagctggtatttaaagactcaccttggacttcattctcacctgactgtgcactttttttggctatacatagggagatggactatataggtagagaaatatatttcttacaattggaactacttccttggctgggtggatatagccatgcttgtgtgtctattcccggtgtgtgcgggtg

SEQ ID NO: 314539 - DNA, 672 bp, Homo Sapiens
ggaccgctgagggggccgacccaactgctgccgcactctcttgaacgcggatagctgaagtcggggtgcacgacttttttggggagcggggacgtgaagtacagcgctagagaggccgcccagagggctgtggagctccggaaggagccttaggagtttgttgtcgtggtagacagactcccccgggagctttctctgactccgaaccctgccttgctctgacttcctgttggagatgatcgattcgagagagggaaagagccgagaacgccctgaatctcaaatcacctcgtttcacccaccggcagcgtcaagcggggttttgtccagtcgtcgagttacgtatatgggaccgattctcatctcttccggggcttaatgttctgtggctggtttctcttttgtctgcccttcccggcaaatctctttggtgcctcatgatatatttcactgctggattttctcaattaccaagtggactgtttaatgtacagcttttacttcccctcctcttccagttatccgaaagaaataatgaatatcgcatcagtcttggaatgtgtattaagactgtaaggtgaaaataaagcggataaaccaggcaggattttacttgctggttaaatgaatgaaaacccccttaattttttttgggtataggccgcccccttg

SEQ ID NO: 314540 - DNA, 1017 bp, Homo Sapiens
ggttttgcctattttgtgtgttccccgcgtgctccaaatttctcttgtctccgccttttcctctttgctcttgaattgttgtctggccctgagtttttgcccccctttttttgtggataaactgttttatccagcttagggccagccgcccaccggtgacagtgccgggcccttccccttttgccacgcccccttaccggcacagcctcgttggccccgactcggcacggacgtgcctagtgcccaccatgacctgggccacctctgccgaggtcagggtcctctgtccagcattgggaaggggtcccagttccctgacagaggagcaggcacggggagcctgcctcacccagcggacagcacgggccggggcagacagagcagggaccctagggccacagaccggtacagggttccaccacccggggacacaggcccaagcaccgtgccactaagatggggtctgcagaggcaaaagccttgctgcagcctctcccactctgcgaggatggcgggggtctgctatgtggtttgcgggggttatcctggtatgcgggagctgccttccaataaggctggggaacccaagcctgagtctgggtgctcagtggccgagagcactggtgtgggctgggagggcacacgcagaggctcaggagccccgggctctgttctgcttctgtctgctctctatagacacggtgatggcctcttggtccctgcagcctccagtgatggcagcctgggcccctgacagggagccagtgggaggttggagcatgtggtgactcctagcacgggcccccacccagtgggcaacccctcacccacctgctgatggcagggaggggcagctgaacagcaccccgggtggctgagactgcctcccagtccacgtgggaaccacggcctcaaggagccacaggctgagctgccgggagggtgggctgaggggccaccactggtcaccgggtgcgacgcgtgggtcgacgatatcccgtaattccggaccgtacc

SEQ ID NO: 314541 - DNA, 967 bp, Homo Sapiens
gttggatttagaagtggcacccacgggggtcttcccaggtggaaaccccgagtcccgttctcctacatcccacaggggcttggccctcccgaccagggatggagggcctttgccccccaggtccgggtttcttggccttttttctccggggtattccggtagcccgtcctccccccaggtgtgccggctccctgtcctcctcctcatggtcactgccaaacaggtcaaggtcatcatcctggtcatcctctgctggtgtggctggcttcttggctgggggctccacttggcgcatgggagatacgtgctgggtctgtggggccgtggcccggtggccaggcgagctcttctccagcacgttcagccgggcctccagcttggagatggcctgctgcagctcctgtaccacgccacgcagactctggttctccacttccagactggcaatccggacgacgagctcaccgtggtctccgctggtgccgctggaggccccggggcctgagcttccagccagggatttctggatgttctctctggctctcgcaatgtcacggaggatcacgctggcgccgttctcctggcgggaggcacctgccacaggcccgttcatctgctcgtagaatctcctttctgcgtcgtcatatttgaacttgtcgaaccagatcttctcatgtgctaggaagtttgtagccatttttctgtagcgtctaagttccaaaagtgttgcgtccgtgcctatcccctccgtgctcagctgatgcgtgcagtaactggtgcttgacaaagacgtggtgtacgaaggtctgcaggccagagaaacagctggggcagatgtctggtctcccacggggacggcagcaaacacaggccttaggccccagcagcctggccgaggggcttccacgaccgggatgcgccgtgagacagtgctcccggcgcccccgtcccgcggacgccctccaaa

SEQ ID NO: 314542 - DNA, 1005 bp, Homo Sapiens
  misc_feature (217)..(247): n is a, c, g, or t
gttggcggccccgtcctcgtttagcgggggcgagataccaacgccggtagaggggcgggacgaggacctttcgcgcgggcgcggacgccaatataaccccgcggctgtagggctttccagatccttcgtcgaaaaacctgcgcattattggcccgctggcgcaaggggtttccccacaaacttgggggagcttcctccctgccgggcagatttgttnnnnnnnnnnnnnnnnnnnnnnnnnnnnnnngccgggaatgtggaggcttccgggattgccgtagcgccccgggcccccagcttggagagcccgccccaggaccagcccggtccaggtgggatagagggcggcacaggcctccgagttgggcccatgtcggtctcgtcatcccgaggctggccatccagcaggatggaggactgggccaccaggcagggcttcttgcctttgttctcccgcgtactgccgtagccgctcctcccgcagctgggccgcctccttgtcctcctcctcattgtcactgccaaacaggtcaatgtcatcatcctggtcatcctctgctggtgtggctggcttcttggctgggggctccacttggcgcatgggagatacgtgctgggtctgtggggccgtggcccggtggccaggcgagctcttctccagcacgttcagccgggcctccagcttggagatggcctgctgcagctcctgtaccacgccacgcagactctggttctccacttccagactggcaatccggacgacgagctcaccgtggtctccgctggtgccgctggaggccccggggcttgagctctggcgggaggcacctgccacaggcccgttcatctgctcgtagaatctcctttctgcgtcgtcatatttgaacttgtcgaaccagatcttctcatgtgctaggaagtttgtagccatttttctgacgccagccaaggacgcggcgaccaaggaggaggaatcggcggacgcgggaagactatgaaagggag

SEQ ID NO: 314543 - DNA, 947 bp, Homo Sapiens
ttggaaggctgcgatattggaccattttggcccggggttccttcaaaactgggggaatttcctccctcccaaccaagtctgtccccccccttgtggtccctcccaccaccaccagggaaatctgtagcttcccgaatacccgtagccccacgggccacccagcttggaaggcccctccaggacccaggcccgttccaggtggatagaggggcccacaggcctcccagctggggcccatgtcccgtctcatcatccccaagggcttgacattccagcagggatggaggacttggccaccagtgcaggcttcttggccttcttctccgcgtactgccgtagccgctcctcccgcagctgtgccgcctccttgtcctcctcctcattgtcactgccaaacaggtcaatgtcatcatcctcgtcatcctctgctggtgtggctggcttcttggctgggggctccacttggcgcatgggagatacgtgctgggtctgtggggccgtggcccggtggccaggcgagctcttctccagcacgttcagccgggcctccagcttggagatggcctgctgcagctcctgtaccacgccacgcagactctggttctccacttccagactggcaatccggacgacgagctcaccgtggtctccgctggtgccgctggaggccccggggcctgagcttccagccagggatttctggatgttctctctggctctcgcaatgtcacggaggatcacgctggcgccgttctcctggcgggaggcacctgccacaggcccgttcatctgctcgtagaatctcctttctgcgtcgtcatatttgaacttgtcgaaccagatcttctcatgtgctaggaagtttgtagccatttttacgccagccaaggacgcggcgaccaaggaggaggaatcggcggacgcgggaagactgatgaaagggcccc

SEQ ID NO: 314544 - DNA, 1194 bp, Homo Sapiens
  misc_feature (69)..(130): n is a, c, g, or t
  misc_feature (132)..(293): n is a, c, g, or t
ggggggaatcccaccctttttctttccccggttttctttggaaacaattttgccccttttcctttcccnnnnnnnnnnnnnnnnnnnnnnnnnnnnnnnnnnnnnnnnnnnnnnnnnnnnnnnnnnnnnnannnnnnnnnnnnnnnnnnnnnnnnnnnnnnnnnnnnnnnnnnnnnnnnnnnnnnnnnnnnnnnnnnnnnnnnnnnnnnnnnnnnnnnnnnnnnnnnnnnnnnnnnnnnnnnnnnnnnnnnnnnnnnnnnnnnnnnnnnnnnnnnnnnnnnnnnnnnnnnnnngccggtctcagtctttaatcgtggcagggcctcacgcacgcgcgcacgtacacacactcaggcttcagatcttgttgaaagctgcgatatcgacactctgcacgtgctcctcaaacttggtgatctcctcctccagcaagtctgtccccaccttgtcgtcctccaccacacactgaatctgtagcttccggataccgtagcccacgggcaccagcttggaagccccccagaccagcccgtccagctggatagagcgcacacaggcctccagctgagccatgtccgtctcatcatcccaaggcttgacatccagcaggatggaggacttggccaccagtgcaggcttcttggccttcttctccgcgtactgccgtagccgctcctcccgcagctgtgccgcctccttgtcctcctcctcattgtcactgccaaacaggtcaatgtcatcatcctcgtcatcctctgctggtgtggctggcttcttggctgggggctccactgggtctgtggggccgtggcccggtggccaggcgagctcttctccagcacgttcagccgggcctccagcttggagatggcctgctgcagctcctgtaccacgccacgcagactctggttctccacttccagactggcaatccggacgacgagctcaccgtggtctccgctggtgccgctggaggccccggggcctgagctctggcgggaggcacctgccacaggcccgttcatctgctcgtagaatctcctttctgcgtcgtcatatttgaacttgtcgaaccagatcttctcatgtgctaggaagtttgtagccatttttctgacgccagccaaggacgcggcgaccaaggaggaggaatcggcggaccctcgtgccgaattcgccacccaggcctcgcta

SEQ ID NO: 314545 - DNA, 1066 bp, Homo Sapiens
  misc_feature (956)..(1001): n is a, c, g, or t
  misc_feature (1007)..(1007): n is a, c, g, or t
gggctccctttcatcagtcttcccgcgtccgccgattcctcctccttggtcgccgcgtccttggctggcgtcagaaaaatggctacaaacttcctagcacatgagaagatctggttcgacaagttcaaatatgacgacgcagaaaggagattctacgagcagatgaacgggcctgtggcaggtgcctcccgccaggagaacggcgccagcgtgatcctccgtgacattgcgagagccagagagaacatccagaaatccctggctggaagctcaggccccggggcctccagcggcaccagcggagaccacggtgagctcgtcgtccggattgccagtctggaagtggagaaccagagtctgcgtggcgtggtacaggagctgcagcaggccatctccaagctggaggcccggctgaacgtgctggagaagagctcgcctggccaccgggccacggccccacagacccagcacgtatctcccatgcgccaagtggagcccccagccaagaagccagccacaccagcagaggatgacgaggatgatgacattgacctgtttggcagtgacaatgaggaggaggacaaggaggcggcacagctgcgggaggagcggctacggcagtacgcggagaagaaggccaagaagcctgcactggtggccaagtcctccatcctgctggatgtcaagccttgggatgatgagacggacatggctcagctggaggcctgtgtgcgctctatccagctggacgggcttggtctggggggccttccaagctggtgcccgtgggctacggtatccgggagctacagattcagggtggtgggggagggacgacaggggggggacagaacttgctggagggaggagatcacccaggtttggaggagcccgtggcaaagtgtccatattcccagcctttcaaccaaactttgaaaccccgggcgtgggggtcnnnnnnnnnnnnnnnnnnnnnnnnnnnnnnnnnnnnnnnnnnnnnnacgggnaaaacaatcgcccttgcacccacccccccgcgtccttctaccccggccgcccagcgaac

SEQ ID NO: 314546 - DNA, 1138 bp, Homo Sapiens
tttccagaaaaccgttccgtttggcccccccggggcctgtttttgaatggggggggaattccaaaaccctatgtccgtaacccaagggtttccctagggaaaacaggtattggaccatgttccatttgccctacagggggcgccgcgcccaaaaggaaaggttgtagaaaagctttttgaggggccgaaggcggcccaacaagaaaaaaggggataggggaagacgagaagaagaacggtctcagtttttaattgtgtcagggcctcatgcacgcgggcgcacacacacactcaggccagatcttgttgaaagctgcgatgtcgacactctgcatacgctcttcaaacttggtgatctcctcctccagcaagtctgtccccaccttgtcctccaccacacgctgaatctgcagcttccggataccgtagcccacgggcaccagcttggaagccccccagaccagcccgtccagctggatagagcgcacacaggcctccagctgggccatgtccgtctcatcatcccaaggcttgacatccagcaggatggaggacttggccaccagtgcaggcttcttggccttcttctccgcgtactgccgtagccgctcctcccgcagctgtgccgcctccttgtcctcctcctcattgtcactgccaaacaggtcaatgtcatcatcctcgtcatcctctgctggtgtggctggcttcttggctgggggctccacttggcgcatgggagatacgtgctgggtctgtggggccgtggcccggtggccaggcgagctcttctccagcacgttcagccgggcctccagcttggagatggcctgctgcagctcctgtaccacgccacgcagactctggttctccacttccagactggcaatccggacgacgagctcaccgtggtctccgctggtgccgctggaggccccggggcctgagctctggcgggaggcacctgccacaggcccgttcatctgctcgtagaatctcctttctgcgtcgtcatatttgaacttgtcgaaccagatcttctcatgtgctaggaagtttgtagccatttttctgacgccagccaaggacgcggcgaccaaggaggcctcgtgccgaattcgccacccaggcctcgctc

SEQ ID NO: 314547 - DNA, 836 bp, Homo Sapiens
tccctcgggctgcaggaattcggcacgagcttgaatctctccaaagtgacattcttcatgacgctgacagcaacgatctgaaagtcattatcatctcggctgaagggcctgtgttttcttctgggcatgacttaaaggagctgacagaggagcaaggccgtgattaccatgccgaagtatttcagacctgttcttcaaggttggccctggccacggctgccggctgtcaactggttgccagctgcgacattgccgtggcgagcgacaagtcctcttttgccactcctggggtgaacgtcgggctcttctgttctacccctggggttgccttggcaagagcagtgcctagaaaggttgcctttgagatgctctttactggtgagcccatttctgcccagggggccctgctccacgggctgcttagcaaggtggtgccaagaggcggagctgcaggaggagaccatgcggatcgctaggaagatcgcatcgctgagccgtccggtggtgtccctgggcaaagccaccttctacaagcagctgtcccaagacctggggacgggttactacctcaccttccaagccatggtggaccacctggccctgcgggacgggcaggagggcatcacggcctttctccagaagagaaaacctgtctggtcacacgagccagtgtgagtggaggcagaggagtgaggcccacgggcagcgcccaggagcccaccttcccctctggcccagccaccactgcctctcagcttcaacaggtgacaggctgctttcgtgacttgatattggtgtcatagcatttggcctacattgccactttcatggggggc

SEQ ID NO: 314548 - DNA, 932 bp, Homo Sapiens
  misc_feature (209)..(276): n is a, c, g, or t
gaaaaaacggcaacggtagaacaaagagttaaaaaattcaagcccaggcgcgcataacccgtatcccacttttggggaccagagggccgactatagagctacagatttagagccaactggccaaaaggggtgaaaccccatcttcccggaaaaatccaaaattaccgggtaatggtggcacgggccgtaaaatccccagttactatggnnnnnnnnnnnnnnnnnnnnnnnnnnnnnnnnnnnnnnnnnnnnnnnnnnnnnnnnnnnnnnnnnnnntgacagagcgagactctttctaggcactgctcttgccaaggcaaccccaggggtagaacagaagagcccgacgttcaccccaggagtggcaaaagaggacttgtcgctcgccacggcaatgtcgcagctggcaaccagttgacagccggcagccgtggccaggccattgaccatggcaatgacggggacggggtggttccggatgtgcatcatgaccttggaacaggtctgaaatacttcggcatggtaatcacggccttgctcctctgtcagctcctttaagtcatgcccagaagaaaacacaggcccctcagccgagatgataatgactttcagatcgttgctgtcagcgtcatgaagaatgtcactttggagagatttcagcattgcaagtgacaacgtgttcctcttcttgggattgctcaagacgatgttccttatgccgtccagctgccgcgcgctggtgggccgcggctccgactcccgccgccccgccccggccgggtcccggctgcagaagcgggcggggagctgggcccaggggccgcaccggagacacatgggcccaccttgccccgaaggcccgcaagacggcgacggcggccatacggacgcgtgggtcgacgatatcccgggaattccggaccggtacccaa

SEQ ID NO: 314549 - DNA, 426 bp, Homo Sapiens
accacaggcgctaaataaaagtatatcatgttctctgactagaaataaacctccctctaagggaatggaagattaaaaaaggagaaaatatcctttaaccaaaatgccttcttactcttatttctatgcctaaagttcaaataaggaagagaagattgaagctgagacagaactcagagagctaatgactgtttatttcagaagttccatgttattaccatgggaagagaagccatttaaaaccttccccgtgagtattgccagcagtccataatcctaggagaatataggttgttgaatgttactaagcaccttctagcacctggtaagtttccaaatgttccttctattctttccaaacagctagatgacacctaggaggtgctgcatcttgttgtgtccccgagtgagaaccagcaaagattc

SEQ ID NO: 314550 - DNA, 283 bp, Homo Sapiens
  misc_feature (103)..(111): n is a, c, g, or t
tgcacacaaactacacctgtaacagcatgaccttttacctgaaaaataaaggatgaaatattacatttatttatttacatattgcccataatactgataggcnnnnnnnnnaatgctttgttttctaaaacttgtattgtttttaaacaaaaatagatttgaaaagaatgaaccacaacagtgctaccaaaaagtcacatcttgttaccagacatcactgtccttacaacaattcaactaataagatttaagatttaacttcatcctaatgtatcagaacatt

SEQ ID NO: 314551 - DNA, 755 bp, Homo Sapiens
  misc_feature (522)..(522): n is a, c, g, or t
  misc_feature (726)..(726): n is a, c, g, or t
ttaagtttgcaaatcttttatatttccagctgttgagacagtatttttgagggctgatgttacctctagcggcgaaaccagagccagctattaagcagccagaaagctacagtaattgaatacatgaccatttctcttttagcacgttctttgttctcctcttccagaagttgtagacgtctatttagtttgattatctgtcgtcttagtgaagctgcatctacaacagtcaggtcatctgacgttccttcaatggttgtatctatatttgaaatgccatacctgacgttgtcatgatgaggattagaagtggcggcagcagacccaccacgcaacacaggtctgcgattttcatccagcacatccaagatctgctggtatgccctacgagtagaagactggataagcgacaaaatgccacgagcagaggaaagattagctccatcttcaggtaacatatggggaggacagacccgagcctgttgtggcgatggtgtcacactggttacacaagcacagcanatgaagagaaaacactcaggtcagattttataaaacttagctgagcagctttatcttaatttcttagggtcttgccccttccccaccttacttccccacaggaaacagtcaagaataatattttgaatgtttcaaaactagttacaggcagacttaataacttggaacctaacataaaataaataactgaatttaaagactgtnagagggagagaacttcgcaatgaagtgtc

SEQ ID NO: 314552 - DNA, 1208 bp, Homo Sapiens
  misc_feature (58)..(58): n is a, c, g, or t
  misc_feature (66)..(66): n is a, c, g, or t
  misc_feature (99)..(99): n is a, c, g, or t
  misc_feature (102)..(102): n is a, c, g, or t
  misc_feature (108)..(108): n is a, c, g, or t
  misc_feature (124)..(124): n is a, c, g, or t
  misc_feature (139)..(139): n is a, c, g, or t
  misc_feature (201)..(201): n is a, c, g, or t
  misc_feature (207)..(207): n is a, c, g, or t
  misc_feature (209)..(209): n is a, c, g, or t
  misc_feature (212)..(212): n is a, c, g, or t
  misc_feature (216)..(217): n is a, c, g, or t
  misc_feature (241)..(241): n is a, c, g, or t
  misc_feature (244)..(244): n is a, c, g, or t
  misc_feature (253)..(253): n is a, c, g, or t
  misc_feature (257)..(257): n is a, c, g, or t
  misc_feature (268)..(268): n is a, c, g, or t
  misc_feature (287)..(287): n is a, c, g, or t
  misc_feature (289)..(289): n is a, c, g, or t
  misc_feature (299)..(299): n is a, c, g, or t
  misc_feature (976)..(976): n is a, c, g, or t
  misc_feature (1039)..(1039): n is a, c, g, or t
ggcgaaaccagagccagctattaagcagccagaaagctacagtaattgaatacatgancatttctnttttagcacgttctttgttctcctcttccagangtngtagangtctatttagtttgantatctgtagtcttantgaagctgcatctacaacaataaggtcatctgaagttccttcaatggttgtatctatatttnaaatgncntanctgnngttgtcatgatgaggattagaaanagnggcagcagncccnccacgcaacanaggtagagaatcatttctnancagctgtccnttttggcgaacagcattttcactcatagaccgctctctttttagtctgccaactgctcggatttcttcattttgaggggttgtaggaggtctttctaaatccagaaaatctagtggtctttcactcagcgtaagtacacgaggtggtgttttcagtgccaggggtttaaagggagttgactgaataaggtcaagatctgctggtcttgaaaatgaaacatcttcattatttcctgctacaacaatcctctccggaacttgcattatcacactagcatttggaactccttcttggaatccttgttccaggtcagcgtttggcggtgctacttttaacttttctgggaccctcattcgctgactaatgccttcagtatattccatttcgtactgaattcgactaatttctgccatctcagcagcagtgggagaaggaaatgctgccctgctcacccttcctagtgatgtgtcactgcttgttcctttactcatttaaatacagtaaatacaggtctataatagctattaaaatactgctaccctgcagttcagtttactttacacaacaattcccctacacatttgaactttttttggaggtgtacataacaacacggacactgcttttccagaaatgtgtaacaactactgctttctatttggcactatctgcttctntgcttcatattaaatcctttaacttgcttcaatgtgcatgtgctggattgagagccacttttntccccctgggcccacaggagggtcccggcgaggacccccgccctctggctcccggggcgctcgagtgggcgctctcagaggcggttggctgagagcacggaggcgcccagggacagcaccggcggagcggcccgcagagggccacggcagaagcgcgaaaggcgcgggc

SEQ ID NO: 314553 - DNA, 886 bp, Homo Sapiens
acgagtagaagactggataagcgacaaaatgccacgagcagaggaaagattagctccatcttcaggtaacatatggggaggacagaccccgagcctgttgtggcgatggtgtcacaagagaatcatttctgaccagctgtccattttggcgaacagcattttcactcatagaccgctctctttttagtctgccaactgctcggatttcttcattttgaggggttgtaggaggtctttctaaatccagaaaatctagtggtctttcactcagcgtaagtacacgaggtggtgttttcagtgccaggggtttaaagggagttgactgaataaggtcaagatctgctggtcttgaaaatgaaacatcttcattatttcctgctacaacaatcctctccggaacttgcattatcacactagcatttggaactccttcttggaatccttgttccaggtcagcgtttggcggtgctacttttaacttttctgggaccctcattcgctgactaatgccttcagtatattccatttcgtactgaattcgactaatttctgccatctcagcagcagtgggagaaggaaatgctgccctgctcaccaaatgtgtaacaactactgcttgctatttggcactatctgcttctgtgcttcatattaaatcctttaacttgcttcaatgtgcatgtgctggattgagagccacttttgtccccctgggcccacaggagggtcccggcgaggacccccgccctctggctcccggggcgctcgagtgggcgctctcagaggcggttggctgagagcacggaggcgcccagggacagcaccggcggagcggcccgcagagggccacggcagaagcgcgaaaggcgcgggctggccccttctg

SEQ ID NO: 314554 - DNA, 351 bp, Homo Sapiens
gccacccccagccccaaccttaaggggacaacgagcactccctcatccaccctttacctccattgcacttggagtcctcaatcctaggcctattgtttgctgacttgagttgtcagaagtcagcctcctccaccatcccctggaggccctgccccatgtcctgctaatcagtgctctcccactgattggctgattacttgcaagccccagaggagtcacctgacctgtctaggccataggtacatctagaagagaacaatctcaactcctgggtcttcaggagtggagtagatttcaggtggagcaaggcagacatagagccaggaattgcagccacgagagagctggttc

SEQ ID NO: 314555 - DNA, 359 bp, Homo Sapiens
cggcctcccaactaaatttacttttaaaatgggatattcatcacctgagtattgtcaggcttgttactcttatctctgtttacagatcacttataagtcaaaggtattgtgtaagaacaaagtggtattttaaatgacgggctttcatccttagtgcagccttatataattgagcacagtgattctgtctttggtcatctgtaatccacacaggtggatggttttatagattgatgtgtaatttgtgggggttatagaaacgattatattcatatagcaaagtctatatgtattatttgtagttcagagctaggatgattcagtcttgtctagttccacaaatggggagggtgtctgct

SEQ ID NO: 314556 - DNA, 804 bp, Homo Sapiens
tgcccctttgcttgccagttctcccggccggggttgatttttattggcccccagtttaatgtggaccagctccttgggatgggacctccttgtggtactccatgaaagggcctgcagtccaatgatgacaggggccctgactcggcaggtgactcttgctgcatttggtcatcttcttgcccaagtcattggggtagattattttgatgctggctagctgcttgggggtccctgacacagggctgcccaccccacttgatggacttagagagcctgtattctcattattgttgaccatctggttagcagggcaggtggtagaggttccgatggcagtggtggtggtgccagcggcaatggcttgggtttgggcctgattgtccttgtcgtaggttgccacagtgcagcagctggcactgctgcatccacaattcagcgagcgggcagagccgctggatgagggcatatacgtcagattcgcagccttgagggacacaacggtggtggcgatgacaggagggtggctgttactgcctgggttggcagagccaaggtaactagagtctaaacaaaggttgagatcctgaggtcggacgggcctagatagtgccactactaccctgtcgtctaaaggagacggaggcatgaggaggctgaaaactggcaattcaagaagaactcaagacagtttcataaataagtgtattcctccaccatctggcgctcctcttcagctatggactcgcacattcagcccccattcactcggcttcattgatctccagcagcaacatagttctttct

SEQ ID NO: 314557 - DNA, 1228 bp, Homo Sapiens
tcttttcctacaagggaaagtcaactcagcaagaattaggaaataaatcacaataagaaaagggatcactgttactggggatagggggctaggaggagtaggtaaaaatgtccatttctcaactattcggcccttgcgtacctggtgaacaagttgcctaggaactgggatgattaagatctgcacatgctgttctaatggtcatgtccttggttgtcattatttcaaagctatgctgtgtatttcccgtcacctcacctctttaaccttgtactgttctagaaagttttactctgatatttctcatggtactttcgcagggtatcccttgtagttgctgaaactgacagaggagtctgggacagttacatacgactctttgagagctaaagctgactgtagcacgctacatctgggtgcgctgctcactacagatggtgtctgacatcacgttctctggtggcattgcagcccttcttttctcaaaggcaagtcacccctgtccaggccaccaagcccagtcttgtaatcttagctgacaggaaggaatgaatgatgaaaacaattggcttggggcaggaatgaaggtccagttgaatctctccatcgcctccaaaatctaaatacagcatcctgattccatcatctgaagacagagcttttcataaggagactgtatgatggtcttgggaaaggcaccctcctgtggttcagtggtaatagaaaatccattctcataatgtatggtcaaacggcactcctggtttttgtaggtgcaagcagtgctgatttcagcaatgagttcagcagaattgtggcaaccctgtactatgctccttgtccagtgggagaggtccctgctggtctctgctctgaagagatgtgtttcaatcccttgcctggtaccagttcgcgttgcaaaggacagatccacaccagcctggggtgatccctttcctggacctgaatggaccagcctggtggcaagaagagggtatgtgtgaactgggctgaaccaggcttccttcctccgtggcatgctgtcatagattaaaaggtctttctcagtcagcacaaccagggctggtttccactgtttcttgctctcccctggcaccttttctgcaagccagccaagatgcctaatctctcggctcccagcaatgcctgttttccccagctgctctctgacctcagcaatcactcgggtcagcaggtcattaacgtt

SEQ ID NO: 314558 - DNA, 665 bp, Homo Sapiens
tctttctcttctttctcttgtaacaaaaaaatattttaatgatatttctgtaggacaaaataattaaactgaggcaggcagaggaaagtaagagaatccacataaccacagcttacatcactttaaatctcgacagccccaagtcatgagaatgaacccagtcccagcagcccaggcttctctgttcctcctcctgcaggcacagtttgagtagagacatctcttgagctctttcccactgacgtgtcattcacaggcattcaaactgtgatgtttgaaactgtctacctccgcagatccagggacagtccctccagtccaaaggctcactgcaattggccctcagcccccttcaaactggacttctggtttcttctttccttctgcccctgaattctgaagagcttcttcctgaggtccttctgccgcttcagcttctcctcctcctccttctgcttggctctgaagtgctctttattgtgcaggtgccgctgctccttggccttcttcatcttctgactatgcaccgtactcagagcatccagcagtgcaaggatctttctttcatgaggctcgcgtatgacggccggtctccgcctgtcctttggcacccttgcctgcctttgcttgggtcttgggcttgttcttaaactgcagggccttct

SEQ ID NO: 314559 - DNA, 682 bp, Homo Sapiens
  misc_feature (601)..(601): n is a, c, g, or t
aacttcagacagattcagccgaatactcaagcacatcttgacccagaggagctactacccactctacccgccccaagaagacatggccattgactatgagtcgttctatgtttacgcacagctgcctgtcaccccagatgtcctcatcatcccgtcagagctgaggtacttcgtgaaggtaggtttgaactctgctttttcccagaaacaccagaacccagtctttgactttcccttctagaccacccggcactcacccctcatgggtcagctgatggggatggggcctctagcaccctgccctgtggccttggttctttggggaggtggtgggaccagaaaacaaacaactctgtcagtaaaatgcttgagtaaacagtgtcctctcctcccttcccaagagaacgagagcccagatgactaggaaggccctcaaatgagggctttcaccaggccacatagaggtgacctggggaagatttcatatgtacacttgcctgtcctctgcctcccttctgatatgacctccaagtgggctcagctgtgaataccttgaagaagctattgggtcatattgagctctgtcaccctttagccctgnctgccttgagttaggtccctacaaggaatctgcctagaccagtccccctctggccaacaagagttagttcaatctcgaggt

SEQ ID NO: 314560 - DNA, 647 bp, Homo Sapiens
  misc_feature (87)..(87): n is a, c, g, or t
  misc_feature (227)..(227): n is a, c, g, or t
  misc_feature (275)..(275): n is a, c, g, or t
tagaaagtcacactcagaatttaatttctccaaaagttgtttctgtgtttgattcatgtagaaaatcacaaagccttctcgcctttnctgagtgggcgggatccacagctgggcttacttctggacacggagcatggactggagaagcaagagcttccttccaggagaggcaccactcagaggcaggcccggctgcacaagtcctccctgctgggcctggtcactgncagctgcccctccctggctggctcttctctccttttcccacccaactngttcaccttgtcacagggctatgtcttggctcttggctaagactttaagggcccacacagcagagaacagcagaggacagaagcctcagatcctgacgacctgcacagcaatgcatgggctctgcctctctgccctgtccgctgccggcctcctaaggtagagtcgggcgaaggtgcctcccacctgccctttggtaaggcgcccagggttcacacagacacagccgaggacatccttcacgaagtacctcagctctgacgggatgatgaggacatctggggtgacaggcagctgtgcgtaaacatagaacgactcatagtcaatggccatgtcttcttggggcgggtagagtgggtagtagctcctctgcc

SEQ ID NO: 314561 - DNA, 1889 bp, Homo Sapiens
  misc_feature (43)..(43): n is a, c, g, or t
gcccattacaatcaggacaatgagacccccagtgctttatcanaaatggcattcaatagattatagcattgttagatctgcatctcaatcattcttaccacaatgaattatcacagagtccaataatatgtatgactattcatcaacacccttggaacatataattatgtgcaaataatctcacacgtgcatgtaatacacacataaacttcgtgaaaaggcgtgtgtacaatatatactatggtatttcttcaattctatttaatgctgcctaaggactgctaagtagaacatttttgcataacatagataagcaagagcctatgcaaatacattttcttgtagtgtaatgtaattgctaatatgaggtatactctgtaagcaattaatacaaatataaataggtataagccaccactaactcagtctggtgaaaagcttctcagctaaagtagtttggagataagggttaagggaaatgagagggggtgggacagggcaggtttccagtgggaaaattatttatgtgccttcccattgtgatcatcctgtatgtaccagtccgttgttgcagaacggtaaatcctttccaagtatgttatactttatgtagcacagtaaaaattatttaagtattactaatgcttcatttgcatttgtatttagatatacacataattatatatgcatatcaaaaactataaacagaattttaaaacacttttatctcaattggggaaagttaacaggtaagacaaaactacgtactacagaattttttaggatatctaactcaaggtaaaaccaatagaaaacatttctacctctttagtaaatggcttgtgtgaaacctcaagctctccctcattttttttacagatgggtttgtctgatgaggattgtgatccaatgattgtttagcagcaattttaccaaactgtaaattcttttattaacaggcattataaacagataatactaatcttatttaaaaaccatgagtgccacactggtgaatatacagcttatgaataacttaaaaagtatttcccattttaaaaggcaaacccagcatacaaaaacctatactaaacaaagaagctataatatggatacatgattgatgtgtctaaaatgatatatacagtacataatgttaattatatgatcagtacatttttcctatgattcccttcatgcttcactttccccagaaactgaattctgtacttcctcttctaaaaattggtacaatcaggttatccttggacatcaaattgtatttcatcacaaacttagtaaaccgatgacacaaaaatgtttcattttcatattcatcaaatatctgccgatgatgaaaataagcatgtgaaaatattctgtaaatcctacggcatactgatcctagtttcgctacagatgattcctttatgctaaccctgctgggaaaatatttattgctattcagaagacatgcagcaccatcaagtgtgtgtctagtatagtctatagcaggacactcttttggagttttatgagctgcacaaagaaaaatccattgttcagttgctgtcatttgagtgcaagtatctggatggcattcactctgaagtttgacagcaagtccatttagctcaaggcagaactgccttaaatgttcatacttccacacaccttcatcttggccttcaggtggttcaagaattttgtcaatattggagcaatctgctcttatgttctgttgaatatactgttgaacagctagtgtactgtccatttcatcaaaggattcatcaggccaattatagaaatcctgcgccttggtgcccggcctgttccgcctcagcactgccgtcccctccgccatgaccatagtgccagcgtctccc

SEQ ID NO: 314562 - DNA, 865 bp, Homo Sapiens
ttatttttcaaggtcccttctgtaaatgctgtgctttcttccctgtgagagccaactttagagtgtctgctacctcttcattaccaatcagaattagatgatgtttaactgttagactgaagcgtgacgctttcatcagtagcttcaagaaagtctaaattgttaatttatggaattggacacagtattcagtttacccgtacatgctcctcccgcccctcctgttggcacccttgcatcgcccaggcctgattcctcctgggggtagttcacccccacggggtcatagttcagcggcgaatgccaggcagctgttttctggctgagcaaacagcacctttctcattgagcttcctctactgacctctgtcccccttgggatttcatcttctgaccgaaccctgatgttcagtggcagagacagcccatagccagaactgtgggtagaccagggttggggtgtgcggtttgggacagcccaaaccccagccgctgtgtcaaggcctaggacgccgtgctgccatcctgaggagtgcggaattaaagagatttgactccctttagtattgggggcagtccgttccccagacactgtggcctctgaagtggaaactgaaagctgcatacctgggaaagaactttctagcaataggcaatggccttcaatggaagaaggaaggctggaagtgtgcccagtacttggatgttcatctgtccacaacagctttttggttttttaaaaaagctaaaatggaaatggattttatcataaaggatgacatcgttttcttctacaattaatacatgttcattgtataaaacccaaaaagcagctaaaaaataaagcgggaaaggaactactggt

SEQ ID NO: 314563 - DNA, 1200 bp, Homo Sapiens
  misc_feature (81)..(89): n is a, c, g, or t
  misc_feature (118)..(128): n is a, c, g, or t
  misc_feature (204)..(251): n is a, c, g, or t
  misc_feature (286)..(305): n is a, c, g, or t
  misc_feature (349)..(361): n is a, c, g, or t
  misc_feature (446)..(455): n is a, c, g, or t
  misc_feature (490)..(504): n is a, c, g, or t
  misc_feature (512)..(662): n is a, c, g, or t
ccccgcctcttttttctcccccgggggggaataattatttttcagcccacgccgccccaacggtggtttttaccccccgcnnnnnnnnnattttaggttcccccaccgcgcggggttnnnnnnnnnnncttcccagcggtggggaaaggatttttataaagaagaagctcccccccacttttctttataaaaaaagggggcccnnnnnnnnnnnnnnnnnnnnnnnnnnnnnnnnnnnnnnnnnnnnnnnnccccccccggtgtgattagccctccaagaaaaggnnnnnnnnnnnnnnnnnnnntgtggggtttttttaacaaaaccgttttggtttccccgcccggnnnnnnnnnnnnngtggggggggaaaacccacgcctcttttttcccgggcccggtttttttgaggaaaaaaaagttaaggccctttttccccttcccnnnnnnnnnncccccccccaaagagaatgtttaaaaaattttttnnnnnnnnnnnnnnncccacaannnnnnnnnnnnnnnnnnnnnnnnnnnnnnnnnnnnnnnnnnnnnnnnnnnnnnnnnnnnnnnnnnnnnnnnnnnnnnnnnnnnnnnnnnnnnnnnnnnnnnnnnnnnnnnnnnnnnnnnnnnnnnnnnnnnnnnnnnnnnnnnnnnnnnnggcagtgaggactttattggggagggtgactttggcttccagataagagggaaggtggggacctagtaacaataaccatttattccaaggaggccctggccctgaacccggggttcccacaggaatcagggaggcacctgagtcccccaggaccagggcatcccaaggcatcatggcagctgcgttgttcaaaaggaagtttcattgagcttcatcttgggaggtgtgaggggagtgccgagaccgctggagggccacggggctggtgtgggtggccgtcggaggtctggcccactccgcaccagttcctggcagcgttccacaaagctgcccccaccgcggcgccgggcctcagcctgcggggggcttgggctcccacggtggccagacaaggaggtgttgctggaggctgagtggaggctggtgagggagatgcggggtgaggggctggggagacagccccatgagggagctgaaggagccggcggggccagctcacagtgttccagctgttccatcagctcttgctccgtcaggc

SEQ ID NO: 314564 - DNA, 763 bp, Homo Sapiens
  misc_feature (67)..(67): n is a, c, g, or t
cttgcgctccactttgatgcgctcttggtcttccatgttgatgggggacaccggcggcgtggcgtcnccgtctgtgcgcctccggcacggtctgcggttcctccttgaaggtggaggcgccgcggcccaaggccagctgcgccgggtggccaccggcgaaggccggcgcgtgtgggaggtagctgatggtggtcgtcgggtacgagctcccggtcccggcggcagcccgggcgcctcccgaggacgcagaggctggggagtagctgctgaggttggtgtaaacgggaggtggctccggtccggcgtagacgcccccgggcccagccgggggccccccggtagcgcccagggacacgttggggggtgtcacgtggttcatcttgtgcagatcgtccagggctttgacaaagccgtcggcgaagccctcgtgctcctcggtgacgccgccccctgcgccccctgcacctccaccgctgccacccccgcgggggtaaaagtactgtcccgggggtgtaggcgtcgtcgtgatcacgccgttgctgttggggacaatcaggcgttccagctccgaagaggcgagcttgagagacgcgccggtgtccgagccctgaccagaaaagtagctgccgccaccgccgccctctgggccgggtccgcgagccccaggcgctttgagactccggtaggggtcggccaggttgaccgccaggctcggtttcaggagtttgtagtcgtgtagagagaggccaccaggggcccggcc

SEQ ID NO: 314565 - DNA, 862 bp, Homo Sapiens
ggggcacccagggggggaccgcacaggcaaccacacctcgcgtgccaagatgagcgccgaactggccaaggtcattaatgatggcctcttctactatgagcaggacctgtgggctgaaaagtttgaacctgagtattcccagatcaagcaagaagtcgagaacttcaaaaaggtcaatatgatcagccgggagcagtttgacacactgacccctgagccccctgtggatcccaaccagggagttcctcctgggccacctcggttccagcaagttcctacggatgccctggccaacaagttgtttggtgctcctgagccctccaccatcgcccgctctctaccaaccactgtcccagagtcaccaaactaccgcaacaccaggacccctcgcactccccggacaccacagctcaaagactcaagccagacatcacggttttacccagtggtgaaagaaggacggacactggatgccaagatgcctcgagaaagacaagacacagttcaaacccacccttggagagccatgtgggctgggtgatggattcccgtgagcacaggccccgtactgcttccatcaggtacctggggcagtgggggaagagtgatcaggctgcctatgggatgggtgggcgagccatgaaattgactggaccaagaagattggtctgaaaattaaagggaccctcatctaagaggttttcaaaaaaccagtggtgtggaaagctcagcccaggacctgggaatgacgggtaggcttttttcctaaagaagtggtgtggcagtcacgtgagaccagattttcatacatgcagagagaaaatctctgaattggtttccaagcctggctatctactttctg

SEQ ID NO: 314566 - DNA, 354 bp, Homo Sapiens
  misc_feature (218)..(227): n is a, c, g, or t
ttgattacttatggaagattcctcatttttatttgccctttatgcatttaatccacatgataggacattaaaaattaatataaagaaaaatcgtgctcatactgtacatctgtttctgtgcttggaactacttgttaatagtttttatcgaagctgtcagcaataagggacataaaactgctgtattatacattgtggaattgaataaacagcctaannnnnnnnnnctagtatagggtacttaagcatttccacttttggaaggtgtattagtattttatattgcatttcatttaactgtataatgtaatttggagcctatttagtaatagaatttgtcctatgtagtgctac

SEQ ID NO: 314567 - DNA, 257 bp, Homo Sapiens
aaaacacttttccatcaacgaatatagactcttctctcatttatcgatgatcctctttttccattttttaagtacttatgtggaagctagtctcccaaaacacaatctttagagagaaaagacatgaacgaactccaaaatatccatttaatcaatcatgtttttggctttggataaagaactttgaaccagtttttttctcaggagctgtcaaatggacacttaattatgacatgagaatgaagaaattattttgg

SEQ ID NO: 314568 - DNA, 1213 bp, Homo Sapiens
  misc_feature (173)..(173): n is a, c, g, or t
aatgggggagaatcccaagcccttagttcatgacccaggttttcctttgaaaccagctatggcccatgttccccttccctaatggggcccgcgcgcccaaacggaatggtcttagaaagctttttcgagggccgagggcggccggacatggtttttcgtttttgcagaaggtnttatgatcgtttctagccacacaacagtgttatttcaagaaaacaaaacaagtcagagaaagaaaaattacctattacctattggcacatttctgttacgtcaagtctgggcttaagccctgttggtcctgttaagctctttttgttctgtatcaagcaggagtgtcttgagttctttctaatccccatacatcatgtctttgaaatgacaaaagtcccatcctttgttgcccgtgcagtaatctgcttgtggaactctttaagaacatccagctggccaggcctgatgtggatgtatgaccggatcttggcgatggctcttacagcctcctctggactccatttgtgcacctgaatcaggtatgctgccaccatagtggcactcctggagcgcccagccttacaatgcacgtaaacacactggcccagcgactggtacttgagagcaaattggactcccttctggaggttgtccaaggtggggatcccagtcatgtctactgtgctgagccgcagctgctcgactcctagtctcttccactcctgtgaagagttgcacaggaacctcgtctcgtactcctcgttcatggtgatcaccccgcgcacgttctcgtcctgtaccagctgccgaggcaaagaggtggctcagcaaagacggtggagaccccagcggcccgacagggacggagcggcggggacggggcaggggcccgggctccccggcccggctcacctggcgcgtcaagctccgcaacggcagcgcgcccagcagcacggtggggtcgatgcggtggtaccagtcccggtgcgcccgacccggcaccttcccgcggaacagggtgtagagcagcgtcgggtagaagagcacccgcgccaggccggcctccagcagcgcggtggccgccatcccggcccggcgcagcggcgacccgtcggcccccgcgctcgcggtccggacccgcgagaagagtaggcgggtgccggggcggggctgccagctgcactaggcctctcgcgggttcgcaccgggtgacggcccc

SEQ ID NO: 314569 - DNA, 855 bp, Homo Sapiens
ttttttagccccaccccaaccaaggggttgttttcagagaaaacccaaccccagttcccggggaagggaaaaatttaccttttttccttatgggccccatttcttgttaacgtcaagtttgggggcttaaagccccggtgggtcttgttaaagttcttttggttcggtatcaagcaggagggttctgaatttctttttattcccccatacatcatgtttttggaaagacaaaaggtcccatcctttgttgcccgtgcagtaatctgcttggggactctttaagaacatccagctggccaggcctgatgtggatgtatgaccgggatcttggcgatggctcttacagcctcctctggactccatttgtgcacctgaatcaggtatgctgccaccatagtggcactcctggagcgcccagccttacaatgcacgtaaacacactggcccagcgactggtacttgagagcaaattggactcccttctggaggttgtccaaggtggggatcccagtcatgtctactgtgctgagccgcagctgctcgactcctagtctcttccactcctgtgaagagttgcacaggaacctcgtctcgtactcctcgttcatggtgatcaccccgcgcacgttctcgtcctgtaccagctggcgcgtcaagctccgcaacggcagcgcgcccagcagcacggtggggtcgatgcggtggtaccagtcccggtgcgcccgacccggcaccttcccgcggaacagggtgtagagcagcgtcgggtagaagagcacccgcgccaggccggcctccagcagcgcggtggccgccatcccggcccggcgcagcggcgacccgtcggcccccccc

SEQ ID NO: 314570 - DNA, 548 bp, Homo Sapiens
tggcattcctccacctgactttttttcaagtgagttgttccgatctgacctcagagaaggccaaactgggtgcatggtcatgtaggtggcctctgatttttcacttggttcttcttcctcgatcacctcccgtacaattattggggagtaaatgtgtttctagagggggaaaatggtacaaaaattcctaaaaattagatgaatcttatacaccagagaaaaggccacccactcctatttgctaggcatcgaccacccaaactgctggttcagagggttactgagacctagagaattctcaacaatgataattcagtcttcagtcttcttgaaaattaactgtcaaagaacacagtcttaagaaccaaactctttgcttcaaaagccaaacatctttgtttagatggatgtttaggtagcagcaggggttccttatcttgctaaattccttgtattctggggttatttccttctaattacagtaaaggcagaatggcattaatcagcagtgaattgtcatcatctccctcagaggatttatgtggcag

SEQ ID NO: 314571 - DNA, 545 bp, Homo Sapiens
  misc_feature (26)..(26): n is a, c, g, or t
  misc_feature (46)..(46): n is a, c, g, or t
  misc_feature (64)..(64): n is a, c, g, or t
  misc_feature (141)..(141): n is a, c, g, or t
ggccccggaacttgattgaatgtttnccgctgccggtttggaaccntcctaaattttttaacangggcccccaccattttggtttgtactgggcctggtaaattggttgtggctttacttgaatctggggagtagtgaaanccaggttgagaaaagagcttcctacattgtgttcccacttatatgaggctgatggtagaatccttttgatcccaaagattattattttggggctttttctttaggataattaatcctttatttgggactctagcagaggccttattcttctctgggaagaagttttgcataacagatgcatactacttatactaacaattaccaatgtattcttaatttggtttcagctatttggatggctcttttgcaaagtacatcctgttgctattgtgtttgctatattagcagcaatgtcaatacaaggttcagcaaatctgcaaacccagtggaatattgtaggggagttcagcaatttgccccaagaagaacttatagaatggatcaaatatagtactaaaccaggt

SEQ ID NO: 314572 - DNA, 656 bp, Homo Sapiens
gtttcccaaaaatgaactccttggagggacaaggtttatttaacaggttaaaaattaaattatacactcaaatttacttgtttggataatcacctacagcaaaatcacatttctgtaaaaatcaccttaaataaaggtctccaccacatggcccattttttccaaacgacagcaaagaatttggtaaaacgaaaggctgcacatccctttggagtttgggctgacagcatttcacagaaaatggttgggaaaatgggttgaagcaagctcctaaatggcccttcttgaggctctgggagaggcactgtgccggcacctggccactttcctcattacacacttgggaccaatccactcagatggtggcctcgcttccactcagcatggctgtgcttggacttggaggaatggggcagatgctccaggaggtcctctgtaaccagtcccctacagggttacgtttctctgttctcagggacagagaaatgtatatagtagaagtcgtatctttgatgcctactttttacattgaagaaagtggcagagagctcaaccgcacttccagcccggttgtggcctgcgcatgagcagaggccaggatttctcctctccaggatcccactgccagagaccaactgggatccgcagttcagctt

SEQ ID NO: 314573 - DNA, 1234 bp, Homo Sapiens
  misc_feature (1182)..(1182): n is a, c, g, or t
  misc_feature (1191)..(1191): n is a, c, g, or t
gaaggtcatgagatgagttccttgtaggtaccagcttctggctcaagagttgaaggtgccgtcgcagggtcaggcctgccctgtcccgaagtgatctcctggaagacaagtgccttctccctccatggatctgtgatcttcccagctctgcatcaacacagcagcctgcagataacacttggggggacctcagcctctattcgcaactcataatccgtagactacaagatgaaatctcaataaattatttttgagtttattaaagattgacattttaagtacaacttttaaggactaattactgtgatggacacagaaatgtagctgtgttctgggaactgaatcttacatggtattcttagttgctggctgggtaatttgttggtatattatctggttagtggttaatgcttcctttaaaaataattgagtcatccattcactctttttcagttttatctgtcaatagtagctacatttttaatggggagcaccttttatcccaaagtgctttattaaattgagtggactgatatatatcacacccaggtatcactgtgctgtcctttgctgtcagatttagaaatgtttttaagagctatgtgaaaacagacaatattagtttaggtcgggaactgagatattgtaatcaaatagttaacatcaggaagttaatttggctggcaaaattctagggaaacttggccagaaaactggtgttgaaggcttttgctcatataaacaagtgccattgagtttcaaatgaccagcaaatatatttagaacccttcctgttttatgtctgtacctcgtccacccctcaggtaatacctgcctctcacaggtacagctgtttcttggaaatcctccaaccaaatagcagttttcctaacttgattagcttgagctgacagactgttagaatacagttctctggccacagctgatgagggctttctgtactgcacacagattgtgtactgcaccccagtccaggtgactggtacccactcgagttgtgccgtgcacaacctgtccagtatatgcatgtggtggccctactgactgggtaatggttagaggcatttatggatttttagcttttaaggaaaaaccatgaccttttaacaaattttttatggggttatatggcctaaacccttatgccacattgtggttaantaattattnaaaaatgggtctgtttcataatttggtagggtgtccttttgtg

SEQ ID NO: 314574 - DNA, 603 bp, Homo Sapiens
tgcaggttcagtacgaatacagaccgtggcggggcctcacgatccttctgaccttttgggttttaagcaggaggtgtcagcgctttttgatccttcgatgtcggctcttcctatcattgtgaagcataattcaccaagcgttggattgttcacccactaatagggaacgtgagctgggtttagaccgtcgtgagacaggttagttttaccctactgatgatgtgttgatgccatggtaatcctgcttagtacgagaggaaccgcaggttcagacatttggtgtatgtgcttggctgaggagccaatggggcgaagctaccatctgtgggattatgactgatcgcctgtaagttagattcctgcccaaccggaacgatacggcaaggccacggagactcgcgagctctggaatagcctgacccccgggtgtccctggcgacggttcgaccccgatacaagcggcccgcgtctcctggatggcgcgcatcaagctgcacgtcggtgtccggtctcagcttatagcgggattatttgagctatatcggacgattgttgttgtggagttcccttttaatgtatgccctggaactttttgcccgccct

SEQ ID NO: 314575 - DNA, 663 bp, Homo Sapiens
tatgaagcaccgccaggtcctttgagttttaagctgtggctcgtagtgttctggcgagcagttttgttgatttaactgttgaggtttagggctaagcatagtggggtatctaatcccagtttgggtcttagctattgtgtgttcagatatgttaaagccactttcgtagtctattttgtgtcaactggagttttttacaactcaggtgagttttagctttattggggagggggtgatctaaaacactctttacgccggcttctattgacttgggttaatcgtgtgaccgcggtggctgtcacgaaattgaccaaccctgtggttagtatagcttagttaaactttcgtttattgctaaaggttaatcactgctgtttcccgtgggggtgtggctaggctaagcgttttgagctgcattgctgcgtgcttgatgcttgtcccttttgatcgtggtgatttagagggtgaactcactggaatggggatgcttgcatgtgtaatcttactaagagctaatagggctagctcgtgccgcgcgggtttctgcactgtgcttctctgagccccgctgcctctgtgtgtttcggtcctgcttctctcacggagtatgcgtttcccagatagtgccccttgagtcattgattgtgggtcggctgccctctg

SEQ ID NO: 314576 - DNA, 990 bp, Homo Sapiens
  misc_feature (27)..(27): n is a, c, g, or t
  misc_feature (867)..(939): n is a, c, g, or t
  misc_feature (954)..(954): n is a, c, g, or t
ctgcatcatctttgctttacatcaagnagggtgctggttacctaatgcccctcctccagaaattattgatgtgcaaaatgcaatttccctatctgctgttagtctggggtctcatcccctcatattccttttgtcttacagcagggggtacttgggactgttaatgcgcataattgcaattatggtcttttccattaaattaagatcccaactgctcacaccctcttagcattacagtagagggtgctaatcacaaggacatttcttttgtactgttaatgtgctacttgcatttgtccctcttcctgtgcactaaagaccccactcacttccctagtgttcagcagtggatgacctctagtcaagacctttgcactaggatagttaatgtgaaccatggcaactgatcacaacaatgtctttcagatcagatccattttatcctccttgttttacagcaagggatattaattacctatgttacctttccctgggactatgaatgtgcaaaattccaatgttcatggtctctccctttaaacctatattctaccccttttacattatagaaagggatgctggaaaccccagagtccttctcttgggactcttaatgtgtatttcctaattatccatgactcttaatgtgcatattttcaattgcctaattgatttcaattgtctaagacatttcaaatgtctaattgattagaactgagtcttttatatcaagctaatatctagcttttatatcaagctaatatcttgacttctcagcatcatagaagggggtactgatttcctaaagtctttcttgaatttctattatgcaaaattgccctgaggccgggtgtggtggctcacacnnnnnnnnnnnnnnnnnnnnnnnnnnnnnnnnnnnnnnnnnnnnnnnnnnnnnnnnnnnnnnnnnnnnnnnnntcgtgcgaatctctngcagctcgtgggatcttcagtttacagggcatcact

SEQ ID NO: 314577 - DNA, 566 bp, Homo Sapiens
atattcttgccctcagccctgatggccactggcaaatacttttattttccaattgataagagagcctccttcatcttcttggtcatagttgggatgaggtgcatgtggtcatccacacacttggtcacacaactgtccagctgctgcttcacctgaagctccttactcccagcatctattgaatctttggctttgtcgttgcaatgcatggtgcaccgggccaggcggtcctggaacttctccagctcactggtgaccaaagcctgggcttgagccagaggcacatggcagcgctcgatgcactggtgcacctgcttcatggaggcctggctgtcctcacaacagctggcgctgcaccggaacatgagaccctggccaacggggaggccggaagtcctcgcctttctggtctttcacgttggcagcgcctctgctgggcctcgggccgctcacctgcatcttccggatgttctctctttccagactcttcaccatggactccaccgcctcctgcacccggagctgctgcagctcagccatggcgaccccgcgctgccccccttaat

SEQ ID NO: 314578 - DNA, 1074 bp, Homo Sapiens
  misc_feature (20)..(20): n is a, c, g, or t
  misc_feature (34)..(34): n is a, c, g, or t
  misc_feature (71)..(71): n is a, c, g, or t
  misc_feature (112)..(112): n is a, c, g, or t
  misc_feature (281)..(281): n is a, c, g, or t
  misc_feature (284)..(284): n is a, c, g, or t
aggtccaaaattgggaagangtgcaagtggtcancccaaaacattggttcaacaacaaatgtcccaactgnctgcttcaacctgaaagctcccttaactccccagcatctantgaaatctttggctttgtcgttgcaaatgcaatggtgcaccgggccaggcggtccctggaacttctcccagctcactggtgaccaaagcctgggcttgaaccagaggcacatggcagcgctcgatgcactggtgcacctgcttcatggaggcctggctgtcctcaacanaantggcgctgcaccggaacatgaggccctggggaggaaagggcagagaggttaggtaggaaagtctctggggacagagatgactatggagcactacaggagttagaaggccacgtggatatttgcacctctctctccactttctgctttcaccttccctgagaatagacaccaggaccttaaaaccaccactggggaaaattatcctcaatgtctagtgtagtgtttcatggtgtccttgctgctagctcatcggcacctgttgcaccgatggttgggtgaacagaggttcgcccgagtgggtgagggtagggtggtctgacgaagccaaattctgaaaaccaggagcctcttccatggggttcagaggtcagcaacctagcaatacaaattccaccagagggcagccgacccactaatcaatgactcaaggggcactatctgggaaacgcatactccgtgagagaagcaggaccgaaacacacagaggcattgcggggctcagagaagaacagtgtagaaacccgcgctgtgtgaagcgaggttgggcgcaagagaagcaggcatgacctggccaacggggaggccggaagtcctcgcctttctggtctttcacgttggcagcgcctctgctgggcctcgggccgctcacctgcatcttccggatgttctctctttccagactcttcaccatggactccaccgcctcctgcacccggagctgctgcagctcagccatggcgaccccgcgctgccccgcggcgctccgcgccggcgcccatatggaatcccc

SEQ ID NO: 314579 - DNA, 1802 bp, Homo Sapiens
  misc_feature (559)..(559): n is a, c, g, or t
ggggagaaaattaaaccttatttatttttaaagtcaaaccactaggaaaatatatcacagcctggaaacagcaaacggacaggctatattataatttcaagtaataagttggtgaaaattcaacgaagttgctatcaaaacaataaggtgccatgctggggcaggaacactgccagctgcacaagccccaggcaaaaatggtatttggtaatgggggctgtctctcctttgctctaagggagtcagctcatcctagcccaagttgcttactttttctcccttgaatttcctgttgccaggggtttgtctcaattgggctctgttaattcagggggctaagtaggcaatgctaggtgtaggctttcattccatatgttctaataaaaccaggttttcccaaatccagtacttcatttactctgttgtaatcaagtagccaactgctcctcttttactgttcattcctagatactagtatatatcacaatcaaaacccccttctcttcaaggggaaagtgttactgcaagattgtcctgtcattttgttacacacagcctncaggggccatcagccagtaattctgcttcccataattagtgtgtcatcacctctcatgtttctgcacagtctccaggctgaaagatgcagcatgtaataattttaagaaatgtacatccacatcttgatgaccagaaatggggatccacaaggaacatttcaaagttcttatccaaactagtctacctcccagttccacatcttaaaatcaacttgtatgcccttgtataaattaccccaaatcaagaaaacaaagacccagaaaactttctttcccttctaagttagtgacctcattgattttgtttcacagcttatggaagatggtggggtgacacttttggtaaacaggatgttggcaacaaagagaaaatatctctcctcagactccaccaactctaacctgccagcctgttagtacctgtgtagtaagaagagtctggtaccttggagggctctggcttgttacaggggagagccttactgccaggacaagcactggccacaggaaataataagctctaaaactctcctgtaatatctctgactcgatttagcaccacttttttccatttcattttttagggactgaaacataaaataaccagtgtccagaggcaagtgacatatgccttacgcttgtggccatccttcatttcttcattcgtaaactttgcttaaaagactaaaattcccaattccttataaaaaatatattcttgccctcagccctgatggccactggcaaatacttttattttccaattgataagagagcctccttcatcttcttggtcatagttgggatgaggtgcatgtggtcatccacacacttggtcacacaactgtccagctgctgcttcacctgaagctccttactcccagcatctattgaatctttggctttgtcgttgcaatgcatggtgcaccgggccaggcggtcctggaacttctccagctcactggtgaccaaagcctgggcttgagccagaggcacatggcagcgctcgatgcactggtgcacctgcttcatggaggcctggctgtcctcacaacagctggcgctgcaccggaacatgagaccctgcatcttccggatgttctctctttccagactcttcaccatggactccaccgcctcctgcacccggagctgctgcagctcagccatggcgaccccgcgctgccccgcggcgctccgcgccggcgcccatatggaatcggcgtacgggcccgccccccc

SEQ ID NO: 314580 - DNA, 1593 bp, Homo Sapiens
  misc_feature (8)..(8): n is a, c, g, or t
  misc_feature (54)..(55): n is a, c, g, or t
  misc_feature (71)..(71): n is a, c, g, or t
  misc_feature (89)..(89): n is a, c, g, or t
  misc_feature (104)..(104): n is a, c, g, or t
  misc_feature (156)..(156): n is a, c, g, or t
  misc_feature (260)..(260): n is a, c, g, or t
  misc_feature (317)..(317): n is a, c, g, or t
  misc_feature (556)..(556): n is a, c, g, or t
aacacagnatagatcagtttaaaagaaatcatggtacttcttagagcaatttgnnaaaggggaaaaaagtnttagggtgactccttggnaataaatatcaagtnaccataaaaatattcagccatttttgagttattgggggagttcagggatggncccacgcagagcatcagagttcctctttgaaataacccagctttgccaatgacatctcttttctcaactgcataacctcccaaaacatctgatcaacatcctgntgtttcacgagtccctgctgaatgtatcgaatgtatgtaaaaaagttacatacagangtgattttggtcctccgcattcaactgcagaagctttcacaaacgggataggttgtaatcccactggttcaatgcttagagtattgttttccacagcctccagaacagctgaagccaatttttgagaatgttaaacatggaaagatatcttcctggtagattttgtctaagaaaggacacgtcctgtccattgtgggctcatccttccacaatcggaattcattatacaaggataagtncagcctctttgcagtcttttacaattggctgtatcacactgaggtcctgatgactgccactcatagcactgcttgtgcttttatttcttgtatgcccctttttaaaaggtgtctttccacctggcaaaggctcctgcgtaggtgatgttggagaactggacaatacaagtgtcttcaatgcagctacttcagcttgaagtacatcaatttttccttgtgcttcttttagctgtttttctgctgttgcctgcttgatatttgcttctctcaccattttatgagcttcctcaaatagactagctgtgagttcttccaattcctgtccaagttgatctcgcacttttgaaagcctctcacattcttcatcttttaacttcagttccctctgagcttttgcgagttcttcttttaatcgttcatagcccttttctctaacttccaaaacagatgggcttcgtaaacgagacagactatcagtactcaacccaaaaatatcatcactgccatcgcaagcctctgttatagtagcaccctgtaaaaactctctctctgcattatagttgtcctttcttgtagttaatttagttaatccagctgtgactccagaggtagagcaaggggctgggtctgtaacatgaaagctgatactagatatttccgcacaatttaaacgtctgggggatgaatacacgggttgtgtaggaagttcagaaacatctaatgcatttgcctggataggtacagaggataaagctgaagggtgtggccggtagatgacacttggtgaggtagtctgctcttgagttcctgattcatacacaccaagaaggtccggagaagtaggtgaagcaaggtttacttcatggaagccttccaagggattattagccatagcaaccggctcctcttcagatagctgcgacttccacccagcatcatcacttctggagccagtaagctcgcgcttcctgggcggtcggggcgagttgtcaacgctgggagggcagagccatgcaatcccacccgtgcagttcgtc

SEQ ID NO: 314581 - DNA, 599 bp, Homo Sapiens
caaaacccgtagtattcagccaccaacctcaagctaaaaagaaccaaactcttcccaagtgatgtttaatgccaatcacattttatctgtcttacaactcattagaggaaaacaattgcaaaaatgtacctatgtggggaaatcagtatctaaaaagtacaagatgggattatgttatggaatccaagaataggaaagcgaatgtgaatccagacagcatggtttagacggggacccaaataaccttcagcataacttctccaaacttcatcaactatttttagcttttttagtgggtctaaaatgcagttaaataccaaatttcagatgtgaaccaccttttcctgttaacttgattcttttctaaattcaacgaaaaaagaagccctaaaatcatttgcttcttgaggttatccttttattaatccacttgtatagcttcaactcatagacagctcctgaatcaatgactccagcctggctcaagcttcaactttgcatttcctattgtctggtgattatctttccacttggatggccctctggcatctcaaactctacaaaccaaactcctcctttcacttcatactccattcccc

SEQ ID NO: 314582 - DNA, 372 bp, Homo Sapiens
agggaatgttatggaatccaagaataggaaagcgaatgtgaatccagacagcatggagtagcttagtgggtctaaaatgcagttaaataccaaatttcagatgtgaaccaccttttcctgttaacttgattcttttctaaattcaacgaaaaaagaagccctaaaatcatttgcttcttgaggttatccttttattaatccacttgtatagcttcaactcatagacagctcctgaatcaatgactccagcctggctcaagcttcaactttgcatttcctattgtctggtgattatctttccacttggatggccctctggcatctcaaactctacaaaccaaactcctcctttcacttcatactccattcccc

SEQ ID NO: 314583 - DNA, 604 bp, Homo Sapiens
  misc_feature (541)..(541): n is a, c, g, or t
ctctcccctgctttccgctcgctgcttcccgctctgcccctgctggggcctggctgcaccctggcctgccttcctatactctcctgtttcccgctcatatctcttcctcatttttgcgttcaaataacacacagctaatgagcttctaaaaatcttttcaggttgttcacttgtattccttaatttgaagaatgaatatttaaattctctcaaaagtcagatattgaggatcttctctgggaaattggccactgtacctgcccacctttctgcctggttccctggaaggtcttattgtcatcttagacggacagatttcattctcagcaccatacagatttggcttcaaagccaggtgaattttgcctttgaggctctggtattaagtgttttaagaggtcccccaatatttacttatttattttttaaaccaagaaagacactggttccctgagagaaaggagcgcccagtatgacaggcccccaaccctgatccggccactgtgcacaagtcgctgagggtgtgagaacacctctgcangggctcccgcaccatgtggtttcatcggtctacacttcttcaagctgcaagggttgtgcgggg

SEQ ID NO: 314584 - DNA, 1147 bp, Homo Sapiens
tttttttcaataaaatagctctttgtttattcactttgatttggatcattggaaatattaaacaataaataaaacagagcgggggctgaggaaagcaggatcttgctgaagtcattcgaatgcatcccaaccagtgctcagctgcgtaacgacatggagagaggcaggggggaatagaaagcaaatttaaaaacaccaacacccaaacacacaagactgcacacaagaaaaagtgctcaagaaactttggctttgaagggaattcagtgaagggaagcgattgtgcaggaggaagggaagaaacccacgatccaccctaaggggcggggggctgggaggcgaggccctgagacaggctagggttaaagctgacgtcccacagctcaggacgtacaaccgatggcagttttgtactaggaagaagctgagtgaatgaggctgggtgatgggatcgcttgacgggctgggagggaggacaggaggtgtaaaggtggctcaccttcccctaggaaattcagtgctcttttggtaagaaaaaatagtcggtaatgccctgatcctgacaagctgtgagatgctgtcttgcctgtctctgccttttcttctaagttttcctccttttctttgcacaggtgtcaggttacagcccaggggtgcaggagctggtgttttcatgacaaacaaaaatggggaggttgactctatctcaaaactagctagcccagtccacagggcaggataatcctgatggcgtgtagccacatttgctgcaaaccagatgtctgcgatggatataatgatacccccggggctcttctcaggggtgaggacaggtgctggttcctgatggtgcatggctggtgtccagtcatctttagctggcagtggcccctcgaggctcgggcttccctgcacaaggtatttttgatccttgccagcggagggagagagagttatcttggtttcctttcacttgttttcgggctgcttcaaagcaaacatcccagttccaaatgttctttgtggtttgaaatctggcagaggccagggtcacatacaagtgggactggcctctagcaccaccttctggccacagcagagaatgggattccatcaaagcctctcaaccagccgtttccctaaagaa

SEQ ID NO: 314585 - DNA, 417 bp, Homo Sapiens
  misc_feature (307)..(307): n is a, c, g, or t
gggcagttaagatctgggtgattctttagggaaacggctggttgagaggctttgatggaatcccattctctgctgtggccagaaggtggtgctagaggccagtcccacttggatgtgaccctggcctctgccaggatttcaaaccacaaagaacatttggaactgggatgtttgctttgaagcagcccgaaaacaagtgaaaggaaaccaagataactctctctccctccgctggcaaggatcaaaaataccttgtgcagggaagcccgagcctcgaggggccactgcccaggcttaaagatgactnggacaccagccatgcaccatcagggaaccaggcacctgttccttcacccctgaggaaggaggccccgggggtttttcatttattattccattcggcaggacattttgggt

SEQ ID NO: 314586 - DNA, 470 bp, Homo Sapiens
ccctcctattttacattctattttctcatatccagcttttctctctaagcctaaccaaatgctttggtgaatgatgcttggaaaagctggagttttaaaaggcattcatccatttatgaactttcttccagcccaggatccctgcagagaaccagaggttacaaatctgccctcctttctcccctaaaaggtggctgaggggaggagaggtgcatgtagctccagctatagcaaatcagtgccctgactcactggggagacccagggggttgggatgttgctgacacctcatgggccacctcatcagcccatctttgtagcttcaggttcagctctgggtgctgcaggcagggacccctctgctccctgcctgaatgcagggccagtctccaaggaactctgtctgcagagtagaaagagctgtgggctgggaatcaggggcctgagggagccctgccactgcctgccag

SEQ ID NO: 314587 - DNA, 1401 bp, Homo Sapiens
tttcccctttaatttttttaaaaagtccacctttacaaaggtagcatttaaaaaataaatccatctcacagctcaaagaaatttctgacagtactgccctcatgctggtcagccattatttactgtgtgtctgccacatgccggcacatatatatagctcttcctctcctttcctgggagcaaacccttagcgtttcttccacgtaaactttctgcgggctccctcttggcctggcttcttccgttccctcacacgtggatcagtagtaagtagtccagcttgtctcatccactcgacctcgtcctcggtgacaaagctgcacaaggcttttgccattgccagtcgtattgctccagcctgcgccgacctcccgccccctgagactgtgcaggtcacgtcgtgctttcccagccggtcaacaaagtggaaagggaacatcagctgttctctgtcctgtgtgatcgggaggtaaagctgttaatcaattcccatttacttttattgttccctttccatgtttataaaccattgcttttgcttttgcagtctttcttttaccttcgcttttggtaaaggccattccttgctcatccatactgtacaggttcaatcagctgtttttttgattcaagagttacacttcttcgaaacctctgcacaaattcttcctcagcagcaccacactgcgatgtcaataacttttctagcagccgaatgaactgcatataatctagatctgacagtttttccactaacatttcttctagttcttccttaatcagccatctgctgccaatcacgtctctggttacagttttttctgggagcagacttttggcttgcaagtgactttgatgtttttctaaattgagtaacattccatatacatcatgcattaatgaatagtatgactgtttgccagtatagaagagatagtgaaatggacggccatcttctccccactggattgctctttgtcttggaaaaatctgttcaggatgcttcattactggcctggctcgtttctcaaacaaaccacttgggaaaaggtaagcaatagctctgtcaatatcttcttgagtgaaagtttctggatcttctcccatcatgttggctaaatgtctctttcctatgttgaactcttcaatctgctttttaataaaatcctctgtgtaagtttcacgttttgaggtaggaacgtttttctttggtattacaaatgcagtatgtcttagccttaatatctgggatctgacatttgtttgcaactcaggggccgcggttttccagaggccttgcttccgggcgaggctacccctaccccagagaagaagccggtacgaaactgctccgccgtaggacacacagggcgccgccatgttagctgtgggagctccccc

SEQ ID NO: 314588 - DNA, 1658 bp, Homo Sapiens
  misc_feature (1251)..(1267): n is a, c, g, or t
  misc_feature (1432)..(1432): n is a, c, g, or t
  misc_feature (1633)..(1633): n is a, c, g, or t
gctgggtggcgaattcggcacgaggggccaccccccgacccagggagaccacacagctcccgaccactcatcaggcctcaacgaccacagccaccacggcccaggagcccgccacctcccacccccacagggacatgcagcctggccaccatgagacctcaacccctgcaggacccagccaagctgaccttcacactccccacacagaggatggaggtccttctgccaccgagagggctgctgaggatggagcctccagtcagctcccagcagcagagggctctggggagcaggacttcacctttgaaacctcgggggagaatacggctgtagtggccgtggagcctgaccgccggaaccagtccccagtggatcagggggccacgggggcctcacagggcctcctggacaggaaagaggtgctgggaggggtcattgccggaggcctcgtggggctcatctttgctgtgtgcctggtgggtttcatgctgtaccgcatgaagaagaaggacgaaggcagctactccttggaggagccgaaacaagccaacggcggggcctaccagaagcccaccaaacaggaggaattctatgcctgacgcgggagccatgcgccccctccgccctgccactcactaggcccccacttgcctcttccttgaagaactgcaggccctggcctcccctgccaccaggccacctccccagcattccagcccctctggtcgctcctgcccacggagtcctggggtgtgctgggagctccactctgcttctctgacttctgcctggagacttagggcaccaggggtttctcgcataggacctttccaccacagccagcacctggcatcgcaccattctgactcggtttctccaaactgaagcagcctctccccaggtccagctctggaggggagggggatccgactgctttggacctaaatggcctcatgtggctggaagatcctgcgggtggggcttggggctcacacacctgtagcacttactggtaggaccaagcatcttgggggggtggccgctgagtggcaggggacaggagtccactttgtttcgtggggaggtctaatctagatatcgacttgtttttgcacatgtttcctctagttctttgttcatagcccagtagaccttgttacttctgaggtaagttaagtaagttgattcggtatccccccatcttgcttccctaatctatggtcgggagacagcatcagggttaagaagacnnnnnnnnnnnnnnnnnaaactaggagaacctctggaagccacagggtatggactatctgtctggtggccccgtttctggtggtctgttggcaggctggccagtccaggctgccgtggggccgccgcctttttcaagcagtcgtgcctgtgtccatgcgctcagggccatgctgaggcctgngccgctgccacgttggagaagcccgtgtgagaagtgaatgctgggactcagccttcagacagagaggactgtagggagggcggcaggggcctggagatcctcctgcagaccacgcccgtcctgcctgtggcgccgtctccaggggctgctttctcctggaaattgacgaggggtgtcttgggcgctggctctgagcgcctncatccggccaggtttctcgttgctc

SEQ ID NO: 314589 - DNA, 1157 bp, Homo Sapiens
  misc_feature (60)..(71): n is a, c, g, or t
  misc_feature (114)..(124): n is a, c, g, or t
  misc_feature (208)..(219): n is a, c, g, or t
gagaaaaaaacaaagggggggggttctctggtgccccccggccacatttaaagggggcgnnnnnnnnnnnnacaaagagttgtggtgctcctccccacgaaagagggtttcccnnnnnnnnnnnaggacccccaaagccccccccccgcggggtttttttccaaccccccatgggggccccttttgggtccaaaaaccagtggggttnnnnnnnnnnnnttccaagaatggggccccggggggagggggttgttttcaagtttgggaaaaacccgaattcagaaatgggtgggaatccccaggttcttggcctgtgggggaaaaggttcttatgggacaaacccccctggtgcccttaagttctccaggccagaagtcaagagaaggcagagtgggagttcccaagcaccacccccgggacttcggtgggcaggaggcgaccagagggggctggaatgctggggagggtggcctggtggcaggggaggccagggcctgcagttcttcaaggaagaggcaagtgggggcctagtgagtggcaggggggagggggcgcatggctcccgcgtcaggcatagaattcctcctgtttggtgggcttctggtaggccccgccgttggcttgtttcggctcctccaaggagtagctgccttcgtccttcttcttcatgcggtacagcatgaaacccaccaggcacacagcaaagatgagccccacgaggcctccggcaatgacccctcccagcacctctttcctgtccaggaggccctgtgaggcccccgtggccccctgatccactggggactggttccggcggtcaggctccacggccactacagccgtattctcccccgaggtttcaaaggtgaagtcctgctccccagagccctctgctgctgggagctgactggaggctccatcctcagcagccctctcggtggcagaaggacctccatcctctgtgtggggagtgtgaaggtcagcttggctgggtcctgcaggggttgaggtctcatggtggccaggctgcatgtccctgtgggggtgggaggtggcgggctcctgggccgtggtggctgtggtcgttgaggcctgatgagtggtcgggagctgtgtggtctccctggtcggggggtggcccctcgtccgaatcgcc

SEQ ID NO: 314590 - DNA, 2433 bp, Homo Sapiens
  misc_feature (17)..(17): n is a, c, g, or t
  misc_feature (635)..(725): n is a, c, g, or t
  misc_feature (2032)..(2046): n is a, c, g, or t
aatcatcaggttgcgtnttgagagttgcgcgcgtgatcgtcgcgacgagtgcatgtgatatctcagtagtggagcgcaggagagttggtgtggagagagagaacttccaccgtgtgtgtggcgcggacgccgagtggtggagaagggggtatcaaatatattttggctacgtctgaggattatgtggacgttctgtggtggagaacgtgttgagtgaggtggatcaccagactgttccggagcgagcggagcaggcggtggaggaggagacctcggtgcgcgagtggtgtgtcacaggcgtgagctgtgaggatgtggtggtcggcgcgccgattccccgagggtattgggcgggttgcatcactggtgtgtgggtattcggttgtggagtcattctccgcggcgggagggggtgtttcaaatatgtcgtatatattctcacagccaaaggttgcgtgtcggggagggagcaggtctgtggaggtgagggtttgggaagttggcggggttgggggccttggtagcgatgtttagcggggttttgtagtccgaagcattcaacgaagcgccgatgggcgccgcggaggagacaggtggagggctatggtgggtttgtggggggaggtgtggttggnnnnnnnnnnnnnnnnnnnnnnnnnnnnnnnnnnnnnnnnnnnnnnnnnnnnnnnnnnnnnnnnnnnnnnnnnnnnnnnnnnnnnnnnnnntgccgttgcccgaaatgacaagtaccgtttattgtcgttacacaaatgaacccagcctctggcttgggcaccgtcccacggaccagcagatgagcatggtcagccgacccctttccccacccccgagtcatgtgcagtcatacactccaggcagaaagtcgcagtatcgaataccggacacaggttcccttggcttggtggtgcatctctgatccacagactggcccacctctcggagtggccaacggagtcgctgaaacgttgtcaaataagcaagtaagtgcaggagccctgggctgggggcctctggcctctgcagccgggtgggaggaggatgtccaaggtgtctgcggggtaggcctcggctccacacctccgctgtgaccacagcctcaggtcaagctgtgctggggccatccaccttcctttgccatttagaagatggggcttggagcttggcaacacagaaattgacatcagccttataaaaccttggctgaacctaccgacctccaggagaatttcagccaaaacaaaaaagcaaatacacagagggaccctggaaccagaatccctccccatgggaaagacgaaggcacagagattcgagccaagtttcccaacatgttggtgtttgcagaaaagtccggtcacgtcacacacagcacagaggcaagaagcgaaggcagtggcattcacaggactactttatattaaagtttattacatttggaaaatctactgtacagggaaaaacccattggattaagtagagttttgccaaaagcaaaagactatcactctttggaaaatattcctgattccagcccagggcccagggtggggccacaggagctaacggagaacctggccttggatggaggcgctcagagccagctctgcccaagacacccctcgtcaatttccaggaggaagcagcccctggagacggcgccacaggcaggacgggcgtggtctgcaggaggatctccaggcccctgccgccctccctacagtcctctctgtctgaaggctgagtcccagcattcacttctcacacgggcttctccaacgtggcagcggcccaggcctcagcatggccctgagcgcatggacacaggcacgactgcttgaaagaggcggcggccccacggcagcctggactggccagcctgccaacagaccaccagaaacggggccaccagacagatagtccataccctgttgcacacatgagcgacaaactcaagagacaacacacaaactaagcctacattttggcttccagatttggttctcctagtttnnnnnnnnnnnnnnngtcttcttaaccctgatgctgtctcccgaccatagattagggaagcaagatggggggataccgaatcaacttacttaacttacctcagaagtaacaaggtctactgggctatgaacaaagaactagaggaaacatgtgcaaaaacaagtcgatatctagattagacctccccacgaaacgaagtggactcctgtcccctgccactcagcggccacccccccaagatgcttggtcctaccagtaagtgctacaggtgtgtgagtgcggagcttctcccgcagggtcttccagccacgaggccatttaggtccaaagcagtcggatccccctcccctccagagctggacctggggagaggctgctccagtttggagaaaccgagtcagc

SEQ ID NO: 314591 - DNA, 184 bp, Homo Sapiens
aggctttggattttttattaagttctgcaataaataataggtttataagttcaccctgttgttgatctcatcagtggtcgccaagtaagagggtgaatcactcatcccaagagactctgctacctcttagctctggagggtaaaaagcaagggccagagcaaatacattggggagagggggaga

SEQ ID NO: 314592 - DNA, 357 bp, Homo Sapiens
gataccacagctgaactttcttctaagtgccacagtgaaagagcagatcgtaaaacaatctacagaattagtctgcagagcctatggtgaagtgtatgcagccgtgatgaatccaatcaatgaatacaaagatccagagaacattcttcaccgatcgccgcagcaagtgcagacgcttctttcctgattatcttatttcattgtgttagctatgacctccctttacagttttctttgtatcataagattgtaagtcccgataattccatgctgcatttggtctcagtaacagggaagtaagtcatgttgacctgagctagtattgctgtgtatctactcttgagatgatctattttc

SEQ ID NO: 314593 - DNA, 419 bp, Homo Sapiens
gaggatgatgatgagggatgttcttcagtccccccttctcacagtcctcgggacgcacgtggctcagggacacctcctcctgggagctgaagcggcagatcaggtcctgggtggcgtccacgtccacacggccctggtgcagctgggctgccagccagccattgccgcagcagctgagtggattcccctgcaggtagaggcgccggaggctggtctccaggccacccatggcactgcctggcaggaggctgaagctgttgcgcaggtccagcacctccagtgacacagcctgtgtccaggcgggaaggtggctcaggcggttctcggcaagattgagccgcttgaggcagatgaagcagggcaggtccacctgcaggaccatcagcccgttgccctgcagtgccaggacctccaaggag

SEQ ID NO: 314594 - DNA, 683 bp, Homo Sapiens
gctccgaggagctgcatctgcggcaacctgtgtgctgacgctacgtgcctcctggctccgacgtagctcgcagctccccagtctcactccattccttccccacctggcgcgcacctgctcaagaccagggtcctgccaagcgctaggagggcgcgtgccaggggcgctagggaactgcggagcgcgcgcgccatggggccgccgcctggggccggggtctcctgccgcggtggctgcggcttttccagattgctggcatggtgcttcctgctggccctgagtccgcaggcacccggttcccggggggctgaagcagtgtggaccgcgtacctcaacgtgtcctggcgggttccgcacacgggagtgaaccgtacggtgtgggagctgagcgaggagggcgtgtacggccaggactcgccgctggagcctgtggctggggtcctggtacccgccgacgggcccggtgcgcttaacgcctgtaacccgcacacgaatttcacggtgcccacggtttggggaagcaccgtgcaagtctctttgttggccctcattcaacgcggcgggggctgcaccttcgcagaccagatccatcttgcttatgagaagaggggcgtctggagcccgcatcttttactttcccgggcccccaatgaggtcattcccatgttttacccggggtgcgt

SEQ ID NO: 314595 - DNA, 980 bp, Homo Sapiens
  misc_feature (25)..(25): n is a, c, g, or t
  misc_feature (51)..(51): n is a, c, g, or t
  misc_feature (58)..(58): n is a, c, g, or t
  misc_feature (74)..(74): n is a, c, g, or t
  misc_feature (133)..(133): n is a, c, g, or t
  misc_feature (135)..(135): n is a, c, g, or t
  misc_feature (146)..(147): n is a, c, g, or t
  misc_feature (155)..(155): n is a, c, g, or t
agaaggccaatttcatctttttaanacattcctcacccccaacctacaacngtccccnttcagtggcccttatngcagcacatcctggctcaggccctttgccatgtgctgttgcctccagctgcaagccctnantcagccacccnngttgttcntgctcaccccttgacggagcacgacctgggcagtgtggccctcaattcaaatcacacatcccaccccctgctggatttcccacacagcagttaacttgcagcatactacatatatattttccttatcttgtaaactctgtctccctgccctagaactcaactgctggaagacagggttttctgtttcttttgttcagtgtggactccccagcgcctagaggaggtgctcaattactttttgctgagaatgaaagtgatgaaggggttttagggggtgctttagcgggatgaaaggacagggtccaggagctgagtggggcagcagaacagcacatgaggggactgcaggtgcgggtggggacgactgccgaggaatcctggcgctgctttcttccaaatgtcctgggggaggtgaggtgttggggtgaacagtgtcaagttctcggcttccgtttgaaccctctcttcagctgcacagcttctgcagggccccctgggcctgaacccagcgcagccgccactggggcagggacaggccctggcagagctcctcagagagggcggcctggcctggctgctcccaccagtcccccacgatcccctgcagctcagggattcgctccagtgcctgtttcagtagcttctccagcctcttcagagcctgccccaggttctctttctgctgtcctgggatgcctggatctgcagcagctcctgggtgggaaggcctggcggcaggctggtcttcatgtggagtagatcccagcaccagaggctccgctggtcctgcaggagcagaaggtcctggcgaagagaggcagccgc

SEQ ID NO: 314596 - DNA, 1135 bp, Homo Sapiens
tgggggtggcaaaagagctttatttacacactgacaaggctcacggggtgtcagctgaagaagtaggtggaacgcttcacctgctccaggtcgaaggcccctggcttgggcaccgcctgcagtgtctccttcagctggctggcctccaagatcttctggggctcagagcagaaccgcttgaccaggaatctggacaggtcctgcaggatgggctcgctgtgcaagcggacaaactgctcccggcacacctggttcatgacggagacatcagctgcgtgagtccagtaacagtcgtgcacagagacgaaggtcaggcccttcctgtagcagtgcagggcggtgagcatcatgtgggaggagtccagcgagtggatgaagttgggcgggaagccgttcttctgcttacgtgtgttgggctttcggctgatgtctccgttgtgggtgtaggtgatgctctgaattccacctcctatttgcttgaccttggagtccaggcgatacggctggatgacggggacgcccaggggtgtgacccactccaccacagagcccatgtgggagatgaggcgggcactctcggtcagccagtgcttgatgggccgggtccccgagaacatctcctgtagactcttgaagaccttgcgtacgagatagtgagaggcctcccacacgacttcctggggaaagtcgctcagctcccggaggcgcttctcaatctgcaggcgcccgccatagcgcgtgaccccgtacaccaccgtcatcaccgtctgcttcaccaccttgcgggtgatgaaaccttccagcacctgtgccacccgcatgccccgctgggcgtcctgcctacggaacacctccacctgcgcggccacgccgctgtacacgtcctgcggcacatccgagggctccaggttgacggaggcggcgcccacgctgtcgcggcccagagcagcataatgctgcaggccgttgcaagagccgtcctgatggacggggaggtgggagacataggcggcagggtcggaggcgcgcacagcgttcgccacctccatacagcaggccagcgtctgccagggttcctccgcgcccatccaccactttcggcccgtcaagggttggtccgcggagtccaggattc

SEQ ID NO: 314597 - DNA, 752 bp, Homo Sapiens
  misc_feature (515)..(614): n is a, c, g, or t
  misc_feature (627)..(681): n is a, c, g, or t
gagtctaggccctctgtgagatgtgtccatttcttggacaccatatgagacattccccctcggattagagatgctcaacctgcattaacatatctaaagtctacatctggccactctagtttgattacatgatgcattacttttcccaataggcccgtgctagcatattggaagagtgatttaataagctggcaaccttgatgctatcctaccaatccaaccttatttgcctcatttaccatttccactattgtggcagccagccctccattccagccagagcagcccctcaccatcccccagtcacaccatctgcatttctgcttttgtctgtgtgtttgttcatctaaaattcccttatttcactctgcctgtgggagtcctatgcatctctcaaaagccaactcaagttcatctttcttcttgacaccttccctgaatattccagccctgctgagcctagtccctttgtgagatttgtcaccatttcttggacaccatatgagagacttcannnnnnnnnnnnnnnnnnnnnnnnnnnnnnnnnnnnnnnnnnnnnnnnnnnnnnnnnnnnnnnnnnnnnnnnnnnnnnnnnnnnnnnnnnnnnnnnnnnnttgatgacacgtnnnnnnnnnnnnnnnnnnnnnnnnnnnnnnnnnnnnnnnnnnnnnnnnnnnnnnngaggccgagtctagtgaacggtgattgcaccacggtacccaagcctgggtgacagagtgagaccctctttc

SEQ ID NO: 314598 - DNA, 655 bp, Homo Sapiens
attgtctgtatgtaccacagtttattcatccttccacctactgaaggacatcttggtttcttctgatccctgtctttatttgaaattttgatattatgtttgcattaattgtgatgtttttaaaatttttcacttaaattgtatttttcttgatcactaaatttttctggttccttgtaagttttgtgcatgaggcatgctctaatcctggccctggtcttacctctgtttgctcaatattcagaagcgagggaaaggcatgtgataccaagcatggagcataattcatatgacacagccctgtacaggtctggtcaccagtgtgctctgcagcaccctttaggggagtccttggaaatactgatgggcctcttctttcctattatctgttgctgcccctatatccctaactgcttcttagcttcttccctgttcccttctcctgcatttccagtcttggatcgttatgctcatgtcctgtcattccacatcactctccttcttccactgtcatcctccttttagtattcattccaccccttctcgcgccttcatgagttctcgtcccctcctttgtcattgtgagagcccttaccttatgactctccatctccttccacttggctctctacacacgcccttagtctcctcccct

SEQ ID NO: 314599 - DNA, 361 bp, Homo Sapiens
  misc_feature (305)..(305): n is a, c, g, or t
  misc_feature (350)..(350): n is a, c, g, or t
ttttttgaagttaaccagcatctttatttttcatgcttccttaaatagttttgggagtaggagacttgtcctttggaagattgtcatccagaggcccaggaaagtcatctccaccaagagagccaactccctgcctcagtgtggtgttcagctggaagggggtgaacccagccaggccccaagagctgtcccagcaaagcccccgataactttagatgtcacagggagtccagctgcccctgggggaagcaagagagggtgagcacagggcacagggaggggtagcagctcctaacagggggttnaaggccagagaccctgggtccctccagagacctgaggcccagggnagtccaaccct

SEQ ID NO: 314600 - DNA, 621 bp, Homo Sapiens
gaggcccaagtgtcacatgggctgtgtcacagaaactctcactgaacatcgtcccaactgaaaatactgaccaagtgtgtggaagacgtagatgaattccatcttctccatcgggggtggtgagcaccgtcactgtcctctgaccatgctgtccagttgtaaacatacggatcagcagataaaccagcctcatttctgcagttcttctcatagactatgttgccattggcatcttccggcatctagggaatatcaggttcaccgcaaatgttatatttgagcccacgagggctggtgagtcactggtcaggaccgcctgcacacggcctcccttccaggagtttttccacctcatgtctcgccgcttccacactgggtagagtttttcattccagtcattttcatcagaagaccagccatttaattgattgtgctccctcatgtaagcagaaggtctttcattgcccagcacatcatgaaatcgtttggcggcatcaagtggcaatcttgcagccaggagcagaaatcccaggaaatagtagagacattccatgctgaattctcacggacgcaggcactcaaggtttaactctgaattcctctgggcccgtccaccaagag

SEQ ID NO: 314601 - DNA, 621 bp, Homo Sapiens
gaaaaagagcttaatctttttgtttttctctctttttaactcttcggtgtcctggagatttggcaaggttaaccaagatttcatttttatctctcactgttcactcatgctaaggaaagttagcagggtgactgttattaactctctgtgttatcattctcaattatagagtaagaaaagagaaggttgaaattttaaggaaaggtaaagaagaagcttaggggtttgtaaaagccaaccaagtgtgtggaagacgtagatgaaattccatcttctccatccggggtggtgaggaaaaggtttcccatcagggaagacgttatgatggctttggccggtgccattttccccgtcactgtcctctgaccatgctgtccagttgtaaacatacggatcagcagataaaccagcctcatttctgcagttcttctcatagactatgttgccattggcatcttccttttggcatctagggaatatcaggttcaccgcaaatgttatatttgagcccacgagggctggtgagtcactggtcaggaccgcctgcacacggcctcccttccaggagtttttccacctcatgtctccccgcttccacactgggtagagtttttcattcca

SEQ ID NO: 314602 - DNA, 1259 bp, Homo Sapiens
  misc_feature (68)..(74): n is a, c, g, or t
  misc_feature (76)..(76): n is a, c, g, or t
  misc_feature (78)..(78): n is a, c, g, or t
  misc_feature (80)..(86): n is a, c, g, or t
  misc_feature (89)..(89): n is a, c, g, or t
  misc_feature (91)..(92): n is a, c, g, or t
  misc_feature (94)..(98): n is a, c, g, or t
cggggcggccaaaacgaaatggttttagaaaaggttcttcgaaggggccgagggcggccgaccagggnnnnnnntntncnnnnnnnttntnntnnnnnggacttacaaaagcagttggggcatttattgacatttaaacaagggaggagatcctgaacactagtctcgctcagtttataaaaacttgaggccaaactctccatcatctgtacacagcttaaccacggccaggagcaagaattcgagttaaacgaattgaaccagtccaaccacaagacgataaagggaaacagggcgtggggatttccagtttttccttttacattacaaagtttccaacacaagaagccaacaataccccagtgctgcaccaagttacttcccactgtttcccaaggcacagtcaattaataatcagtagtccaagttctaagaacatttcctggaaaacaaggacgcacctcccgtggctctatgcatggcctgccactgatgaatcaaattcttaagaacctacgaccgtctgatacccttgaggagagcaccctcatagaatctccagcatcaggcctcagttttcccatctgtaaaagacagccatgcaaagtgggagatccgctaggcttccagatcgaagtcatcgcgctcctcattgtactctagcacgtgccgcttgatcttggacgagtccacccaagtgacaaagtcctccatgctgcgcgtgacaaggaaggcggggtcggtaaccacgtcagggcccacgcgtacgtgcccttgctccacaaaggccactgcagcctgaaggtgctgcgccatgcgcagcttgaggagcacggtggggaggcggcggcggcagaaggacgaggccgtgacgaagtcgcagagctccagcgaaccgcgcgtgggcaccaagccgagagcatacagcttgtccagcagcgcggccgaagcgcgcacgcggaactggtcgcgttcgggcaggtcgcgcaggcgccgcgccagctcacgcacggcacggctcagctggttgtagcgcgtgtagtcctcccgccgctgcagccggtaacgccgcagcacgcgcagctcgtgcaggttgtggtcggtgacctcccagttcaggaagtccacctgcttcagcagcttctgctcgtggaacttaagcttccgcaccatgatggcggcagccgcagccgcaggacccgaagctgagagcgcgttctggcatccgcgcgatttccgccgcggcgccccaagacctg

SEQ ID NO: 314603 - DNA, 626 bp, Homo Sapiens
ggagggagtggagggatgagcaggatgggatgggctgtccctcgggtttggtatatttgctcctagagcagcccaggaggcacggtggctctgaagcatcactcacttctgtcccgttcttgacagcgccattcgcgaacgatttcccaagttactacgcctggatggccatgagctacccccaccaattgcctttgatgttgaagcccccacgacgttaccgccctgcaagggaagctattttggaacagcttgaagagtctggtcttgcacttcctgcaacagtactatgcaatttacgactctggagaccgacaagggctcctggatgcctaccatgatggggcctgctgttccctgagcattcctttcattcctcagaaccctgcccgaagcagcttagccgagtatttcaaggatagcagaaatgtgaagaagcttaaagaccctaccttgcggttccggctgctgaagcacacgcgtctcaacgttgttgccttcctcaatgagttgcccacattgctgtgtttttctgtcaatggagtcttcaaggaagtggacggaagtcccgggattctttgcgagccttcacccggacattcattgctgttcctgctagcttcggg

SEQ ID NO: 314604 - DNA, 1214 bp, Homo Sapiens
tgtcgcgcgtcgcatgttttcaacggctggtaatcccgcattgtcttggtgtgcggtagttcagtgctgccctcggcccatggctcatcttctaatttccagagcagctagaaaggatccgcactcctctttcctggtcaaatcccgggcgcctcgccaacagaggaatacagcgtcaaccgcggtaatatccaggactattacagggggactgccttgctgagggcatggactacgatcactgtcatgaatgccacttcctgggatctcgcccttggccttgagatgaaggtgaaagcctggcagattctggtgtagtccccagttgttgtcctgaaggcacttctggggaccactcgaggttcatgccagactgggtagagaatgcttgcaacatttcctgctgctctggagagagtgtgggcaccgggctggaggaaggcgtgggtgcaggcatagcgaaggctctttggatctcttcagaactggcattccgcacaaatagctcatcatttacaatacatagccctgaattgctagcaggaacagcaatgaatgtccgggtgaaggctcgcaaagaatcccgggactttccgtccacttccttgaagactccattgacagaaaaacacagcaatgtgcttgtctgggcgcttatgtctaccacgaaggaattgacgtcgtgctgggttttgggcaactcattgaggaaggcaacaacgttgagacgcgtgtgcttcagcagccggaaccgcaaggtagggtctttaagcttcttcacatttctgctatccttgaaatactcggctaagctgcttcgggcagggttctgaggaatgaaaggaatgctcagggaacagcaggccccatcatggtaggcatccaggagcccttgccggtctccagagtcgtaaattgcatagtactgttgcaggaagtgcaagaccagactcttcaagttttctgttccaaaatagcttcccttgcagggcggtaacgtcgtgggggcttcaacatcaaaggcaattggtgggggtagctcatggccatccaggcgtagtaacttgggaaatcgttcgcgaatggcgctgtcaagaacgggacagaagtgagtgatgcttcagagccaccgtgcctcctgggctgctctaggagcaaatataccaaacccgagggacagcccatcccatcctgctcatccctccactccctcc

SEQ ID NO: 314605 - DNA, 1596 bp, Homo Sapiens
tccctccttctggagcccttccagaacccccaatgctttctggcgctagtctacccgaggataacttcttctggttttggcaactcatgagaaggcacaacgttgggacgcgtgtgcttcagcagccggaaccgcaagtagggtcttaagcttcttcacatttctgctatccgtgaatactcggctaagctgcttcggcagggttctgaggaatgaaaggaatgctcagggaacagcaggccccatcatggtaggcatccaggagcccttgtcggtctccagagtcgtaaattgcatagtactgttgcaggaagtgcaagaccagactcttcaagttttctgttccaaaatagcttcccttgcagggcggtaacgtcgtgggggcttcaacatcaaaggcaattggtgggggtagctcatggccatccaggcgtagtaacttgggaaatcgttcgcgaatggcgctgatgtaggtggactggtctcggaaggtgtcacacagggagtttccatcgagccagagctcttctagcttcagcccctttatcttgtccaattcccgctcagacttcaattcatttccagaaaggtttaggatcttcaggttgggtgccttctgaacaatgctagacatgtcatccagcctgtacagcctgttgttgctcaagttcaaggacatagctcagggatgttctcttcaatgatcctcagggtagctgccatacagcttttgcgattcaggacaacgtcaatgtttctgggccaccaaatctgggtctgaacggaggcctttgaggtcaagggcttgttgggagccatcgtatcgtttgctcatgatcagctttagctgttctacttgttctggcttcagttcattcagtatagtgtggggtggagcagaagagttgatgatgatagatatccttcggttctcccgatccaaaatcttatagttgacagccttcaatgcagaggcagtactggcgtcttcaacgaagaactgggcccgtgtattctcatagtgaaactcaataggggtgaagggcacactgcacttgctctgaatcatgctcaggagccatgccttgtcatactttctgccataaggaattgtaatcttgaaccagttctttgaggtcccatcctggctggtgccagcccctcctctctctggaggagctctgtctctccgcacagtaacatgaatgcgatctcgatcatgccaagtatcaccccgacggttaggtcgggtggtataggggttgtatcgtactcggggaccatcctgggcatcactcattgccacatctccatcatcttcctcaaggcgggaagaccgaataccagaaccgcctcttccagacctacggtttccttcaccatatttccaccggaagggaccccggcctttcttctttctttgagggaaattaacgcgttcatcatcgtgttcgctgtacgacttcccctcgtccgccatgccacagcgaagatcaagggcgggctcaggcgctggccgctacgccggcaaacaacctaactcccaagcgctccggacgcgtgggtcgacgatatccctacccactccggaccgta

SEQ ID NO: 314606 - DNA, 573 bp, Homo Sapiens
  misc_feature (203)..(388): n is a, c, g, or t
  misc_feature (559)..(559): n is a, c, g, or t
gcacgagctgacaattcccttttgaatgtcaactccctgataacagctatcttgtttgtcttgttctgattgtatccgtcataccttagcatctggcatattgtaagctctcatatattcagtgaataattaaaccatgccctgatatgatcaggctctggccttgctatcctctcaacttcccctctaaatcctataaactnnnnnnnnnnnnnnnnnnnnnnnnnnnnnnnnnnnnnnnnnnnnnnnnnnnnnnnnnnnnnnnnnnnnnnnnnnnnnnnnnnnnnnnnnnnnnnnnnnnnnnnnnnnnnnnnnnnnnnnnnnnnnnnnnnnnnnnnnnnnnnnnnnnnnnnnnnnnnnnnnnnnnnnnnnnnnnnnnnnnnnnnnntcatgatcatggaaatctcatacacatcaatttttgccttctaatgaacctgatctttgttgcaatgtggagtttgctacacatgcttggctgcatggggcgcctggattatccacaggaacttgattctagaaataccgcactgttgttttacagaagcccgacaagtangccctgcatggtgg

SEQ ID NO: 314607 - DNA, 708 bp, Homo Sapiens
tgtaggtcttgggcccccatactagacttcctgaatcaaagtttctgaatgtatgcctagggaacatgatttaaagcaccctgtattggcattcttatgtatgctgaggtcgacggaccactgccatgatcatggaaatcttcatccacatcaatttttgccttttaaaaaagcgtgtccgtttatgggacaagaatgtcatgtcatctgtgtagctccccctgaacctgatctttgtgcaggtgtggagtttgctacacatgcttggctgcatggggccctggattatccacaggaacttgattctagaaataccaaagcactgttgtttcacagcagcccgacgagtaggccctgcatggaatgaggcttttgctatgtcttcctgcatggtcacctctagtcatttgagagcttccattgcatgcagatcacacatagtaggagatgccatcaatttatcaattatttcaagcacactttaaattcatcttccctctgtctacctgagaattgctaatgttatattattccctgaccccaaggaaaatgagaaaattggttgctatcatttccctatctatagaagacaaagccctgtctttatttttacagtagaagtgctctaaagaatttctgtgtcaacttgagatacttttcacaaagacaagaagcattttactttgtgagagaaaagagaataattaa

SEQ ID NO: 314608 - DNA, 1817 bp, Homo Sapiens
ttgactgctacattttactttattttgttgtaaggaaaaccaattgactaagttgtccccaaaatgttagtgttcactgatcaagaaggaaatgaggtcagaaggcaaacttttcacttcttctcaaacataaattgcaagtatcacagaaaattgtaacaacacatgcaacacgggatggctttcaacacacagagagcctaagcaagaagagtgagtactgaaggtctacagaggtcagactgggagcactaccacaggaagtttgaatctatccacgcagctctttcctcccacagtccaggctcaacacctcttcctattccaaggtggcttatccatatgcagaaatccaggctgttccatatacattaatacttgcccagctgtgtttcacgaggcatctccataagccaagccccgactcaaattctgtacaggaagttcccgttgctgtcaaagaactctcggcccctctgcactactttgctgctgaagttatctggctcctctgccttcaactcctccagcttctgaccacttggcaacgcaccactgccagttcctctggggctctcagaatcactggagtacttctgcagctctcttggatgacctaggggtgcagcaacaggcacaaagctctcctccaggtcctggatttctttatttcttcccttccttctccttggtgtatttgtcctgtgagtgtctgactctatcactttcaaagctgtgctgtgatttgggtctttagatgaggcttcatgccctggcataagcaaagagcctgatacagagtggcctgcagggagcagctttgaggtatttccagagccccggaggtgctgcagcgagtgggcaagcccagctttcttaaggactttttgatcctgcttcagcttctgctccaatgtgggtaaaaacttgctttttaaaactcttcggatcacatcagtgctgacatcaaagccttcagccaacctgggaactgaccaggactctggaaattcctcatgtaaataccgtatctgctccatggcttcccacgtcagggtcctgggcggggcaccaggcgcctccatttgcctccgaattttctggaatcggattgcttgtttctgtcgtttcagggtgctgggggaagagaaccaatggcagaagccatgcgtggaagcagaatggatgtttgaagagcctcaggctaaatcatggagcgcccagccctcttctctttgatcgcaagggcaaccgggccatgttgccggcttagagctgctccgtacacccagaaagctaacacctagaacaataactgcctgtaagcatgccgaactctctaaactgatgatgaaatacgtcactaatgaagggaccagtggtcccaggggagctgaacacctgacgctgcgcccctaacaacgggtaagaagaaacaagggccgctgcgcaagcagcggcaggacacccggcgccaagggggcgcggcctggagcgccggggcacgaggccctgcttcaagctgagggcccggggagaagccggtacctctccacctcctgcagctcccgttcctccggctcccagtcggaatcggggtccggctcccggccaatagggcctgggcccgccaccccccgggtcgcgaacccacagcgagtgacggcggcgcaaacgcgcccgcccagcaagagactcagggtaaccgccatgtcgacgcaaaccagccttcagcagtcggccctcgtgccgaattcgccacccaggcctcgctacttagggacaagaggggaaaggagggtgaggagaggaggtga

SEQ ID NO: 314609 - DNA, 333 bp, Homo Sapiens
  misc_feature (243)..(243): n is a, c, g, or t
tcactacacacagtgggctatgattgcatcagactgagaccttgtctttaaatatataggaatgaagtaaatacttgttcctatgcttgacccatatggtgctccccataattaagtggggtgcttaatatgcagaggaaatactttgtattacctttccaaaatgtgcataatacatatgactcaatacatattgtgggtggagctacacagagccttgtcgggccctgtctatatggtgtngctggacctgtttaggcactgcacggagcagcatgtgtcacagacctggctgtgcagaggcctcactctcacaccttttctatgggtggc

SEQ ID NO: 314610 - DNA, 601 bp, Homo Sapiens
cgatgaaatagcagaggtgtccataggtttattaagatttcatcatgtagtactcgattcagtgctcttagactacatttgctgtctttgtagaccaataaaatgcaaggccattatcttcaaaaaagttctggaataacgcattgttagaaccaaactggtagtctgaaagaccaaaattcccagggaaacgtaaggttggcgaacattgttttatcttcatttgcctcccgcgcagctcgaccggctgagcccaccaccgggggccgcggttcagctccgccgggcgccccaggctgccgagtccgctgggtcctacgcgaccgctgacccgcagcgccgccggctcccgtcgccgtagccaccgccagctcggtgcagcccaggcgtttccgggttcccgcggtcccgtcccccaaatgctccggcttccgcctcggctctggcaaatgccgttcccggctcggctctggcagccccagctcggcacttggcagctctgtccctaaggcgacgcacctgggctgctctgctggcagcccctggttcctgcttcaccgtcgcgtggaggcctggggcactgctttctgctacacctctc

SEQ ID NO: 314611 - DNA, 654 bp, Homo Sapiens
agcaaggacagtctgcctcccaccaccttgcccccaatactggtcaacagttgcatccccagtgcgggaaacaccatttctctatgtgactgaagtgagcaggggagaggccaaccaaggggttaaaaaaatgttgtagaagggggggaaaacacaaatgagcacacaaaagtacccacaatatcttgcaactcaacctgaacaaagataacaattctgattggcccaatttaagttacagattcatccctgcagatatagttttgagttgcacttgaagtacatcaaagagaggaaaatcatcgtggtgaatgtcctcgagtttccgcagacacctttgtggtcggcatggtcacgtgctcaccattcaacagcaatgcgaggatggacggcccgggctggggacgggccctctagaaactgtgccctgccaggctgctctccggcacacctcccgtctgctgctggaacacgtcgatggtgtcctcgtcctccatctccagctgtgctggagtgtcagtttcattgattggctgcccgtcgaacctgaatctgatctgcctcattgacaagccctgcctctcgcagtaggccttcatcagcttgctcagcggcgtgtgcctcttgatcttgaactgcaccacggagccgtcc

SEQ ID NO: 314612 - DNA, 1688 bp, Homo Sapiens
  misc_feature (583)..(586): n is a, c, g, or t
  misc_feature (595)..(595): n is a, c, g, or t
  misc_feature (603)..(603): n is a, c, g, or t
ccgagggcaacaaagttcccccccgggggcccttccggcaagcgggaaaggggaccctttcagcaaggttttcagccaagcaagaggatgatgggtcatttttcaggtgacgttaaaaaaggcaagagaatggccccccaggcagcaatggagcctcaggggagggccaataggcagacctatgaaaaatgtttaattggtatagatccccaaaatatttcacagaactgaaatcaccagactaatgcataaattcaatacctatttggaaagcagcacggcacaaacccacgagaagaacatgaagtcatcattccatgggttcatttgtaaccacacttggaagtagctcttatacacgacaacataactgcaaattcagcaatacttagtcttacttttttatgtatagaccataatcattcatcagaagcaaatactagaagaaatctgaggccacaacaccattaccaaatgagaaatgtgggaatttcttcaatattaagagggagaaaaaggccaattttggttgtgccaatccttgcctgtgtaccaacgccaggtactgagcagggagtggggnnnncggggtggngggggggngggtcctgggcctcagaccccgaggttacatgcttgagggccagagagcacgtggggtcaaattaccaaaagactcggttattttttaacctttgaagaagcattccagtattttcccttcaacttttccatatactgacaaagcttaaatttgcaatatttagcattttaatcacctgtgcctgtaacagcaagtgacagtctgtcctccctaccaaccttgcccccaatacctgtccaacagctgcatccccactgcgggaaacaccaattctctatgtgactggagtgagcaggggagaggcaaccaactcaggagtcagatccctggccagactaaaagcgaacattcaggctataattttggggttaaaaaaatgttgtaggagggggggaaaacacaaatgagcacacaaaagtacccacaatatcttgcaactcattttacctgaacaaagataacaattctgattggcccaatttaagttacagattcatccctgcagatatagttttgagttgcacttgaagtacatcaaagagaggaaaatcatcgtggtgaatgtcctcgagtttccgcagacacctttgtggtcggcatggtcacgtgctcaccattcaacagcaatgcgaggatggacggcccgggctggggacgggccctctagaaactgtgccctgccaggctgctctccggcacacctcccgtctgctgctggaacacgtcgatggtgtcctcgtcctccatctccagctgtgctggagtgtcagtttcattgattggctgcccgtcgaacctgaatctgatctgcctcattgacaagccctgcctctcgcagtaggccttcatcagcttgctcagcggcgtgtgcctcttgatcttgaactgcaccacggagccgtcctgcccggccaccttcaggttgatgtggtcattctctgtcttcacaccctccttgggcttctcctcggacatggctgcgcgagcggcgcggggaggcggcgcgggggaagcagcgcggagcgggcgagtcacgctctcggccccgccgctctcccgccgcaactgtgcgcggggccgcccc

SEQ ID NO: 314613 - DNA, 414 bp, Homo Sapiens
  misc_feature (346)..(346): n is a, c, g, or t
  misc_feature (376)..(376): n is a, c, g, or t
  misc_feature (398)..(398): n is a, c, g, or t
ttgacagaataccaaactatatttactgtttacagtagtaaaggacaacaaataatgtacaaattggtgaataaacacaacagagccaacaaacatcccacccgagcccatacagcaaacaggaaatgagaacatttcagcaagatttcaagcaagcaagagatgatgggtcattgttcaggtgactgtaaaaaggcagagaatggccaccaagcagcaatggagcctcagggaaggacaataggcagaactatgaaaatgtttaattggtatagatcccaaaatatttcacagaactgaaatcaccagactaatggcataattttccatacctgttttgggaaangcaggcacgggcacaaacccacggggaggnacatggaaggtcattcattccntggggttccttttgtt

SEQ ID NO: 314614 - DNA, 629 bp, Homo Sapiens
  misc_feature (554)..(554): n is a, c, g, or t
  misc_feature (563)..(563): n is a, c, g, or t
  misc_feature (590)..(590): n is a, c, g, or t
ttttcagaataccaaactatatttactgtttacagtagtaaaggacaacaaataatgtacaaattggtgaataaacacaacagagccaacaaacatcccacccgagcccatacagcaaacaggaaatgagaacatttcagcaagatttcaagcaagcaagagatgatgggtcattgttcaggtgactgtaaaaaggcagagaatggccaccaagcagcaatggagcctcagggaaggacaataggcagaactatgaaaatgtttaattggtatagatcccaaaatatttcacagaactgaaatcaccagactaatgcataaattcaatacctatttggaaagcagcacggcacaaacccacgagaagaacatgaagtcatcattccatgggttcatttgtaaccacacttggaagtagctcttatacacgacaacataactgcaaattcagcaatacttagtcttacttttttatgtataggaccataatcattcatcaggaaggcaaatactaggaaggaaatctgaggggccacaacaccatttaccaaatngaggaaatntggggaatttccctccaatatttaagnggggagaaaaagggccaatttttgggttgtgccaaatcc

SEQ ID NO: 314615 - DNA, 1035 bp, Homo Sapiens
  misc_feature (27)..(27): n is a, c, g, or t
  misc_feature (127)..(127): n is a, c, g, or t
acaggcaagaggaatgcagaaatctgntgtccccatgaatcacccatcaaggcctcgggttcttctaagattagtcccatcatcattagcaactgagatcaagcaactctcccacacgtctattatntgaggggagttggcagaagttccatgtatatgggatctttacaggtcagatcttgttacaggaaatttcaaaggtttgggagtggggagggaaaaaagctcagtcagtgaggatcattttatcacattagactggggcagaactctgccaggatttaggaatattttcagaacagattttagatattatttctatccatatattgaaaagaataccattgtcaatcttatttttttaaaagtactcagtgtagaaatcgctagcccttaattcttttccagcttttcatattaatgtatgcagagtctcaccaagctcaaagacactggttgggggtggagggtgccacagggaaagctgtagaaggcaagaagactcgagaatcccccagagttatttttctccataaagaccatcagagtgcttaactgagctgttggagactgtgaggcatttaggaaaaaaatagcccactcacatcattccttgtaagtcttaagttcattttcattttacgtggaggaaaaaaatttaaaaagctattagtatttattaatgaattttactgagacatttcttagaaatatgcacttctatactagcaagctctgtctctaaaatgcaagttggccttttgcttgccacatttctgcattaaacttctatattagcttcaaaggcttttaatctcaatgcgaacattctacgggatgttcttagatgcctttaaaaagggggcagatctaattttatttgaaccctcactttccaacttcaccatgacccagtactaggagattaggggcacttcaaaggcattggaaaaaaatctactggatactttactttcttaggacaagtaggtttcttaggttaaccccccattggggactgggggttcattctga

SEQ ID NO: 314616 - DNA, 371 bp, Homo Sapiens
tatttttctccataaagaccatcagagtgcttaactgagctgttggagactgtgaggcatttaggaaaaaaatagcccactcacatcattccttgtaagtcttaagttcattttcattttacgtggaggaaaaaaatttaaaaagctattagtatttattaatgaattttactgagacatttcttagaaatatgcacttctatactagcaagctctgtctctaaaatgcaagttggccttttgcttgccacatttctgcattaaacttctatattagcttcaaaggcttttaaactcaatgcgaacattctacgggatgttcttagatgcctttacccagtactagagattagggcacttcaaagcattgg

SEQ ID NO: 314617 - DNA, 903 bp, Homo Sapiens
taaagatgaatgtgaagaagtagaacatcagtgccaaaagactattcagcaactggaaactgtcctgggagagccactccagagctatttctaagactttctgtggtgtttcatactctactcagagttcacactcatatttcatatttttatttttgggtgttgggtgccatgttacttttggtgccttaatacacctacttggattacttacaaatgttttatcacttctttacaaaatccccacctggcttgtgctgccacataagcctctcctgcctatcgtatagagctgcagaaagagtaaatgatacacggtatttttatacagactgctgtgtttgtttaaacatttattattctcttcctgattgatggtaataatattagacttgttaattttagcacccaaaggtgacgcctcatttgcactgtaagccttaactcttctgtacagcagtatcttatatacatggtatccatgttgcagatttcactcaaagttgctctatttcaagaaaatgaagttatttagcaatcaacagaagtacttttgactgtaaagcctacttttcattttgggtaggcgaacttcagccttcgtttctttgttgtgcccataaagagaagtggttctggaatgctttttttaaccccaggagtgtgactgtcacctttatcctttgttcttttgggaaacgggagagatgaaggcaacacgctgcttctaaaacagctcatacctggctgctcacacagagggcccagaaacactgggtggcacgaggaagctcctccaggattcagaatgaacccagttccattggtggttaactaagaactacttgtctaagaaagtaagtatcagtagatttttttcaatgctttgaagtgccctaatct

SEQ ID NO: 314618 - DNA, 353 bp, Homo Sapiens
ctgggccggaggaactgtggcctccaccgacacctgcttcttccctcacctcgcagcctttcacacctgttgatctgacactctgtcccgctgtcgcccaggagtaacctaaggcttttggcctgattcgagctcacttcgtctaaacctctaaatgcggtgcgaaattcgcatcaacttctctttacaggcatctttatccggaattcagcttgtgccccccacgtggtgtagctctgcttgtgtttttgaatcccggggcctctttgaatcagaagccctttgtgtagagataagtatcctttaggccacagtcaggctccatttttttcgcagtcccatttcctcccggt

SEQ ID NO: 314619 - DNA, 721 bp, Homo Sapiens
  misc_feature (30)..(30): n is a, c, g, or t
  misc_feature (82)..(82): n is a, c, g, or t
  misc_feature (86)..(86): n is a, c, g, or t
  misc_feature (144)..(207): n is a, c, g, or t
  misc_feature (405)..(452): n is a, c, g, or t
aaccaaccccaatatatagatttctatagnaatttcccttttttcctctcctcccacctttcctctgcaaggtattgttacntatnttttgttacctgatttttgctgcaataaccttcttgtttcagtcacagcaagaaacannnnnnnnnnnnnnnnnnnnnnnnnnnnnnnnnnnnnnnnnnnnnnnnnnnnnnnnnnnnnnnnagggaagggggaggaagggaagggagcttggttttgtttttaaataggactgaagaataacattgaaaaatcaggagatgatgtccaacccttttcgcaaggcaaaggcctccggtatttccgcctctgtggtttttgttttaaattcctttttctcttctgggtgctgatacttctctccatcctcatgttcttggnnnnnnnnnnnnnnnnnnnnnnnnnnnnnnnnnnnnnnnnnnnnnnnngctacctcagtttgcccccatgtcccttacacacacgcaaaatactccttcagcggagcgaagaggtggcggatgactggcacgctccatgaccggcccagcagtctctgcctcgccaagcggctcatgttggagacgtcagtatagtggactgggaaaccaaataccctttccatttcagtgcaccataagatgtcctctttctcattcatgaagacaggaaaatgctggtctttgccctgctttatggagtttgacctcgtagtaat

SEQ ID NO: 314620 - DNA, 478 bp, Homo Sapiens
  misc_feature (466)..(466): n is a, c, g, or t
atttcaatatgataggcttcttacattttaatagttactcatctttgttccaggacccttgactgatgctagggaaaggataaagcatagaataccagccagtttggctctgattttgagttatttataataaagtttggggattatcataacatctcatatctttgtgtatgttgttttaatgctcggcagagcacaacactgatgataactattaaaaatagaaaataacagccattttactttcaaatctgatgtgatgcaatctgtgaacactaggaggggattaagcattgcagggaaacttatttgtaaatagcttcctcacctctttgacttggcaatcaatactttctactttgtggaggggattaagaatagaatgggcaggatgagaccatgtttttattcattgtctcatttggtcagaacaattttattgaggacatgaattcaatagttagantttctgactggc

SEQ ID NO: 314621 - DNA, 423 bp, Homo Sapiens
ttcccaaatcttaatgtctgtttcagaattttagtgattttaaagtgatagtagaaaataccaagcatatgaggtatttcaatatgataggcttcttacattttaatagttactcatctttgttccaggacccttgactgatgctagggaaaggataaagcatagaataccagccagtttggctctgattttgagttatttataataaagtttggggattatcataacatctcatatctttgtgtatgttgttttaatgctcggcagagcacaacactgatgataactattaaaaatagtaacagccattttactttcaaatctgatgtgatgcaatctgtgaacactaggaggggatgacttggcaatcaatactttctactttgtggaggggattaagaatagtgggcaggatgagacctg

SEQ ID NO: 314622 - DNA, 442 bp, Homo Sapiens
  misc_feature (341)..(341): n is a, c, g, or t
  misc_feature (421)..(422): n is a, c, g, or t
caaaatttgcttttatttacacgtttgagtcaattacatgcatgttttatttttgaggagtgattagcaaaatgcattaaaattttaaaatagcaattaaatatacaaaaatatagcttacaaaaaactgcgaatgtttatattctgctgcagaatttttagtgtacaaagacgtctatgaaacctgaggttcagcatttcataaacctttttttgagggagttacacaatacctagtgaggaaacccgagggccctacaagacgaagcaacactctaggaagaccagctgtcaccagaagggagttcctaacacttgccacacctgctcccccgaccggnggcctgggagggaagggcagatggagaggaacggtgtgcagtgggcgtgagatgcagatccaccaggcttgggactggcnnaaggagctgaggaggttccc

SEQ ID NO: 314623 - DNA, 466 bp, Homo Sapiens
  misc_feature (435)..(435): n is a, c, g, or t
  misc_feature (447)..(447): n is a, c, g, or t
ggagaccgagacggcgccgctgaccctagagtcgctgcccaccgatcccctgctcctcatcttatcctttttggactatcgggatctaatcaactgttgttatgtcagtcgaagacttagccagctatcaagtcatgatccgctgtggagaagacattgcaaaaaatactggctgatatctgaggaagagcacagaagaatcagtgttggaaatctctcttcatagatacttactctgatgtaggaagatacattgaccattatgctgctattattttatctctggagggtgctcgagaggaagacctcgatgctgtggaagcgcagattggctgcgcttcctgacgattatcgatgttcataccgaattcacaatggacagaagttagtggttcctgggttattgggaagcatggcactgtctaatcactatcngtctggatttgntagacgtcgatacgctgcc

SEQ ID NO: 314624 - DNA, 751 bp, Homo Sapiens
tcagggtttatttgtgaactcagtttcactactaacaaggcaattatactacttaacatgttaaacaggttttagaaaatagttttgtaattataagggtaataagtgaaaagtaagagaaacaaaaggcataaaacaaaacaatgaatattttaatctttatttttaaattgttttcttacttttttaaatactatcggtggaatctgggttactgccagctgttgttatgtcagtcgaagacttagccagctatcaagtcatgatccgctgtggagaagacattgcaaaaaatactggctgatatctgagtgagtattcgaggaatatgtacttctgaaaactggcccttggcttcttccataacactagtttgtcctgattctcctctctaacccttgtctctttatctcctttggtggctcttctcgtgcctgctagtaaatgttggtatttgccaaggttctgtccttagcccactgctgctctcccttgctgaactctactgcatgcattgttgccgtttatagtgactatctgcatgctcctaactcccaaacctgaatctccctccctgacttccccactgaggtctagaattgtttgcacaactgtctgctggacctttctattggctgtcccacacttattaactggattcagtaaatgttaacaaatttgacagaatcaaagtacagatgacagaaagtgggagttgagaaaggtggaagaaatgagtaggaatgctgat

SEQ ID NO: 314625 - DNA, 775 bp, Homo Sapiens
  misc_feature (206)..(461): n is a, c, g, or t
  misc_feature (463)..(463): n is a, c, g, or t
  misc_feature (497)..(659): n is a, c, g, or t
cctggacccagctttcactatcttgtgtgtgtctattatttctcaacctgccgatccgcctgggaacaaagagagagccccgttgcattgcaggctactggccagatcccgcaataaggtatgttctctaagatctgaaacaagatagaaatgctcacctttaccagagaaaaaaagggcgtccaaattgaaaaagaagtcaaatnnnnnnnnnnnnnnnnnnnnnnnnnnnnnnnnnnnnnnnnnnnnnnnnnnnnnnnnnnnnnnnnnnnnnnnnnnnnnnnnnnnnnnnnnnnnnnnnnnnnnnnnnnnnnnnnnnnnnnnnnnnnnnnnnnnnnnnnnnnnnnnnnnnnnnnnnnnnnnnnnnnnnnnnnnnnnnnnnnnnnnnnnnnnnnnnnnnnnnnnnnnnnnnnnnnnnnnnnnnnnnnnnnnnnnnnnnnnnnnnnnnnnnnnnnnnnnnnangatgtatatgagggaaactatgtaaaacttgtgnnnnnnnnnnnnnnnnnnnnnnnnnnnnnnnnnnnnnnnnnnnnnnnnnnnnnnnnnnnnnnnnnnnnnnnnnnnnnnnnnnnnnnnnnnnnnnnnnnnnnnnnnnnnnnnnnnnnnnnnnnnnnnnnnnnnnnnnnnnnnnnnnnnnnnnnnnnnnnnnnnntgatgttggaacacaaaagaccctggttgcccaaggaatctgagcagaaccaagttgagacaacataatacctggctttttcttcacacctttggacccctagcttgtcctggctt

SEQ ID NO: 314626 - DNA, 451 bp, Homo Sapiens
tttttttagttattgatgtaattggcttttatttttgatttatgatttggggcagctctccctctacagatgcttcagcatcccaagtagctgggactatattgcgggatctggccagcagcttgcaatgcaacagggctctttctttgttcccaggcagatcggcaggttgagaaataaaagacacacacaagatagtgaaaactgggtccagaggggtcactgccttctggtcctgcgatgctaccaatgcactggatataccagcatttattattaagtttagtgagagtgttggtaggttagtgagggatttaaggtcatttgtaagctgtccacaagggtcgcattccattcccagagctatggacatctgcttttctgggataggaatcttggttatgtgaaacctccctgactgcatgtccattcataggctctctgcaggcgg

SEQ ID NO: 314627 - DNA, 476 bp, Homo Sapiens
ggaattaactctataaggaagtattctgataatggctttcaattataggacatatctaataacatgattacatactctcttaatagtgtagcactatagttgttatttatttcccacactgaacaaatataattatcatatacaccctttccattattagctctctccatttttaatgcagtttgctacccagaatttaaacattccttttttgctgctgttttaatttgaaataagaatggtagcccccaggtcccctaacagtgggtgctgatttcacagtgggcttactgctcttcaagagtatctcagtgttgagtccagccacccaagggagactggttcttcactgtgcatcatggccttttaatgccattttgcttttttatcatccaatcagcagatgttctttcttcattcacgttgaaagcacttcgctatggaaacgagtaagttctggctttttggttggttgt

SEQ ID NO: 314628 - DNA, 473 bp, Homo Sapiens
gaattttctgtaggatttttattggtggcacctggggccacatggaggggtgaagacgggtggaggagttccccgggggagtggaggagtgtcaggaggtaatggtggttgaaactgaaaactttcgctgctctgagaaccatgtggtacctccatatctgaatcgagctccatgtcggcgggagatcccgctgagttgctttcattcttctgcttctttggactacctgggctagagtgagatgaagacctcttgttgccagacttcacacctggcgcttggaagttagaagtaaggtaattggcaaacacatccttctgctgacatgcctgcattggtatggaaccaaagatcctccattcgtctggaattcctctgggagtagatatattaaaaccaggatagttgaccaattttgagagatcgtaagtgacacttttattctgttgtatttctccaacttctgtttccc

SEQ ID NO: 314629 - DNA, 456 bp, Homo Sapiens
  misc_feature (14)..(14): n is a, c, g, or t
  misc_feature (23)..(23): n is a, c, g, or t
attattcctccggnaacaggagntcctaacctcatttggaacaagtgaatgaaggcaaacggaaatgcccagttaaaaggtgtgtcccacaggaacgtcggaagtcgctgttttacgctcctcggcctgctcaagagctgccccagatccgcctctgctgttccttcccagttcttctagagtcagtgcgtcctcatcccacagctccagatgctgttctggtctggggtgagtcactgggagtcagcggcggggtgcccctttgggagtggaggggtgaagacgggtggaggagttccccgggggagtggaggagtgtcaggaggtaatggtggttgaaactgaaaactttcgctgctctgagaaccatgtggtacctccatatctgaatcgagctccatgtccgcgggagatcccgctgagttgctttcattcttctgcttctttggactacct

SEQ ID NO: 314630 - DNA, 406 bp, Homo Sapiens
cggtaccacttactgaaaatattcccaaaaaatgaggaaaagggactcctacccaactcattgcatgatgtcagcatcattctgttaccaaaaccttgcagagatactacaccaaaagaaaacttcaggccaacattcttgatgaatatcaatgcaaaaattctcaacaaaatgctggcaaattgaatccagcagcacatcaaaaagcttattcactatgatcaagtaggcatctctgggatgcaagctttgttcaacatatgcaaatcaacaaatgtcagtcatcacataaagagagctaaagacaaaaaccacacgattatctcagtagatgcagcaaagactttcagaaaattcaacatctattcatgttaaaaactttcaataatctaggcattaaaggaag

SEQ ID NO: 314631 - DNA, 1233 bp, Homo Sapiens
  misc_feature (481)..(481): n is a, c, g, or t
  misc_feature (536)..(536): n is a, c, g, or t
  misc_feature (582)..(582): n is a, c, g, or t
  misc_feature (617)..(617): n is a, c, g, or t
  misc_feature (747)..(758): n is a, c, g, or t
aaaaatattcagaaccaagttttattttgtagtcgttacacaggagggggcagtcagaagagtacagctcacccccagcagtggaggggttaaatctcagggacaaggtggggcagtggggacagcacctccgaccctatggggtgtaccttcaagtagcaaggctgacaatgatgtctagaaaggtctccacttctgcctgagttttgccaaacccagtggtctatagggatgtggcaaaagaatgacctaccgcagtgtgattatcagtgttttttaaaataaagagcacagttttgcctttaaaataattcacatcaacggtatttgggagaacatggagctggcataacattggcgtagaaagcagggccaggcccacccacggggccctcgtgtggggacgggtgcctgagcccctgagcccctcgagcctctggccacggctggctgcctgtgtgctgttgtctcgtctgtcccnaccccgagaagggagttgaaacaatgtgagttgtcctgtggcattggaaaagtgncagtggttaacatgggtgtgtgccgaaagtggttagctgtgccttncaggcggtgccgtcctaagcagggctgatgggggnccagggctgctccctggctttctgtgggcagggcttgccctcccagggaccccgagtgcttgcacccgctcggtgacagtggctggcaggtctaagtgctgctgctggatgcaaattcctttggtagacnnnnnnnnnnnnaagaaaaaaataaaaccaatttttgggttggcacctgaggtaataagttaagaataagcaccaaaatggcccttcctggcacgcgccggctcacaggttcttcatgcacacctggcagcggctgatgtgtgtgcggatgaggccggccttgagcgtgtcggcggagggcgagccctggaagctctgctcgggaatggtggtcagccagaagctgtacttgttggcgtagtagtggcaggtgccgcggcctccattgcattcgatgaatggtgtggcgcggaagtcctctagacagctgcccggtgacaccagtgattggccaccgccttcgtctcccgccgccgtgtgcatgaggaaggaatatccgatccacaaactccgccacccagctgggcagtgtgggatggagacatcctgactgtggaccgcgatggcgatggccggggcctcacacacagaacagcggctgatgtag

SEQ ID NO: 314632 - DNA, 518 bp, Homo Sapiens
  misc_feature (417)..(417): n is a, c, g, or t
  misc_feature (465)..(465): n is a, c, g, or t
  misc_feature (477)..(477): n is a, c, g, or t
  misc_feature (486)..(486): n is a, c, g, or t
  misc_feature (497)..(497): n is a, c, g, or t
tttttaaaaatattcagaaccaagttttattttgtagtcgttacacaggagggggcagtcagaagagtacagctcacccccagcagtggaggggttaaatctcagggacaaggtggggcagtggggacagcacctccgaccctatggggtgttaccttcaagtagcaaggctgacaatgatgtctagaaaggtctccacttctgcctgagttttgccaaacccagtggtctatagggatgtggcaaaagaatgacctaccgcagtgtgattatcagtgttttttaaaataaaggggcacagttttgcctttaaaataattcacatcaacggtattttggggagaacatgggagctgggcattaacattgggcgtaggaaagcaggggccaggggccaccccacgggggcccttcgtntttgggggacggggtgcctgagcccctgagcccctcgagccttttggncacggctggctncctgttgtnctggttgtctncgtcttttcccaccccgagaa

SEQ ID NO: 314633 - DNA, 730 bp, Homo Sapiens
  misc_feature (146)..(146): n is a, c, g, or t
  misc_feature (149)..(149): n is a, c, g, or t
  misc_feature (155)..(155): n is a, c, g, or t
  misc_feature (166)..(166): n is a, c, g, or t
caccacgtgataagtcagccttgagagttaggtctcataaccaacaccacccaagtcacgaaataacaatgtgtggcacaaaaaggtgtcccattgtcttccagaaggacaaacgggaacgtcccttcctccagcactatatcaanacnatatanctcttgttganacacagccttcataagatactgggaaacttcccttttgaccctcccacttgggtgagagcatcaataatctctgtgttttcatctatttctagtgacttagaacacattcatttggcaactagatccacctctgtactaaacataaaaatatgttgaaatgttttttcaaaattcatgttctacaaactatatgataaggcaaaacttccaaaatcaaacttgaaagccacccaagcaggatcataaatagataaggattcatatttgcttaaatgtattctcatatttctacataatttacttttgagaagagtctcttataaatcctgtgtcataagccacttgcttagagctatgagcagctgtcatttttactaaggaggatgctctttgggggttcaaacatgcaatcaggcaaaaacattttccaccccttcaaacctgcatccccaagaggcaaaaggcttacgtgttcagacttctcctgttcttttttgtccgtctgcaaaaactgatagttttcttttgccagcttctggactagttcaattcgtccgatttca

SEQ ID NO: 314634 - DNA, 716 bp, Homo Sapiens
  misc_feature (40)..(40): n is a, c, g, or t
  misc_feature (181)..(181): n is a, c, g, or t
cgaaccagtgtgtggcacagaaaagtggtcccagtcttcncagcatgacggcagcactctcagttcctccagcaactatattcaaacaatatacttcttgttggaacacaagccttcataagatactgggaaaactcccttctgaccctcccacttggtgagagcatctataatctctttntgtgcatctatttctagtgacttaggacacattcatttggcaactagatccacctctgtactaaacataaaaatatgttgaaatgttttttcaaaattcatgttctacaaactatatgataaggcaaaacttccaaaatcaaacttgaaagccacccaagcaggatcataaatagataaggattcatatttgcttaaatgtattctcatatttctacataatttacttttgagaagagtctcttataaatcctgtgtcataagccacttgcttagagctatgagcagctgtcatttttactaaggaggatgctcttggggggaaaaaaacccccaaaacctaaagaatttaaaataaaatagtctttcgttcaaacatgcaatcaggcaaaaacattttccaccccttcaaacctgcatccccaagaggcaaaaggcttacgtgttcagacttctcctgttcttttttgtccgtctgcaaaaactgatagttttcttttgccagcttctggactagttcaattcgtccgatttca

SEQ ID NO: 314635 - DNA, 380 bp, Homo Sapiens
actagtggatcccccgggctgaggaattcggcacgagcttgtctctggagtctgttctcagatccgccaccagggaggctctgtcaaggcatttaagtcaaatacttttctcagaactccacagtggcttctcacgtcaccaggaatgccaaagattgtcaaccctgtttcttttctggcttcatttcttgctccttttctttcagacactggtcttttcaccattcctcaggcctgccaggcaccatcactatccttgggtctttaccctgttactttatgaccctcatatgtacaattgcatctcaaggttgtattctccacatttctctgctgctttctctctttccattaccatctgacataggtgtatcattgtc

SEQ ID NO: 314636 - DNA, 1090 bp, Homo Sapiens
taaacatccatattcagtttatttttaaacagaggggcacgtacccacagagaagcaggactgagaaccatcatgggggcttgcttgaagtgatctgccccagccttctgacttcagagtgtctcatgatccaatggccatggggacggagctgccccttgataggatgcacttaagcatggtcaattcccccttcccccaaaggaaatggagaaaaggagccaagaagtcaatgaatccctggaatattgtcccagaatccttccagggatggtatacgactggccaccagtccacaaatgtgactggtaagggatctagtaacagaggatggagttgggcagaatattatcctggatgatatgcacccagcactagaatacacctttcattagaatgaagagaacagacaaagccctcagaaaagatacaaaggcagagacattgattagaacattatctcataacagaggtggggccattacccaccattattgtaaaataactgtaactaaccaaaacacatacaggcttctttaatggagttaataaaactatggcacattgggaatcaggggcagaggtactgttcccagacggaaaactgggataaagggagccatgctgacagggccttattccagtctaggttgttagaaaggagccctagcccagaaatgacagcaaatagccataatcattatgtggggctgaaccagaggaagccaggctgagccaagaagctggaagtatcttgaacggctctccaaatccaaagattatccatactctttatccctctatttctaggatatcttgatacatctcattacatttcacaatctctcggggttgtcaggcaggtcctgttggaggtaactgtaccgcacttgccgcagattatcagagaggatcaggctggggtaggccgtgtctgggtccagagtcacgtccactgagtataactgagcctctcttaattcttggattttctccatatctgactgcattttttctgtgaactgctttagactctccgtcaagaatagacatttttgggcaaaaatgtggattttctcttgcaaatctg

SEQ ID NO: 314637 - DNA, 2243 bp, Homo Sapiens
  misc_feature (17)..(17): n is a, c, g, or t
  misc_feature (38)..(38): n is a, c, g, or t
  misc_feature (68)..(68): n is a, c, g, or t
  misc_feature (89)..(89): n is a, c, g, or t
  misc_feature (96)..(96): n is a, c, g, or t
  misc_feature (109)..(109): n is a, c, g, or t
aaaatacccaaaatcantatgtggggctgaaccagagnaaacccagctgaacccaaaaagctggaaantaaccttgaaacggctctccnaaatccnaaagaattatccnatactctttatccctccagcgaatgtgtaaaaccagaaagtatgaaacactggaggtggacatctggtttttatttctaggatatcttgatacatctcattacatttcacaatctgcatgggaaggaaaaggatggtagagaacatggacatcctgtctcccactgcaagggcgtggaacatggtaaggatacccagctgtgacaggacgtggcaaggcaacaagatgccttgtgcctggcgtaggattacagccaacagcccttttggcctgaattcacctcctcaaggggaggtctccatggaatgaccatgattcccaacatggccagaaaacccatctatcccactcatggggcagatgatcagaggagctgcacttttccctcccgagtaactcagactgaagtagggccggacaggcccacaaaaggtagcatgagagaaagtgaaggtgtgacacctctctgtcacgttgtagaaggagacctcaccagcatcatagtcccaagaaaatccccacccgctggagcggggtccgccaggggtagggcagtcattggggaggtaagagcccaatattctttcccataccacaaagacactgcccagaatccattctggggggctgaggttactccaccttttctgcacactgagtcttcacagacacctatggtccacttggctttatctccccacctctacctcccaataatggtctccccggcgatgaagctatggagagcccaagacacagggaaacagattgaacctctcggggttgtcaggcaggtcctgttggaggtaactgtaccgcacttgccgcagattatcagagaggatcaggctggggtaggccgtgtctgggtccagagtcacgtccactgagtataactgagcctctcttaattcttggattttctccatatctgactgcattttttctgtgaactgctttagactctccgtcaagaatagacatttttgggcaaaaatgtggattttctcttgcaaatctggaggtgtgatccaaggttcaggaatcctgattctttcagccctgctcaatgtgtccccaatgtcctgcaggagctccctggtgggctgctgctgcttctcttctagctgagcgatcaggctgctgaggtgggagatgttgcaagagaactgggtgatggcaccattgatgctattgtagatggccaagtctagctcctcaaggcgggccaggaggcgatactcatgctcctttaaggagtgatacagctgctcaaactcccaaacaatcttctccctctccatctgggttaggctcaagagttcagctcgtgcctgttcccccctgggccccgacgtctctttctttaaatctttcactctttttaaatggtcgagctggttctggatttgctcccttgaagccctccaccgcctcctggagcggcagcacgctgtggccgcggtgctcgcgggagcggtcgcacaccacgcagatgggcatctggtcctcctcgcagtacagcttcaggggctcgcggtgcttctcgcacacgcccatctcgccgccgggccccgacggccgctcggtgcgcagctgctttaccagttgggtcacgttggccaggtgccggttgggccgcatgtgcctctgcgggaaggtctcccggcactgcgggcacgacacgttagtctctgccgtgccccagcagcgggcgaggcacgcgcaacagatgttatggccgcagtcgagcatcatgggctctgcgaagtactgcaggcacacggggcaggtggtctcctgctgcaggcactcggccacactcccggaggccatggcgccggcctgcgggggcgcacgggcatgggccccggcgccgagctctgcactgagcccaactctccggcgctctctccggttcgctgttcctgagaggcaccgggcggacggagggcggcgcctcccgggcccgtatcccagacgcgcccgcgcaccgaaggcttggagtggccgggccgatgcctgcgcctgtgccccctaagcgagagcgggaatacggccggctcaccgaggctcgcggccacgctagtggggcaggaaagggtagccgagggtcagagtccccctcgtccga

SEQ ID NO: 314638 - DNA, 701 bp, Homo Sapiens
  misc_feature (83)..(83): n is a, c, g, or t
  misc_feature (109)..(109): n is a, c, g, or t
  misc_feature (168)..(168): n is a, c, g, or t
cgacgacgaacacgcgagagtgagaagatactcgacacgtgtgcaacatcaagtctatgcagtgcccaagaaatctagtggcnacaacaaggcaagtaagaggcagtancgaagtcaactgttcatagagtatcaagtgccagtgatgacgtcacaacatcagcatcntcaattgacatttcaacatcacaggatgatgcgtcaaaagaagaaaagtgaggagcctgtgccctcgatttcttctgaaattgtgctgtttgtgaaattcactcgtccacaaagagtctgctaatcactaatgtgaggaactatggttgttggcctatgggcaggggaggtgataaggccttagaactggatttaaaacacaaaacaaaacttcctgaactaaagtcacagtacagaatagaatgggatggacagaaagactcaagagggcagctccgcaatggctactttcttgattcagtgctatttctggcatcatgtgctgcaatgtgaatttttgcttttctcacaggcctgggattcctcaggtcacaaaaggtgaccagcagcctctactcaaatcgttttagtgtttgttcctgaacaagctgtgttcactagaacatgaacacttaaaccaattgcacatccaggactctggcacttggtgttagtttgctgttgtttccacataggcaaacactacctcgtgc

SEQ ID NO: 314639 - DNA, 392 bp, Homo Sapiens
tagttgtgttacgagcttttatttaaaaagcacatttaatacaagtatagtttcgcagatacaagttttcactttgtatgctacaaaagtctttgaatattattctctttacaaaatggaaccttacaaaaatactgacaatttaatgtttttatacagttttctctagttgcagttatttcattataaaacaatgtctaccacagaactatgatattttagttgatatttaaaaaaattaactcaatgcttttttaaggcaggctaatgtaaataacacagggtcgaggacacaggtttataatcatggtggggtataggctaaattgtttccggggaataatatcttaccatgggttaacctttttaatggtttttataccctatttata

SEQ ID NO: 314640 - DNA, 1653 bp, Homo Sapiens
ttttagttgtgttacgagcttttatttaaaaagcacatttaatacaagtatagtttcgcagatacaagttttcactttgtatgctacaaaagtctttgaatattattctctttacaaaatggaaccttacaaaaatactgacaatttaatgtttttatacagttttctctagttgcagttatttcattataaaacaatgtctaccacagaactatgatattttagttgatatttaaaaaaattaactcaatgcttttttaagcagctaatgtaaataacacaggtcgagacacagtttataatcatagtggatatagctaaattgtttcagaaataatatcttacatagttaacttttaatgttttatacattatttatataatatttatatataaaaatcatagcttgctataagttgaaatgaaaggacggattctgtagtaaggatgtgcatgtggttgatccatatggttaacatttaaccctttgaaaggtctgcatccaagatctaaacgcatttcttccttcctcctttcctcaaaggttcagtagaaggggtccctgtctatcacctagagtgggaccttgcatggaaggacacttacggatagaggatgaggaaaactctctaccgagatttaacccatatgttctgcccagcagaacctaccaagaactgccctagggctcaaccccaagacaatagtgctttacacagcaagagcaactcctacaaagaccctcagctctgtcatcctgaagggtaacctctcatgcatgagactgcctgcttctctggctccttctgatttgcaacagctaaaaggttggttcgattttcattctgcccccttcaccctcccatctgttgtacagaaggctgctttccgtcagctggtggcagaccatgccttgctcattcccgggccctcacaggaaatcctggtgggcacgcagcaaggatttcaagggagaaggcagtaaccgaagtcgaactgtttctaagagtatgcaagtgcccggtgattgacgtgcacaacatcagcatcctgcaattgacatttcaacatcacaggatgatgcgtcaaaagaagaaaagtgggggcctgtgccctcgatttcttctgaaattgtgctgtttgtgaaattcactcgtccacaaagagtctgctaatcactaatgtgaggaactatggttgttggcctatgggcaggggaggtgataaggccttagaactgggaatctagattcgggatctgatcacttgactgagcaaacttgctctttccttttatttaaaacacaaaacaaaacttcctgaactgaagtcacagtacagaatagaatgggatggacagaaagactcaagagggccagtccgcaatggctattttcttgattcagtgctatttctggcatcatgtgctgcaatgtgaatttttgcttttctcacaggcctgggattcctcaggtcacaaaaggtgaccagcagcctctactcaaatcgttttagtgtttgttcctgaacaagctgtgttcactagaacatgaacacttaaaccaattgcacatccaggactctggcacttggtgttagtttgctgttgtttccacataggcaaacactacctattttgcccgactgatttta

SEQ ID NO: 314641 - DNA, 1199 bp, Homo Sapiens
gggggtggtacacagatataaaattattttaaaaaatactacgtatgaattgagtatctgagctaagagaggccacttataaataatgaaagatacatgtgttttgcataaggaatacagtgttttcttttcatagcaaagtaccattaaagcctcatgttttatactactaggtcaaattattttttctcctttttaaaatttatcggttccgacttaaaaccatcaagtctggtcagaatcaactcagtctagctgatgcaaaatcatatgcattcaaaaagcagtctttaccgagatgcctttacaaaccttggaatccagcaccttcttaaggcaaagtttcatggcagcagggaagtgaactaataattttcatttaccacatcttggtgtctttgaaaaaatactttatggcacaaacctgtttttgtctctccttatgtctccacttccttcaagtagactagatgctacaggcaatttctcatttatgccaccatgcagtctcaatccattttcaacttgctctacatacctaaaatcttccactactacacaaacctcagacacactgcaatctccacagcatgtgtgctccacagcatgtgtgctccacacttccagctggccctgggttccttgacttgtgaatggcagtgtttttttcacctatgtttgaagaaaaccaaagaaaagcctggcctttgctacctctcctgtgccttctacttttatctaaatgaacacactataatcatgctggttgcattttccttcattctcctccctactccttccaaacccctgattcctccaaatactatatatgccttggtcatttgggtggtttggatgctttctgtggaatgaactgtaatatatttctgctttattcagagcactttatattatttatatttaaattagccttttaatatggtttgtaaataagtttcctaccaaggtagcatgaaaacactacacataaagaaaaaaaatgttaagaactaaggtattaaccttgttagaaaactcttttgatattaacatttaaggcaagtagttccttccttatgatttaatataaaaacatttgcaaagacaaggcatttacttggatttctttgtcatctcttcttctttcatccttacatattgcacttggttcactgtatctgtctgaatacactgtgctt

SEQ ID NO: 314642 - DNA, 395 bp, Homo Sapiens
aaactcagaaaacaattaactggccagcaagcatgctaaaagggaaaagagaatccaaaaatttcagtagctacagtatagaaagatgcaactctcataacaaaaaggtaagaaaaaaatcaagaaatgctttgagaaacaatgacaaataattaaggcaaccttaaagcaaaagccaacttgagggcatgccaatcttattatttgctatagcctctgaataatttcagttgattcatgataaatcctttcaattgactaaaatggcttagtgaaaataaactaatagtgagcttctttcacattatccttataaattaaacataatgagaatgtttatagaacatatctttaatcttttactctatactttttgatgtgtctattggcatgtg

SEQ ID NO: 314643 - DNA, 438 bp, Homo Sapiens
gggcagagaagagctcacccagcacacaaggtgaacagagcaggcctcgaggtgtagtagatccgaagcaccggattcccggacaagtcgatcatcttgtgactctcactgcctcggaccacagaacttggggagaaaacaggggaacccacaaggcatgaccactaccatgcatccaatcctcatgttaacacctattgtacagatggaaaactgggcacggctaaggaccagtatcctgccgaaagccacagttacctatttgggggcagagtcaggattcaaatgccacatttgaaagctcccatgccccttcctataagctgtcacctatatggaatcctagaatacccagccagaagagtcctaagaattgcttaatgcaactgtaaacatgactgaagctttaaagagaggcaggtttgcctggggtctttc

SEQ ID NO: 314644 - DNA, 1850 bp, Homo Sapiens
tcattgacagacgagtatttattaagcagctactatatgccaggttcaagttggtcttactctagggatagagaagagaacaagaaaagtctgtgccttcatggagtttacattctagtgagggtagaaaatatcaagaatataaatacatgtagacagtcagtgacatcaaacaagtgggcggtggggacaccacatgagcatgggtggcaggagggcctctctgtgaggtcactgtgggtagacggagaagccagccagcaaactggaggaaaagcacccagacggacgtccttccctaagctccctcaacccaggccctgagccaagaatatctgaaaggaaaccaagtcaaatagtgaagtcccgccaggaccagggtaggcaggacagaggagccggtgacagggaaggctgtggatggcttcttccctcctgggcatggtgccccaagcttgctctggctgggggcggaggtctgactcccgcctttcaggaaacctggccctcacaccacctccctcactcaagcgtccctagcatctcggaccccaggactgagcaggcagggtgtgacactgcccggtcccggcaccccaggagcaccgcctggatggagggggcctcccgcgtatcctccctgatttgaggcccgggtcctcaggatcccagagaacgtgacgtcaccaaagagaggctgacccccatcccagcaggtagaacaacacatgaggaaggcgtgagactgggacctcctagcagggggtggggagctgtgtggcacagcaagactcccagggcaggtgggcagccaggacccggggctccagcgtcacttcttcttggcgcggtctgctgcgtccagggcagccatgttgcgggcggccgtgatcaggtggatgacgctgatgagcgacttcagcaaggcgatgggggcagtgacccagaggcccatccggaacagtcccacagagccaactaaaggtccctcagagaaatggaacaggtagaggaggcagtagaagagctcattcccagcacacaaggtgaacagagcaggcctcgaggtgtagtagatccgaagcaccggattcccggacaagtcgatcatcttgtgactctcactgcctcggaccacagaactgtggaggtgcagccagtgactggccacatccaaactcatgctgatttggaagaacagcgtggctccagggtacagcagggccaggttgaccaacaggcacatggtggagcagcggtccgtcagcatgtccagcatggccccaaaccgggttccgttgattttgggcgcgagcaggacgatattttcgtctggcatcgtggcgcctgccttgctgcgccgggcctgctctggaggatgccagtgctgtggcagccgggcatgaagtagaaagaaatgatggcgaagacaatccgggcataaccgatgaggttgggcacgaacaggaagatattttcgtctggcatcgcggcgcctccattgctgccccgggcctgctctggagatgccagtgctgtcccagccccgcagcgcggcctcagcctccggcccggcgcatcggccgcaccacctgcgccctggaccccgccgccccaacctggccccagatgctgaagcccgcagccgtcgggagcatggaccggccccgaggtgcgcgggacgcagggggcgcgcgcagtccgcccttcctacccgcaacctccctcgcctctgccagccccgcaggcgctccgggcctccagctgcggtcgccgctgctccagctgcgcgtggcttccgggaacctcctcctccgcgcccgtcgttgcaaaattggagagaggaaagt

SEQ ID NO: 314645 - DNA, 360 bp, Homo Sapiens
aagcagcacgtcatcaatcatggccaaacaggtgaggccgcaagtccccgacaaaggcgcctaatctcgggctctgtcttgatgacttcatcttgggctgtggccaccctctcaggggtgtctctgtgagtgttctggctccagggacagttgaagggaggaacattgccgtctgggactgaaggggcaccccccggtgctcaggctgccgcggccgtgacgttgagctcctggcggataaaccaggcccgcgggcgcggtagccagcgccggagcaagcacagcaggcggaaacgccacgggtagaagacgccggccgcgcgcgtggcgccgccgcggatcgcggccagggctgccttg

SEQ ID NO: 314646 - DNA, 1068 bp, Homo Sapiens
  misc_feature (152)..(152): n is a, c, g, or t
tttatagaaaagggtgacccccggattcccgtagatggtgagcgggtcccagctgttttttccccgtgcttgccttgccccgagagggttggacacagctgccaccttgcggtggaagaggtagtccagcagcgttagcgccatcttctcgnccgtgcggcagttggtgctgatgtgcagcatgtcggaggggatgatggcgcagcgtacccgcatctcggggttgttctcgtcgcccagccaggtgccattggggtagtcctcttccgagttcagggtgatgagcgtgacgttgctcccgatgctctgactgcccgcctgcccacagctggacacagagtcgctggcctccgagccgctctccccgtcctcgtggtggctgtcttcttggcccggcaccttcaccacaatggtgttctgccgacgcccaggcacagcgttgctaatgacattttccagggaatccggtgccctgttgctcaaggggtcttccatcttggctacaatggcgttctgccgatcattgttgagtattactgtagtctgggggacgacgcatcgcactttgttgcacgtctgggttgccccgagaggggagccggccaccatgggaacctggatggggctgtgctgcttgttcgtgaccagatccagcttttcttctaaggatttacaagtagcctccagggcttgcaatttggcttcaatgctatccaaccgcaagcagattgtctggttgatggaatacaggaatgactttatagatggatcctggcaattgatttctagtcgctggcgtttcaaagcaggttcgtcttcatctgtcactacatgattctccaaaacaactgggtggtcagggctcaggtcttccactgcaatctgaaccacatcggccaggtcgtgttccgacatcatccagagcacggagagtggccggtcaacacgaaagagttcaactcacagtggggctggcttttggtcaccgtgtgggctgcggaattctcgtggtgtttgtcggggagatgcgataatggcgtccgtcctcgcgagagaagccgccgctct

SEQ ID NO: 314647 - DNA, 1003 bp, Homo Sapiens
  misc_feature (131)..(131): n is a, c, g, or t
cttctccggcgttaagcgtgggtgcaagggttcggccgttcggtgccccggcccggtggtccactcattggcgcccagctgcagttactgaacctggatgtcgttgccctggagtggggacccattcccgncccgctgccgcggggtccgaggggcccacggcgatcagctgtgcaccctgcagcacctgaccgtcctgcccccacgtgatggatctggaggttgccctcgctgtcctgcgtgatctggacttgctccccctgcggcacctgggcgatgtggaggtgtccctgtgggattacttgcacctgtccgtcttctccgatctggtggatctgcacctgctgtgcgttggccagcgcgtagtgcagggcctgcggctgcggctgtggctgcgggagctcgctggcaggaggtggggtgctcatcatcggctctgaagggcagtaggaggacgagttgggcgttctccgcgagaagctcttgaccgccaggctctggccccgctgcttgcgccgccacgccgtgcggcacttggagtcgatgctctgcttgattcggtaccagtcggattctgtgatgccaaatttatagaaaaggtgacaccggatgccgtagatggtgagcgggtccagctgcttcttcccgtgcttgccctgccccgagaggttggacacagcctgcacctcgcggtggaagaggtagtccagcagcgttagcgccatcttctcggccgtgcggcagttggtgctgatgtgcagcatgtcggaggggatgatggcgcagcgtacccgcatctcggggttgttctcgtcgcccagccaggtgccattggggtagtcctcttccgagttcagggtgatgagcgtgacgttgctcccgatgctctgactgcccgcctgcccacagctggacacagagtcgctggcctccgagccgctctccccgtcctcgtggtggctgtcttctcctcgtgccgaattcgccacccaggcctcgctac

SEQ ID NO: 314648 - DNA, 357 bp, Homo Sapiens
aaaaagaggaatggctcatgactggtcgctggaaagtccaagactgggcagttgcatctggtgagggactcacattgctttgactcatggtggacaggggacggggagccagcattaatatagaagagcagggatcccctgcctgaggaggaccaatgcaggaaaggccaaagagcagttagaaatcagcatcccgagagaatgcaagatgttgtgaccaaggtgtctaaatatcaaacgcaagtcaggcggtaatgacttctcggagggagctggcttcggctcaggccattccgggtggggggagaggactgcaataaattgcatgagattatgttcctgtcaggatcttctcct

SEQ ID NO: 314649 - DNA, 426 bp, Homo Sapiens
  misc_feature (326)..(326): n is a, c, g, or t
cataaagaaaagaggtttatttggctcatgattctggtcgctggaaagtcccaagactgggcagttgcatcttggtgagggactcacattgctttgacctcatggtggacagggggacggggagccagcattaatatagaagagcagggatcccctgcctgaggaggaccaatgcaggaaaggccaaagagcagttaaaaatcagcatcccgagagaatgcaagatgttgtgaccaaggtgtctaaatatcaaacgcaagtcaggcggtaatgacttctcggagggagctggcttcggctcaggccattccgggtgggggggaganggaaactgaagacaaaactgtgcttctcgtaaaggtctaattcaggatcttctcctttgcccccaactcccagaccggcaatttctgaaggctgggagag

SEQ ID NO: 314650 - DNA, 825 bp, Homo Sapiens
  misc_feature (253)..(253): n is a, c, g, or t
tgggagttgggggcaaggagaagatcctgcaacccagtgattccatggaaagcagaaagaaggacataaagaaacggatacttggtgacatctttgactcactggatcaaaccttgcctgaagctcacatttctgaaatttccagatacaagaacaaatacttcctctttattgttttacttagattttgagacaagcttttaagtttcttcagactcttcctcttcctaacagatttatcagaagctgaaantctgatcttgttgggatgcggatcgtgtcaggagaaggcttactttgcacgcttttcttagtctggttgcctaactcaagaacctcggcatggctctgttacttctctactcagacaagcatccctgcagacactcactaggctaactctgtctttatttttagaattagacctttacgagaagcacagttttgtcttcagtttcctctccccccacccggaatggcctgagccgaagccagctccctccgagaagtcattaccgcctgacttgcgtttgatatttagacaccttggtcacaacatcttgcattctctcgggatgctgatttctaactgctctttggcctttcctgcattggtcctcctcaggcaggggatccctgctcttctatattagtgagaaaaccaaggctcagagaaactgtggattttctaaggatgctggctccccgtcccctgtccaccatgagtcaaagcaatgtgagtccctcaccagatgcaactgcccagtcttggactttccagcgaccagaatcatgagccaaataaacctcttttctttatgaaaa

SEQ ID NO: 314651 - DNA, 751 bp, Homo Sapiens
  misc_feature (439)..(439): n is a, c, g, or t
ctgaatgctgtttgtgatctctgttttcatagttcttgagcaggtactaataattaactggaaacaatgaaagtcatccaggttagggagaggaagttacccgtttatgagagttgcttgagagataagctgaaaggatgtggcgtgctacccccacccctgcctcgtgtagaaaagcctgccaatgttgcctcatttagacccagactccaaaacgggagtcttatagctgggccacctatgaagagaggttctatagcatataaaagaaagcatttcattttgggacacttttttgcagctggaaatgggggaatgggctaactggctaaactactatcttgtgcatactgccttcactttagtgcttccacattgttatttggtgtttggactgtgctagaagaactgtgttatacaggctgctattcaatatatntgtaaataccatacccacaccaaaggatttaacactgaaaagattaaggtaattttggaaaattctgtcactcttcactcctgagatagtaggtggtcagaagaaatgaggaactctgtagaagccatatgcaagatgcacagatggcattgtgtttgttgtggactgttgatgttaacaggatggaagaagtcggtgctaagaaactagacttcgaggacttgtctctctcagaattgagaaattgttagcatggttgactgctcatctcttggatttgcagctactgtgcatcatagactgtatatagag

SEQ ID NO: 314652 - DNA, 634 bp, Homo Sapiens
  misc_feature (19)..(19): n is a, c, g, or t
  misc_feature (40)..(40): n is a, c, g, or t
  misc_feature (131)..(131): n is a, c, g, or t
gagagtaaaggaaagctgncggtggatgggccaacagaanagatgcagcagacagggccctctcatacactggagggccacatggccaggcctggacccagactctcaccgtggctcacaggcagcattgnaggtgtggagccatacgtagatgtcacagccacttggacccacttgggcacagtcagactccaaattcagagtatttgggggttagcatatgtcagagaggccagcacacttgctgctgtcttctgtgcagtgtctcaccctcccaaatttgtgttgtcacgtaggcaaaagcagatagacacatgttctatgtggtcatgcaactaaggtgccagctatacatttaacatatcctagcatagtctcatacacgtatcagaagcctccacctggctaacaggaatttggggctttgggagattttttaatcagggcaaaacctgtactagtaaccacatgtccagacccctcctatgctcccacccagggtcccttgagctgcttcccattcccctagggctgagacccaatatcctctatccctggcctctagtgtaaatgtgtctgtatgttcctgcctatccgtcctaggccctgggtcagaatgggcggagaagccttc

SEQ ID NO: 314653 - DNA, 1250 bp, Homo Sapiens
  misc_feature (410)..(450): n is a, c, g, or t
  misc_feature (1093)..(1093): n is a, c, g, or t
  misc_feature (1121)..(1121): n is a, c, g, or t
tttggaatggcccctgattcctccatgagcatgcagcttggcccagatatggtgccccaggtgtacccaccacactctcactccatccccccgtatcaaggcctctccccagaagaatcagtcaacgtgttgtcagccttccaggagcctcacctgcagatgccccccagcctgggccagatgagcctgccctttgaccagcctcacccccagggcctgctgccgtgccagcctcaggagcatgctgtgtccagccctgaccccctgctctgctcagatgtgaccatggtgggaagacagctgcctgagccagccagtgacagcgtttcctcagggcacttgggattgggtgaagacatattccctcctctgctgcctcccactgaacaggacctcactaagcttctccnnnnnnnnnnnnnnnnnnnnnnnnnnnnnnnnnnnnnnnnncacagcccctcctgcagccctcccactatgggcaatctgggatctcaatgtcccacatggacctaagggccaaccccagttggtgatcccagctggagggagaacccaaagagacagctcttctactacccccacagacctgctctggacacttgctcatgccctgccaagcagcagatggggagggtgccctcctatccccacctactcctgggtcaggaggaaaagactaacaggagaatgcacagtgggtggagccaatccactccttcctttctatcattcccctgcccacctccttccagcactgactggaagggaagttcaggctctgagacacgccccaacatgcctgcacctgcagcgcgcacacgcacgcacacacacatacagagctctctgagggtgatggggctgagcaggaggggggctgtgtaagagcacaggttagggcatggaaggcttctccgcccattctgacccagggcctaggacggataggcaggaacatacagacacatttacactagaggccagggatagaggatattgtgtctcagccctaggggaatgggaagcagctcaagggaccctgtgtgggagcataggaggagtctggacatgtggttactagtacaggttntgccctgattaagtatgagactatgcanaagtacaagggctgagattcttcgtgtatagctgtgtgaacgtgtatgtacctaggatatgttaaatatatagctggcaccttagttgcatgaccacatagaacatgtgtctatctgcttttcctacgg

SEQ ID NO: 314654 - DNA, 2253 bp, Homo Sapiens
gtacagtagattatttattttgttattttggaataaaatttattttatggcttaggatctatgacccctgccttgagagggagaatgggataggggagtgaagggaagctggcggtggatggggcaacagaaaagatgcagcaggcagggccctctcatacactggagggccacatggccaggcctggacccagactctcaccctggctcccaggcagcattggaggtgtggagccatacgtagatgtcacagccacttggacccacttgggcacagtcagactccaaattcagagtatttgggggttagcatatgtcagagaggccagcacacttgctgctgtcttctgtgcagtgtctcaccctcccaaatttgtgttgtcacgtaggcaaaagcagatagacacatgttctatgtggtcatgcaactaaggtgccagctatatatttaacatatcctaggtacatacacgttcacacagctatacacgaagaatctcagcccttgtacttttgcatagtctcatacacgtatcagaagcctccacctggctaacaggaatttggggctttgggagattttttaatcagggcaaaacctgtactagtaaccacatgtccagacccctcctatgctcccacccagggtcccttgagctgcttcccattcccctagggctgagacccaatatcctctatccctggcctctagtgtaaatgtgtctgtatgttcctgcctatccgtcctaggccctgggtcagaatgggcggagaagccttccatgccctaacctgtgctcttacccagcccccctcctgctcagccccatcaccctcagagagctctgtatgtgtgtgtgcgtgcgtgtgcgcgctgcaggtgcaggcatgttggggcgtgtctcagagcctgaacttcccttccagtcagtgctggaaggaggtgggcaggggaatgatagaaaggaaggagtggattggctccacccactgtgcattctcctgttagtcttttcctcctgacccaggagtaggtggggataggagggcaccctccccatctgctgcttggcagggcatgagcaagtgtccagagcaggtctgtgggggtagtagaagagctgtctctttgggttctccctccagctgggatcaccaactggggttggcccttaggtccatgtgggacattgagatcccagattgcccatagtgggagggctgcaggaggggctgtgcccccaaggaccctccccccgactccccttgcccctccaggagaagcttagtgaggtcctgttcagtgggaggcagcagaggagggaatatgtcttcaccaatccaagtgccctgaggaaacgctgtcactggtctggctcaggcagctgtcttccaccatggtcacatctgagcagagcagggggtcagggctggacacagcatgctcctgaggctggcacggcagcaggccctgggggtgaggctggtcaaagggcaggctcatctggcccaggctggggggcatctgcaggtgaggctcctgggaaggctgacaacacgttgactgattcttctggggagaggccttgatacggggggatggagtgagagtgtggtgggtacacctggggcaccatatctgggccaagctgcatgctcatggaggaatcaggggccattccaaggtcataagaaggcaccatggtaggcatctggagctctggggtaggaagtggttggtccctttccacggtcatcttgatggtagctgggacataacccctgccatccttacccatctgttcaggcttgtagtggctccggaaagcctcatccttgggcttcttgggatagagatttttgagctgagcaagatcccggattcggtcccccagtgagcgaatggacaggtctttggcagagaatggctggatgttctctatctgtggagagccatcctggccccggatgacatgggcaatggtgatgcccccaatctctgagtcgctgaagcggaggagaaaggttccgtcgggctcattgagaagaaggctagtaacgtactgtttgctgatgaagccaatgatcagccggtcagaccagtagctccggagacagcgtttggtgaggtccaggacaccatcaaaccactgccaaaaggtgaagccacggcccagcaggatctccttgttgaactgcgaccaggacacagaacggtgctggaaggcctccatgctgaggctgttgtcattg

SEQ ID NO: 314655 - DNA, 508 bp, Homo Sapiens
cgcagctactttattttcgttttaattttttggaaggatatacaccacatatcccatgggcaataaagcgcattcaatgtgtttataagccaaacagtcactttgtttaagcaaacacaagtacaaagtaaaatagaaccacaaaataatgaactgcatgttcataacatacaaaaatcgccgcctactcagtaggtaactacaacattccaactcctgaatatatttataaatttacattttcagttaaaaaaatagacttttgagagttcagattttgttttagattttgttttcttacattctggagaaccgaagctcagctcagccctcttccttattttgctcccaaagcctcccccaaatcatcactccctgccccccttaaggctagaggtgagcatgtccctcacaattgcacatgtcaagccatcagcaaggcgcatcacacaaaaggcaccaagacgtgaaactttttaaaccaaaaggacgaagaaaaaaccctttc

SEQ ID NO: 314656 - DNA, 943 bp, Homo Sapiens
  misc_feature (3)..(3): n is a, c, g, or t
  misc_feature (7)..(7): n is a, c, g, or t
  misc_feature (24)..(24): n is a, c, g, or t
  misc_feature (28)..(28): n is a, c, g, or t
  misc_feature (37)..(37): n is a, c, g, or t
  misc_feature (45)..(45): n is a, c, g, or t
  misc_feature (48)..(48): n is a, c, g, or t
  misc_feature (51)..(51): n is a, c, g, or t
agntcanccctaatgagagtcagnactngtcccgagnctttgganctnccngaacacacccaacattgtgctggtcacagtttgctgttcattttctgtacacctcgcattaccatacacatgtgtgttgcttcaaccactaccccgactccagcaggccgcaaggcttccgtgattgctacagcaatttgttttgtaaggcgctcctgaacttgtagtcttctactatagatttctacaatcctcgcaagtttgctgaggccaaggacttgcttgttaggaagataaccaatatggacctttccaacaaatggaaccaagtgatgctcacacatggaaaacatgtctatgtccttcacaatcaccatctcatcatgatcttcatcaaatatagcatcgtttaggacatctgagatggtctcctggtagcccttggtgaagaactgcatggccgaggccgccctccagggcgtcttgagcagcccttgccgctgggggttctcgcccagcgagctcaggatggacgagtaggcggctgccaggttagggaggttcagctcgttatcctcctcgctgcggggccgctcgcccttccagccgtccgcgggctgcgcgctcttggcctcgggccgcgggggcttctccgccggcctgctgggcccgggccgcggcggatcccgctcggggaacccattgctgcacctggcgccccgcggcttctccgccggtgcccgcacagggcccttctccatggacccgccgcagccgctgccgttcgggaaggaccccggggcgcttcgaggtctgcggctaaactccgccggtggccgcggacaatgggctgtggccggagtcacctgaggaaggtacgcgacctgcttagatcacactccgagccgggagcggatcccgggaattccggaccggtaccagcctgcttttt

SEQ ID NO: 314657 - DNA, 341 bp, Homo Sapiens
gctatcgggagccccagtcctagtcggtgaaacgcggagacggcctctaacgtcccgccgtagggggtggagtgggctccgagcggctgggtttcgtttggttggagttgtgccatgtgaggtgcccggtgtgggacgcgcagtccagttggggctctgcccgcctcgggcctgacctacttagtggttccaagttaagagttggcaggagccgcacctgattttattacttttgccactgtggtacttcgtgttagtgtgtccagagtaagttttcagaagagttagcaattgaattgacttagcccgtctgattgcagtgctattgcattaggatgtcg

SEQ ID NO: 314658 - DNA, 601 bp, Homo Sapiens
  misc_feature (127)..(127): n is a, c, g, or t
cccaatgtccctgggcccgatgagtaacaaatgcaccctggacccagagaagtggaaagacatgaaagggaggaaacagatcgtaaaaataacctgtatgaaaatcacacactcccgggactgcctntgctgtggagggtgagtcctgggacaggctttgggtgacaagttgtgggcatgttccatccaagcctggctctcccgactggcagagggaggtggctgacaatcaattcctctggatacacctgtgattgctcctgtgatcaaaggcagccaccgacaggtgcgggagcggttagttcaccacgtcatagtagtaattgcgcagccgcagttccactgctgcgaatccgggcctgttttccacatcgtatgtccagcacagattcatgagatcgtacatctctcttggacaccctgcagggcaccccatccgctctcctttctctaacatagcggtgacttcacttcctttcatccctcgatatggcttctgcccataggagaatgcttcccacatcaacactccaaagctccagacatcgcttttgctggagaacttgtagtagttgatgcattccggagcgtaccacctcgt

SEQ ID NO: 314659 - DNA, 814 bp, Homo Sapiens
tctttctttctttccttaactggctacatgcttagaaactgcactggtcaaacttgattttctttttaaagcctcaaaacatttttattgtcaggaaagcttttcagtggccagggatcagtctcatggccgtagaagcagccaaattcctctgcctttgccttcccttcaggagtcacatgctaaggcatccttgggcatttggaaaaggccgcttggggtgagagtgctctaggccactctgcaatgtccctgggcccgatgagtaacaaatgcaccccgggacccagagaagtggaaagacatgaaagggatttggaaacagatcgtaaaaataacctgtatgaaaatcacacagacaagaaaacaaacaaatccagctagccccttggatcctgccatccgtcttttctcccgggactgcctttgctttgtggagggtgagtcctgggacaggctttgggtgacaagttgtgggcatgttccatccaagcctggctctcccgactggcagagggaggtggctgacaatcaattcctctggatacattttcctgtgattgctcctgtgatcaaaggcagccaccgacaggtgcgggagcggttagttcaccacgtcatagtagtaattgcgcagccgcagttccactgctgcgaatccgggcctgttttccacatcgtatgtccagcacagattcatgagatcgtacatctctcttggacaccctgcagggcaccccatccgctctcctttctctaacatagcggtgacttcacttcctttcatccctcgatatggcttctgcccatagcc

SEQ ID NO: 314660 - DNA, 624 bp, Homo Sapiens
  misc_feature (50)..(50): n is a, c, g, or t
cacaggcgatctgaaatgtgcttcttgatatgaatggatcattcctcaancattctctaccgatgggccatgaaattgctccaatgtgtattattacaaatataactgcagggaccagactgacacatgtatctgtcgtgcatcgcttgtctatttctccgtagacacctttaacattgagaattctttttttctccatcttctggtcaaaactgggaagtacttgcctaccatttcctctgagctcacttttgccaacatttgtgtagtcatacagtgggatcacattatatgcatgacatcaaactcaaatccctccaacacgtttgtgtcctcgtttgctgggtcaattgctacattgttataacttgtatattttattcagagttcagtcacattggacatacatagcaggaatgagaggccagtatcttcagggactctctctcaagtggataagcttcagagatttttgtaatctttggtcactctccccatctttttcctattccaggtaagtactggatctgatgggcccagctcaggtcaggcactctctccttgagcagtggagagcgggacatcttcatgtgtagtaccagctcgtgccgaattcggcacgag

SEQ ID NO: 314661 - DNA, 711 bp, Homo Sapiens
  misc_feature (134)..(149): n is a, c, g, or t
  misc_feature (649)..(649): n is a, c, g, or t
aagattccaagaaaagttgttttttctagtggctactttgccttaaagaggctttataagttcattcacacagctggcttctctggttttaagattctggagaggatgataacctagtaacaccgcagtgcttnnnnnnnnnnnnnnnnctaccatcaccagaaaattccaccagtttgttttccttttctctttgtgtgatgtgtatgtacttcccaactaagtaaaattttcctctagtgagtgctttaggtaacctctttccatatggcagtagtgaaagaactgagccttcagttgatagttcttctctctccagcaagtcgctaaactccacatcccttcgtttttcctctggaatgagaataacaaactatcctagtttgcatttaatctaatggaaacttgagcaaagtttcaattttcttcctataaagaaactgacattttgtcaacaattgatgagcctatagatcatacagtgtataggaagtgaaattgaaacagttaaattatgtgatatttttctctaattggtaaagtacctatttattttagcattataatatttgattgaggccctgagggtgttaatatctcaatctcagagttagatgttcatgtgctttctgaattctttaaacatttntcataaatatttttttaagtagggagcacattggtgaattctctgtgtctcctctgtttgct

SEQ ID NO: 314662 - DNA, 756 bp, Homo Sapiens
ggtttcgtttttttggccctagagagtttattacaaaataagaaagagaagtctggggaaggttcactcatcatagaattttggcagttcattgcccaagatgactcgatggtccacaccggcagctgtaatagtgaccaggtagatgacacccccgcttgagccatcccggctcatggccagagcaatagcgtctgtggtgaagcgcctgcactcctcgggagacatgcctggcttatatgctgcatccacataaccatagataaaggtgctgccggagccaccaatggcaaaaggctgtcgagtcagcattcctcccagggttccatatacctgacctccttcacgttggtcccagccagctaccatgagatgtgcagacaagtcctctcgatatttatagctgatatttctcaccacatttgcagcagccaaaacaagtggaggttcctccagttctatcccatggagctccagctggtaggcggccatgtcggccacggcttgggcatcagcagctgaaccagagagtgcacagtagatgtgctcgtgcagcggggacagcttgtcaaacactcggttcaccaccgcctcgcctgcagacactcgggaatcagaacccatcacaacgcccccgtcaaactccactgccatgatggtggtcccggtgtggacttctcccgcccggggtaagtccccggttggtgctcccgcccgcagcatccctgcaaggcaccgctctcctcgccgcctccc

SEQ ID NO: 314663 - DNA, 635 bp, Homo Sapiens
ccgggctgcaggttttttgtttcttctttagctctctgatgctccaagccgagtttttctaatattttgtcacacatttaaaaaataaagccaagaattggtacatttctttaagttaggatgagttaagagaattgcagctgttgtgtggacaaagttcatatgtgttctgtgacgtggtgtgaactctgttctatgtctggtatctaatgtcaccaggttgctcagacaggatctctggtcaccattatctgaattctgcctggtgacatcagtataccttgagcatttatctgaacacctaggctagcatagtgctgtcttggtcctgaaggcagagcacgtgagaattctgactttcttttgatctagaagttaagtaactctgtagaccttttatattactttcaccctagatgaaaattccatttttcccctttttggatgctttaaggatcaactactgatgaatatgttgcaagacaacttcaagaacacaagaaccgcagttactttagcatgaacctagtagataacattcgtgtaagaagggatatatcgatatacttggtaactgagagctgagatttaatctttaggccttgctttaagccccagtagctgtctactacttt

SEQ ID NO: 314664 - DNA, 361 bp, Homo Sapiens
gtggtgcattcatgctcctctaggggggaagcggggtcggaggggagtgctcagagccaccttagcgcaaagtgctaacttttgaattgaggcagtgccaggggacgcagtatccgcatcgcatctacattttacctcgctgtgaaatgagaacgcaaagacgatttaggttttattggttccgacttatatttttccgaggtctttgatttacgggaaattgttacgtactaaatctcatatagcaagagatttagaggaagctacagaatctaggctaatgtatctaatagcatttcctgcttttgctctttttctttgcctttttcccctactctaagaagttcatattcctggcctg

SEQ ID NO: 314665 - DNA, 740 bp, Homo Sapiens
ttttgcaaatataaagaggtttattcattctgtcattaggatacaaaatagaacatgtaaaaggcacccctcccgtcgaccccacagttcagtgtgaacaccgagcgctcgtccagggaaggctgccatgcacggcgtggctcccggtgaaggcagccggcttgagccagcctcaggtctcgaacatggcacagctggtgcacagcactttctcgtacatgtcactgcagtccacgaggccacacagggtacaggccacggagccgcagccccagcaggtgcgcacacactgcccgcacagggctcgctcacactgaccgcagaccgccttcccatccacggctcgcacgcatgaggaacaggcaatggacgctaccccagatgggtcagcttcggaggcctgcccaaggctcctgatcaggcggccgtctggtccaatcagcatctgcccacgtgcagccctcggggcccctgtagggccaggctttggggactctggcaggtgaacgacggcacagccttcatcccacacgtggtccaggtaggcctgggccccgaggaacaggagtcgcttggtcttctcgaagacctcctgcgagtagcgctcggcgcacacgccgcggctcaactccctctggctcacgcggaccttgagctgtagcggggccacgtccgcgaaggggcagctccgcttgggcatggccgcggggccgggagctacgcagctccccggccgccag

SEQ ID NO: 314666 - DNA, 837 bp, Homo Sapiens
tctttgtcccctcttgcattctgttcaccttaaattatgtatgctcctcctgatttctccaccgggggccaaatataaaaggggggttatttccatttcggcccttgggggtcccaaaatggaacctgttaaaagggccccccttccggtcggacccccccagtttcagtgggaaccccgagcggtcttccagggagggctgccatgccccggcgtggctcccggtgaaggcagccggcttgagccagcctcaggtctcgaacatggcacagctggtgcacagcactttctcgtacatgtcactgcagtccacgaggccacacagggtacaggccacggagccgcagccccagcaggtgcgcacacactgcccgcacagggctcgctcacactgaccgcagaccgccttcccatccacggctcgcacgcatgaggaacaggcaatggacgctaccccagatgggtcagcttcggaggcctgcccaaggctcctgatcaggcggccgtctggtccaatcagcatctgcccacgtgcagccctcggggcccctgtagggccaggctttggggactctggcaggtgaacgacggcacagccttcatcccacacgtggtccaggtaggcctgggccccgaggaacaggagtcgcttggtcttctcgaagacctcctgcgagtagcgctcggcgcacacgccgcggctcaactccctctggctcacgcggaccttgagctgtagcggggccacgtccgcgaaggggcagctccgcttgggcatggccgcggggccgggagctacgcagctccccggccgccagccccttaccaacgaccccc

SEQ ID NO: 314667 - DNA, 375 bp, Homo Sapiens
  misc_feature (237)..(237): n is a, c, g, or t
  misc_feature (240)..(240): n is a, c, g, or t
  misc_feature (341)..(341): n is a, c, g, or t
tgcaaatataaagaggtttattcattctgtcattaggatacaaaatagaacatgtaaaaggcacccctcccgtcgaccccacagttcagtgtgaacaccgagcgctcgtccagggaaggctgccatgcacggcgtggctgcccggtgaaggcagccggcttgagccagcctcaggtctcgaacatggcacagctggtgcacagcactttctcgtacatgtcactgcagctgcgacangtncagggaggggagagaaaagctgctgtcaggggctgaattgtgtccaccaccccccaccattcaaacgtcaaagtcctgaacccagaacacctcaggacatngacctttttctgggagacaggtttcattgtgggg

SEQ ID NO: 314668 - DNA, 364 bp, Homo Sapiens
cttttctcctcttcatctgcctcttgtcagtaattttcacctaaccttcagagggctaagcggaagtgttctcttggctccaacagtactcagaacgtggttgagttgagagctatccaatcttccctgaagttttttgttggatgtctaaagtaccaaagagttgagacccgtccgtcagagatggccgcaaggccctgaagcacagaccatgagtttctctagctaccaacttcaagtgaaagaccagaagcaactagacatatgaggaatgtcacctcagagaccagaggaggcagaagaacctgttcaaacctgaccctttgtcccaatgcctcaggttggtatctagggatatctgatt

SEQ ID NO: 314669 - DNA, 710 bp, Homo Sapiens
gtccggggaagcagagggaagcaaacagatccaagaaatgtgttcaagattgattttgcaggacagaaaatgggaggtgtataaagagacttccaagctcctgatctaagcttaggagggaatggccagctactgagatggggaagctgaagtgtgagggagttcaccattgcaagtaagtcgcatttaaaatatacatgaagatgaaagtctatgagagtggtggtcattcatccataaaagtgagagagagggtttctgttcatttccaggtgggtttgtgcccttcgtgatgaccccttggactcacctcaagcagaggtctaaattacttgagagtgtgttcatgtaaattcactagtcagatatgaatgccactcaggcatcacaaaacaatcacagaagacaggagtgagcgcattctcaagaatgttttctgaaatgagcagaagagctttgataccagaagactttgtgttggaatttggctttctattattagaaaacgttatcatccggagtatttgatagatattcagggttagttcctgagtgactgtccaccagctgtaaagcagactgcatcaagcattgtagaagcctcacctgagatttatgacaaatggaatgttgacctcctgacaacacccggcaagtcccattatgtctttaacttgagggacttatacaaatgtgtgcagggatgtctg

SEQ ID NO: 314670 - DNA, 379 bp, Homo Sapiens
agagggccgaatgaagtaaagctgcacctcctccgtgcaccaacctcacttggcctctgtggagagacccccattataaaggaggggacttcttcccccaaaccagaggtttgaggctgactagaccttggctgttatggtctcctataaaacacagtaggaaagagagttttactcttacagcaagagcaagaccaacatgctgtggacgtgacctactaagttgacctcccagcgagctaaacattctaacatcatttccttagaacaagagcaagaccaatacgctgtggacatgacctactaagttgacctcccaacaagctaaacatcctcacagcatttccttctgagcctctgcctgagaagtccaccacag

SEQ ID NO: 314671 - DNA, 414 bp, Homo Sapiens
aggggggaccgagatcgggatagggaaagggaccgagaacgaggcagggaaagggatcgcagggacaccaagcgccacagcagaagccggagtcggagcacacctgtgcgggaccggggtgggcgccgctagctgggcactagagctgcaggtaccagccactcggccccagggggttatggccacagagggataggcacagtctccaccaccctggagccaagggtctttcacatcacctatccctacatacatacctggcttagcccgaccctccctctcatttcccattaagtctgagaggcaagagctaggttaggcaaggaggtggttggccagagatggggcagccaggtgccccagtcctctgatttttcctccatcctgcttaccacctccctgggtacttacgcc

SEQ ID NO: 314672 - DNA, 644 bp, Homo Sapiens
gaccacaaggaaaagggtggatataaagtggaacctgtgggaaagaggcaagggctgcaggacagaagagactgggaactgcaggggccctgggactcaggaggagatgctgattcagctcataggtgacccagtcctggccccggctgttcccaagagaaggctgtaagtacccagggaggtggtaagcaggatggaggaaaaatcagaggactggggcacctggctgttccccatctctggccaaccacctccttgcctaacctagctcttgcctctcagacttaatgggaaatgagagggagggtcgggctaagtcccaagagataggttaagggggtgtgtttggggggaaaaggatggccacttttccatttggtatgtatgtagggataggtgatgtgaaagacccttggctccagggtggtggagactgtgcctatccctctgtggccataaccccctggggccgagtggctggtacctgcagctctagtgttttcccagctagcggcgcccaccccggtcccgcacaggtgtgctccgactccggcttctgctgtggcgcttggtgtccctgcgatccctttccctgcctcgttctcggtccctttccccctcgtgccgaattcgccacccaggcc

SEQ ID NO: 314673 - DNA, 443 bp, Homo Sapiens
tctggttttaaactttattttccatgtacagtttcagattatacaaaacatagaaaatggactattttaaaggtacattaagtagaaagtttctaactaccctaaagtcacaaaccaagattcaaaatgaacctctaggccttgccctaacatttccccaacaccacaaaattgtccaacttgctctattgtaagtaacctttaaactattagcgagtttagtaacatcccgcgaggcagattttaaactacgatacagtttctatctaggccactgtgtttagtgtgtttacaaacaggcttggagttctaggtttcttcatcatcagtgaacacagagcgtcctagagcgccagcctgttcatgaggggtgtccacaaaagcacgcaaactatagcagagtgtgtgggagtgaataggtctccgatgttcctgtattcagg

SEQ ID NO: 314674 - DNA, 352 bp, Homo Sapiens
cctcttgcttctcacctccttccccttcaaaaataaccagttttgaaataattaaatcaagtatatactaatcagcaactagtcatcttggaggagttattagaaaataattcctttcatacttggctgagtcactctattttctagtcatacattgagtcactatcttctttaagccatcttgaatgaatgcttctgtgtgttggtggcagctgccacttaaagatgcatttcttctggccatcccctttttcacagtaactgtgtaaaggctagtatccctcagtcgaaggagccattggaatgggattaagggcacagcagaggcttaggggtagtggacaagaacgag

SEQ ID NO: 314675 - DNA, 435 bp, Homo Sapiens
cgcttgcagctgcggcaagtgctgtcggcggctgctcgcgcacgtcagctgtcgtgggaactaccctttgtagctgagaacggcttgtttattgctaccgagactctattgacattgcgtagcttcagcggcagcagcttcttacggtataaagctgttgcttgctgaagaggctacaagcatacttccgtaggactggtgtaagctttgagcctctagcaggggacatgccttggtgacggattctgcgccggcgtaatgcgagagccgcagaggagaaccgcagcaatcggagaattcaggcctcagaggcctacgagacccttatggacgcctctgtggtagcgagcacccgtgaagacgaactgagcggacccgagggagacccgagcactccagaggaggcctctaccaacgctgaaggcctcggccctg

SEQ ID NO: 314676 - DNA, 345 bp, Homo Sapiens
aaagctctgacaactcccacttcattgtcagaataacctggatagaggccaaagcttaaaccaatttgtacatatgtaaaaagaaaagaaaaatgagaaccctaaattgccgtaagagttcagggcagcagagcagatctttctggatttggcaccagagtccctgagcctggggatgggcccgggggtcaggtccttgtttgcagagggagtctgagggccagctccgtcaccatggtcctggtgtctgcacagccgtgcctctgtgccaggtgccacaggttgacggagagctggttgagcttgttgttgcgtaggtccccatgggccaagatgctgttaaag

SEQ ID NO: 314677 - DNA, 921 bp, Homo Sapiens
tttgctccttcaggacatttattcagttactgtatactgaagccacagagaatctcaaatttgacctcgctttctcctttgatccaccaacacagattctaagtccaatcaagagctgcttttgataggaaaaagagttaatggagtgctatttctgccttttataaatcctccataggggttcaggtaacacagttccagactttgggtgtgctctaactttaaggtacaaagtctggaatggaatgggtctggaacagtggcactttgaaaagcagtccacttttaaagtccttatttctaaactatgaaaaaacaaacaccttccagagaagaaagatgttacttgcattcttgtttctctcttgctaaaaaggcccatcagatcgggctgagtagaccgaaggccacttgtgcaaagacaacacagagactgcttcttagtgaagattgcattttaatgctctgacaactcccatttcttcattgtcagaataacctggatagaggccaaagcttaaaacaatttgtacatatgtaaaaagaaaagaaaaatgagaaacctaaattgccgtaagagttcagggcagcagagcagatctttctggatttggcaccagagtccctgagcctggggatgggcccgggggtcaggtccttgtttgcagagggagtctgagggccagctccgtcagatgagtcatgtctggttgtttgctttgcttcttgatgtattctagcgcaccatggtcctggtgtctgcacagccgtgcctctgtgccaggtgccacaggttgacggagagctggttgagcttgttgttgcgtaggtccccatgggccaagatgctgttaaagaaggaaaggcccatcgagctctggcgcttcagggcctcgtccttggccagggttttcagatgcc

SEQ ID NO: 314678 - DNA, 588 bp, Homo Sapiens
gttaagccagagccaaccaactcttccgtggaagtctctccagatatctaccagcaagtcagagatgagctgaagagggccagtgtgtcccaagctgtctttgcaagagtggcattcaaccgcacacagggattgttgtctgagattctgcgtaaggaagaagaccctcggacagcctctcagtctcttctagtcctgagggccatgcagaatttcctcaatctgccagaagtggagcgagatcgcatctaccaggatgagagggagcggagcatgaatcccaatgtgagcatggtctcctcggccttcagcagtcccagctcctcccgaacccctcaggccaaaacctcgacaccgacaacagacctccctattaaggtggacggcgccaacatcaacatcacagctgccatttatgacgagatccaacaggagatgaaaagggccaaggtgtctcaagccctgtttgccaaagtggctgcaaatagtcagggctggctgtgtgaactgctccgctggaaggagaacccaagcccagccgcaccctctgtgtcatctatgaggaggagtcaaggcatcaccacgcgc

SEQ ID NO: 314679 - DNA, 668 bp, Homo Sapiens
  misc_feature (607)..(607): n is a, c, g, or t
ggatcccccgggctgcaggaattggcacgagtcatgatgttcagtgctaccttgagcaaagagatccgtccagtctgccgcaagttcatgcaagatgtaaatacccttctaccttctctccctccactccccgcccgctgcctcctccccttcctcgccctcttcctcagactcccttgtcattcaagtgccaagaaggcggcttgtgcccaactgggagtaatgactccttgaagagacatacagaagcagagacagctagtgttagggcctgcgcgggtgccagggaaactccggaagacttggtcgggttaatgtgagagcgggtagtgttcgactttttcattcacaacatttttgaacctcttctcccttcgggggagggcaggatttttctgccctaccacccacccatccatcgtctcttacatgcaccctacagccacgcaccctcaaggtggcatcgagcatacagctggagccttctgctcaccctcctacttcccggtggcaggagagcaagagagggacagacagatggcagggcatgtccgggccctttggcacctcaatccccgataccctaactccttcccacccacatctncttgcacccatctggaaccctcggtgatgtgagcccggcacagaggcaccgtggcgccgcg

SEQ ID NO: 314680 - DNA, 757 bp, Homo Sapiens
  misc_feature (649)..(649): n is a, c, g, or t
  misc_feature (651)..(651): n is a, c, g, or t
  misc_feature (676)..(676): n is a, c, g, or t
  misc_feature (692)..(692): n is a, c, g, or t
agaagccatgaagctaaataatcaagccatgaaagggagatttgaggagctttcggcctggacagagaaacagaaggaagaacgccagttttttgagatacagagcaaagaagcaaaagagcgtctaatggccttgagtcatgagaatgagaaattgaaggaagagcttggaaaactaaaagggaaatcagaaaggtcatctgaggaccccactgatgactccaggcttcccagggccgaagcggagcaggaaaaggaccagctcaggacccaggtggtgaggctacaagcagagaaggcagacctgttgggcatcgtgtctgaactgcagctcaagctgaactccagcggctcctcagaagattcctttgttgaaattaggatggctgaaggagaagcagaagggtcagtaaaagaaatcaagcatagtcctgggcccacgagaacagtctccactggcacgagcagatctgcagatggggccaagaattacttcgaacatgaggagttaactgtgagccagctcctgctgtgcctaagggaagggaatcagaaggtggagagacttgaagttgcactcaaggaggccaaagaaagagtttcagattttgagaaggagaatgatgaagagaaagggcccgagactgtngnaagcgaagtggaagcactgaacctncaggtgacatctctgntaaggagcttcaagaggctcataccaaactcagcgaagctgagctaatgaagaagagacttcagg

SEQ ID NO: 314681 - DNA, 1255 bp, Homo Sapiens
ggaggaaaaaatctgacatttaccaacagttttggggaggtgatacatcaacacttaaatgatgcaatccatcacgtgaatctgtaacgtgtctatgtcaggcagaacctctccacacttggggcaggaatgaatcggaatattccgctgttgccgccagtccctgtcctcagctcctctttgaacaaggtaaagcctgctggtcagagtcacttgttctcgccccatgacgactctgcatctccatcaaggactgcctgcctccgtcttcgaaagcatcattctctttcagcagaactgccagctgcaatgccagttgctccttttcctcatgaattttctctctcgctgctctttcagcatgaaaatcagaacagtaaacttccatctgagccctgaggatggtcatggtttccaggtcctcttcctgcttggcaatggtttgcttcatttcatccatttgcagctgtttggaagccagagccttctctgccagttccagtttttcactcagttccttcagcactgccctgtccactttttctgactcttttcttgttagttcctcaattgttttcaatgcattattatgttcttgaagaagcttgttgtgtgtcatctgtagcacagttaatttggacttttcatcctctgttttagcctgttccattttgatttctgatagcatgctttccacttgtagctctaactttttgttagtataaacaagctcttgcttttcattcaactctgatggaattgcagaatttttcctttcaagggcctgacacttttcttgaagtctcttcttcattagctcagcttcgctgagttttgtatgagcctcttgaagctccttaaacagagatgtcacctggaggttcagtgcttccacttcgcttccaacagtctccgggcctttctcttcatcattctctttctctgtgctcccctctgtctgggtttcaatctcagaacgattacttgttttcttttcaaaatctgaaactctttctttggcctccttgagtgcaacttcaagtctctccaccttctgattcccttcccttaggcacagcaggagctggctcacagttaactcctcatgttcgaagtaattcttggccccatctgcagatctgctcctatatttagacaatgccgtgccagtggagactgttctcgtgggcccaggactatgcttgatttcttttactgacccttctgcttctccttcagccatcctaatttcaac

SEQ ID NO: 314682 - DNA, 993 bp, Homo Sapiens
  misc_feature (166)..(166): n is a, c, g, or t
cgggcaggtcattataaaaggccaattttccccccgctggatgtccaatgcctgggcccaaataggttggtaaccacaagaattcgtcgttggaaattctttaaccggtgatccggagaaaacctctcctcctggggcatcccccggtggatggcaatggctgganagttttctccactagtaggggggccaaggcaatgcaccggtgcacagactcacaaaagatcccccacctggttgaactcaaggacatccagaaggtcaaagagctccggttcttctcgttgtccttcagtttcacgtagtactgctgcaacccatgcagcgtcaacttcgtctcatcatccacgaagatctccattggatcttgcatgaacttgcggcagactggacggatctctttgctcaaggtagcactgaacatcatgacctgcttctcgtggggggtcatgcgaaaaatttcctggacatcccgacgcatgtcgagctgttcaagcatcttatcacattcatccaaaataaagtgtttaatgtgtttgaggttgaggctcttatttcgagccagggctaggatacggcctggagtccccacgacgatatgcgggcagttcttcttcagcacctcttcatccttcttgatagacagaccaccaaaaaaaacagcaaccttgacattgggcatgtatttagagaagcgctcatattccttgctgatctgaaaagccaactcccgagtgtgacacatcaccagcacagacacctgcccagtaactggctccagctgttgcagtgtggccaagacaaacactgctgtctttcccatgcccgacttggcctggcacaggacatccattcccagaatggcctgagggatgcactcatgctggacttctgacggatgctcaaagccacagtcgacaatggcccggagcaactctggcttgagcaggaagtcaccctcgtgccgaattcgccacccaggcctcgctacct

SEQ ID NO: 314683 - DNA, 886 bp, Homo Sapiens
  misc_feature (91)..(91): n is a, c, g, or t
  misc_feature (106)..(106): n is a, c, g, or t
  misc_feature (112)..(112): n is a, c, g, or t
  misc_feature (314)..(314): n is a, c, g, or t
tttgttctctatcatccccgaaagttctcccattggattcttgcctgaacttgcggcagacttgacgggttctcttggctcaaggtagcantgacattcatggccntgcttntcgtggggggtcatgcgaaaaattttcttggacatcccgacgcatgtcgagctgtcaaagcatcttatcacattcatccaaaataaagtgtttaatgtgtttgaggtgagggctcttatttcgagccagggctaggatacggcctggagtccccacgacgatatgcgggcagttcttcttcagcacctcttcatccttctgnatagacagaccaccaaaaaaaacagcaaccttgacattggggcatgtatttagagaagcggctcatatttccttgctgatctgaaaagccaactcccgagtgtgacacatcaccagcacagacacctgcccagtaactggctccagctgttgcagtgtggccaagacaaacactgctgtctttcccatgcccgacttggcctggcacaggacatccattcccagaatggcctgagggatgcactcatgctggacttctgacggatgctcaaagccacagtcgacaatggcccggagcaactctggcttgagcaggaagtcacgaaagccagagctgtggatggagacataggagcccttgacatccttcttggcaggggcctcagccccatctcccccagctgctgtctccacctcatcatcttcatagtccaagagctcattgtccacatcgttctctgccataactaaacagggagagcgcgtatggcggcagcaacagcgacgaaggagggaaatctgccttcacttccggttgcaggcttccctctactccagcctcccgccttcccc

SEQ ID NO: 314684 - DNA, 1677 bp, Homo Sapiens
  misc_feature (92)..(92): n is a, c, g, or t
ttctgacaaatcagaaatgggggttcaggagtggtggtgatgcaaaagatggaagcccatggggtgggggctgttcaggggtgggggcagtnagtgtctcctttaccccacccctggtgtcctctcctgaaggacagacggtcacattccaaaatgggcgagtcttctaccgtgtctgttcaatgtaggaggagatgtctatctcatcaggcagctcactaatattgacctcaaagcgatcctgcacatcattgaggatcttggcatcattctcatcggacacaaatgtgatagccaagcccttggtgccaaaccggcctgctctggccacccgatgcaggtaggtgtcagaatcctcaggcatgtcataattaaaagcaatgttcacccgctcgatgtccatgcctcggccaaataggttggtagccacaagaattcgtcgttgaaaatctttaaactgctgataccgagaaagcctctcctcctggggcatcccacggtggatggcaatggctgggaagttctgctccactagtagctgggccaaggcaatgcaccgctgcacagacttcacaaagatcaccacctggttgaactcaaggacatccagaaggtcaaagagcttccggttcttctcgttgtccttcagtttcacgtagtactgctgcaacccatgcagcgtcaacttcgtctcatcatccacgaagatctccattggatcttgcatgaacttgcggcagactggacggatctctttgctcaaggtagcactgaacatcatgacctgcttctcgtggggggtcatgcgaaaaatttcctggacatcccgacgcatgtcgagctgttcaagcatcttatcacattcatccaaaataaagtgtttaatgtgtttgaggttgaggctcttatttcgagccagggctaggatacggcctggagtccccacgacgatatgcgggcagttcttcttcagcacctcttcatccttcttgatagacagaccaccaaaaaaaacagcaaccttgacattgggcatgtatttagagaagcgctcatattccttgctgatctgaaaagccaactcccgagtgtgacacatcaccagcacagacacctgcccagtaactggctccagctgttgcagtgtggccaagacaaacactgctgtctttcccatgcccgacttggcctggcacaggacatccattcccagaatggcctgagggatgcactcatgctggacttctgacggatgctcaaagccacagtcgacaatggcccggagcaactctggcttgagcaggaagtcacgaaagccagagctgtggatggagacataggagcccttgacatccttcttggcaggggcctcagccccatctcccccagctgctgtctccacctcatcatcttcatagtccaagagctcattgtccacatcgttctctgccataactgggccggcaggggaagaagggaagggggatctggatgggttctcgcaaaataggtgaaaacaaggggtgaagagtaggggattgaggaacagcaaaggaaaacaaagatactatttctaacagaagagctaaacagggagagcgcgtatggcggcagcaacagcgacgaaggagggaaatctgccttcacttccggttgcaggcttccctctactccccc

SEQ ID NO: 314685 - DNA, 750 bp, Homo Sapiens
  misc_feature (131)..(156): n is a, c, g, or t
  misc_feature (206)..(277): n is a, c, g, or t
  misc_feature (295)..(303): n is a, c, g, or t
  misc_feature (626)..(626): n is a, c, g, or t
  misc_feature (659)..(659): n is a, c, g, or t
  misc_feature (715)..(715): n is a, c, g, or t
gggggtccccacttccccctggggtttcccccagttcccttcgggtccccgccgggccccttttaaaagggaaattcccgagcccttttccaagggcagggttttccaaaaaatatgtgattcccaggttnnnnnnnnnnnnnnnnnnnnnnnnnnaaaagaatggttttgaaagcttttttgtgggccgaggcgggcttccaatnnnnnnnnnnnnnnnnnnnnnnnnnnnnnnnnnnnnnnnnnnnnnnnnnnnnnnnnnnnnnnnnnnnnnnnntcatttttagttttgttnnnnnnnnnttctgacaaatcagaaatgggggttcaggagtggtggtgatgcaaaagatggaagccatggggtgggggctgtcaggggtgggggcagtagtgtctccttcacccccaccctggtgtcctctcctgaaggacagacggtcacattccaaaatgggcgagtcttctaccgtgtctgttcaatgtaggaggagatgtctatctcatcaggcagctcactaatattgacctcaaagcgatccctgcacatcattgaggatctttggcatcattctcatcggacacaaatgtgatagcccaagccctttggtgcccaaacccggccntgctcttggccaccccgattgcagggtagggtnttcaggattcctcagggcatgtcataatttaaaaggcaatgtttcacccgctcgangtccatgcctcgggccaatagggttgggtggccac

SEQ ID NO: 314686 - DNA, 628 bp, Homo Sapiens
ttgagtacaaaaggattgttttaatccccattattctggaaagtgcatcctagtctcccagtctataacatcataataccttgagtataagtccaaatattaggttatatctatattaaaaacacaatttctgtcatctgtcctggccattcaggcaactccagcctggtgcttcaatcctgggagttctgtctggtcactatcagaaggaacactttgaggggaaaccctggtgcagccagccctgagggaaacatgggcctgagtgccctcactggtgggtgggaattggaagtgcacagaggagatgtcagaagaccagtggccttttgggaacccaagttacgtcctggtgaaagcagaagggaggagacaggatggctgtcaacaacgtcagcatgggcatggctcccaggcatggaggtaattgggtcttggcttcaatgccacccttttgggaagccctaaaccaagtgaggtgttcttttcccttgcttcccatatttgtcccagttgcagccctgttgttatgtatttactcttcaatttcttatttatacctctcacttcaattgttgaatttctttggggtttcagttcttcatgccatatttgactcctagttacc

SEQ ID NO: 314687 - DNA, 400 bp, Homo Sapiens
gttggctcccccaacgtgtatcactccctgccctgcacgcctcacactggggctgaagacgctgagcaggctgccggtcgcaagacacagagcagtgggcctgggctgcagaagaatagtgagtgtgtggcactggtggcctggagcctttagcttgggtgagagttgacaatggtagttttccttcctcaagcccctctgtgcccctagagcaccctggctgtggctgcctccttcatccgagcagagtccatgttgggccaggagacttcagatccatgtcctggtgctgcctctggctttgtctttcctcagtgggcaggactgggtctgctggtccatctttacccttctctgagctatgcagccttggcctgctgcgtctccggcctgtttctct

SEQ ID NO: 314688 - DNA, 420 bp, Homo Sapiens
  misc_feature (45)..(59): n is a, c, g, or t
  misc_feature (232)..(312): n is a, c, g, or t
ccaaagtgctgggattacaggcgtgagccaccgcgcctagcctannnnnnnnnnnnnnngaatagaccactttgtgctgaataaatgtttaacatttatttttaaaacaacaattgcacctaatttaaaatagtttattaaatgaattcattaaagcagattatatgcctttggggcttcagaaaatcagtttaagcaaaagaacttatgagagtaagtcatttgtacttgnnnnnnnnnnnnnnnnnnnnnnnnnnnnnnnnnnnnnnnnnnnnnnnnnnnnnnnnnnnnnnnnnnnnnnnnnnnnnnnnncagtggaatttgttttcccatgcctttgcagtctccttgagtagtttatatttagtaatttagttgtgtacctttttattttgaagtaatttttgatttgcagggttg

SEQ ID NO: 314689 - DNA, 441 bp, Homo Sapiens
cccgcaggcgcccttctccgggctaggctgaagctagtggcttcatctgtgcctttggggaagacccctgcttgcccctccccactgaggcctcaggaggcaagtgggtgggggggtccgggtgccctagagttcctgaatgtgctattcactgccctgggcctgtcatctctggttccaggggcaggagctggcgtgggaacagaggggaagagagcaggcgagcgagggagctagctgttggctgagcagagtcagcagccctgacagccgaggatgggacatgggacagagcaagtcagcgactgcaggagccaggcaggggtggagggcttcccagctctgccttctcctgcctcccaccccagcctgctgaggctgctgccagcggctgcacctccagggccagggtgacagtccccatggagccccacctcgtgc

SEQ ID NO: 314690 - DNA, 829 bp, Homo Sapiens
agagtaaagagctggactaaccaggagagaagtctagttggttccctacaggtgcactggaaacactccagcagggaccttctgggatctggggagcactgctgccaattataaacagcagtcagggccagtaaagacctatcctgcctaaacaccactgcatccctggtaatctatctatgacccacttctagttggtactgatgtcctgccaagaagctcacccaacagtagactagattctcagaaacgatgctgaagcaggcaagctgcagttaatttatggttagcacatcactctggatctcgtggcttaattgagtttgtaaatcactcagtttcttcttcaatcctgagagggctgacaggacaatggtttcaggacgcagagagccacaggactccacattgtagtaaaacctttctggcttgccgttggggtcatagggagcctgcgactcatcctcatccagctccgagtactcactctttggccattcctcgggcttggggtacactgtgtgcctcagggcattgtctggatcgtattcaaaagccacccctgcagtagggttccacttggcatgctccttgccaaagccctggcataggctcgaagtctcagctcctggccctttctcaacttgacgatgaggatgtcatcctgctccacgtagtcattggggtcattatctcggttccgggatgtcaccggaatgacccgggggctgttggagatgaggtctcgagacgtgacatgtcgcgtctggtcttcattgcaccgcacatcgagggtgaactccaccgagcactcggggcagaactcctc

SEQ ID NO: 314691 - DNA, 1496 bp, Homo Sapiens
ccccaccaaactaaatgatcaggtcattggaggtgaaggggttcatgactgctggacagagaatgaaatatcatgtttatttggtggggaggggacagccagggtctaatgctattccaaaaggttacttctcaaattagggacacctgggaatttgaagcgctagcaggccagccctggggcaagaactggaagggtttataggccccctgaataaaggctatggcacttgatcctcaacaccagacatctaaggtacaactgaaaatgactcattttggacagaaagggtttagagtaaagagctggactaaccaggagagaagtctagttggttccctacaggtgcactggaaacactccagcagggaccttctgggatctggggagcactgctgccaattattaacagcagtcagggccagtaaagacctatcctgcctaaacaccactgcatccctggtaatctatctatgacccacttctagttggtactgatgtcctgccaagaagctcaaccaacagtagactagattctcagaaacgagaagagtctgaagagagacccccatatccagctgctggcctgaatctccgtttttgctgaagcaggcaagctgcagttaatttatggttagcacatcactctggatctcgtggcttaattgagtttgtaaatcactcagtttcttcttcaatcctgagagggctgacaggacaatggtttcaggacgcagagagccacaggactccacattgtagtaaaacctttctggcttgccgttggggtcatagggagcctgcgactcatcctcatccagctccgagtactcactctttggccattccctcggggcttggggtacactgtgtgcctcagggcattgtctggatcgtattcaaaagccacccctgcagtagggttccacttggcatgctccttgccaaagccctttttggcataggctcgaagtctcagctcctggccctttctcaacttgacgatgaggatgtcatcctgctccacgtagtcattggggtcattatctcggttccgggatgtcaccggaatgacccgggggctgttggagatgaggtctcgagacgtgacatgtcgcgtctggtcttcattgcaccgcacatcgagggtgaactccaccgagcactcggggcagaactcctcacatgtgcagtcccgagagtactgcagcttgtccacaatgtcatcactaatgaggggaattaatccaagcctgtgagcaatgaattcatcatgaaggactgaggaattggcatcaatctgaacccagtcaatggctattatgggaacctcagcgatgaagaccctccgaatcgaattggccaccgccaggtcggtgttctcgatgatgaacttgacattctcgtcagtgagctccgtgatccgcacggtaggctggttggcgtacggcatctcgcccaggggccaccagcctccgcgtctgctccgcggtccc

SEQ ID NO: 314692 - DNA, 1727 bp, Homo Sapiens
  misc_feature (275)..(313): n is a, c, g, or t
ttttttaaatatattgtaaccgcgccattcacggccgcttttttgccaagagccattcagaccaaaagctttgctgggatcatcaccattcccaggtttacacccagctacccatgcttgccatcagcctctagccttgatgctctcagagcatagaaagaaagttaaagaagtctcacttcacagacatgaaccctcctaaccctcttccccactacccacactccctacactgccgatctaaataaaagaggacaatgcatgagtgtgagatnnnnnnnnnnnnnnnnnnnnnnnnnnnnnnnnnnnnnnngcttcctttcagccaaagaactgcaaaatccttccccggaaggaggacaaactggcaacaccaatcaaggcttggtggtctaaggtgatggctggaatcatgtgagactggtaaaaatccagggagaaaatgtttcaccttcagctcattcccaagtctctatgaagcccgccccacttccacataggggaactgtggctctgggggcagctggcttagggaaaggcctcccatggccaagaagacgatggtggagaggagggggagggcagcaggcaaagcctttggggagggtcagcaaaggggccccctgcccttggctaatggatccgagttagctcctccacaaccttgatgaggtcgtctgcagtggcctctcgcttcataccgctgccatcgtcatactgtaggtttgccaccacctcctgcatcttggggcggctaatatccaggaaactctcaatcaagtcaccgtcgatgaaacctgtggctggttctgtcttccgctcggtgtgaaaggatctccagaaggagtgctcgatcttccccacacttttgatgactttattgagtcgattctgcatgtccagcaggaggttgtaccagctctctgacagtgaggtcaccagccctatcatgccgttgaccgtgccgaagagcaccgagccttgtgtgggggtggaagtctcacccagattctgcattaccagagagccgtggcaaaagacattgacaaactcgcccaggtggaaaagaccaacctcctggaggtgctgccgctcctcgtcagtggtggcagcgctatccttttgacacacaaacaagttaaaggcattttcagcccccagaaaattgtcatcatccaagatttccacagcactcatccagttgggattaaagtctcgagcaatctcttcaaagtttccttccatgggcttgtaggcaagcagcagcactgagcgcataaggtcgcccaccaggatgaagtcgcccttggtcttcaggtagagggccatgatgttgttgtagtggttgcactcagtgcgcagctccttctctgttgtccactcatagagccgcaccgtgctattgatgctggctaacagcttcccgttaaattccaccatagagtacacggcccctttcacttccttttcagccacagtctgtagttttccatccgaatactgaaagaccacaatgcgaccctgcttgggctctgcctcttcaggatacaccattgctgtgcccacaatgaagtaagtgttggggtctttgcccagcttgcaggaaaccagactgagggcatattcattctgcagaaactggtgggcatgaagcacttcaaaggtgtgttggtcaatgataagtaggttgtgcacctccacctcttctccaaaggaggtctcatgcc

SEQ ID NO: 314693 - DNA, 1673 bp, Homo Sapiens
  misc_feature (159)..(159): n is a, c, g, or t
  misc_feature (345)..(345): n is a, c, g, or t
  misc_feature (369)..(369): n is a, c, g, or t
  misc_feature (421)..(460): n is a, c, g, or t
  misc_feature (682)..(682): n is a, c, g, or t
  misc_feature (686)..(694): n is a, c, g, or t
  misc_feature (866)..(923): n is a, c, g, or t
  misc_feature (928)..(936): n is a, c, g, or t
  misc_feature (1363)..(1390): n is a, c, g, or t
  misc_feature (1410)..(1410): n is a, c, g, or t
  misc_feature (1564)..(1564): n is a, c, g, or t
  misc_feature (1597)..(1597): n is a, c, g, or t
  misc_feature (1616)..(1616): n is a, c, g, or t
  misc_feature (1651)..(1651): n is a, c, g, or t
  misc_feature (1662)..(1662): n is a, c, g, or t
aaagaagtgggggtgggtgggggcgcgcataaggtgaagtgggttgggtgttatgatcgcgagagagcgtgggtttggtggctgcacgcggcggaaacagtgcgattggtatattatgcggcgagacacataattcgtgcgtaaccacagaggcggggnttttggaataaatgccacggcgtgatgtggaagagatcattcatgacaatagtggcgtggtgtggccatgtcaacacactttattttcttgtggatgtagacggtgcgatttttgttgccgtgggggttctcgggggacgcggggggaggacagtggtgtgacatgggggagggagagcgagaggnggcagaaacacacctgtggtgtgnagggtgtatagggagtgagaggggaatataagtgtggtgacccaaggtggcnnnnnnnnnnnnnnnnnnnnnnnnnnnnnnnnnnnnnnnntgtttcgcctgataatatttgtggcaaatgagagttcgtggggtcacaaacaagtggaggagggaaaaaaagaacgggcgggggagggtgtaatagaggtgtaggaggggtgtgtgcggccgcacggcggcataaaatatatgcgtcggcgcactgtggggtgggcggagagaacacccacacatttctggacggaggagctcggggtcttttcaaagaganaccnnnnnnnnntgtaatagaagggggcaacaggagggcggccatttgttttgtcgggggtggcgggaagaaaaacgcgcaaagggcgcattttgtggtgaaaagaacaccggagaggttggtctaaggggaatgcgttggtttttgacgggatgggcaaatataccgtgtggggtgggacccnnnnnnnnnnnnnnnnnnnnnnnnnnnnnnnnnnnnnnnnnnnnnnnnnnnnnnnnnncacgnnnnnnnnnttgggggaggtggggaggatgtgtggtgtggttttggttgggggatgggtattggtggggaaaggtgtaggcgatagggtagggtgagggtgtgttcgtcttatattctactttatttggtaaaactcagaaactaacaattcacatcctcccaccttcttctttccgaagaaggcagtttgcagagacaaaagggctgtggcgtggggatcatccaccatctccaggttttacacccaggctacccatggcttggcagtcaggcctctaggcaaatggctctcagaggcaatagaagaaaagtaaaaggaaggtctcacttcacagacaatgaaaccctcctaaccctcttccccactacccacaactccctacactgccaatctaaataaaaagaggacaatgcatgagtgtgagatacaccatnnnnnnnnnnnnnnnnnnnnnnnnnnnnacgacagcttcctttaagcnaaagaactgaaaaatccttccccggaaggaggacaactggcaacaccaatcaaggcttggtggtcttaaggtgatggctggaatcatgtgagactggtaaaaatccagggagaaaatgtttaccttcagctcatcccaagtctctataacccgncccacttccacatagggaactgtgctctggggnagctgcttaggaaagcctnccatgccaagaagacgatggtgagagaggggaggnagcaggaaagnctttgggaggg

SEQ ID NO: 314694 - DNA, 384 bp, Homo Sapiens
gtttatgttaaaggagggaaagccgaccacttttatgtttttaacgggctaaattgggaacttgtcagtgctcacaatccagttcttcaaaattataaaactaaacttgaaagcaccctgttcacctctgacccactgtggaacacggtgccccccattgaagaggaaaggggtgcagttcttttcaagtagagccacctgcagtcacaggtgttctccgcaagccttggcgcttcagagagctatggtatttttgcttctgccagccattgtgatgacagtacctctgaagttcctgggccatattcaaaccttgtctctcacaagccacattagaaatatatatgccaccccctttttcactggtgtgctttttcctggttt

SEQ ID NO: 314695 - DNA, 415 bp, Homo Sapiens
atgagccactgctcccggccacttatttattagtcacttaatcattaatagtgctgttgatagcaactcttcccaaagtcacttgaagggttggggtgtcttcaccttcagaagtggtgacctggctccccagtgcctgacaccactccctgctccccatgccagggccgagccacgtgtccatgcagcagacggcgcctaacacgctgcccaccacctccatgagcatctctgggcccggctacagccacgcgggacccgcctcgcagggcgtccccatgcaggggcaaggcaccatcggcaactacgtgtctcggaccaacatcaacatgcagtcccccagtctccatgatgcagcagcaggcggccacgtcgcactacagctcggcgcagggcggcagccagcactaccggg

SEQ ID NO: 314696 - DNA, 2148 bp, Homo Sapiens
  misc_feature (25)..(26): n is a, c, g, or t
catgttttatttaatattttttatnnaatcttttaatttttaaaaaaaacccattaacagtacattttggtctaaaatggtccctctgctgaaatgctaggtgctagccgtaattctggctttaaaaccaaaaccccaaatatttaataaataaaaattagaattagttgccattctactccaaaccagctagcctagctgaagagaagagggaagggggaagaggccagagaaaggaggaggcagtcagatcttagacctgtcgctacagggacagctgaaagaagtagcactaagaaagatcatccgagcagtccccagtacagcccccactttttggcagaggtagggtaagggttatgtgcaccctcctcctaccctcaattcatttgtgtcatagagggagaaagttaaaagctcagctttggtttctggcccaagttagggagcttagaaaggttagccttggtccagctttggcagaatgaggcccacagatgggacaataaggcacaaccctggctctggaggtcagggagtcaaaggcaaacagctggggccaaattctcagaataaggaatgtgaattgtaacccctacccacagagagctgagggagggcctcaaaagcagtagaaaggatgacttggcgggtagggaggaaaatacgaccgtccccctctaacagaatataaccaacgtccccctacctggggataggctggttagaatttggtttaaaggcaactgggtgacaagcaaggagggaggatgcagagaactctcctctcactttctcctttttccccagagcttaaagtgaccctatagcgcagggagcggggtagttccttggctttatgcattaatctgggaggcagctggaataatggttcagtcattcttacgatggttgttattgaggatggggtggccattggctaggggccggctctttgctcctcccccagctgcagcctcctccccctctgagctctctgtttcttcccggtcactgcgttcatcttctaccagctttccagttatgaacttgtgggccatgcgcaaaatgaggtaggcccagaagatatgcagcagctgtagaactcccatcatggaattgaagaagtaatagccaaagaaggcaggatagagctccagtgggtacaccagggtgcaatgcaggatccagaagggcaggatgaccagtcgggtgatgataaaaacaatggcgaagacgatgaagatgttgttgcaggtgttcttccatcccgcgtagttaaacatcttggctgactccagcaggtaatcggaagagtcatgcagagccatgattagagtcccagctcggatgtaattggcaaaccaggaaaagctgatgagaatgatggtggccacatggtggatgatctgttccttgaaatcctttcgcttgacatcagaggcaatgctgaagagcagggaccagtagaaggaaagttcaatcatgtagtaccaatactgggaagggatagtgctctgtatgggatatccctcccaaactttcttcatgtcatagaaccagggtttatccacaatgacggccatgccggcaatgaaggcaatcaggtaaaatgtgaatctccagctggcttctcggaacttcttgaggagactgggccggtcctggttgcggcggcgacggaaccaacgctctacctggcggccagagagcccgctctgccgggacaaaagctctacttccacctgcttgggctgcttgccactggtcaggtagaaatgttccaaggtggcgttgggaggtgcccgcagccgagttttctcctttatgttcaagagggcagccagtggtgtagccacgtacagctcaaagaagtatcgaacgatgaggaagagcaaggccaggggcagcgtgatatagagatctgaggctttggcgtagacacgtccatctcggtcttctagatcggcccaggtcaagttcacaggcagccacagacgttcccaccagaagtaatcatacaaggtctggagcatcccggcggcagcgttggcggggccggggccgctgctccgtgtactccgtctgctcgggtggttgctccgaggccccgaggcctggctccccgcctcgtccgaatcgccaccc

SEQ ID NO: 314697 - DNA, 268 bp, Homo Sapiens
gatatgtattctaattggcagattgttttttcctaaggaaactgctttatttttataaaactgcctgacaattatgaaaaaatgttcaaattcacgttctagtgaaactgcattatttgttgactagatggtggggttcttcgggtgtgatcatatatcataaaggatatttcaaatgattatgattagttatgtcttttaataaaaaggaaatatttttcaacttcttctatatccttcagggctttcatgattatcttgatttccc

SEQ ID NO: 314698 - DNA, 726 bp, Homo Sapiens
ctatacctttatggcaattttattttttccctttacggctctgtgtctttctgccaagaaggcctggccaaaggtatgccctgctgttggtccctcgggataagataaaatataaataaaaccttcagaactgttttggagccaaaagatagcttgtacttggggaaaaaaattctaagttcttttatatgactaatattcttggttagcaagactggaaagaggtgtttttttaaaatgtacatacaagaacaaagaacatacagctctctgaacatattgaacagaggtggtttttatgtttggacctggtaatacagatacaaaaactttaatgaggtagcaatgaatattcaactgtttgactgctaagtgtatctgtccatattttagcaagtttacttaataaatcttctgaaccatgttttgtgcctgtttgtattcctttataaaccaaatgttgttggaataaaatacataaggtatcattttgactgtggatatttaattaaaaactatttttctgtgcttgtaggcatcaggtaaaagccaccccaggttagcttgaccatacttttttggctttccacaatttattttaaattgagatatgtacctagccacattcaatgtggaaaaaacccaggaagttatccttccatctatacacattggtgtccttatggttgtccacatatacccatatctgatgaacacagctgtact

SEQ ID NO: 314699 - DNA, 1021 bp, Homo Sapiens
gctccttctgccacctctcctgccgcttccgctcctcctcttgatcccacacccagcgactcggggcactgatggttggaactggaagatcaggaaccaccgaatcagagcttccttgttcaaaaaattgtgatcgcctttttaagtttttcaaagaaatggattcagatgcttttgattcaaaagcattgctttcatcatgaattccattgatttctttggattcaatattagaactctgaaggctttcggagaaatcagttgttacagatagatttgaagatttttctgagttgtaaattccagaagttgcatcaatccactttgtttcaggtgaaccagcctttccatagcgcctcacatccatcactaggtgtccagtttcttgagccttagccatggcttcctcccactcttttgaatcgttatatgaaaacttggtgttgttaatagcaataatttcatcatctacttgtagctgagaaaattctgctgggctacctgcttcaactgatgctacgaagatcccaggaatatcccattttattgtaaacccaaagtcaagactcttcccaggcgtctggtttatgctgattctcatatcactgaactgatcctgggatcttgagacttctctttgtggggagatttccccttctccagattcagacattaaatcaagaccagatgtggaagacaatgtggctttagaagtggcagcctggtcttgggaaagagatgagaagggggatgtaggagagggcagccttgtcacatcttcttctgttgctgctacctctttctggctagataagcttgaagccagttggcttgcgtccgggcttggtgcaggggtgctgaccacattgtttggagttctcttaatgtattcaacatctccattatacttccaagcatcatccatcgtgtaagatctggggagtgatgagattccccttgtctgagagccaaagggtcttggtgtgaccacagatgttaacctgactgtatcagttttccg

SEQ ID NO: 314700 - DNA, 1070 bp, Homo Sapiens
agaattggctgtgaaaaataaccgaaatgaaaccataagaacttgtgggagttagtgaagcctacgaggatgccgacaattgtctctggttattaactaactccaagccttgtgccaactgtaagtctccaatacagaagaatgaaggctgcaatcacatgcagtgtgctaagtgcaagtatgacttttgctggatttgccttgaagagtggaaaaaacatagttcgtccactggaggttattacagatgtactcgctatgaagtcattcaacacgtggaggagcaatccaaggaaatgactgtggaggctgagaaaaaacacaaacgatttcaggaacttgacagatttatgcactattatacaagatttaaaaaccatgagcatagttatcagctagaacaacgccttcttaaaacagccaaagaaaagatggagcaattgagcagagctctcaaagaaactgaaggaggctgtccagataccactttcattgaagatgcagttcatgtgctcttaaaaactcggcgcattctcaagtgttcttatccatatggatttttcttggaacctaaaagcacaaagaaagaaatttttgaactaatgcaaacagacctagaaatggtcactgaagaccttgcccagaaagtcaataggccttaccttcgcacaccccgccacaagatcatcaaagcagcatgccttgtacagcagaagaggcaagaattcctggcatctgtggctcggggagtagctcctgcagactcaccagaagctccaaggcgcagttttgctgggtgggaacatggggattggggaatatttaggatttgcatcaccagaggaatatgctgaatttcagtatcggaggaggcacagacaacgtcgtcgaggagatgttcacagtctactcagtaatcctccagaccctgatgagccaagtgaaagcactttagatattccagaaggcggcagcagcagccgcaggcctggcacatccgtgggtaagtctgcatctatgagtgtgctgcacagctcttccctgcgtgactacacccctgccagtcgctc

SEQ ID NO: 314701 - DNA, 357 bp, Homo Sapiens
aattaggtcccctaaaatgtttgtcttaggataaaagcaggactgaaccacatgaagtataaaattagcatctaggaaattctgctgaagcccagaccattgtgtacacagagggaatgcttaccggttcgaatttcttcctgatcggtgccattgacatagtcctgactcaccagagatgcaaagcaagcctcgaaagatgactccacctcgtccaccaaagtactgctggaaggtctaggagcgcctggagctgcctgaagaagcgaagcttggcccggaaggcccggcggggcctgagggggaccgggtgtctgcccagaaaacataccccctagtggagccgccatgtttgga

SEQ ID NO: 314702 - DNA, 836 bp, Homo Sapiens
attcccgggatggcggctccactagggggtatgttttctgggcagccacccggtccccctcaggccccgccgggctttccgggccaagcttcgcttcttcaggcagctccaggcgctcctagaccttccagcagtactttggtggacgagttggagtcatctttcgaggcttgctttgcatctctggtgagtcaggactatgtcaatggcaccgatcaggaagaaattcgaaccggtgttgatcagtgtatccagaagtttctggatattgcaagacagacagaatgttttttcttacaaaaaagattgcagttatctgtccagaaaccagagcaagttatcaaagaggatgtgtcagaactaaggaatgaattacagcggaaagatgcactagtccagaagcacttgacaaagctgaggcattggcagcaggtgctggaggacatcaacgtgcagcacaaaaagcccgccgacatccctcagggctccttggcctacctggagcaggcatctgccaacatccctgcacctctgaagccaacgtgagcgaaagggcagaggcagttggcctatgagtgggctgatgcgtgaggttggccacacattccttcctgtggacttgacattttggaagaactctttgccagataatgagttcattttagttttatgctcccattgaaaaattttccactatttttataagctgttaatttcttgagtactttataacatgtctgtagcttggataaaccaagtaagtattgttctagtcttaagcgaagttagacttgtgaatctgatgacacagattcctttttaacaaccacaacaaa

SEQ ID NO: 314703 - DNA, 624 bp, Homo Sapiens
aaatgcgcaagaaagtttatttacaaatgcaattgaacagaaaggctcaccagtttctgaagaagacttctagtatacaaaccatggttatttttcattaatgaaaataagcagctttctattgggaattacttagcaacatttctggtaaagaaaatagagctcccttcatcaagcaaataaatggtacattaactgcatttttaaaaatcagaataataggtagaaggaaggatacagaaagcacatttggggatagattttaatgaaattttccatatggttctgcattaatttagaatacattacaataaacagagcaaatgcaattatgtatttatattaactatttcaaataatgtttaagaacctttttttaaaaaacaataaaataccctcttcaaaacaccactaactagaaagtcaaactagatcattatctgcctcaaaaatattcgtaggttcttattttttcccttgtgctctcaagatgctgaattcaacaggtaaatactgcacttttccccacacacaattaccttataaataaacaacaaaaatactggttctaccaagactacaatgcttctatgtaatctaaagaggcaaaaaaagttattcttt

SEQ ID NO: 314704 - DNA, 387 bp, Homo Sapiens
gttttttaaatgcatcagcaagtttatttacaaatgcaattgaacagaaaggctcaccagtttctgaagaagacttctagtatacaaaccatggttatttttcattaatgaaaataagcagctttctattgggaattacttagcaacatttctggtaaagaaaatagagctcccttcatcaagcaaataaatgggtacattaacttgcatttttaaaaatccagaataatagggtaggaagggagggatacagggaagcacattttgggggattaggatttttaagtggaaattttcccatatgggttcctgccatttaattttagggaataccatttaccaattaaaccaggggccaaatgccaatttatggtattttataattta

SEQ ID NO: 314705 - DNA, 316 bp, Homo Sapiens
catcattcagaagtttttaataaacaacttcattataaaaacctttttttgaaaatgtaattctgtaaaacattgaaaaatctactttaacaaagatatgccctgtgcattttctaatggcacttatactttacaattaaaaaccttggtttatataaagccatactccaagaggttattcactgggtttacaaagtgctagaagatttctggcttggacttttctctttaaataatctggagttactggtgtctcaggagttctagtgccggtggagaggtgcaagtgggaacaatcagctaagggtcagctgcg

SEQ ID NO: 314706 - DNA, 1135 bp, Homo Sapiens
ttttaacacatcattcagaagtttttaataaacaacttcattataaaaacctttttttgaaaatgtaattctgtaaaacattgaaaaatctactttaacaaagatatgccctgtgcattttctaatggcacttatactttacaattaaaaaccttgttttatataaagccaaaaatactccaagaggttattcactgtgtttacaaagtgctagaagatttctgtcttgtacttttctctttaaataatctggagttacaaaagagtggctccaaagccttgaccgctggtagggagggagaagcatgagaagtggtgtctcaggagttctagtgccaaaggtggagaggtgcaagtgggaacaatcagctaaggaagtcagctgacacacaaagaaatcggactggaatttttccaaacccctctatggaggcactaggttatcatggtgaacacccttttccctcgccatagaccctactctccagaggtgaaggtcatggccaattccttccacagcaggttcagagttccaggagaggccagggtgggatcccagaggaatctggacttttctggccaacaccctgcctaaggcaaagtttcttattaccataaatatccttgttaaaaaagcaaaatattgatcctgtacaatatgacctgttaaaaaaatcgtgcttacaaacagctcctagataagagggcaggtggagagaggacggagaaaacagctaccaaaaagggaggggggagtttaaaggactactagggaaagttttagggcagtgggagaattccaacttaggacaatatctacgagcaaaaaagtaatcacacctgcttcccggattttcaattaagaaaatgccatttgtaaaaggttgggcggtgggctggagggcgggggttgcagggaacctcattggcgctcctttccctgcctcccacctcaagatgatgcagagatcctttgagctgacacctgggcatgtcatccccttacccccaggactgtactcagccctgaccagctactgtgtagggtggcagggggacagctcattgctggcagaggctggaggtggcagggaaaggggacatcactttttttcctggtccctcattggtcttt

SEQ ID NO: 314707 - DNA, 448 bp, Homo Sapiens
  misc_feature (364)..(364): n is a, c, g, or t
  misc_feature (375)..(375): n is a, c, g, or t
  misc_feature (401)..(401): n is a, c, g, or t
ttcatcattcagaagtttttaataaacaacttcattataaaaacctttttttgaaaatgtaattctgtaaaacattgaaaaatctactttaacaaagatatgccctgtgcattttctaatggcacttatactttacaattaaaaaccttgttttatataaagccaaaaatactccaagaggttattcactgtgtttacaaagtgctaggaaggatttctgtcttgtacttttctctttaaataatctgggaggttacaaaagagtgggctcccaaggccttgaccgctgggtaggggaggggaggaggcatgaggaagtgggtgtctcagggagttctaggtgcccaagggtgggagaggtgcnaagtggggacnaatcagctaagggaggtcagctgacnccccaaaggaatccgggctgggattttttcccaacccctcttttggg

SEQ ID NO: 314708 - DNA, 1317 bp, Homo Sapiens
gtgggagattccccaggcctcctgttttatggggccccggttcttcctttgggagaacacggctttgggccccagtgttgcactttacccttacgggggcgccccgggcccccaaaggggaatggttgttgaaaagcttttttggagggcccgagggcggcccgcacaaggcagtttttgtcgcgctgtcctttcttttcctgtggaaggaaaaccccatgaatctaaatggtgccattggggggaccctccaccttcccttttttgcccgccccccccatccaacccttttgtggagttgggggaggggctgccccccattttccggtcttgcggctctgggtgccatcctgttcctttggagttcagtcagcctcctggggctcgtctctctgtgaatctccttcttgggtattcatataggtgcttgcttgcgctcctgcaggctctcctgccgggcccaggaagacttggcaaatgttagggctgttggctgaggggtcaccgggccagagctgggaaacttggaggcagaggctgtgggtagggactgagttcccttggtgatgtcttcaggcatgaaagctacggccccctcaagcagattagtgatagtcaagtctacacagccagtcttggccaggtctctctggatgacacccaatggcacatggggcaaaacttccttgactctctgagccagagttgccagttgcacatcaggagaaggaccaggggagggagggaaagaagactgggctgactgggggcgcaatctggggtgtctttgtcgcttcatgtgctctgctttgtcagctggagtgagccgtgtccctgtctggcccaattccttggccaccagctgttgtacacggagtgcaaactcctcattcgcttcccctagttggcgatgaacaggacgaagccaccttacttgatacaccgtgaaagggacgaaaagtgaccacagcagttctgagacccaggaggcatctgacaccgtacacagagaccaggggtctctgaacttgcagggtaagaggttgtaccacatcttggatagaaaatggccaggaactagaagaggaaggagaaagtaggatgggaatccagccagcctagtcagcagctcacacctgccttataacaggcaactgtcaaactctacaagcacataattgaagaatgaagggattcaggagaaagaacttaaagtggacagaaaggaaatgaactggcgatgatggggtctaagggccgaagaaagttgtaaaaactcaagggcccacaagcttgaccacctacccagctggcgcc

SEQ ID NO: 314709 - DNA, 1570 bp, Homo Sapiens
  misc_feature (54)..(71): n is a, c, g, or t
ggcctgggtggcgaattcggcacgagggagagagagagagaactagtctcgagnnnnnnnnnnnnnnnnnngaaaaccatgaatttaatgtgacattgggggagcctcatccttccctttttaccacccacccatccagcctgttgtgagttgggtgagggctgcccccagtctccgtcctgcggctctgggtgccatcctgttcctttgagctcagtcagcctcctgggctcgtctctctgtgaatctccttcttgcgtattcatatagtgcttgcttgcgctcctgcaggctctcctgccgggcccaggaagacttggcaaatgttagggctgttggctgaggggtcaccgggccagagctgggaaacttggaggcagaggctgtgggtagggactgagttcccttggtgatgtcttcaggcatgaaagctacggccccctcaagcagattagtgatagtcaagtctacacagccagtcttggccaggtctctctggatgacacccaatggcacatggggcaaaacttccttgactctctgagccagagttgccagttgcacatcaggagaaggaccaggggagggagggaaagaagactgggctgactgggggcgcaatctggggtgtctttgtcgcttcatgtgctctgctttgtcagctggagtgagccgtgtccctgtctggcccaattccttggccaccagctgttgtacacggagtgcaaactcctcattcgcttcccctagttggcgatgaacaggacgaagccaccttacttgatacaccgtgaaagggacgaaaagtgaccacagcagttctgagacccaggaggcatctgacaccgtcacagagaccaggggtctctgaacttgcagggtaagaggttgtaccacatcttggatagaaaatggccaggaactgaagcgcaggagcccctcccggccattggtggcctcttcctcagggaatagcagcagaggagtggggggaagcctcgtggaagcacagaatctcttgagtgactccaccaactccccccgcccattcatctccatgaagccccgagaccagcacacaaagctggggggactattgagtagaggggtgctacaggtggtaagcaaattgactatgttgtggtcgaaaggtgtcacatggttggaaatgaggaccctgacactgtgatcccggagtccggagtcctcctgccgggccacgagccctagcaccgcacacatggtccgcactacgaatctgcgaaggacgctgtctggcagcgcgcagctgaccaggaagacgtggatcccgagaaagaggcgcaggacgaggaggcagaacccgactggcgcgtagagcagcagcacgagcagtaggaagcagtcacccggaagccggtgcgagtcaaagagccgctccggccccggccctgagggaagctccataactgctgcttcaggagcgcccggccgtcgccgccgccgccattttcgcgcccggccgcaggggctcttgggaaggcggagtctttgggcatccgcaccggggtgaggggacccgaagtcctga

SEQ ID NO: 314710 - DNA, 1670 bp, Homo Sapiens
ggtcagcacactggcgtagaggcagcgccgtgctgtggggatgatctggccccctccgcggtggatggcgtcggcgtgcagggtgacgtcgtggacgtcgaagcgcacaccccgcatgttctcctcacacagtgcgccctccttgtggcccactggaagccggccaccacactgtccttgatctcgttgaggtactgcacacccttggtgatgtcggtgaggatgttggggccggtgccgtcgggcccaaagcaccagatcttgctggcctcagccacggtcccactcgtacttctcggccaaggtagcgcgcccgctggcttgagctcctgacgggcggacaacctcgcctttatcgatgtcctcggccaggccgttcggggaagggccgcgccttcatgtacagtccggttgtgcttgttgggggacttggagaggcagagcacgttcgactcttcactgaccgtctcgcggtacgagacgaccgggtcagatttcttgatggggatgcaggcgtggtcctcctccaggtccttcaggcagatctccaggtgcagctcgccggcgcccgcgatgatgtgctctcccgactcctcgatgatgcactgcaccatggggtcggacttggccagccgcttcagcccctccaccagcttgggcaggtcagccgggttcttggcctccacggccactctgacaacagggctgacgctgaacttcatcacccgcatgttgtgcgcgtgctcgaaggtggtgatggtgcccgtcttcaccaggaactggtccacgcccacgaggcccacaatgttcccacaaggcacatcctcgatgggctccacgtagcggcccatcatcaagattgttctctggattggcttcaggtagaggtcctccttcttcccaggggtatagttgggccccatgatcctgaccttcaggccagtggagaccagccccgagaagactcgtccaaaggcgtagaaccgacctttgtcggaggttggcaccattttggaaatatacatcataagagggcctttggggtcacagcttttaatgcccatggcagcctcgtcgtccgggggcccctcgtacaggagctcgcagcggtacttctgggccgtcacaggggagggcaggtggatggtgatcatctgcaacaaggcgtctccggcaggcagccagcggcgcatcacagccttcagcaggggtttgccttctttgtccttgtcctcgctgtccagtttgatgtccagtttctctatcagttttgctgtctcctctttcttgaaattcatgatcgcatcaaacaccttgaagatggggtccaggatcagctggcagaaggtgcgtgcagcttcttcccttcggggctggtggctgacttgctgaacttgccgttggctgggtcaaagtacctgtcaccccacagcttcttcatcatgtcctctactttcttggcccgctcggcaggccccaactggccctcccccttggcggcgaacttggccacatacatctcggcaaactgcttcagggtgaaggcccacccgtggaggccagacccaaagcccacggtaccgaggacaggatcgatcatgatgttgcccatgggccgctctcgcgccacccagcctcgctaccttaggaaccgttatagttactggccc

SEQ ID NO: 314711 - DNA, 436 bp, Homo Sapiens
ttttcgtccctttcacggtgtatcaagtaaggtggcttcgtcctgttcatcgccaactaggggaagcgaatgaggagtttgcactccgtgtacaacaggtggtcgggtgcacagacagggtggaggcggggtccctgcttaggaggagagggaggaaagcttgagatcttgacacttccagtcttccaattctccctagctggtggccaaggaattgggccagacagggacacggctcactccagctgacaaagcagagcacatgaagcgacaaagacaccccagatttgcgcccccagtcagcccagtcttctttccctccctcccctggttcctttcttcctggatgttgcaaattgggcaaactctgggcttcagagagttcaaggaagtttttgccccatgttgccattggggtgttcattccagagagacc

SEQ ID NO: 314712 - DNA, 621 bp, Homo Sapiens
  misc_feature (559)..(559): n is a, c, g, or t
  misc_feature (578)..(578): n is a, c, g, or t
  misc_feature (590)..(590): n is a, c, g, or t
  misc_feature (607)..(607): n is a, c, g, or t
cggcacgagcaggaaagtacctgtgcagatgctggcacttaaggcctatggagaaaacatcaggtgttatagagagtctgttgtagggaattaacgaaaagaccactgagttaagtcaaagaatggtctatttgagtttaggtggtctggtttatggggaccctggctaaggagcatactccaaattcttggtgttaaccctctcagtagtcataagaatagtctccctggtgcactgtattctctcaaaggttttaaatgtttgcatgaagccatctttagaacgtcagatggtctctcttcaactggaatgacaagagctgaaagaaatgtgtgaccacgaggacaccgaaaccgatgagtgacatgctgagactggaaatccaaaatgatagtaacggagagtggcgctaacatcctaagttttggtcacactcttgcctaagtgacaacctgacaaagggggaattttttaaactgatgggaggccatttttttggactgagcactatgtcccaacagaccccgaaccacacatgggtcctagaatagaccaggnttttgtttttctcttgcanacagggactttncagcataaggtggtatnctcctcgtccttgt

SEQ ID NO: 314713 - DNA, 409 bp, Homo Sapiens
ccacccacccgtctcttaggaagcccatctggccttaagcacattggtagacccaagtgcacatgacgggcatcactcaactccaccaggcaggctcccaactcctcgtgcagagaaagaagtgggaggagggtggtcactaaatccaccacccgtagacactgacccgaaccagccccaaatgccccgttgcatgtgaaagtctggctccctcagagtatcacgggtggtgtctctgtctagggtggccatgggagagggcagcctgcaggcaaggagaggagtgtctggggggggcagccaggcagccttacctctgggtctgcagagcctgactctgtggctgtggttcttagaggcccagctcagggggcctgagcctccgatccctctggtctggtctggtctg

SEQ ID NO: 314714 - DNA, 367 bp, Homo Sapiens
  misc_feature (160)..(194): n is a, c, g, or t
tgtttgtgcagtaacttgggagtgtggtttctttttgaatctttaattaaaacctgggattatatatccctgataaatattcacacttgaaccatagttactgtaaaatgcaaaaaatcttaatactgttattctttgcactttttcttaatcatttttnnnnnnnnnnnnnnnnnnnnnnnnnnnnnnnnnnntgcttatgttgttttgtacagatgtgggccaccattgcaacaaaatacattctttttgctctaaaatatttatgaagaaaatacttaaatgttatgtatatggtggtaataagggatcaagtattataaacaagaatgaaggtttttgtgatttctgttcagcgttttgcggt

SEQ ID NO: 314715 - DNA, 612 bp, Homo Sapiens
  misc_feature (533)..(533): n is a, c, g, or t
acggggttatcagtacatgctagtgtttgtttgcactttctcagggtgggtcgaggcattccctaccaggatagagaaagcccaagaagtaaccagactgttgctaaaagacattattcctaggtttggactgcctctaactttaggatcagataatggcccagcattcatggctgaagtagttcagcagctgtcgcagctgctaaagataaagtggaaactgcacatagtctaccacccacagagctcaggaaaggtacaatggatgaaccagacactaaaacatctgctgaagttttgtcaagaacctcatcttatgtgggatcaggtcttgcccatggcctttctccaagtcaggtgtacccttaccaaattgactgggctttcaccctgtgaaattgtgttcggccgaccacccccgattataaatcaggtaaaaggtgatctgtgggaactaggggaactaaactttaaaaaggcaaatgcaagctttaggattagctatgcgattcatggctgggtacgagaaggtngggtttaagaaatggaacccccacactagggcccatatgggattgggccacactgttattcttgtctactccactgctg

SEQ ID NO: 314716 - DNA, 1187 bp, Homo Sapiens
  misc_feature (49)..(49): n is a, c, g, or t
  misc_feature (57)..(57): n is a, c, g, or t
cggttatcccgcatgggcccattggcatgagcagacctgtaaattaaanctgggcancaaattcaccttccttttcataggagaccataaatggtgcagccagtccatgtttggggcattccaccacaacccatcgagcctttcttctcattttcaaatgctcttaaagtaacgggcatggcatcaaaaccgcctttccacctcactgaagaaggcacgtgaagttttcattttcagtccatactgtttagaggggtctcgtttgtaaatagtggttctctgtcctgcatccttggccttgccctctcctgagctgacgagaacatccacagcatatacttcatgtacctcaaattcagctttttcatggtccttcttctgctggtctgtgggattctggataatggttttttctccatcgatgacatgctgcttcaactggtgtgacagcataccttctattggcgtgcagttaaatgagtgggcaactttgttccaggcttctgtcacttgtgtgttctgatttccaggtttgaccaggcgtagggcagcttcagcacaaaggtgagctgccttaataacatctgctttcctccctgttacttgggtcccctgagctacatcaaccacaaaagtgtgagctacattagcgatgaagccatccacatggaccccaaggtcaatttttaccaagtcaccttccttgagaatataatcctggtcgctcttcaaaggggagaagtgacatacacagttatttaccgaaatgctggtgggaaaagcaatacctttcttcatttccttttctttcttgaagattttccctgtttcttccataatcatggcatcacctttctcacacaggctcagtaccgacacacctgagctagatgcttccaccaaggaccgaagtaccctgttggcgatgtcgccccccatcttatacttggtcacgaccaggtcctcagcgatagtttgctcctgttgctcgtcctcgcccgacatcttcctactaccaccactgcagcctcgtttcccctgagccgccgccgcctctgtctcccttcccagccacaggctgtggtcagagtcccctcgatcctcgaggagagggcgagcgaaagcgcgagcaagcaagggagcgggcaggcaggcgagagcgagaagctgcgagcgcgcgggctccc

SEQ ID NO: 314717 - DNA, 2329 bp, Homo Sapiens
  misc_feature (171)..(171): n is a, c, g, or t
  misc_feature (299)..(299): n is a, c, g, or t
  misc_feature (309)..(309): n is a, c, g, or t
  misc_feature (314)..(314): n is a, c, g, or t
  misc_feature (344)..(345): n is a, c, g, or t
  misc_feature (1092)..(1105): n is a, c, g, or t
  misc_feature (1114)..(1115): n is a, c, g, or t
ttatgagcaaatccaaatttattttaatgtcatgtcattttcaatgtgtttaaaaacctcataagttagtgggagccctagtttcctgggacagcatgccagaggtactgaaatttgtcacctttctctacaaacccccatgcaatccaatccaagtccatagcttcaganagccaggggttgtgtcttcagtcagtctacgcctctggttcttggtttttctttcatgggagggagatcacaatatttcaaacagggaacaaaaccagttgagcttccagctcaggtctgtgtaaganggagcgaggnaagancccactgactccagagagaaaggggagggnngggggggattatttctttacagctttgtgaaaatggaagaaaaaagatttacaaatgaggatccatttccatagatgagaatctcttcataaatgagggctccagctcctaaaatgggaggggcctgactggacagcctgaatcagatgaggaatcggccacactgaataaaaacaatctgaaaaataatcctcttaattttgaagccagataaaatatttggggagaatggaaaaaagaggaaaaagccccaaacagatggaaaaaatgctgacatcagagtggtataaaaaaattcggctgagttttcagtggtggtggctaatttagccctgttctgtagtggggcacaaaccttgaccaagcagagagtagtagaaaaggctagaaagaggggcttgaagacgatgaattttgactcctgattttattattcaatttctttttttcatttaaagtagtcttccgtggttgggaagcctcacctcccaagaccagagtcagttggagctggttgttgttggaagggagtgggttggggaactggggtgggggcagggagatccccccgctctgctggcggtcctaggtggagaagaactgcacttcacagagtctggggtttggtgggaaggggatgaggcaggagcagcaagctggggagatgggacccacctcagtccccagcttcattttcttctaatgtttccccactggtggcattctctgcagtcttggaggccttcnnnnnnnnnnnnnnctgggtctnncgacttgcagaactctggaggagggcctttagctctgcatcctggacctccatctcagacttgtagaggtcaggctcgaagggaccactggttatccgcatggggccattgggcatgagcagaactgtaaatttaaactgggcaacaaattcaccctccttctcatagagaacattaaatggttgcagcagttcatgtttggcgcactccaccacacccatccgagccttcttctcatcttcaaatgctcttaaagtaaacggcatggcatcaaaacgcctttccacctcactgaagaaggcacgtgaagttttcattttcagtccatactgtttagaggggtctcgtttgtaaatagtggttctctgtcctgcatccttggccttgccctctcctgagctgacgagaacatccacagcatatacttcatgtacctcaaattcagctttttcatggtccttcttctgctggtctgtgggattctggataatggttttttctccatcgatgacatgctgcttcaactggtgtgacagcataccttctattggcgtgcagttaaatgagtgggcaactttgttccaggcttctgtcacttgtgtgttctgatttccaggtttgaccaggcgtagggcagcttcagcacaaaggtgagctgccttaataacatctgctttcctccctgttacttgggtcccctgagctacatcaaccacaaaagtgtgagctacattagcgatgaagccatccacatggaccccaaggtcaatttttaccaagtcaccttccttgagaatataatcctggtcgctcttcaaaggggagaagtgacatacacagttatttaccgaaatgctggtgggaaaagcaatacctttcttcatttccttttctttcttgaagattttccctgtttcttccataatcatggcatcacctttctcacacaggctcagtaccgacacacctgagctagatgcttccaccaaggaccgaagtaccctgttggcgatgtcgccccccatcttatacttggtcacgaccaggtcctcagcgatagtttgctcctgttgctcgtcctcgcccgacatcttcctactaccaccactgcagcctcgtttcccctgagccgccgccgcctctgtctcccttcccagccacaggctgggtcagagtcccctcgtcctcgcctcgtgccgaattcgccacccagc

SEQ ID NO: 314718 - DNA, 781 bp, Homo Sapiens
  misc_feature (431)..(686): n is a, c, g, or t
  misc_feature (694)..(694): n is a, c, g, or t
  misc_feature (705)..(705): n is a, c, g, or t
  misc_feature (707)..(707): n is a, c, g, or t
  misc_feature (733)..(733): n is a, c, g, or t
cggctggaaattaacccccactaaaagggaccaaaagctgaagctcaccccgggtggcggccgctctagactagttggatcccccgggctgcagtaattcggcacgaggcgctaggacctggagggctagtcggcgggctgcgcgtccggccgctagctgagctggaggccaccggccagagccgaccccaggagtgagagagacaggggcgtgcgtgagttccggcggcctgcaccgggcaaaccccgtaccttcccagcatcggctcagcaacccacgtgcatccaggccggtcaatgtcattgagtcacctccgcgccttggccaccctggagtcccgagaatccgaagttccagacaaatgcccaaactacattcctgcatgttcgaaagcgtaaattgcaaagcacaaatccagttgtagattgcnnnnnnnnnnnnnnnnnnnnnnnnnnnnnnnnnnnnnnnnnnnnnnnnnnnnnnnnnnnnnnnnnnnnnnnnnnnnnnnnnnnnnnnnnnnnnnnnnnnnnnnnnnnnnnnnnnnnnnnnnnnnnnnnnnnnnnnnnnnnnnnnnnnnnnnnnnnnnnnnnnnnnnnnnnnnnnnnnnnnnnnnnnnnnnnnnnnnnnnnnnnnnnnnnnnnnnnnnnnnnnnnnnnnnnnnnnnnnnnnnnnnnnnnnnnnnnnnacagacangactcatctananagagaacctcgagggtgccgtaccantcgctataggagcgatatccttccagtgcgatacgccgacacgcttcc

SEQ ID NO: 314719 - DNA, 732 bp, Homo Sapiens
tactcctcttcattcaaataatcatatataggcacttagagctggaaagatgtggcacccttctttaaatatccaatcagaatgccagtagaaactctctcttatgatataagagtgccactcagaagagaggtgaacatcttctcattagtttgtgagtgtggtggttcaagctcttaaaaggttgaaaatttcgataggtccttctccatctcagcatagtgttctttaagcctttccatggcgtgtgctgttcatccacttcagcccttgtgttgggttgctccttcatggagttgtccctctggagcatatgctgtttctcactagcttctgagtggtcactatgaatcttttttcgttcgtgttccctctgttggagtctacagactgagtcattagctgcttgcaatctctggagaacctggctgagtgtgtcccgcagtgtgtctctacatttgggaagagtatgttcatttgtttcatggatcatgttcttcaaattttcaagaactcgcatttctcgaagaccacgtttttcttcaaattcttttacaaaataacgagtttcaccttgaataactggtctgtgatccaaaagccttgaatgaatttctccaagatccttgataatgaggtgcgatgagccagcagtcaccagggagtccctcttcttgctgccaccgcccggggcggcctcacaacccacaggggtctctgtccctccgccac

SEQ ID NO: 314720 - DNA, 801 bp, Homo Sapiens
taggtaaggaatgactttattcacaggaacactgcagtaagggaggaggtgttgtaattgggagaatactccagccataagatctgcaagcatagcaaaggtcaggcataaaggaattttcttttatagggaagagtaaacaggcaagaaagaactagattcaggggagtgggatgagactgttttggatctgttgaccctgatatgtctgtcaaaatgtctgtgagtctagctgatgttcatgacgtctgaaagaaggccacattttggtctctgaagccccttcctaagattggggagcaaagtacctgacttaggtgtttgggtccaggaggatgatggggggctccctgggcatgcctctgttctactgtggaagaggagatgccatgggaaagtaacagcacctagggtcctgttcaacatggacattaaggaaaggtctgcctgaaccccttctgcagtagctggcttccattgggtttgtggaagaactgagattttttccaaattcccaaaagaggagaagtaaaggtagttctaagtagtttattttgtgggctgtgagccaagtctaatcttgtggctttttttccttgtccagcactggcttctctggactttgcacacctccaggagaagaacccagaaaattgatcagttctaaaaaaccatgccccacgtgagttgctgtttctttccttcttgaagtacaatcattttgttgtgtaatgtgaacaccagatttatcccagaatttcctgccttgtttggttccttaagggaactgcttccaaacgt

SEQ ID NO: 314721 - DNA, 557 bp, Homo Sapiens
  misc_feature (57)..(57): n is a, c, g, or t
  misc_feature (90)..(90): n is a, c, g, or t
  misc_feature (139)..(139): n is a, c, g, or t
ccccaaaaaaggggaaacaaaaatacctgaacctaaatgttggggcccccgagaagnaagaaaggggggctcccccggggcaagcccccngtccctaactgtgggaaaaagggaaaagcccaaggggaaaattaaacancaccctagggtccctgtttcaaacatggaacaattaaggaaaaggtctgccctgaaacccccttcctgcagtagctggcttcccattgggtttgtggaagaactgaagattttttcccaaattccccaaaagaggagaagtaaaggtagttcctaagtagtttattttgtgggctgtgagccaagtctaatcttgtggctttttttccttgtccagcactggcttctctggactttgcacacctccaggagaagaacccagaaaattgatcagttctaaaaaaccatgccccacgtgagttgctgtttctttccttcttgaagtacaatcattttgttgtgtaatgtgaacaccagatttatcccagaatttcctgccttgtttggttccttaagggaactgcttccaaacgtctccc

SEQ ID NO: 314722 - DNA, 989 bp, Homo Sapiens
ggggctttcatctttttattgatagcacagccagagctaccaaaatgatttactggattctagcaaattaataaatacagtaatttgattgtaaaaggaaacattctacttggacattttagtagaaattgctagagggaaggagctcctggcgtacattctacttggatagaagagaagatagcacaggaggagaactggacagtccaggtatagattgttgagattagggattcagcagaaagcaaagcaaatgttctcattgttcttttgaggtacgaactctgaagagtcaagacattaaaaataaaaagcaattgaaccgggtagccaaacttaggcaaaaggaataaatatttggcaacattttgactttaactgccaatctgagattagtttcttcagaaatttggaagctgcaaaacgttgcctttcttattccatgaaaggcagggcaggcaaaggtaagaaaactgctgagtgggctccttgtaccagcaccaaccagcagcccttgacagcatagatgggatgagtgtaagggctatccttagcataagggaaagacggttataagctgagaagattgaaagaagaatggagccacaaagagaatagcataaataacaagaaggaaacatgaagaacaagcacttaagatattaactttcagtctttctccatttcttgatgtctaatgaggcaaaataactgggcaaggaccaccaagatgaagaagttaaataaaatgtcacaatgaaattgagtgcaataatacaactgttgactgactttccaaaaccacggtgatcggtagagtatcatcaatgttaccgaggattttgtttctgcctcattataactcacttccatgtattttgtcagtatagtacgtatatttaagcactccagtgacaattatgacaatagtttctggaagaaatctatgactatagctttgggaagcacacaatatgaaaagggaattt

SEQ ID NO: 314723 - DNA, 826 bp, Homo Sapiens
aacgttcctcaggaagcctttattgagggccttcttggtgtggaagtgctgcactgagtctgcagggacagaggaatgggcaggagcggggccgggggtagaccacctggcaagactggcaaggcagtgggctgagtctgccagagaagatggggagctgctgcccgcccaggggcatggcatctgggctgagaagggcaggagggtgggtgacaacaatgtgcaggtctgtgggggacacagcggcagtacacagagaggtagtgggggctgggagagttgtttggcagggatggcactcgagggtgcttggcacacctgtggctgcttcaggccatggcaagagggtcaccccaggggcttcttgcaggcagggtcctgggtcacagacagggccacagagccttgtgttcgctcccaggcatacgaggtcccagctagcaccaggaggctgtcatcaggggccaggctcaggcgccgtccccccattgtcaccaccgaggagccctccagctgccacagccacacgtccacattctgtctcaggccttcgctgctgccttgcccataggcgatcacctgggtctcataggtgtccccaaacaggctgagtggtgtgcctgcctgcagctccctgtggtggctgtccagccaggcatccagggacatgggctccatgatggatcgtgtgctcagagggaatggtggctccttgagcagctggtcagggatgggccctgttctgtactgctcagagctgaagaactcctggatgatgggggccaactgcgtgccgaggtccttgcagtagaaccacttctcaaac

SEQ ID NO: 314724 - DNA, 598 bp, Homo Sapiens
  misc_feature (404)..(412): n is a, c, g, or t
ggctgcagaaaaaaaggggtttcctttttatcaaaataaagcttcataaagtcaaatcctgattatgtaaaataccacagtgtggtttgaatcacaaaaatcatattctatatgtctgtacatctaagctgcccttacatgtttttaaattcccccaacttgggggttcacccccaaatgctagatgtagcccccaaatttatttctgttttatcctactgaaatagctcatagtcacagagcacttgggctatactggaaatagtgacaccagcagaagtcagaaggaaattcttgttctgctggctgtttctgcatctaatctatatgatgctgactagtgagatgtctgacagtgaagtggctggaatcacttagtgtacagctgtgagagttaagcagannnnnnnnnaacccttcgcttaccttgctgatagtgaagtatgtgaaggagatctagagctctgacgactgccttttgtgctagctgtaggtagttctaacccactctggaggaatattcaatagcaatcattagtactacctactgtgttttagaagattatttttaattagctttcactctatgatgtgtctg

SEQ ID NO: 314725 - DNA, 189 bp, Homo Sapiens
  misc_feature (165)..(165): n is a, c, g, or t
  misc_feature (170)..(170): n is a, c, g, or t
ccaatctataagtcatgcaacataaactctacatcatctcctccattgggttgctttgaagtgaagtacaccttcgatagtacaatgaagtcttgtgatatataaagtacaaagttgtgtttaccgggtagaccaagtaataaatcatagaccagctttcctggnttggngaagagtttttgttgctgt

SEQ ID NO: 314726 - DNA, 2220 bp, Homo Sapiens
  misc_feature (150)..(150): n is a, c, g, or t
  misc_feature (378)..(378): n is a, c, g, or t
  misc_feature (559)..(584): n is a, c, g, or t
gccctggcgggcgtgtatatcactcagcagagcgggagtgtgtgtctatagggaggccggtgatgcagagaaggtatatggtccatgatccgccctgcggggcctggatgttcactgggggcgaggctagtttgtccggcgcgtgggagngatcaacaagagggaggcactttgtgtcaatgtcggcgaggtttgttccgccacacggcgtgggtacagcgcgtggaggcaaaagggcgggaggtggcgaactggggcgaaccacgggtggtggtgtttcacggttagcggcagatgtggaagttgggtatgagaggaggttcccaataataggggctatccagtttggcggccagtggggcagctaaaatgatattnccccatccggttcgctttgactgggggggcgccataattgcagcagccggtacagttaacaataccagggcgtctgggtctctagaaatccccggtttatgatgatctctcggggagatcgcccttcgggatctgtccctcggggcatgtggggtgtgggggccccagaggatttttcccnnnnnnnnnnnnnnnnnnnnnnnnnnaggcctagggcccgagtttatgatagtggatcgtcccttggacacccgcacttcaacccgggttgaggtttggtggggggggcagagggcccaaaaaagcgatgtcaaaaagtgagggcgccggacgagtcaatcctctatgttttttttgtttagatctgcgggcgtttattcttgttctgttgttttcatatggggtttcggttttctaaaaccaaatctttattctctagtttgaaaaggaggggtaaatggttgttctgtttagttccagagaacagaacaaggcccaataggtagaaattataggaaagcagaattcattcattataaggaaggatttctaacaattagaatttctaacaattagaatcatccagggcctcaggaggtgcggaagttcctgtcacctaagtgctcaagcagaggcccaggtgtccatatgctagaaatggagaaaaggaaactcaccagcaacttcccctcagctggccctccatcaccaatgcggcagtccttgctgtgacatgctgagctctggaaggagcgaaggaggggctgcggtgttcagacaagagcctggacacagtgctgctgacagccaggggaggctctcagcgctgggaggggcgacagataaagcgagacagaccaaggagtaaatgccttggggtctgctctttgggaaggaagaggatggaagtattaacagcagacgggtctctccaagtctgggtgcctacgcagggggcaggtgggaaggggaagggagaggtaagagtggctttcgtttcacctcttgctgctggcaaaggccccaagtgctgtctaacagggccagcagtttctccaagctgtatctagcccagagcattcatttacaggactctcccacgcctgctcccaaaaatgatcttaagtaccttacagtaaaagacaggggcattaaggcgttaataccagaggatggagggtcttcctttccactggtggctcctctagccagagggctctaaggggcggatgctattgctgcttttccagggcacagggcagtcaggacggagccttagcacacaccagctggaggccggcgtccctgcgcttggaagtgggttccctggccaccggggttgacctctctcgctagcagggcccacccagctcactccccgcgtcttccatcccctctaggattcccattgtcccctactccagcactaggcaggcacccccagcccactgcgactcccaccacgaaggaccccagccctctctcagccaacacggccccgcccaccgtctcagacatcgtgcttcttctggtgggccaggagtctctcctcgtcgtcgaaggtctggccacagatggcacagcagaaggcgccgtcccggatgtggctcttgcggtgggtgatgaggttggacttctggctgaagctgcggtcgcagtcgggacaggcgtagggccgctcgcccgtgtggatgcgccggtgcgacaccaggttggacttctggctgaaggctttgccgcagtcggggcagacgtagggcttctcgccggtgtggatgcgccggtgcgccgccaggtagggtttgtggcggaaggccttcctcgtgccgaattcgccaccca

SEQ ID NO: 314727 - DNA, 737 bp, Homo Sapiens
caggtgtaacagtggactgaagaatccatacaactcagctgaaaaacagttacatctggtgtgtgaaccttggtggaactagggtgaagggtggagtaaagacacacccctgttgatcaaggtcagggcaaagaccaggaggaagggaaaaccataaagccaaagtctgagtgtggaaccactcaactgagcacaggctgtagcttctccaagaaggatgcaagggtgaaacattctttccttccttctgcagggaaatcattgccctggtgtgccagccagtggtaggcacaacctttcaaaagttcaagggatgctggctagaaaaggaggtattctggattgctgcctcctctcagaaccctctcctaccccgcagcctgcctcctggtgtcttttttcctccaaactctctttacctaacctctcttcatcagaaggcaagcgggaatctgttccgggtttcagtagagtgggagaaaggacaggcaaaggcacagatatttaggcgagagtcaagctacttctggcccttgcatgtcccttattcaggaatagtgggccccgacgactggcactccgactctcaactctggttttgggagaacattagaggctcttaagaggctccccaccatcagtgtgcctttcctgaatccttgctctttgaatgggctgagctgttgccaccagatgcactgatacactgattgattaggtttgtgctggctcgtgcc

SEQ ID NO: 314728 - DNA, 394 bp, Homo Sapiens
  misc_feature (181)..(181): n is a, c, g, or t
  misc_feature (358)..(358): n is a, c, g, or t
  misc_feature (384)..(384): n is a, c, g, or t
ttttaaaacacagttttatttactcatttataaatactgttgtgtttacaggcatcatatagaagtgaatattattattcccaaactttcaaacacagaatactcaaaactatataacaacaaccagtaaaacaaaaccattcatcttagggttgaaaggccactcaaaattgcataaaantacattcagttcacaaagcaagtctgggctgcttctccctaaacaaccccaaccccaccccatcccgggtgtatttacagtgggactgaaggttaatccatacaactcaggctggaaaaacagttacatctgggtgtgtggaaccttgggtgggaactagggggtgaaggggtgggngttaaagggcacaaaatggcttaccncttaaatggg

SEQ ID NO: 314729 - DNA, 498 bp, Homo Sapiens
  misc_feature (358)..(358): n is a, c, g, or t
  misc_feature (409)..(409): n is a, c, g, or t
  misc_feature (415)..(415): n is a, c, g, or t
  misc_feature (426)..(426): n is a, c, g, or t
  misc_feature (437)..(437): n is a, c, g, or t
  misc_feature (463)..(463): n is a, c, g, or t
gattcaggaaaggcacactgatggtggggagcctcttaagagcctctaatgttctcccaaaaccagagttgagagtcggagtgccagtcgtcggggcccactattcctgaataagggacatgcaagggctagaagtagcttgactctcgcctaaatatctgtgcctttgcctgtcctttctcccactctactgaaacccggaacagattcccgcttgccttctgatgaagagaggttaggtaaagagagtttggaggaaaaaagacaccaggggggcaggctgcggggtagggagagggttctgaggagggagggcagcaatccagaatacctccttttctaggccagtcatcccttngaactttttgaaaggttgttgccttaccacttgggcttggcacaccagggncaattnattttcccttncaggaagggangggaaagaattgtttttcacccttgncatccttctttgggaggaaggttacagcctgttgt

SEQ ID NO: 314730 - DNA, 501 bp, Homo Sapiens
ttcaaagttaaaacacagttttatttactcatttataaatactgttgtgtttacaggcatcatatagaagtgaatattattattcccaaactttcaaacacagaatactcaaaactatataacaacaaccagtaaaacaaaaccattcatcttagggttgaaaggccactcaaaattgcataaaaatacattcagttcacaaagcaagtctggctgcttctccctaaacaaccccaaccccaccccatcccaggtgtatttacagtggactgaagttaatccatacaactcagctgaaaaacagttacatctggtgtgtgaaccttggtggaactagggtgaagggtggagtaaagacacaaaatgctaccactaaaatgggagaggcatggaaacctcagggtggttcttttcacccctgttgatcaaggtcagggcaaagacaaggaggaaggaaaaccataaagccaaagtctgagtgtgaaccactcaactgagcac

SEQ ID NO: 314731 - DNA, 555 bp, Homo Sapiens
ttttacaaagcagaggctcttttagtaatgtgctagaaatccagagacacaatgggttttctaggaaacaaaccaccagtgtacaaaaccgtacagcattgctcccgtgatccgtacaaaatgattgtccgcatggtggagtaaggctggggctgtgggaggggaagcgaggagctgaggaggggcacagttctattgccaccaccaccaggctgtgcccctggccgccagtgggtgccacttgggtgcactcaactatgacatcaaggatgagagggcatctgagctagatcacatcccagggcccacagagctcacagcctgtggggggaccccaactccctgctgggtggggccaggcataacctggggatagctgtccctaacctcaatgacaagggcacccaccctggctggactcccgtctgttgacactgctgccattgggtatttgtcaggtcctggccaaaaccaggtcctttctcaggacagggttgggcagatggacacattaactcgctctggacagggccgagatcccactcctcctggaat

SEQ ID NO: 314732 - DNA, 1007 bp, Homo Sapiens
ttttaagagggaaaaaggtgaaaggccggtcccccagtttgaacccagttgaattgcgaaaattctccccgggaaatcccaactttttggtcttttggggccccagggtttttttccttggtgcggaaccctttggcaagggaggcaatcagttccctagacccacgcgctttggcagttttccatcatctggaagaatgctctctgggttccagggtgcctttaccccactttcctcatgccacgtcacaacttccttgtgctggtcaccgacacccagccaagctggccagcgagcaggcctcctcctgaagagtagcatccgccaccatgccgattagccaatcttgcacagagtgacaatgcagggggcattctccaccacttagtcgtatgcagtcataagggtcatctgacaattcaatgtccttcgacccctcttcatcctccaaaactcgaacccttggtatccttgtattgaagagagcagcctttacagcaatggaaatggcatcaaacaaatttccaccacattccagaagcagcacatccacatagagaacccagcagtgctcccgaggactaatgcagagggtctttaagtcgacactgcttttattgttaaatatccgatagagggtgttagcgatctcggtgccaaggtcatcacctcctctaccttcaaattcaggggtagcactggctgaacagtcaacaaagaactccaagtagccttcatttggtttctccagcttcggcgtccccatttctgctttcactcccaccaagatgtctgtgtgacccagcttgaccctggcggacccactagtgttggacaccacatcagtttccacttcgacacatcggtagtcctcacagccacggccatccacacggaggtcttcctggacgccatgcacgatgtacaccttctccgcctcgctcagcgtcacggacgccatgctgccgagcctcgtgccgaattcgccacccaggcctcgctacct

SEQ ID NO: 314733 - DNA, 810 bp, Homo Sapiens
ttccatcatttggaagatgtttttgggttccaggctgcccttccccatttttcctcatgcaggtcacaactcccctggttggtcaccgacaccagcaagttggccagcgagcaggcctcctcttgaagagtagcatccaccacatgccgatagccaatcttgcacagagtgacaatgcaggggacattctccacacttagtcgtatgcagtcataagggtcatctgacaattcaatgtccttcgacccctcttcatcctccaaaactcgaacccttggtatccttgtattgaagagagcagcctttacagcaatggaaatggcatcaaacaaatttccaccacattccagaagcagcacatccacatagagaacccagcagtgctcccgaggactaatgcagagggtctttaagtcgacactgcttttattgttaaatatccgatagagggtgttagcgatctcggtgccaaggtcatcacctcctctaccttcaaattcaggggtagcactggctgaacagtcaacaaagaactccaagtagccttcatttggtttctccagcttcggcgtccccatttctgctttcactcccaccaagatgtctgtgtgacccagcttgaccctggcggacccactagtgttggacaccacatcagtttccacttcgacacatcggtagtcctcacagccacggccatccacacggaggtcttcctggacgccatgcacgatgtacaccttctccgcctcgctcagcgccacggacgccatgctgccgagctgccccacgagccgcacgtcatctccc

SEQ ID NO: 314734 - DNA, 830 bp, Homo Sapiens
tcagaccagaaaatagcctttaattttacatgtacaaatgctgctgtaaattcgtaacagcgaagaaaaatatatacgaaccggtttaaaaggaaaagtaaaaaccaatccacagttgagcagttgatgtgcaaatcatcccaggaatccaactttctgtctcttgggccccaggctttcttccttgtgcagaacactctgcaaggaggcatgcagtaccttgcccacacgcttgccagtctccatcatctcgaagatgctctctgggtccaggctgcccttccccactttcctcatgcacgtcacaactcccttgctggtcaccgacaccagcaagctggccagcgagcaggcctcctcctgaagagtagcatccaccacatgccgatagccaatcttgcacagagtgacaatgcaggggacattctccacacttagtcgtatgcagtcataagggtcatctgacaattcaatgtccttcgacccctcttcatcctccaaaactcgaacccttggtatccttgtattgaagagagcagcctttacagcaatggaaatggcatcaaacaaatttccaccacattccagaagcagcacatccacatagagaacccagcagtgctcccgaggactaatgcagagggtctttaagtcgacactgcttttattgttaaatatccgatagagggtgttagcgatctcggtgccaaggtcatcacctcctctaccttcaaattcaggggtagcactggctgaactggacgccatgcacgatgtacaccttctccgcctcgctcagcgccacggacgccatgctgccgagctgcccc

SEQ ID NO: 314735 - DNA, 899 bp, Homo Sapiens
  misc_feature (270)..(270): n is a, c, g, or t
agccaagattccctttggcccccaccggcgtttgccccaggtttcccatccattctggaaaggatggtttttgtgggtgccagggtggacccttcccccctctttccttcagggccaggtccacaaacttcctctggtgggtccaccacccccagcaaagctggccaagggagccgggccttcctcctggaagagtaagcatcccacccacatggcggatagcccatttttgcaccagagtgaccattgcagggggacattttcccacancttaagttcgtatgcagtcataagggtccatctgacaatttcaatgtcctttcgaccccttcttcatcttccaaaactcggaaccccttggtatccttgtattgaagagagcagcctttacagcaatggaaatggcatcaaacaaatttccaccacattccagaagcagcacatccacatagagaacccagcagtgctcccgaggactaatgcagagggtctttaagtcgacactgcttttattgttaaatatccgatagagggtgttagcgatctcggtgccaaggtcatcacctcctctaccttcaaattcaggggtagcactggctgaacagtcaacaaagaactccaagtagccttcatttggtttctccagcttcggcgtccccatttctgctttcactcccaccaagatgtctgtgtgacccagcttgaccctggcggacccactagtgttggacaccacatcagtttccacttcgacacatcggtagtcctcacagccacggccatccacacggaggtcttcctggacgccatgcacgatgtacaccttctccgcctcgctcagcgtcacggacgccatgctgccgagctgccccacgagccgcacgtcatctgcgcgcccc

SEQ ID NO: 314736 - DNA, 238 bp, Homo Sapiens
tattgaggcttttcccctcattattccagtgttcaaatagggtgaaaactatgtggatggttttatttgcgcctaggtcctctgtgttagagtactcaagtcctgctctgtgtgcacttcctttcacttgtttttatttcctcatagtgctctacggaaacgtattcgagaggacagaaaggccaccacagctcagaaggtgcagcagatgaaacagaggcttgagaatgaacgaacg

SEQ ID NO: 314737 - DNA, 668 bp, Homo Sapiens
  misc_feature (576)..(576): n is a, c, g, or t
  misc_feature (586)..(586): n is a, c, g, or t
  misc_feature (594)..(594): n is a, c, g, or t
  misc_feature (631)..(631): n is a, c, g, or t
ggaggctccatcgaggcagccaagggaccaaggccaacacccgagagcagagtctgctctgcccagctggaagagtgtggacaggctggatgaaacaaacctggccccagttttgcagagccccgacgggaactgggtggccctgaaggatggcgctccaccccccacccgactactggcccctaagagcgggacgtttcaggccctggaggtggcctccagtgtggcatctgcctacgatgagatgggctccgatagcgaggaagactttgactggagtgaggccttgagcaagctgtgtcccaggtcccgggccctgcccaggaacccccagcctcagcccacacaggcccagagctctgaccaaggccccatagctgcctccccatcctctgcactctcccccccctgaggccatgtgctctgactcggagacctcctccgcaggctcttcccgagaagttgggcaccaggccagactgtcctggttgcagaggaaggccctcaggaaccctgcagctggatgcgcttgcatggagaggctgacgtgaacttcaaacccccagttggcagcanggagaccttngacagcanccagctcgaggaaggccctcacacctacagaccggtnggcccacgaggttggagccaagtttccggatctgcct

SEQ ID NO: 314738 - DNA, 593 bp, Homo Sapiens
cccacggtgagaagtcgtcatcagcatcattcttccgcctggaaggcaagagaagcccaaaacccatgggctttcctcgggcacggaggtagagagctccggccaccaaagcccaagcagtgctccagcggcaagcacagcccccacgcctgccgccacaggtggggcttcaggcgccagcactgcctgcacaggggcccaggaactgttgtcagggcctgcgtcactgatgatgaggctgaggcctgagtgggccggaagcaacttcccctggctggcgttggcacttaggagggtggcgttggaggcatgcagctccaagtctgggccactcagcgtcatgttgtccacaaagccttcattgacagggacgaagagtgtcttatacgtgagctcatcatccaggaagtccaggaagtcgagaccccgctgggtggcatttgcatagcccaatagcatcccatagaaggtggagaagttggcagtggcagccagcacatccagcagcttcccattgcacgtgctgatcccgtcacccacaaagccacggcatcggcaggccacatcttgcacacggaagcagtaggcatccc

SEQ ID NO: 314739 - DNA, 1189 bp, Homo Sapiens
  misc_feature (214)..(234): n is a, c, g, or t
  misc_feature (1075)..(1075): n is a, c, g, or t
  misc_feature (1112)..(1112): n is a, c, g, or t
  misc_feature (1140)..(1140): n is a, c, g, or t
  misc_feature (1164)..(1165): n is a, c, g, or t
tgattgttgcatgagagtcaggaaaaatactttggtttgtttattcctgtattcacaaaccttgagctcaagaatgagactaggatagtctttatcactacatgtgggcatgtaggaattatctttttccctcctttttgtccggcctactaggaagctcatctaagcttcatattctattcctgtatgcttctcaaattcatgtggattgtannnnnnnnnnnnnnnnnnnnngaccttgcgtttgcctatactgatttttcttttttaataaactccctcaactcttttgaagtaggctgggataactaattcagtcaagtacaattcagttagcccttacgtgactttggaacaatcatttgctgatgttatcccattgtttcctgatccgtcaatgtggataaaaattgttctctctcaggttcttttatcttttatgaaaatcaactaaaaagtcataaaaatctttttttgaagttgagtattatcctaatgatggatacaatatgggccatctccatagagctgtatattttttctggtttcagattttaaagatttacacataaattttaaatgattttttaaaagtcttttctagtataacatgtttgctttctttctttctgtctttttagtttcatagcttctttttaaataattgctcattcccatcagggctctttctgcttttcttttgcagaatatgtgagatccaggctgttgactgtactacaatatcctcatttacagtgagggaatgtgagggatccagtaggatgggctcaagaccaaggcgctacttgttcacaggccatacaaatggcagtattcaaatgtgggatctgaccactgctatggatatggttaacgtgaagataaggatgtaggtggtccaaccgaagaagagctactcaaattactcgatcaatgtgatttgagcacatctcgctgtgctactcctaacatcagtccagcaacttccgtagttcagcatagccacttacgagaatcaaattctagccttcagcttcagcaccatgataccacccatgaagcagctacttacggntccatgaggccttacagagaaagtcctttattagcangggcaagaaggactgagagctttcacangtatagggacttccagactattannttgaccagtgtagggctgtccttg

SEQ ID NO: 314740 - DNA, 133 bp, Homo Sapiens
ccgggctgcaggaatcggcacgaggtttaacaggcaaataagtttccttgggagactgaggtcccttaaaggggggacagcaatatgtgacaagtgtgtccctattctaaagaggactgttaaatcatctgga

SEQ ID NO: 314741 - DNA, 2184 bp, Homo Sapiens
caacatgccggcggaccagcacggggcagacttcttacatgagttaagtgcagtgggggatgggaagggcgggggagggggtaaagttggtgggggtgagccgcattatacgtaatctcccaagcaaatattggcaatacatacaaaaggttatgaagccttataacttctgccttaggcaaattccaaacttaaacaaagctccctctcccactaaataagaaaactttaataagatgattacaaagaaattaataaagaaatagaaaatgatagcagcttcaaaaataccagtctccctgttttaaaacaaaatcaataaaatcagtgaatcacaattcattgaactcattcttggctacaaggaagcagctggatagatccactggcaggcagccctgcaggattaaaatgaggcccactgccaaaaagccccaaatgagatgccgtcctcctcatcctcacaccatcctcatcaggcagggaaggaataggattagactccctattatggagaataggttgaggcacagagcaggaagggccccttcttaatatcatagagcccctctgttgggtcagaccagaactgggggcagaggctaaaggtgagacccactgctgtccaggagcaaggggctgggggtaggggctaccctggcagccgggagttctggagccagtgatctagagccccccagcaaaacaggtttcccattgcaccatttggcactatcctggagagagctgaaataacaaatcaaagttaggcagcaccttgcagggcaccgagcaaatagtaggcgcagttgtgtgtctgctgcgtaaactgtgcatcatgaatgaagggagctacttccctcagctagtgccttccctccagggaaatccaggagctgcctttgccattccgaagactctggatttctccaaggcaggcaaagaagacaagggaggtaatggtgagttccctccgtgaataaacacatggatttcccagctctaagggaacatcatcgattctgtcagactcacggacacagaggaagggattccagaacctcacagaaacagaagaagccggaggggctgtgtttgcattgagcttgggctaggacctgagagctagagcaagtcctatacccagtagtccaagcccctagctttccttctgtttggtgcctataggaattccctagcatccttatacccaaaggacttggcacagaaagtcgatgtcaacatgagaaagaaagaggctctttgttctcaccggcatgtgtggctatttctgtcctggccctgcagcacgcagaccgtcttggccctggcccgacaagcccccaaggcaacagtgtagtctttattttggcttgctctgggagccaaggtccagggaagcctgaccctctctgctctgggggactctgacagggagaaggcattggctcagccagaatgtctcaaaggtactacaattggcattgaatggaccaattctttgctgtcagagactgttctgcacattgtgggatgcccactagatgccaggggtgcccccacagtcactgtgaccccctcaacacacacacatttccaatgctgcctggagggacaacctgcccctggtttaaagccactgggctggtggccccctcatgcatttgtgaaacagaagccccagagactgagtgacatgttcaaggccatgcctcagctctgatgacttctggttcagagttcttcccagctgcactctcaacgatgggtgcccatgcatgtgcccagaacactgcagacacaccatggggtgccacagctctgcagagcctcaaagcggacagccatctgtctcagtggctcagagaaaccgagacagagagacaaaataacctccctgtgatcagactttagcaaatgcttgggtggggagtaggttcccaggggagactctgttttaggtcgtgcttgtcttagtaagccccactgtctagctggtaactgtgagtgtggcaggcctccagcaggcgggggtttctgcagtctccatggagacctgggggccagtaagacggagccaggccccagtctgtaggttagagccagggacagcgcaagggtccagccttcatcttgagtctccggtgggctcagcaggagtgtgtacgactccatcacaggctt

SEQ ID NO: 314742 - DNA, 647 bp, Homo Sapiens
  misc_feature (562)..(606): n is a, c, g, or t
ctataagatatcaacgaggtacttcttggttttattagatatgagaattatcaattcaagtcagaagtgccacaaccactgccatattagaaagattagtacccgagagcccagactgtcacccggctggaggcctctcgccgatggctcccagggaccactgacctaatcaagggcctcctccttcacacgccaccctccaccccaacccctttatgccttcttaaagtccttcagggaggggacccaccatcaagattgtcctttctggcacctaactcttctgtctgctagaagacagcaatgagactgtccctacaacgatgatgcttatggtggccacatctcaaagaagctgagagggatctcagccccgtattgtcacttgggaggcagaacccaaatcttagtaaatgaagactttctctcttgaaccattcacaggaatactgaaggtaatgaaaaaataatgtgtaaaccatcctttggagcagaggctacaaactcacatgcccgcctggaccagcaccgggcagacgtcttacatgagtgaagtgcagtnnnnnnnnnnnnnnnnnnnnnnnnnnnnnnnnnnnnnnnnnnnnngccgcagcagacttgagatgacagcatgccccatcctccac

SEQ ID NO: 314743 - DNA, 573 bp, Homo Sapiens
  misc_feature (136)..(136): n is a, c, g, or t
  misc_feature (282)..(308): n is a, c, g, or t
  misc_feature (513)..(513): n is a, c, g, or t
aacagggagactggtatttttgaagctgctatcattttctatttctttattaatttctttgtaatcatcttattaaagttttcttatttagtgggagagggagctttgtttaagtttggaatttgcctaaggcagnaagttataaggcttcataaccttttgtatgtattgccaatatttgaaacttgggagattacgtataaaaaatacctagttttctgggtggaggatggggcatgctgtcatctcaagtctgctgcggctcacccccaccacctttannnnnnnnnnnnnnnnnnnnnnnnnnnactgcacttcactcatgtaagacgtctgcccggtgctggtccaggcgggcatgtgagtttgtagcctctgctccaaaggatggtttacacattattttttcattaccttcagtattcctgtgaatggttcaagagagaaagtcttcatttactaagatttggggttctgcctcccaagtggacaatacgggggctgagatccctnttcagcttctttgagatgttggccaccataaaggcatcattcgttggtaaggggacagtc

SEQ ID NO: 314744 - DNA, 459 bp, Homo Sapiens
ttttctataagatatcaacgaggtacttcttggttttattagatatgagaattatcaattcaagtcagaagtgccacaaccactgccatattagaaagattagtacccgagagcccagactgtcacccggctggaggcctctcgccgatggctcccagggaccactgacctaatcaagggcctcctccttcacacgccaccctccaccccaacccctttatgccttcttaaagtccttcagggagggggacccaccatcaaggattgtcctttctgggcacctaactcttctgtctgctaggaaggacaggcaatgaggactgttccctacaacggatggatggctttatggggggggccacattttcaaaggaaggcttgaggagggggttcttaaggcccccgttatttgttcatttgggggagggcaagaaccccaaatttttaggggaaattgaa

SEQ ID NO: 314745 - DNA, 733 bp, Homo Sapiens
caaggatgaacacacacccaagctgtggctgccgtgcgtgtctatttattgttgctgccaccctggaggagccccagtttcttctgtagctttcttttctgggggatcttcctggctctgcccctccattcccagcctctcactccccatcttgcacttttgctagggttggaggcgctttcctggtagcccctcagagactcagtcagcgggaataagtcctaggggtggggggtgtggcaagccggcctggatcctgtcctgggtcctccttcctccgcagtcccgtctctattgctgggtgtagtgtccatggtctggcctcatctccagctctgtctcagcgccgtgcccctcgcttcttcctctctgaattctgcagcttggtcaccagtttcctctcgtgcccgccagggctggggcggttggtgttggcagcagcttctctcttggtgcgacctttccggcctccacctccgaggtaggaatgggccaggctatagaggtcagattcatccaggctggagtcctcgtcctccgggcctgggggctgctggggggcgctggttgctggtgggaaggtggccatcgtgcctggcttgtcttccctgcctctcttcttctcctaacgctttgtctgtctctgctttcctggccccgggcctctccactccctcagcttataaggctgtgtctccctcgtgccgaattcgccacccaggcctcgctacct

SEQ ID NO: 314746 - DNA, 1466 bp, Homo Sapiens
gctaagggaatatttttattcttctgagggcagttaaggcttctgataaggaaagagagtctgaacagagcacacacatctggagctccaggagtgggggatgcagcatcagattccatcttgaatttctgctaaaatactttgtactcataatggatctcaacaaagatctgtatttcatctgtggctccatcttccctctgggtcaagtagatgttaagctggaccttggcacgcctcttaacatgaagagatctagctagacagacagactcccccatttatgggaacaagaattcaatttattctctatttataaaacatttttttaaagtgccttgggtataaaaatctaaatgtctgcggtgtgatcagtcaggagcacgtaactatcactcttcgcatcctttggtcactgggagatcctttgggggctgggaggtccttctgtcccaggctaaaggaaaagcttcacaagggtaagagccacagaaccctcggcaagaaaggccggtcagggagaatgaatggtacagagaggaaaggaaggaaagggggtggaacagaggtagaaggcaaggaagggatgccgcactggagaccgatggggacactctaattgtgcaagagggaggatcttccttctttgaatgctgaacacagctagtctgaaccttccttggaaagtccagctgtttgcccatgcatagggccaactctcccctgcaaagcagcaaatgtggcttctatcaggaaggaaaagtatccatcagtgtgacaagaggtcaccttcgaacttgcatgaactccttgcgcagccacaaagagtcctggtagaagtgaggatcgcctagtcttacggctgtccgtttatagaagtagcagtacaacactgctgctagtctctggaatacaaacagcatttgaagtccatctgtccatatgaagctgttggagtttttccagcgtaagttcatgacccagacatgaagggagatgctgagggcaaagtacacagctgtcaggatgatggtccctttgaacttatggaataggaggttgaccaggccagcctggaagacgaaggtgttgaagaacatgaggaaaatgatgatgatgttgaagaggactgcaatatcctggatgatgaagagcacaagctggatgacaggagtcttttggagcagttctgagaaggaattgacaaagaggtcataggacagcagcaggaactgcagagagagcaccaggctgtagttactggtctggagcatcttccttctgttttctcgggcccccaagggcacatcccacagttcccagaaaaccgctcctggctgtctccctaccactgagggagaggcttctagttcctttgaatgagagctgtttcccttgctctaaggcaagcacctccaaactccaacgtcggttgtcatgcggacatcgtcccggcttccggaccc

SEQ ID NO: 314747 - DNA, 403 bp, Homo Sapiens
ctatccccgaccatggcgaagctgattgcgctcaccctcttggggatgggactggcactcttcaggaaccaccagtcttcttaccaaacacgacttaatgctctccgagaggtacaacccgtagaacttcctaactgtaatttagttaaaggaatcgaaactggctctgaagacttggagatactgcctaatggactggctttcattagctctggattaaagtatcctggaataaagagcttcaaccccaacagtcctggaatcactggaagtaaatttgatgtatcttcatttaaccctcatgggattagcacattcacagatgaagataatgccatgtacctcctggtggtgaaccatccagatgccaagtccacagtggagttgtttaaatttcaagaag

SEQ ID NO: 314748 - DNA, 1755 bp, Homo Sapiens
ttttttggaatagttcaggttaatatttactgagaaaaagtcatatatcgaagggaaaatgggagtaagtaagtctgactgccatagtcagacttactatgtgcatggagtagaggggaacttcataatgcatatgttttctggcctgtgaactggagtccctgggtgagtactggagttctaaagacacgtgagctaaccctgctcccctgtgtcttctgaacaagacatggcaaggcagcgatacacacatgtgctttcaggcaacacatgttttagggtaagtacttttggggtcacacactgttatttaatatctgacaattgacataactgatttatccattttagtgagaaggatttttatggtaaatgaggttttcaagtattccaagactgatttgatagtgtattctcaaaaaaaagccctacacatcatatcactcccagttaaacagtgctttgatgcttcatgatgtccacatttagggtcagcattcattgttcagctaagaacactgggtcctcggaatatggcaagcggttgaaataatggcctcagtttctatggcatgggtgcaaatcggtctgttagagctcacagtaaagagctttgtgaaacactgtgccaatcagcagtttccctttgtacacagaggcaactgtactgccttgcaacactgtgccattttctgcataaacctgtgtcactttaggttcttctgttagaatgttctggattcgaagcacctctgatgcaggaggattctctgagtcatagaagaagattttcatgccattgggatggcatccaacccaaaggtctcctgtctcaggatccacagatatgttatccacgagggtattaaagtcaagggacttcaatggagttaaagtccaattagcatgcttttcatacacatgaatcttatgagccagcaactcagctatatagacatacttgccatcgggtgaaatgttgattccattagcaaaatcaaatccttctgccaccactcgaacttcacttggactatagtagacaacatacgaccacgctaaacccaaatacatctcccaggatcgtaagtaggggtcaagaaaatagtgatcatttgtgccataaaagtgctcaggtcccacagcaacaatatcattcaaattaggcagaagtttatgtctgatggtttttagatgcaaaagcgatttttcttcttcttgaaatttaaacaactccactgtggacttggcatctggatggttcaccaccaggaggtacatggcattatcttcatctgtgaatgtgctaatcccatgagggttaaatgaagatacatcaaatttacttccagtgatccccaattccaacactgttggatcttcttcattcaggtccatcagaagtatttttccaggactgttggggttgaagctctttattccaggatactttaatccagagctaatgaaagccagtccattaggcagtatctccaagtcttcagagccagtttcgattcctttaactaaattacagttaggaagttctacgggttgtacctctcggagagcattaagtcgtgtttggtaagaagactggtggttcctgaagagtgccagtcccatccccaagagggtgagcgcaatcagcttcgccatggtcggggatagacaaagggatcgatgggcgcagacaccgacgggctaggaggctctgcctgcctgcagccgcagccggttttggcagcgccgatt

SEQ ID NO: 314749 - DNA, 542 bp, Homo Sapiens
ccaaaaaaccaaaattgtaaataagttacctgggcatgaaaatacaatgccttggtgttcaggtggtgccaactgctcaattggtcatgagaaattggactttaaatccgcgccctgcacacgcaattcatttagacccgtgaatcttctccactttcacaaacaacctatccagatcattcctcaggtcatctagtaaacccttggctgattccagattgttctcgttggtttctattttgaccgagtatgcaaccaaactgtccacagcagtcctgagcattttcaagtccgcctccacttggctgactgaggctttcaggttgtctagagaagaaagtctgtccaggaagtcctgagaaggcagacgggcggcctgggcttggtcctgactgagcagcgtgtgcacctgctcctgcaccttctggagtgattccacggtgctggggagctcgcccacactcctcttcagctcctccacgtcaccgtagagcaccagctgggtctcgcccaggctcctcaccgtgctggccaggccatcc

SEQ ID NO: 314750 - DNA, 962 bp, Homo Sapiens
  misc_feature (147)..(156): n is a, c, g, or t
  misc_feature (174)..(174): n is a, c, g, or t
  misc_feature (260)..(324): n is a, c, g, or t
  misc_feature (897)..(906): n is a, c, g, or t
aattcacaagcccctagttcatggaccaggaatttcctttggaaaacagcttatggcccatgtttccctttcccttctggggcccgcgccgccaaaacgaaagggcttagaaagctttttgggggggccgaggcggccgaccaaggnnnnnnnnnnggtttgtggtttttggcntaggaacaaagctcaagtgtttattaagaattaaaaatactgtaaataagccatacagttcatttcacagtaaactaaacaaaacnnnnnnnnnnnnnnnnnnnnnnnnnnnnnnnnnnnnnnnnnnnnnnnnnnnnnnnnnnnnnnnnnggaagggcaagacagccattaaagaacaatacagctcagagggaagggagatacagcaaacaattacacaaacgcagtatgcacgctccttgccgacagggctgcccagacggcaaacctcttcatggacatcatgttaaaataaaaggacttggcctgcattccccagggagaccccctattccactgtagacagctctcctcacgaattttttgaaagaacccaaggactcccctttctggtagtcgaaacctgtgcattccttggtgacctccggagagagaacatgggccggcagtggggacagagggcaccgggactctgctgggtgtagtgcttcacattcagaaccgcctggatgctttgcatagttacctctgatatcacaagatgcgtcaggaagagaaacgacacgcacaccatgagggaggcagccctcaagcagcggattcctttcaaagaaagacccaggggcttctcccctcctcattcagagctgacagctatgagctttaaccggttcaaagtggaagacaagtgagagatatctcataaaaatttcggccagaacnnnnnnnnnngtaaaattaattttccttaaagacaactagaaagaaaagggtccccccaacccacc

SEQ ID NO: 314751 - DNA, 2274 bp, Homo Sapiens
  misc_feature (572)..(585): n is a, c, g, or t
gcaagaaaataattagaaatacatgtctatacatcatagtctgctcgatccctttttggtacctatcatcttgggtatcctctctatcctatcgtctctcaggtccacgaactctacatgaatttatattagctgtcctattcccgggcccctgtcctgtaccaggtctcgcaactttttagaacccaagatccgtgtgtagtcgacctggcctcctcggtactcggaaggtaaatggcggcaatgggaccaaggcacccggactctcggggtgatgtcctcaatctcgaccccctgagcttctgcctagtactccggatatcccagatgcttcaggaagagtacgacacgcaccccatgagggagccaccctcagcacggagtcctttcgaagaaagacccaggggcttctcccctcctcaatcagagctgacaagctatgagctttaaccgggtccaagtggaagaccagtgagagatatctcataacaatttcggcccggaccaaaaaaaagtaaaattaatgtttccttaaagaccactagaaagaaaagggtccccccaacccaccnnnnnnnnnnnnnnacttgaaatctgccagccagacaggatttctgaggttaatctgcttctgttaatcctcaatttaagcctttatcatttttctctgactagagacatccatgaaaagccacctgttattcacaggggctgcgcttcaggaaaccaaccaaatgcagaagcagagaacttaaatattgtaaataagttaactgggcatgaaaatacaatgccttggtgttcaggtggtgacaactgctctttaagaggggacaaaaaattggggggtaggggacacatgggaaaaaaccactcattttttggtcatgagaaattggactttaaatccgcgccctgcacacgcaattcatttagaccttttcgtgaatcttatccactttcacaaagcaacctatccagatcattcgtcaggtcatctagtaaacccttggctgattccagattgttctcgttggtttctattttgaccgagtatgcacccaagctgtccacagcagtcctgagcattttcaagtccgcctccacttggctgactgaggctttcaggttgtctagagaagaaagtctgtccaggaagtcctgagcaggcagacgggcggcctgggcttggtcctgactgaacagcgtgtgcacctgctcctgcaccttctggagtgattccacggtgctggggagctcgcccacactcctcttcagctcctccacgtcagcgtagagcaccagttgggtctcgcacaggctcctccccgtactggccagaccatcctggtctgcctctgaggacccgaggccttccagggcgcccctgcagggcggccaggcgctgctcgtgctcctggctcttggacaggagggactccaggctctcggtctggcgcgcagaagccacctgcatggagagcaccccatcctccacgtgctggagcctggagtccagtccctgactcttttgctggagtgcctcaaaggcttccgagtgtctgaagcctccgtcctccttcggcccgtgggaatcggacttcagctggcggagctcttcctccagtctccggatctcctccgggaggcgggagacggactcctcagacctgagaagcttctccgtgagggcctgcagggcgagccgctccgtgtcggccgcctccttgaaagcctgctgctcctgcttgaggctcaccagctcgcggacctcggtgtagatgtcagactccatagtctgaagggtacttctcagggcctccatgtcccactctctggacttggctgaggtctgtatctccttcacagcttcctttaaggctttcaaatcctgcttgttcccctcagattcttccagggaggcaacctttgccttcatgtcattgatctccttctggctcctcttctggacttctgtgaagatggcgatgttgtcgttgatggatttggtgagctccgtcagccgctcctccaccgtgttctccagggacgtgaagtcccgctcccgggcgtccttcaccacatggatcccatccgagaggtctttgagaatctcattctggagtttctgcagcacttcgctgatccggctgacctcactctccccttgcttcacagctttctctgtgaggtcttgtttatgttgggagcttctcaagatgactcaaaagcgacgcgtgggtcgacgatatcccgaggattcggggaccggga

SEQ ID NO: 314752 - DNA, 598 bp, Homo Sapiens
gaaacattttggttggcctagaagcaagggtcttattttcacaggcgcgatttgctattcaaaatgaaatccagtgaggagatgggagatggctgactatggggaggaagtcagccacttattcaaaacaaagaatgactcccaatggcatacaatgtattgtcaggaattgctgaagatggtgaaaaatgtcttactcattgcgatgtttgtaaaggcagcaatgaattcacgggatttttggttggttagtaaacaggcactgagagtaaccatgagacacatatatatgctatactagtttaactatgttctcttgcctcctgtcataacacttacccagctattttgaagcatgagctcttgggccgcagcttatcactgatggagtgactttagtagatatatgctcctctaacatgttcctgcacttgcaacccaataaacttcccactatatttagaacttgctggatttccacatcttaacatattttagtagaataaagtagctcatgtttaaaatatatttagaaaagttggcgactcatgctattctttacctacacttctcttcttgtgtgtgtacatagtgtctc

SEQ ID NO: 314753 - DNA, 494 bp, Homo Sapiens
ccactatcaaaagccaactcagctgaagcttatctattttctactacagtagttattttgaatgtatagagctaaagaggcctgtggctaacagacagggattccatgcacaagagcttttaagtatgtgcccatgcagtgcaaggccctgtgaacccaacaggccctgtccctcatcccatccaatggctatgcttcaaagggaaagaaagatgtggattgcctgtatgttgcttcaatatgagatctctgagcaagttgggttggtttagcagttctagcaagagccgattagtaagagaaacccctataaaggtattcagaagtttcaacctttccttctaattgatgaaaagataccctgttccacctccccaaccttaaagcaatttacataaaatcctgttctgtgtctaaatatctgattctgctatagaggagagcatgattaatatgttttttatagattttaaaactcaatctcatgtttctct

SEQ ID NO: 314754 - DNA, 681 bp, Homo Sapiens
agattctttgttgggaagactgaaaaaaataaagataggtataggataatttttaatatggtgaccttacagaaaatatttcccaaacatccttttcatcctgtgcttctggaggactgatttgtttgagggaatcattctatgcattatatcctaaaatattctatgactggtttctgtccatgtttgtggctttcatttttttaatgggatgactattagtcaaagtcagcttgtcatgactcatcataggctttctaacctactccctgaatccgggtcctcattgtgaaatgcatgccatacgaaatttgaacgtagctttggaaaaagggactatttgtggagtaatggcattaatcaacatagaacatcttatttgaatcaacagttaacttcagtagtcatgtgaataaaattcttattgtctaaattgagacagcctcagatatttgcagatatttactttttgtctgatatcagtacatatttggacaaagtcatctaaataatagtttgtcaccaaataactacaaaatctcattttaaatgagtaaggagaacgtgtacagaagcaaattttcttcaaaatagttgtgggaagagcttatatgtgaaagcttatgactggttttgagggagaacttactggagaaaatggactctatgttaagtatggtt

SEQ ID NO: 314755 - DNA, 560 bp, Homo Sapiens
ggaaggttttgcctgttctagaagcaactgttgtacttgcacaatcgtgatttgcgataaagactgcagtccatttaggagaggtgggatacattactgtgccggggaaattttccactttttgcaaacatacatttactgccaatgtcattctggattaatgactggaacagttaagttattgcgaaataacttcatactcattgcagatgtttgtagacgcactgagaagactcactgaatcctgtgatgagtgtccaaagagacgcgctgaattaactgggtcaacattgataggctattcatacgtgagctacatgagccgccaagtgatgatttgtaagagtagactttagtacacatattctgcacatacatgatagtgtacattgaacctcataatagtccaactatatttagaacaaaggtgaactttacgtactgaacttgtccaatgacgaaccaagagtttcacctctcgagacttagttataataggccgaccaatcatgctattccgtgacccacccctcaggttgctgctgtttgaacatatagtg

SEQ ID NO: 314756 - DNA, 2011 bp, Homo Sapiens
  misc_feature (29)..(29): n is a, c, g, or t
  misc_feature (63)..(71): n is a, c, g, or t
  misc_feature (228)..(293): n is a, c, g, or t
  misc_feature (326)..(326): n is a, c, g, or t
  misc_feature (346)..(418): n is a, c, g, or t
  misc_feature (465)..(503): n is a, c, g, or t
  misc_feature (512)..(529): n is a, c, g, or t
gctcgggggaagacaccccccattgtgancccggggattaaccgagagcggagggtattttannnnnnnnntcacccaagttttctgaaagggggtgcccctaaataccggctcccctttgaaaggaaccgttttgggtatttggggctttggtgtaaagccaggttcccttgggaaaaaggagttggtagtttttgatccgggcaaacaaaaccaccccctgtaagnnnnnnnnnnnnnnnnnnnnnnnnnnnnnnnnnnnnnnnnnnnnnnnnnnnnnnnnnnnnnnnnnngatcacaaaaaaaagcccgctcattaggcgggntaattccccgggtactgcannnnnnnnnnnnnnnnnnnnnnnnnnnnnnnnnnnnnnnnnnnnnnnnnnnnnnnnnnnnnnnnnnnnnnnnnaccactttgtacaagaaagctgggtcaggaaacagctatgaccatgnnnnnnnnnnnnnnnnnnnnnnnnnnnnnnnnnnnnnnngcctcgagnnnnnnnnnnnnnnnnnnccaggcaccaagatttttatttacccaccttcctgctttcttttaacattataggccaaattattctctttttgacccagggttgtgaaaggaaccatctggttataaagtggtggcagatttcacgaaatctgcctgcattcatgtttttctggcccctctcaacccctagctgtcacttctctgttctttctcagttgccccttaacagtctattctaacccctgtaaaacagggactaaaagtactaacctcattgtaatgaggtttaagagaaggcccagcactaagccaggctctcaggaaaattcaaacaacagttcctctttgcccttcaatatagccccttctcatctgtcatgggctgaagaaccactggacctgtaaaccaagcacacaggtataagtccacagaccaggtgaaggcctagatggcaaaacacatgggctttgtgactccactactgacttccaggctaaggaaggactgacttagtgagctgttccaagaccactgagctcatggttccctgtggctgggacctccatcatgaccggggcttgaagagggtactctgttcccgctgccacatttggaacagtatgacggctgcagcagaggccaaaaactaagtgatcagccccagagagtcgatgggggacactgacaaaccaatcacaaagttggtgccattagctcttagggaggagaggtggggcctgggcaaggacagcagctggagggtgaaacgcagacctggctctcagtagcggtagtgatccggcttgaaggggccatcacaggacatgcccaggtactgggcttgcttctcagttagcttggtcaacttcacattcagcttgcccaggtgggcttcagccactgcctcatccagcttcttgggcaggaaatgaaccccaacggggtacttgtctggatgggtccacagctcgatctgcgccatcacctggttggtgaaggagttactcatcacgaagctggggtggcccatggcacaacccaggttgaccagccgaccctcggccagcaggatgatgcggcgcccattcttcaaccgataccggtccacctgcggcttgatgttcaccttctccacggcgttctcgttgagccacttgacatcgatctccacgtcaaagtgtccaatgttacacacaatggcatcatccttcatctgctcaaagtgccggccaaggatgatgtcaatacagcctgtggtggtgacaaagatgttgccctcctgacaggcctcatccatggtggtcacctcatagccctccatggcagcctgcagtgcgttgatggggtcaatctcggtgatgatgacgcgggctccgaaaccccgcagggcctgggcacagcccttgcccacatcaccatagcctgctaccaccgctacctcctcgtgccgaattcgccacccagcctcgctaccttaagaccgttagtagttactgccg

SEQ ID NO: 314757 - DNA, 1429 bp, Homo Sapiens
taggggtgaaacgccagacctgggttttcagtaggcggtagtgatccgggcttgaaggggcccatcccaggaccatgcccagggtactgggcttggttcctcagttagcttggtcaccttcacattccgcttgcccaggtgggcttcagccaactgcctcatcccagcttcttgggcaggaaatgaacccccaacgggggtacttgtctggatgggtccacagctcgatctgcgccatcacctggttggtgaaggagttactcatcacgaagctggggtggcccatggcacaacccaggttgaccagccgaccctcggccagcaggatgatgcggcgcccattcttcaaccgataccggtccacctgcggcttgatgttcaccttctccacggcgttctcgttgagccacttgacatcgatctccacgtcaaagtgtccaatgttacacacaatggcatcatccttcatctgctcaaagtgccggccaaggatgatgtcaatacagcctgtggtggtgacaaagatgttgccctcctgacaggcctcatccatggtggtcacctcatagccctccatggcagcctgcagtgcgttgatggggtcaatctcggtgatgatgacgcgggctccgaaaccccgcagggcctgggcacagcccttgcccacatcaccatagcctgctaccaccgctaccttgccggcaatcatcacatctgtggcccgcttgatgccatctatgagggactcccggcagccatagaggttgtcaaacttgctcttggtgacggagtcattgacattgatggcaggcaccttgaggatcccattggccatcatcttgtagaggttgtggaccccagtcgtggtctcctcagagatgcctcggatgcctggcagaagctgcgggtacttggtgtggatgaggttggtgaggtcgcccccgtcgtccagaatcatgttgaggggcccgtccttgaagtacagggtctgctcaatgcaccacaggtactcctcgtccgtttcgcccttccaggcatacaccggaatgccagccttggcaatggcagccgccgcatggtcctgggtggagaagatgttgcagctggaccactgcacctcagcacccagggtgacgagggtctcaatgaggacggccgtctccacggtcatgtgcaggcagccagcgatgcgggcgcccttcagtggcttggaggccgagtaccgctcccgcatacgcatcaggcccggcatctcgttctcagcaatgtccagggccttgcgtccccaggcagccaggccgatgtcggcgactttgtagggcagtttgtcagacatgctggcggcactcgtgatggaaacgggcgaagggggctgggcctcagtctgggaacaggaactgggcctcgtgccgaattcgccacccaggcc

SEQ ID NO: 314758 - DNA, 1514 bp, Homo Sapiens
ttgcgcacgtggttctgtgcgccgctatttccttttctttctgctccgtttcgctgctcccggttgtgtttcccctgcttgccgtcgcgcgctttgtccccggtgtgtgggccgccccatcaagttgtctcgtctggtggagccgggcctgcagcgcactgggttaacccgcctgctcccttacgtattgaccgctgaggcatccactgacatgcccagtactggcttgcttctcagttgcctggtcaacctcactccgcccttcccaggtggcttcaccactgcctcatccaccttcttggcaggaaatgaaccccacggggtacttgtctggatggtccacagctcaatttgcgccatcacctggttggtgaaggagttactcatcacgaagctggggtggcccatggcacaacccaggttgaccagccgaccctcggccagcaggatgatgcggcgcccattcttcaaccgataccggtccacctgcggcttgatgttcaccttctccacggcgttctcgttgagccacttgacatcgatctccacgtcaaagtgtccaatgttacacacatggcatcatccttcatctgctcaaagtgccggccaaggatgatgtcaatacagcctgtggtggtgacaaagatgttgccctcctgacaggcctcatccatggtggtcacctcatagccctccatggcagcctgcagtgcgttgatggggtcaatctcggtgatgatgacgcgggctccgaaaccccgcagggcctgggcacagcccttgcccacatcaccatagcctgctaccaccgctaccttgccggcaatcatccccatctgtggcccgcttgatgccatctatgagggactccgggcagccatagaggttgtcatacttgcttttggtgacggagtcattgacattgatggcaggcaccttgaggatcccattggccatcatcttgtagaggttgtggaccccagtcgtggtctcctcagagatgcctcggatgcctggcagaagctgcgggtacttggtgtggatgaggttggtgaggtcgcccccgtcgtccagaatcatgttgaggggcccgtccttgaagtacagggtctgctcaatgcaccacaggtactcctcgtccgtttcgcccttccaggcatacaccggaatgccagccttggcaacggcagccgccgcatggtcctgggtggagaagatgttgcagctggaccactgcacctcagcacccagggtgacgagggtctcaatgaggacggccgtctccacggtcatgtgcaggcagccagcgatgcgggcgcccttcagtggcttggaggccgagtaccgctcccgcatacgcatcaggcccggcatctcgttctcagcaatgtccagggccttgcgtccccaggcagccaggccgatgtcggcgactttgtagggcagtttgtcagacatgctggcggcactcgtgatggcctcgtgccgaattcgccacccaggcctcgctcctt

SEQ ID NO: 314759 - DNA, 978 bp, Homo Sapiens
acgcatacaaaaaaactttatttacagttgaaaacttaaagacaatcttggattctgaatctctgacacttccatggtctcttgatcaaatggggcagcagcaggcagggaagcaaagacgggggccagtccagattatcttactcaagaacaccaccaagaagaagggaaggcatatttgtgatacagtatattaaatgccacagtggagagatgaaccaagtgctgtgggagcacccactgtctgggcttagatcaatggaacagcagctggcagggcatcgaagactttggccattcacacatgatcttatccagagctatcgccaagcagatgggaaggcctgattcagtctttgtctggactacatctccccacactgcgagatcaccacaggtagcttgggcttattgttggggcctgtgggaacattctcaatctttctcatcactagaagtccatcgatgatttttccaaacaccacatgcttcccatccagccaatcgcacttagagcaggtgataaagaactgacagccatttgtacttggaccactgttcgccatggaaagcaggcctggagctgagtgtctaagtttaaaattttcatctgcaaatggcccccggtaaatactggcgactccagtaccatctccattaacaaaatctccaccctgaatcatgaaatcctttatgaccctgtggaaggtgcttcctttgtatcctattggaaccccatctttcctgaattctccggtgcagaactgcctaaagttctcggccgtcttaggcacaacgtctgcaaagagctcgatcttcatgcggccaacttcctgaccgccaatactgacatcaaagaacaccacggggttaacaggacttgaatttgccaccgccatggctccgacccggaagcagaagtcgggagcgtgggattccggcgaacctaaagcccggtccgcggatttcgtccggccc

SEQ ID NO: 314760 - DNA, 758 bp, Homo Sapiens
  misc_feature (615)..(616): n is a, c, g, or t
gtagaagcccagaacagtgacgggcacatgaccagcgctcaataaacatgacctctcaggaccactactcctatgaagggcagcgtaaatggtgagcataacattctaacaaaaagactgtgttgttctaaaatacacatgtatttataaagtttagcaaatacacaactctgatgactatataaataatggtattatagatggtcagcccatctctctccctatcgaaagcaccacaagccacaacacacattaactcacactgaaaccctggactacttcattttctctgcaggctgcttcctgtctctgtagtccagctactgggatgagaagcatcagaactccccatgagcacctgatccgatctaacatccacaggaagagaaagtttcaatgtaaaatctcctgatgtcaagttgttaaagtacaggaatgaatgtttacaggtctcctctgctctaaggactggcactaggtacttgcatgagttgggtactgggttagggccttgcatggatctggtctccctcatagacggtgagctccctgagggctggcaccaggcctggcttgcttccccccaacacagagcctgacacacccggtgcccanngcacccagtttagagaagggctgaatgtgaagatcaaaagtgaccaataaacatgtggaggacaaaatgagaatgctggtaggacactgagactctggaaaagactgtgctaggatagacacttgttctggcgtgagtggag

SEQ ID NO: 314761 - DNA, 1688 bp, Homo Sapiens
gtaaactcgagggattattatttcttgattggagaaagagaagacagcatttggtgacaaagtcatacaggtggatgtcagggagagtgatcaatcaaaggatgggaactggaactgagaacccagcaggtacttctaggaagactcagcagtcagtggtgacggtggctgagagctcctggatgcgccaggcgctgcaggccttgcacaagatgtgcccatccagcgggtagcagccctgacactcgccctcagaggagagcagcagcccacactcctcgcacttgtaacagccaatgtgaaaacttcgatccagagcaacaattctcacagtctcctcctgacctggctcaggcattatggccccaccgcacactgagcatcttggggcaaacttcctgtgaaagtcctcaatgcagtggatctggctcgtagcatccactgtgaaggggatgccgtcgaggccgcggtgacacaccacgcaggtgaagcagccagggtggtaggccttccccatagcccgcagatccggtccaggatgggctgggagcacgtggcacatttctccagggtggccacgtagcagccctcgcaatatgccctcctctccacggcgtagaaatgctggccgcgaagctgggcccggcatgtagaacacacaaagcagcccacgtgaaagacgcgatcaagggccacaaccccagccccatccccaaccacatcttctccgcagccaccacactggccaaagtactccccgctgggcgggtggttcatgtcgtgaaccagcttcttcgtcagcctatccagctcatcctctggaggctggctcaggggcacctggggcccgtgctcgcctcctcttcctcttcctgcagggccagagaccccagcagcttcctctttggcccctggccctggctctctctggctcctatagccaggcccccagacttcacctcggcctgggagaggaaagtgggggcccggaaggggcccagaggcctgagaggctccccgcctgggtgggccgcagcccctcactggctgtgccaccttcacttgcacggggaaggctgggccagccggggtgctggcggtagtgtaagaggctggagtggggcccccatagggagacgctgggagcggcgaggctggatttggcttcagggagcccgtgcggtaggcaggaggtggcgggggctcatatgcctgtcggtctggtcgccgtgacgcatgaccccgacccccattcagctcggccagcgtgctgctcagcaagtctatctcggcgtccaggcttccagggcgaaggccccccctgtctgcagggagcccctgcgtgtgctggagtactccatgggaccccacccacgccggcccccgatcctccggtccccctggggcctggtaacactgctcagatggaagggggcaaaaattgaccctggggtggggctggagtgctgctccgtgggccggtggtggccccggggtgccgcgggggatcgccctcccctgaggggctctggcgggctccggctgcttcgggggcagccaggtgggccccgacatggcctggaaagggggactccagacagcggtcttgaagccccgagcctctggccttcaccccctcttccgtcccgcacctcgtttgggactccagaaaagaaaactttttctcc

SEQ ID NO: 314762 - DNA, 421 bp, Homo Sapiens
  misc_feature (124)..(141): n is a, c, g, or t
  misc_feature (173)..(249): n is a, c, g, or t
gactgatgtgccatggtgcactcatggctcactgtaacttcgaaatcctgtgctcaagctatcttcccaccttggccacccgagaagctgggactacaggcacatgctaccacatacgaccaannnnnnnnnnnnnnnnnnaaaggcagagtctttctatgttgtccaggttnnnnnnnnnnnnnnnnnnnnnnnnnnnnnnnnnnnnnnnnnnnnnnnnnnnnnnnnnnnnnnnnnnnnnnnnnnnnnttcactgacaattctctgaattgaaatcatttgttcaacatatactgaatccctatggtctcctaggcactgagtgaatgagtgttcacgctgatgaagaactcacactctaatggaacgacagataaactcaaacaatttgcaaagtgacacaattagatttgccttttgg

SEQ ID NO: 314763 - DNA, 1050 bp, Homo Sapiens
  misc_feature (11)..(11): n is a, c, g, or t
  misc_feature (21)..(21): n is a, c, g, or t
  misc_feature (24)..(24): n is a, c, g, or t
  misc_feature (26)..(26): n is a, c, g, or t
  misc_feature (36)..(36): n is a, c, g, or t
  misc_feature (40)..(40): n is a, c, g, or t
  misc_feature (42)..(42): n is a, c, g, or t
  misc_feature (45)..(45): n is a, c, g, or t
  misc_feature (47)..(47): n is a, c, g, or t
  misc_feature (55)..(56): n is a, c, g, or t
  misc_feature (63)..(63): n is a, c, g, or t
  misc_feature (71)..(71): n is a, c, g, or t
  misc_feature (76)..(76): n is a, c, g, or t
  misc_feature (78)..(79): n is a, c, g, or t
  misc_feature (932)..(948): n is a, c, g, or t
cgtctatcttnataactgagnaancnatgctatacnttancngtnanatcccganntcacccnttcctganatttntnntgcaaacattccactaccactggggactgtcaccatcctctgcattgacttgggcactgacatggttcctgccatctccctggcttatgagcaggctgagagtgacatcatgaagagacagcccagaaatcccaaaacagacaaacttgtgaatgagcggctgatcagcatggcctatgggcagattggaatgatccaggccctgggaggcttctttacttactttgtgattctggctgagaacggcttcctcccaattcacctgttgggcctccgagtggactgggatgaccgctggatcaacgatgtggaagacagctacgggcagcagtggacctatgagcagaggaaaatcgtggagttcacctgccacacagccttcttcgtcagtatcgtggtggtgcagtgggccgacttggtcatctgtaagaccaggaggaattcggtcttccagcaggggatgaagaacaagatcttgatatttggcctctttgaagagacagccctggctgctttcctttcctactgccctggaatgggtgttgctcttaggatgtatcccctcaaacctacctggtggttctgtgccttcccctactctcttctcatcttcgtatatgacgaagtcagaaaactcatcatcaggcgacgccctggcggctgggtggagaaggaaacctactattagccccccgtcctgcacgccgtggagcatcaggccacacactctgcatccgacacccaccccctctttgtgtacttcagtcttggagtttggaactctaccctggtaggaaagcaccgcagcatgtggggaagcaagacgtcctggaatgaagcatgtagctctatnnnnnnnnnnnnnnnnnctgcctgaaaaccatccatctgtggaaatgacagcggggaaggtttttatgtgcctttttgtttttgtaaaaaaggaacacccggaaagactgaaagttaca

SEQ ID NO: 314764 - DNA, 1034 bp, Homo Sapiens
  misc_feature (12)..(12): n is a, c, g, or t
  misc_feature (72)..(72): n is a, c, g, or t
  misc_feature (176)..(176): n is a, c, g, or t
agaaggtccccnaaaaagagggggggtggggttttcgggatgccagaagtgtgtgggccctgatgcttccancgggcgtgcaaggaacgggggggctaataagtaggtttcctttcttccaccccaagccgccaggggcgtcgcctggatgatgagttttctgacttcgtcatatncgaagatgagaagagagtaggggaaaggcacagaacccacccaggtaggtttgaggggatacatcctaagagcaacacccattccagggcagtaggaaaggaaagcagccagggctgtctcttcaaagaggccaaatatcaagatcttgttcttcatcccctgctggaagaccgaattcctcctggtcttacagatgaccaagtcggcccactgcaccaccacgatactgacgaagaaggctgtgtggcaggtgaactccacgattttcctctgctcataggtccactgctgcccgtagctgtcttccacatcgttgatccagcggtcatcccagtccactcggaggcccaacaggtgaattgggaggaagccgttctcagccagaatcacaaagtaagtaaagaagcctcccagggcctggatcattccaatctgcccataggccatgctgatcagccgctcattcacaagtttgtctgttttgggatttctgggctgtctcttcatgatgtcactctcagcctgctcataagccagggagatggcaggaaccatgtcagtgcccaagtcaatgcagaggatggtgacagtccccagtggtagtggaatgtttgcaataataaatatcaggaacggggtgatctcgggaatgttactggttaaggtataagcaatggatttcttcaagttatcaaagatcagacgaccttcctctactccagtcacaattgaggcaaagttgtcatccagaagaatcatgtcagcagcttgcttggacacatctgagccagcaatccccatagcaaccccaatgtctctttcttcaaagctggagagtcattcacacgccacccagg

SEQ ID NO: 314765 - DNA, 2514 bp, Homo Sapiens
gggggggttaaaaggaaggttttccttttttccaccccaggccgccaaggggggttcgcctgaaggatgagttttttctgactttggtccttttccgaaggatgagaaggagaagtagggggaaggccccagaacccaccagggtagggttgagggggatacatcctaaggaagcaacacccatttccagggccagtaggaaaggaaagcaggccagggctgtctcttcaaaggaggccaaatatccaagatcttgttcttcatcccctgctggaagacggaattccttcctggtcttacagatgaccaagtcggcccactgcaccacccacgatactgacgaagaaggctgtgtggcaggtgaactccacgattttcctctgctcataggtccactgctgcccgtagctgtcttccacatcgttgatccagcggtcatcccagtccactcggaggcccaacaggtgaattgggaggaagccgttctcagccagaatcacaaagtaagtaaagaagcctcccagggcctggatcattccaatctgcccataggccatgctgatcagccgctcattcacaagtttgtctgttttgggatttctgggctgtctcttcatgatgtcactctcagcctgctcataagccagggagatggcaggaaccatgtcagtgcccaagtcaatgcagaggatggtgacagtccccagtggtagtggaatgtttgcaataataaatatcaggaacggggtgatctcgggaatgttactggttaaggtataagcaatggatttcttcaagttatcaaagatcagacgaccttcctctactccagtcacaattgaggcaaagttgtcatccagaagaatcatgtcagcagcttgcttggacacatctgagccagcaatccccatagcaaccccaatgtctgctttcttcaaagctggagagtcattcacaccgtcaccagtcacagccacgatagcaccctgtctttggcagccttccacaatgatgagcttctgctgaggggaggtcctggcaaacactatctcagtgtggtacttcaaaatgtcatccagctgctcggaggtcatgtcctttagatcactgccgtgtactacgcaggccttggcatccctggggttcacctggctgactgggatgttgaggcgggcagcaatgtcttccacggtctcattgccttctgagatgatgcccacacctttggcaatagctttagctgtgattggatggtctcctgtgaccatgatgaccttaattccagcacttcgacatttgcccacggcatcaggaacggccgcccgtggagggtcaatcatggagatgagcccaacaaagcacagattatcgatagggaaattcacatcgtcagtgtcaaactggaacccttcaggaaactgttcatctggcagaaagaggtggcagaaacctaggactcgttctccggaggccccccagctccaaataggcgttctgaaaggcgtctttcagctcctcatccaggggctgctccttgccgtggaggaggatagagctgcaacggtctaggatcctttctggggcgcccttcatcaccaacaggtgttggggctccgatgtgttggggttcttatgaatagacaactggtacttgttggtggagttgaagggtatctcgacgattttggcgtatctttctctcatctccttcacggaaccacagcacagctctatgcactttaagagtgctgactcagaggcatctcctgcaactgcccgcttaagaataggtaggttttcctggttagcctgaaacactgccctgttacaaagacctgcaattctggacagagcaagccaggtagctgaagtcttgtcaaaagagacaccactctgattctctgtcgtatcagcttcatggatttgattgtcaaaccacatgtgggccactgtcatccggttctgagtcagagttccagttttatcagagcagatggtggatgtggaccccaaggtctccacagcttgctaagttcttcactaagcagtttttccttgccatgcgtttggcagtaagtgtcagacagaccgtgacagtggccagcaaaccttccggcacattggctacgatgataccgatgaggaagatgacagcctcaagccaggtgtactcaaggatgagagaaaggatgaagaaagacacacccaggaacacagccacacccgtgatgatgtggataaaatgttcaatttctgcagcaatgggggtctggcctccttccagcccagaagcaagtgtggcaattcttcccatcacagtgcgatccccagtgtagacaacaataccacgtgcggtgccttcaacacaattggttgaaaagaaggcaatgttcctcgtctccagggggttttcatttgtgaaatctggagacctagtctggggttctgattcaccagtgagcgaggagcggacgcgtgggtcgacgatatcccggaattccggccggttaccac

SEQ ID NO: 314766 - DNA, 897 bp, Homo Sapiens
  misc_feature (63)..(63): n is a, c, g, or t
  misc_feature (68)..(68): n is a, c, g, or t
  misc_feature (70)..(70): n is a, c, g, or t
  misc_feature (72)..(72): n is a, c, g, or t
  misc_feature (74)..(81): n is a, c, g, or t
  misc_feature (84)..(85): n is a, c, g, or t
agcgcgccaaaacgaaatgttctagaaaagcttcttgagggcccgaggcggcccgacaagggnttttntntntnnnnnnnncannttttccattataatagccatctttatttgtaaaaatccagatataaaatgtattctttcagtctttccgggtgttccttttttacaaaaacaaaaaggcacataaaaaccttccccgctgtcatttccacagatggatggttttcaggcagcccttcccccctccccccatagagctacatgcttcattccaggacgtcttgcttccccacatgctgcggtgctttcctaccagggtagagttccaaactccaagactgaagtacacaaagagggggtgggtgtcggatgcagagtgtgtggcctgatgctccacggcgtgcaggacggggggctaatagtaggtttccttctccacccagccgccagggcgtcgcctgatgatgagttttctgacttcgtcatatacgaagatgagaagagagtaggggaaggcacagaaccaccaggtaggtttgaggggatacatcctaagagcaacacccattccagggcagtaggaaaggaaagcagccagggctgtctcttcaaagaggccaaatatcaagatcttgttcttcatcccctgctggaagaccgaattcctcctggtcttacagatgaccaagtcggcccactgcaccaccacgatactgacgaagaaggctgtgtggcaggtgaactccacgattttcctctgctcataggtccactgctgcccgtagctgtcttccacatcgttgatccagcggtcatcccagtccactcggaggcccaacaggtgaattgggaggaagccgttctcagcctcgtgccgaattcgccacccaggcc

SEQ ID NO: 314767 - DNA, 885 bp, Homo Sapiens
ggaagacaatgtcgcccaaacccatctttcgatttttctattcttgatatgaacctcagcaatgaataccagggcattaagttacacaattaatcatgcccttatctgaaatgctgaaacctgcacagtgctggttctctatgctatgaagttaactcagaaagagaaaaaacattttcttctagtatgctgagaatgtacaaatgcatcttaaatctattaaaatgttactaggcagtgttcacatatttatatatataagggaaagagaatggtttttagggccatatatttctacaactcaacatgattacacgattgtgttagcctgtggcatcaactagaatcaccactctggtgtctttcttatcaaagcaaaagttttcctgcttttctcttataagtaataaaacagaaacactcttcacattagcaaccctcccatttcaagtaaatgtctctgttttgttcggttttctccttttttttccctgttaatggttaagcatttcaatacgcaagggtgttggtgaaattcttacaaataatctgaatgtcttcactgcataacagaacctttggaaatatcttctatgtagtcaccatagaagacagtcaactctcagttactcaagaagtggtacctggtatgaaggatttggccaagaaattctctccttctaccagtctttttggtcatgccactgcttattcagaggtggacagacaacatgaaataaaattatgtatttattgtgttacagatcagccacaagtcagtggcagaaaaggtccaaagcttctgatgacaaggatacttggggatcatctgtgaatgttatatctcaatggaaagctgactgtcagtcacataaaggaagtaac

SEQ ID NO: 314768 - DNA, 2119 bp, Homo Sapiens
  misc_feature (145)..(206): n is a, c, g, or t
  misc_feature (236)..(281): n is a, c, g, or t
  misc_feature (513)..(521): n is a, c, g, or t
  misc_feature (613)..(740): n is a, c, g, or t
cgtgaagggtttgtgggcacaaaatattatttttgggggcgaggaggccaatacacggggggaggttttccgcccccttttatgtttaaaaaagggggggccgagataagaggggtttgtgtttgggcgcactttgtgcaaaacnnnnnnnnnnnnnnnnnnnnnnnnnnnnnnnnnnnnnnnnnnnnnnnnnnnnnnnnnnnnnnagaaaaagcggccaattacgggccattgtnnnnnnnnnnnnnnnnnnnnnnnnnnnnnnnnnnnnnnnnnnnnnncccccccgaggatcgatatgtttgcgaacagggtgagcgataatgtttcaaaaggggcgcaaaaggatcggcatggaagaagaccggggggacaaaaagggacgccattgtgaattttgtaaaacaccgggaggggccccccggggtttttttcgagggaagggccaaaggtgtctttggcggggtttttttgggaggggaaagtaacccccttttcctttgcgggaggggnnnnnnnnnaaaaaagagcctggtaagggtttgttaagggcgaaggggccggcgccaaaggatttttatgtttgtttttcgtcctgaaggccttagaaaannnnnnnnnnnnnnnnnnnnnnnnnnnnnnnnnnnnnnnnnnnnnnnnnnnnnnnnnnnnnnnnnnnnnnnnnnnnnnnnnnnnnnnnnnnnnnnnnnnnnnnnnnnnnnnnnnnnnnnnnnnnnnnngggtactagtaatactattttactgaaaatctggagttgcacaaatagttctttagaacataaaactaaatggatttatacataacagttacattcagcatttaagagaggcagtacaaaaatgtgttctgcttttatctgatataaattgcatgtaataccatgatttaaacaatatcagttatattaactaatgccatgagatatatcttactcagaacgtctgatgtttcccataatagacagaaaaaatgcagttgtatgagcaactgagtttcttttcatcttcaaattcatttgtgatggtgggaagatctaaggacaatccttccattgaagaagtaggaaaaacagttacagcactgttctgaactcatcaaaaatgaaattaggcacatgtgcttcagcaaccctcctgggtagctttgtgtaccgaacataatcctccaggaacagaagggcacccacaacatctgcaggaatttcaggtatcttctggcttgtacactgctccaccgtggagcagataaactggccaatcagtgccaggaactgctcggtgtaccgggaatggaactgcttcagcagagtgagcagtcccaggacaagtggtggccaatcaaccgggtcggtcggttttcggcagaccattcccagatttttgttgtattgaagttttggcaactgagcgatcaaaaatagaaagtttacaattggaaaatagggtaagcgctttgttgttatgtatatcttattcagtgggttgtgaatgccagctgcctccagataggctgtgatttcatataaaagtgtgttatcttctttggggtaaggaagtgaagggtcctgatagtgggcttcaatgtctgctaggagagccttattgagattctccagagcagctgccagatgtttagaatcaaaccgacaagaataatttaattcattggcaatctgttgtctcagaatctgcatctgcccaaccttcattatagcctcgagatacgcagtccaaatcttctgtgttttggcaatggcggaaaaataaattttatttgaatttgcgacaatactttttaggggactgacagcattcatgagggtttttaaagtgtcctgaacagttctgtctctcaggataattttctgaaacatactgaggaaattctgtaactcttttacaatcataaagcacagaagcctgtctaagccatttagaccaaaggttcccaaggtggtaagaatttctgagaagaggcggctgctggtcacttcctgatgagttttcatatcataccaagtgttcagctggtctatgtgacatgtcatttttgggtctgtgatccgcaggatttctctgcagagtcgaccaataaacg

SEQ ID NO: 314769 - DNA, 628 bp, Homo Sapiens
attttgggtcatgcattctatcaacttgtagtagtctttacactcttatttgctggtaagaattcagtgtctaataaagcttcagttaattgtttcttttccaagctaatcatccaagatgttataatgttacaaattttcaagagcctaaattctactcctgacttcccatttatctttaatttcttcttaatcagtgagtgcttagtaaatttgggaggacaataagctagatagtagaataaacaggagaataaacagtcctgatgtcttaccctggctctccactaatttagatatgtgatcctgagattatcaccatagttttgggagcttctgtttccttgcctataaaacaagagagttgtactagataatcccaggtttctctagctccttccatgctgccatttcagatcaaataaaaggtctagctaagttgttatttgtatacctgcttgaaatctaatttggtatgataattacaaaatagtcatttttcattctttcaggagagtttttgacattgatagtggaagaaatgctcctttgcatgcttcttctttcagaacattatactattggtttttatacccttttgctgatgcaacttttcaacgttgcccgg

SEQ ID NO: 314770 - DNA, 360 bp, Homo Sapiens
  misc_feature (256)..(264): n is a, c, g, or t
cctctgaaatcttgaaatgttcacagcttagaaactacagcctgctggggaagagaggggagtgggcccccatggggaaatgtcgcagctcgctggaatagcctcaccccagagggtaacttgttcttggggaatccagcatccgggtctttcaaacaaaagccccttgaagcttgcaatagaatcacaggactggatgggtttcccttcgccccaacccccgagtcttacgttttagaacagagacattagaatnnnnnnnnntaatagtaacgattaaaaatcatcaaacaatgaacaccacgaagtctgtccatgctctccacaagcacactggggctctgggcattcccacgaagc

SEQ ID NO: 314771 - DNA, 738 bp, Homo Sapiens
gtgagtttagtcgctcaccagctatctgtcctgcctgcaacagtaccctttctggaaagctagatattgtccgcacagaactcagtccatcagaggaatataaagctatggtattggcaggactgcgaccagagattgtgttggacattagctcccgagcgctggccttctggacatatcagtatttcctttgaaagacctccctgtggatgactttaagcatgtccttgaatgtattgttatatcttacatatacacttatacttcttaaggatgtttgtcatctgtcaagtaactttttattatatttttctggggtctttcacagagcagagatttttaagtttaatgaagtcctgcttatcaattttctctttcacggattatacctttggtgtattttgtcactgccaaatccaagatcacctggattttaccctatgttatcttctgggagtttcatagttttgcattttatgttttaagtctgtgaaccattttgagtttatttttgtggtccagaggctgttcttagttacttgtctcttgggcctttctgacatgactgcttgctttctcgcagcaagggagttgtggctcctagtaagacagaccttatggcctaggtatatacctatgaagggcaaccttgcccattttctgggattttagtcccaggcctgcccacgccaggggataggagtacacgggtgtagtcccagagacattttggggtgg

SEQ ID NO: 314772 - DNA, 1326 bp, Homo Sapiens
ctgtctctccactttctttccctctccgttttggtgggctggttgaagatgaaatccactgaggagggaagtccagcaccctgtgtgccagtccagaactggcccatctgtagaccccctgaaaatcatatgggcttggatttggatattctcaacagaaagggttaaaggctgatggtacctaaagcctggtacttgaattttgatcaagataagctgccttaagttctcttcattacacaaatgatcctagataattgatagatcctgtggttcaactggatttctagatagaagctggattcatgtgatgccagaggagtaaaatttcaagagactgaaaccagatctgagtttcgctgttccagtctggacctctttggtgctgtaaatcctggatatactgtagatgagtactgcgtttttcttttatggactctcttcagcttctggagacctcactatcctattatgtctttgtgtgaagacatgctgctttgtaattatcgaaagtgtcgcatcaaactctctggctatgcatgggtcactgcctgctctcacatcttctgtgatcagcatggcagtggtgagtttagtcgctcaccagctatctgtcctgcctgcaacagtaccctttctggaaagctagatattgtccgcacagaactcagtccatcagaggaatataaagctatggtattggcaggactgcgaccagagatcgtgttggacattagctcccgagcgctggccttctggacatatcaggtacatcaggaacgtctctatcaagaatacaatttcagcaaggctgagggccatctgaaacagatggagaagatatatactcagcaaatacaaagcaaggatgtagaattgacctctatgaaaggggaggttacctccatgaagaaagtactagaagaatacaagaaaaagttcagtgacatctctgagaaacttatggagcgcaatcgtcagtatcaaaagctccaaggcctctatgatagccttaggctacgaaacatcactattgctaaccatgaaggcacccttgaaccatccatgattgcacagtctggtgttcttggcttcccattaggtaacaactccaagtttcctttggataatacacctgttcgaaatcggggcgatggagatggagattttcagttcagaccattttttgcgggttctcccacagcacctgaacccagcaacagcttttttagttttgtctctccaagtcgtgaattagagcagcagcaagtttctagcagggccttcaaagtaaaaagaatttgagccacgcatagtgtcacgcac

SEQ ID NO: 314773 - DNA, 680 bp, Homo Sapiens
  misc_feature (637)..(637): n is a, c, g, or t
agcatcattaaaacagcctcaataaacaggccgtatttagcccaaatcttgttcaggagaacagcatgggctccgtttgaattttgttggattctggacgtcctcctcctattatataggtctgagagttgtctttgttaataaaatttagctttgtttccccaccagtgataatgacatgaagcactaggaaatgatgcaataaccgcagtgcatgaggccttcctcctggggaaggtgtgagacaggaggggagcaggactcccccatactcagtccagtggaagcgcagaatgcctgctcgtgttggtaaaaataagacaggaatgtaagaaaaaaagtcttcacgctcaacgtgactatctttggaattcatttcattaaggttttcacaaaatacaaagctcaaacgtaatcatctatgtccaccacaaaacagaatcaaataagtggttagcacaacaaacatagtgatcttttccattttaaaaaatataaataacaatgttcaaggttttacagttttcttagtgtgtgtctttttaaggctttatgttgcagacccttcattaatgggtacttgtaccctgccatcagggatacactgcccaccagcaagggaaggccactgtggggntacattcctgagggggggacacacactggatcccatggttgcc

SEQ ID NO: 314774 - DNA, 1784 bp, Homo Sapiens
  misc_feature (191)..(219): n is a, c, g, or t
gggagtcggggagtagggaagaaggagaggaacatctctttagcatttgttcattctaacattcacatgtttgcttctccatggagttgtttcactatgaacaggttcactaaggagccagttatgtccatatgaaatgagaataaaagtgcaaactcattcagatcaggttcttctgagtggtgtttttnnnnnnnnnnnnnnnnnnnnnnnnnnnnncattctttgtcaaatacttaaattgcagccacagtagtgggacagccactacttatagaacacatgtctatttaaagcctttttttaggccaaagactgacacctatgcaattgatgtaggaaaagaaaggataaatgaagaaaaagaaagaacacttcatgttagacaatttagtcaccttcataggttttgacagaattagggatgcagaattgctcctgctgaggcagtgggagctcccctcaagctgaaagcgtggaagaggtgaggaggcagctatctacaggccctcagggacagctctttgtctttccccaaatcaagcatacaactacaaagtcctgctgctccacttccaagtcaaacttaataattcttaggtaactctaaataaatcttaagtaacagagtattctctgatgaggctcgtccctgtcagtgccagtgactaaaagccaagatgttgcaaatgattcttttattattttccaatcagccaacagtcctcacttagggctttcttccctttttacgcaatgactgtccttctccagagaaagcgacgaatctgcctccagcttcatcctcttcaacctttttgacaaggggacgtgaatttctgatgaaagttatcttaccaagtttaaattcataattgggaattcctcttttaatatctccaggcttgattggggaggggctgggctctacccctttcttctttccatccagtctattgccagatccagagaaagcgcggaagcccagctctccagcatagccactgtggtcggcttcaccttctgtcgactcctcatgctggacttgtctttcgggttctttgtagcccaggggagcatcaaagtccacgttcatgtcacactcaatgatggacactgccttgtcgggtttggtctccatcacacgcagttcgtagatcttttcattatagttgatggcaatcacatccccggtggtcagacaggcaaagttcctaagtgcgttttctaatacggctttggggttggtgatgtccaggaagtcagggctctgaggttggaatttggagtaggtggccacttgaaggttgacgctctccacctggaccaggccgccttcttccaagagtaagttctgcatcatccagtgtgggaggtagcagatgccctcatcagccacaaactccagcacgccacaatgcgtcatgcggtccgaattcttattggtcagtttgaacagcatgggataggtaatgttaagtcggctgagttggtccagggccgagggtggcataattatcttccctcctttctccacatctgacctgtcattaggccctgctagcatggacacagagaagcagcggtactgtgtggagaagcggttttggaagaccctgggaatagggtggtcgaacatgttgaaagagaacatgatggacaccacctggcagactccgctcctctcaggcaatgcaacgaagaaaccccgccgaccgctctcccagccgccgctgccgctgccgccgcgccaagccggtacgccccagaggctcaccggaagt

SEQ ID NO: 314775 - DNA, 867 bp, Homo Sapiens
tgcttcttgtcctggttgttcttgtggttctgttcgtggtctcggtttgcggtgtgccctatgttctactgtctctgtgtttgttctctcgttgtggtgatctccttcctgtgtcggttccttcctgttctttgtcgccttgtcggtgctccattttcctacgttgtcgttttcttctttctttggttccttgttcgttgtcggtttgtggttcgccagtccactcggcatttgtctagtgtcttttcattagtgttttgttgtctctgccttcctcggtggtcatgcttgcgatgttcgtggtgtgcgttttcttattcgcctttggggctttgttgaattgctctgttagtccaggctctgtagttgaaatttggagtatgtggccacttgaatgtttacgtctctccacctggatcagccgccttctctccaagagtaagttcttgcatcatccagtgtgggaggtagcagatgcctctcatcagccacaaactccagcacgccacaatgccgtcatgcggtccgaattcttattggtcagtttgaacagcatgttaagtcgtctgagttggtccaggcccgaggtcggcataattatcttccctcctgttctccacatcatgacctgtcattagggcctgctagcatggacacagagaagcagcggtactgtgtggagtaagcgtttttggaagaccctgggaatagggtgctcgaacatgttgtaagagaacatgatggacaccacctggcagactccgctcctctcaggcaatgcaagcgaagaaaccccgccgaccgctctcccagccgcgctgcccgacgcgtgggtcgacgatatcccaaattccggccgtaccagcc

SEQ ID NO: 314776 - DNA, 1168 bp, Homo Sapiens
ggataacacagagccctttttgtaaattggcattggagtgttttaccctctagctgttttacttagaatgtaacatatgctgcctacccacctcggccagagttgtagtcccaaagaagagcatgggtggcagatggtagggaattgaactggcctgtgcaatgggcatggagcacaaggggtcacagcatgcctcctgccttaccgtggcagtacggagacagtccagaacatggtcttcttgccacggggtgttgttgtctctggtggtgctgcatgtctgtggctcacctttattcttgaaactgaggtttacctggatctggctactgaggctagagcccacagcagtggggttgggcctgtggccccccaaactagggggtgtgggttcatcacagtgttgccttttgtctcctaaagatagggatctacttttgaagggaattgttcctcccaaataaatttgctttaccttggtcctttcttttgtgccagtattcaagtggtatagctctgagcagggtcacatttggccaaacctgacactgtcttgctgcattctcctttggccatcagggtcagaattcaggatagcccttcctagggcactggactttctggcatgggggctgtgtttgcacaagttattttcatgttacctggagagtgtccagaggctgctctgaggctgaggtgtgttcccccttgcctggttccagctgtcagagggataccatcctagggtctgggaatccaaggccacgagactccttggtttgtggtccgagatcctgtactaaggagggtctggccagaggaacagaccagcttttgcacaatgaagcgcaagggaacaagtggtttgcctggtgtcctacctgtcctgaacctggtcctgtgggccattgaaaagttagatctgtgatctctggggtttttgtggctttgttcaatgcttccactctagggcaggcagagcagtctatactctcccaagcctgcttgacctccaagtagagctgatacagagatctgtgaatattgtgatagaaattctttggtattcatacatttcagctgcaagtcagcaatttcccaggtaccatgtaagctataaaacagtcattcttaaagacagaggatagctgtgactcatgggatcatg

SEQ ID NO: 314777 - DNA, 1042 bp, Homo Sapiens
cgcgtaaagaaaaattttcccttttttcccacacaggcattcttcccggtttgggccatcctttgatttcctgccaggccacaggggatcctccactggctttttttggctgggcttgtccgggtccccctgcagccccccccagggggattatgatgatggaggcggcggccaccacattttctaccacgtggaacgcatcacaaaaggggcctgtgttgatggtttccatgccgggagccgccacagtagtggcaatgctgcaccttggtgccgggctcgttcccctttgccgttgcagcgctcacacgtgtccatgatgttcacggtgaactccttgttgaccccctttgcagcttgattgaatgtcaactccatgaagtattcctgaggctgatcaaacacggtctggaaatctccaaatgaagaggatgagaactcgccaaagatcttcctgaacagctcctcggggtccacagtggggcctcccttccagtagctatgctgggagccgctggccccaggatcgaagcctgcagagccgtaggcatcgtactgcttcctcttcacctcatcactcaaaacctcataggcttctgccagctgggagaacttctccttggctttgggatcatccttatttgtgtcagggtgatacttcttggcaagctgataataggctttcttgatctctttctggctggcatttcgaggcactcctaatatctgataataatcttctttggccaaaggggcactcgtgtggaaggaggcagtacaaatgaaagggttatgttttgttcctgtaaggctgacaccaggtctcaatgtcagcagcgctcgggggccgcaagaggtcagggaagacgcaaaggcggggacgctcagcttgcggctcagccatgcccccaccacgccctccctgggcggccgggcccctctacccgatatagccggcagccgcggggtccccacaaccaccagcaaccagcgtgtggagcaccgcgcagccatccctcgtgccgaattcgccacccaggcc

SEQ ID NO: 314778 - DNA, 545 bp, Homo Sapiens
  misc_feature (49)..(346): n is a, c, g, or t
ccacgacggaaaacgacggccagtaatttttttgaattaatatatttannnnnnnnnnnnnnnnnnnnnnnnnnnnnnnnnnnnnnnnnnnnnnnnnnnnnnnnnnnnnnnnnnnnnnnnnnnnnnnnnnnnnnnnnnnnnnnnnnnnnnnnnnnnnnnnnnnnnnnnnnnnnnnnnnnnnnnnnnnnnnnnnnnnnnnnnnnnnnnnnnnnnnnnnnnnnnnnnnnnnnnnnnnnnnnnnnnnnnnnnnnnnnnnnnnnnnnnnnnnnnnnnnnnnnnnnnnnnnnnnnnnnnnnnnnnnnnnnnnnnnnnnnnnnnnnnnnnnnnnnnnnnnnnnnnnnnnnnntttaaatcatgcttctgatccactatcatttctcctatctgtttgtgaagtgaaacttcttactgagactcgctaggtttggaaacttctagtatctcactttcatcctctgtaaaagggaaaaataatggtacctacttcataaagcaaggagtaaatgggatcatatttgtaatacgctcacaagagtaagctatta

SEQ ID NO: 314779 - DNA, 1234 bp, Homo Sapiens
taaatggattcgatcttatctatttattgaagaaaccaatcctgggtaaagaaaaaagggaatgaggttttgggacagaggtgctgggggtgcgagagaagccccagcccctgagtggtgtggtggagggaagggaagggtcacttgtaaaactcatgctcctgctcgtccttcttgatgacagtcttgtatgctttctcgaagtccttggccaggacaatgtagcggttttcacggacagccaacattccactctcctgacagatggagttaatatcagctcctgaaatcttatctggccgggccacatagtcttccaagtcaacctcctcagagaggttcatcttgctagtgatagtggagaaaatcaatctcttctggcggcggtcaggaagtggaaattcaattttacggtccagccgtcctggccgtagcagggccggatccagggtgtctgctctgtttgtggccatgattaccttgacattgacattctgatcaaatccatccatctgattcagcagctccagcaggatcctctgaacctccctgtcggcccctgtctgagcatcgaatctcttggtggcgatggcatcaatctcgtctatgaagatgatggcaggtgcattctccttggccaggcggaacacatcccggaccatgcgggggccctcacccagatacttctgtacaaactccgagcccacgacccggatgaatgcagctgttgtgtgatgtgccaccgccgccaacatggtcttcccacagccaggtgggccatacatgaggacgcctcgggggggatcgatgccgatctgcttgtagagctcgaaatgcgtgagcgggagctccacggcctcccgcacctcctgcttctggatgtccatgcctccgatgtccgcgtacatcacatctggcttctggtctgaggtgagcatcatgatgctgctgtcggcttcggggggcagcacgtccaccagtgcattgctgtgcttgtggagggccactgaggcgttgggcttgagcagctcccgatcgatggtgctcaggatgcgcacataatagttggagcctgtggtagagcccacgatggctgtattctgatccacagcctccagaaattgtccgatgaccatcaggttcgctcatctttgatgtattcctcctgcacctccaggaactccagctcttgctgcagcttcttgtagcggctgtacaggtcctccaggtcctc

SEQ ID NO: 314780 - DNA, 1053 bp, Homo Sapiens
  misc_feature (120)..(120): n is a, c, g, or t
  misc_feature (137)..(137): n is a, c, g, or t
gggcccgggatttcccggggggggtcgggttccggttttgggggcccatggatttaaccttgggccaattggccatttctggatccaaattcccattccatggtgatttcaggcaggttnccaggcagggattcctnctgaaccttccccttgtcgggccccctgtctgaagcatcggaattttcttggtggcggatgggcatccaatctcgttctatgaaagatgatggcggggtgcattctcccttggccaggccggaacacatcccggaccatgcgggggccctcacccagatacttctgtacaaactccgagcccacgacccggatgaatgcagctgttgtgtgatgtgccaccgcctttgccaacatggtcttcccacagccaggtgggccatacatgaggacgcctcgggggggatcgatgccgatctgcttgtagagctcgaaatgcgtgagcgggagctccacagcctcccgcacctcctgcttctggatgtccatgcctccgatgtccgcgtacatcacatctggcttctggtctgaggtgagcatcatgatgctgctgtcggcttcggggggcagcacgtccaccagtgcattgctgtgcttgtggagggccactgaggcgttgggcttgagcagctcccgatcgatggtgctcaggatgcgcacataatagttggagcctgtggtagagcccacgatggctgtattctgatccacagcctccagaaattgtccgatgaccagcgggatgctttggattcgcttcacctcctcctgggcatggagaaattcctttttcaggttcttttgctcatctttgatgtattcctcctgcacctccaggaactccagctcttgctgcagcttcttgtagcggctgtacaggtcctccaggtcctcaggctcagggcccaggaaggacaggccggtctggggccgggacacggacagtgctgggatctcatcctgagccttctccaccaagatgcctatctcctccatagtgaccaagccggcctctgtgtggcctgggatgatctcccc

SEQ ID NO: 314781 - DNA, 190 bp, Homo Sapiens
gaaatacttatgtgctatctccctccttccattcattccatgaggccacaagtgtgttttgctcatcagtatctctcattgcctagcgtagtgttgggcatgttccacagcatggagagccagtgcttctgggcattgcagtaggtaccagtgagaaaaaaggggaaaatctgcatattgagtatttatt

SEQ ID NO: 314782 - DNA, 355 bp, Homo Sapiens
aggaattcggcacgagtcaactccagatgggagacttttacatgagatgatccttgtatgtgatgcatacagaaaggatcttcaacatcctaatgaatttattcgaggatctactcttcgttttctttgcaaattgaaagaagcagaattgctagaacctttaatgccagctattcgtgcatgtttggagcatcgacacagctatgttagaagaaatgctgttttggccatctataccatctatagaaattttgaacatcttatacctgatgctcctgaactgatacatgattttctggtgaatgagaaggatgcaagttgctacttaagtacttgcattgatcgttccatttgg

SEQ ID NO: 314783 - DNA, 596 bp, Homo Sapiens
  misc_feature (297)..(431): n is a, c, g, or t
  misc_feature (514)..(554): n is a, c, g, or t
aaaacctgattgccttttccgattggatgttccttctttgccacctacacaaagtggggaggtaactcggtttgctggtggcatcctcagtagctgggactacaggcaataaattcttttatacgtcgctttttaaacgtattgtgcctgtgaacaaatcttcaagttatacccaagatttcaaagctcatgatggtccatagtactcgctctttaaatcaatagctgcgtatcccacagatgatttcctttgggatgatttcccagaactggaattgcagattcttcacaatgcannnnnnnnnnnnnnnnnnnnnnnnnnnnnnnnnnnnnnnnnnnnnnnnnnnnnnnnnnnnnnnnnnnnnnnnnnnnnnnnnnnnnnnnnnnnnnnnnnnnnnnnnnnnnnnnnnnnnnnnnnnnnnnnnnnnnnncctgttaccctgttggcatgacaggcctgataaaataactgtgaaagtgctctttcttattgtaagtgcacaaaaaagcagannnnnnnnnnnnnnnnnnnnnnnnnnnnnnnnnnnnnnnnngggattaccatttaatggccgcagctttaccgtcctgctggg

SEQ ID NO: 314784 - DNA, 1242 bp, Homo Sapiens
  misc_feature (210)..(210): n is a, c, g, or t
ctgcctgaggcgctgctcctccacctcccggcactgcagagcgtcagcgtgggccaggatgtgcggtgccggcgcctggtgcgggagggcacctacccccggaggcctggctccagccccaaggtggccctgcactgcgtagacacccgggattctgctgccaggggccccaccatcttgtgacaaatggtgtggcccagggccacgtanacagactgctgtcctgggctgcctcaggtcccgagtaacttatgttcaatgtgccaacaccagtggggagcccgcaggcctatgtggcagcgtcaccacaggagttgtgggcctaggagaggctttggacctgggagccacacctaggagcaaagtctcacccctttgtctacgttgcttccccaaaccatgagcagagggacttcgatgccaaaccagactcgggtcccctcctgcttcccttccccacttatcccccaagtgccttccctcatgcctgggccggcctgacccgcaatgggcagagggtgggtgggaccccctgctgcagggcagagttcaggtccactgggctgagtgtccccttgggcccatggccgattcactcaggggcgagtttcttttctaacatagccctttctttgccatgaggccatgaggccggcttcatccttttctatttccctagaaccttaatggtagaaggaattgcaaagaatcaagtccacccttctcatgtgacagatgggggaaactgaggccttgagaaggaaaaaggctaatctaagttcctgcgggcagtggcatgactggagcacagcctcctgcctcccagcccggacccaatgcactttcttgtctcctctaataagccccaccctccccgcctgggctccccttgctgcccttgcctgttccccattagcacaggagtagcagcagcaggacaggcaagagcctcacaagtgggactctgggcctctgaccagctgtgcggcatgggctaaagcactctgcccttcggagcctctggaagcttagggcacattggtttcagcctagccagtttctcaccctgggttggggtcccccagcatccagactggaaacctaccattttcccttgagcatcctctagatgctggcccagggagttgttgaagtctggagccctatctggctgggatctcaaggggcctcctggatttagcccaatgccctgacacgccttctacctccaagaggcggggg

SEQ ID NO: 314785 - DNA, 727 bp, Homo Sapiens
ctcatgcctgggccggcctgacccgcaatgggcagagggtgggtgggaccccctgctgcagggcagagttcaggtccactgggctgagtgtccccttgggcccatggcccagtcactcaggggcgagtttcttttctaacatagccctttctttgccatgaggccatgaggcccgcttcatccttttctatttccctagaaccttaatggtagaaggaattgcaaagaatcaagtccacccttctcatgtgacagatggggctgaggccttgagaaggagcctcccagcccggacccaatgcactttcttgtctcctctaatgccccccctccccgcctgggctccccttgctgcccttgcctgttccccattagcacaggagtagcagcagcaggacaggcaagagcctcacaagtgggactctgggcctctgaccagctgtgcggcatgggctaagtcactctgcccttcggagcctctggaagcttagggcacattggttccagcctagccagtttctcacccttggtttggggtcccccagcatccagactgggaacctacccattttcccctgagcatcctctagatgctgccccaaggagttgctgcagttctggagcctcatctggcctgggatctccaagggggcttctggatttaatcccactgggcctgagaacaaaggcctctttaccttccagaatgccggggagacggcctgcc

SEQ ID NO: 314786 - DNA, 463 bp, Homo Sapiens
cctgaaacaatgctgttgccttatttgaggaagaagcttcgactcacaggaactaagtatggctgtggaggaggaggctgtggtgcttgttcagtgatgatgttacgatacaaccccatcaccaagaggataaggcatcacccagccaatgcctgtctgattcccatctgttctctgtatggtgctgccgtcaccacagtagaaggcataggaagcacccacaccagaattcatcctgttcaggagaggattgccaagtgtcatggcacccagtgtggcttctgcacacctgggatggtgatgtccatctacacgctgctcaggaaccacccagagcccactctggatcagttaactgatgcccttggtggtaacctgtgccgttgcactggatacaggcccataattgatgcatgcaagactttctgtaaaacttcgggctgctgtcaaagtaaagaaggaa

SEQ ID NO: 314787 - DNA, 1078 bp, Homo Sapiens
tcttttacactggccacagatcgtttattgacaccaccactcctgaaaattgggatttcttattaggttcccctaaaagttcccatgttgattacatgtaaatagtcacatatatacaatgaaggcagtttcttcagaggcaaccagggtttatagtgctaggtaaatgtcatctcttttgtgctactgactcattgtcaaacgtctctgcactgttttcagcctctccacgttgcctctgtcctgcttcttagttccttctttgtgacaaaccaaaagaataagaggatttagaacaggactgcttttcccctatgatttaaaaattccaatgactttcgcccttgggagaaatttccaaggaaatctctctcgctcgctctctccgttttcctttgtgagcttctgggggagggttagtggtgactttttgatacgaaaaaatgcattttgtgcagctggtgaggtataatccaaagcaaaagcaggggcaaaaatggacttcctgaagttatctctgctcctgctggttatcctccagaatctgtcatgttgactgagagtgcgtgcttgctttctcaggcctcctggccaatagcacaggtctgctggaaatcacccacatggtttttcattgcctgtgcagtcaggtgatgcctctatgtttttggaggtccacctctgttgtttcttaaccttcccagccttcccacagttgtcccagtgatttggaagaaggtctcttcatttctggccactttcgacgctgaaactgcctgtattgctcatagcttcctccatctttaagtcccaggtccatgtttcgagtccgggggttacactgcttgtaacccttgcagctcctcagctccatgagctgtacgtgtagctggttgaggacatccctgtccagtgtgttcactgcattcatcagctggtaggggtctgtgttgagatcaaagtactctaggaagccagttgcaaattcacagaagaggaaattgtgagtctcattgatggtcctcatgcaccagtacgtgttattgttggcgctggtgcaggcacagaaaggccccag

SEQ ID NO: 314788 - DNA, 777 bp, Homo Sapiens
cggttgggtttttttccggtttttcctgtggggaggtttctggggcgaggggttagtggtgacttttggatccggcaaaaatgcattttgtgcagcatgctgaggtataatccaaagcaaaagcagggtctaaaatggacttctggaagttatctgtgctcgtctgggttatcgtccagaatctgtcatgttgactgagagtgcgtgcttgctttctcaggcttcgtgggcaatagcacaggtctgttggacgtcacccacatggtttttcattgcctgtgcagtcaggtgatgcctctatgtttttggaggtccacgtctgttgtttcttaaccttcccagccttcccacagttgtcccctgtattgatcatagcttcttccatctttaagtcccaggtccatgtttcgagtccggggggttacgctgcttgtaacccttgcagctcctcagctccatgagctgtacgtgtagctggttgaggacatccctgtccagtgtgttcactgcattcatcagctggtaggggtctgtgttgagatcaaagtactctaggaagccagttgcaaattcacagaagaggaaattgtgagtctcattgatggtcctcatgcaccagtacgtgttattgttggcgctggtgcaggcacagaaaggccccagtgtccagaaaggcgccgtctgccagtgctggttgttgtgggtgaagcacgtgaggcgtggcatgctgcacgtgtcgttgttctgcaggcgcttgagcagcttgcggagtttctt

SEQ ID NO: 314789 - DNA, 1019 bp, Homo Sapiens
  misc_feature (324)..(324): n is a, c, g, or t
agggcttttcccccccacttctttttaaaggtcccccagggttccccaattttttggaaggttccggggggggttcccccctggcttgttaaaacccttgccaaggttccctcaaggttcccagtgaaccttgtaacgggttagcttggttggaagaacatccccttttccaggggtgttcactggcattccatcaggtgggtagggggtcttgtgttgagatcaaaggtactttagggaggccagttgcaaaattcccaggagaggaaaattgtgagtctcattgatggtccttcatgcaccagtacgtgttattgttggcgnctggtgcaggcacagaaaggccccagtgtccagaaaggcgccgtctgccagtgctggttgtcgtgggtgaagcacgtgaggcctggcatgctgcacgtgtcgttgttctgcaggcgcttgagcagcttgcggagtttcttcttgcgcttttgctcccgcaacagccacaccttgtccttctcttgcaggcccttcctgaaaggatgcagactggagcctctgtgcttgaggcggcctttgtgctgggtgtggtagctgattttgtgacagtcacattcttctggccgctttttcttcaggtgacctcggacttccctcaggttcttaattttgttctgcagggtttcaatctcgtggtcgatgtgcagcttgtggtctttccaggcctgcagggacttgtacaggtccaggtcacactggactgtgtcgttctctaggatgtagcaccgatgtgtcactttaatggggttggcggctgagtagtcgggaaggcctccagtgccactgaagtccccaccatccttgtcatcttggtcctcaggggcccctggccagtgccgcttggtgaggtttcggggctgggcggcatcacccaggcctacgtggtacaccctgccgtccacctcgatggccactgagcggatggagcgactgcggaccctcgtgccgaattcgccacccaggcctcgctactt

SEQ ID NO: 314790 - DNA, 353 bp, Homo Sapiens
ccgagggtctgaagccattgtggtaactcctggagagcgcccaggctattcatcttctttagggatgtcatttttatcctcataagccaagaagtagagtgaaagcttcataatgggaaaatcacatttttggattagcgtcattccaagaactctagtataaaaatccagtgacttcttaggatccttcactcgtagcatggtctgctgcaatagaaaatccttggtactggggtccgcgtcggagcagcaactgagggcggcctcgtccgtgaggccgccggacgggggctgcggttctgccatggctgcgctgcagtatcacagacgacgggacccaaggaacggaggag

SEQ ID NO: 314791 - DNA, 1012 bp, Homo Sapiens
aaaaatgatgattcaaaggcagatttgaagggaagtaatatttaggtggcagaagaaggcaaatgcagcctctgaagggaactgttctaattattacctaaaaaataaagttacacaactatattcaaggacatgagataaagcactgcttgaaaaccagaatgactgaacagttaggtgaaaaggaacagctgaaataggaaggggaaatggactgaagaataatttgaatcgggacagtgatccatcagtcctagatgcttctggtatgtaaatatcttgaatcacattgtttcctttcttctgaaatctcaaaggagaattctcacagcactacattaaggttgccattttgttaggattcaaaatttcaatccagtagccatcaggatcttgaataaatgccaggcctttcattttaccatcatcaggtttcttcacaaatttgactcccagttcttcaaaccttttacaagcactgtatacatcaggaacagcaattccaatatgaccgaatcctcgagggtctgaattgccattgtggtaactctgggtcgcatcatcttcagtgccccaattgtgtgtcagctcaagtgtagcttttctggagagcgcccaggctattttttcatctttttctttagggatgtcatttttatcctcataagccaagaagtagagtgaaaacttcataatgggaaaatcacatttttggattagcgtcattccaagaactctagtataaaaatccagtgacttcttaggatccttcactcgtagcatggtctgctgcaatagaaaatccttggtactggggtccgcgtcggagcagcaactgagggcggcctcgtccgtgaggccgccggacgggggctgcggttctgccatggctgcgctgcagtatcacagacgacgggacccaaggaacggaggagtcacccacactacgcctcggccccgacgcgtggttcgacgataatcccgaaattccgggccgggtaccagcttgctt

SEQ ID NO: 314792 - DNA, 1184 bp, Homo Sapiens
  misc_feature (1026)..(1034): n is a, c, g, or t
  misc_feature (1043)..(1043): n is a, c, g, or t
  misc_feature (1090)..(1090): n is a, c, g, or t
  misc_feature (1097)..(1097): n is a, c, g, or t
  misc_feature (1127)..(1127): n is a, c, g, or t
  misc_feature (1151)..(1151): n is a, c, g, or t
  misc_feature (1156)..(1156): n is a, c, g, or t
acaaattaaacatagtcttatttgaagtttcattttatttcagtctataagtattgctatttgtttaaagcactcacataaatccatttcacccaaaaaggaaacataaagtgcttctagcagtacaagcacggttggcatggcctttccaaaggtcttccactagagtctagagaaatctaaatatagtcatccacaaactggatgtttttattttctgagccattagagattttcaaaatcactttgatttttaaaaactcatcaaatgtgaatcatggcggggaagaccactgagctgatttctgataactaagttatcactgaacataatttatcatatatggctactggcatcatgaagaccttgggatagggaagactctttatgagaaatataaacatcacttgtgtaggaatcaccaggtgtccctagagcagttttgtactaaagacttctagtgtttactccctcaccacggtactccagcccaagagccaagagcacaatggtcaaactcactgaaggtttttacaacaggaaaccagtggaggtattgtgaggtactacaactttgaggcacaatctaaatactaaaaatgattatgaaatcttgagttgagctgattgatgccctcttaaatccattaataatccatgaaagtgatttcacatgcctagcctgctttctttctcacatgacagctgggagtattaaatgagataaagttgcagcctagcccagtgtctgggtaccatatcatttccttcctcctcccctttcccaaataaataaggttagtccttgaactttaaatgtactttataataagaagaaatcactttttctatcagtatccttgtcagcatgatttgaattgctctcaagagtacctactcttttgtaaaataaacactttgtactttactgaaagaacactagtgttctttcctttccgttgtgaaaaaagttgtttctgaggaattgaaaccccagaagataactacaacaaaaacatgttaannnnnnnnnaaaaatgangattcaaagggcaggatttgaaggggaagtaatatttagggtgggcnggaaggngggcaaatgcaggcctctggaaggggaacntgttctaattattaccctgaaaanttaangtttacacaacttttattccagggactg

SEQ ID NO: 314793 - DNA, 423 bp, Homo Sapiens
  misc_feature (175)..(175): n is a, c, g, or t
ggagctgaagtagagcacgtcctccagctcccagcacagcaggtccttcagcagcaccagcgactcgtcgaagtactcttgaaggagcaccaggtggaagcgacgctccacctccaggatgtgctcctgcacctgcgggctgctggggtcccaggctgttgtcatagcccaggtncgaagaagagccaggtttcggaggtagtgggccattgaagccgttggggtcgtagtagcgatccgggtcttgcaggaactcggtccagcttgtcgccggccgagagcttccacgtgaggggcaccaccggccccgaagtagtggaaggaggactcgaacaagcgggcggggtcgcggagcaccgtgatgaagatggcgttggtcggcaccaggccgcgcacctcgtcgtagtggaagcgcactcgtgc

SEQ ID NO: 314794 - DNA, 673 bp, Homo Sapiens
  misc_feature (589)..(589): n is a, c, g, or t
ccaagacccaccctccagccctgcagagccgcccagtggccgcttttccatggagccctggtgggaacccgcccggcatcctccgggctcccctgcagctccttgctccagccatcgcatcacactccgcccacaccaagtctggctgcccaaccagggcagtggggtctaatccccctctgtccccagaggggctgtgcttggctggcacacctgcttgcgggtggtgatgacctgccggatggcactgacgaagccgctctggtcgtaggggatgaggcccatgaagatcttcttcttggacgagtacaggagcatgagcacgcgcacttcacagggggagatgtgggggaacagcatgcagtccgtctgcgggggccgcgggtcatgaccctgtggtcactgcccgggtccactgtgcccccaccaccctggaccggcccacctgtaggggatgaagggagatcatcggtggacagaggcccccacagtcaaggccatggccataggtgaggggcctctgagagcccgtgcagcgccccatcgcatcccccgaccctgcatggctgaggtcagaatggcacccggnacccaggctgcggtgagaatgccaagaagcactacctccacccacatcaccccctgccgcgccttctgactgcctgattgggtg

SEQ ID NO: 314795 - DNA, 1417 bp, Homo Sapiens
ttcaggtttttaaaaggctttattggggaaacgtagaggggtggggaccgtccttggaggcctcaggacaccatcctccatgttgctgggcagttgaagtccccaggggcccctgctcagaagcgtgtcacctgggggcaggggtgcagtgggggctgctggccacaggctcccaagcacagtctctgcgggggcctcatctgtgactcctggaggggcccagcccggggtaaccactacccccccatccctcgttgctgttgctcctgctccaggttccgctgcaggacctgctgctggttggcaatgacacgccggatgccgttgacaaagttgccctggtcatgggggatgaggccaatgaagattttcttctctgaagagtacaggagcataagcacgcggatctcacacgatgctttgtaggaaaagtgcacgcagccggcgaagccattgtccatgatccggcacaggctcttcagtgtctccaggtccttggtgaagtggaactggaccaggcgcgagttccggaacagcggcactagggtggtcagcagctgctgcgggatgagctgcatgtacagcttccttggccactgctcggtcctcaggatctccccctggttcacgtagacgtgggatggcagccacctctttggaccgactgttgggctcaggcttgggctcctgccactccatgacaccactccatgccagaaacttgttgttgacgatctggactgggcctgagttgacaccaccaggtcccactgcctgcttgcgggtggtgatgacctgccggatggcactgacgaagccgctctggtcgtaggggatgaggcccatgaagatcttcttcttggacgagtacaggagcatgagcacgcgcacctcacagggggagatgtgggggaacagcatgcagcccgcgaagccgttgcccatgatgcggcagagccccttgagcgagtcgcagtctctgttggtgaagtggaactgtgccaactgggagttccggaacagggggcccagggtggtcagcagctgctgcgggatcagctgcatgatcagcttctgcggccactggtcggtctccaggttctcgccttggttcacgtaggcttggcagggcagggtccgcttcagctttgcagtggagtcagagtagggtctgcgcttctcctgccactcgaggacgccgctccaagccagcagcttgttgctgagccggtgctcgctcacggccagacccccgagggtgagcccaggtgaggagggaccgatgggacccagtgccccgaagacccgagcaccttccatgggaggggccgagcgggcccggatccgcggaggctgcgggcctcgggggctggcaggccagcctcgtgccgaattcgccacccaggcctcgctactt

SEQ ID NO: 314796 - DNA, 989 bp, Homo Sapiens
  misc_feature (70)..(113): n is a, c, g, or t
  misc_feature (163)..(163): n is a, c, g, or t
  misc_feature (324)..(324): n is a, c, g, or t
attttgttgccgggggcccccgggggcccttggggcccaagggttggggtggaattccacgggaattttnnnnnnnnnnnnnnnnnnnnnnnnnnnnnnnnnnnnnnnnnnnntttggtccgggcggaaggccagccagcccccaggagcccccctgggttgnctggaggttggtggaggggagcccctggggttggggggcacccccagtctttccgccggtggtgggttgaggaggaggccttcgcagctgagggttggcccccagggttcttggggccgaaggatgggtccaggaggggggtgggccagaagctgctccanggagggccttgaggggcacctggcgggggctgggcagtaccttggggctggggctgccccgtggccccagaggcccctacggtaccctgaggctggggctgcggtgggcggagctggagcagattctgtgagggcctggcttggtcctccagaatgggccccagccctgggggtgcctgctgtccccccattcctcgctgctgctgctccagcttctgctgctggacctgcttgtggttggtgatgacctgccggatgccgttgacgaagccgctctggtcgtaggggatgaggcccatgaagatcttcttcttggacgagtacaggagcatgagcacgcgcacctcacagggcgccgtgtgggggaagtgcacgcagcccgcgaagccgttgcccatgatgcggtagaggcctttgagagactccaggtccttgttggtgaaatggaactggaccatccttgagttccggaacaaagggcccagggtggtcagcagctgctgggggatgagctgcatgatcagcttctggggccactgctccgtcttcaggttctcgccatgattcacgtagacctggcagggcagtgaccgcgtcagcttggtgttggcatccactgaggcaggtttgggtttctcttgccctcgtgccgaaatcgccaccca

SEQ ID NO: 314797 - DNA, 539 bp, Homo Sapiens
gggtttttaaaaggctttattggggaaacgtagaggggtggggaccgtccttggaggcctcaggacaccatcctccatgttgctgggcagttgaagtccccaggggcccctgctcagaagcgtgtcaccagtctctgcgggggcctcatctgtgactcctggaggggcccagcccggggtaaccactacccccccatccctcgttgctgttgctcctgctccaggttccgctgcaggacctgctgctggttggcaatgacacgccggatgccgttgacaaagttgccctggtcatgggggatgaggccaatgaagattttcttctctgaagagtacaggagcataagcacgcggatctcacacgatgctttgtaggaaaagtgcacgcagccggcgaagccattgtccatgatccggcacaggctcttcagtgtctccaggtccttggtgaagtggaactggaccaggcgcgagttccggaacagcggcactagggtggtcagcagctgctgcgggatgagctgcatgtacagcttccc

SEQ ID NO: 314798 - DNA, 636 bp, Homo Sapiens
  misc_feature (487)..(488): n is a, c, g, or t
  misc_feature (502)..(502): n is a, c, g, or t
  misc_feature (618)..(618): n is a, c, g, or t
gcattatatttgcaaacaaatcagcatgacaaagccagagcagtgtggcttactgcatttgaaatcctcagaatgcagaggttttttatcatatgtgcaaattcttcatcttacagaatcgaggcgataatcttcttccatttttgcggaaatttattgcatccttctttaaaccggggtttgagaagtataataacttggatctgtttcggtatctcttaaatattccaggaccaattgacattccatctcgtttatgtaaagggaattttgatgatgatatgtttaaccaccaagttccttatttgtggctgatttactgcctttgtcatcctcttcaatcaagtattaaagaaacagtggaggcatatgaggcagcattaggggtggctatgagatgtgatatagtacagaagatatggatggattatcttgtctttgcaaataatagagctgctggatccagaaacaaagttcaagaattcannttttttactggatntagtgaatagatgtttggttacagtccctgcccgataccccattccttttagcagtgctgattactggttcaactatgaatttcattataggggttatttcttttatttgagctgngttccgacccagcattcc

SEQ ID NO: 314799 - DNA, 614 bp, Homo Sapiens
  misc_feature (418)..(418): n is a, c, g, or t
  misc_feature (433)..(433): n is a, c, g, or t
  misc_feature (465)..(465): n is a, c, g, or t
  misc_feature (524)..(524): n is a, c, g, or t
  misc_feature (542)..(543): n is a, c, g, or t
  misc_feature (584)..(584): n is a, c, g, or t
  misc_feature (593)..(593): n is a, c, g, or t
  misc_feature (597)..(597): n is a, c, g, or t
gcattatatttgcaaacaaatcagcatgacaaagccagagcagtgtggcttactgcatttggaatcgaggcgataatcttcttccatttttgcggaaatttattgcatccttctttaaaccggggtttgagaagtataataacttggatctgtttcggtatctcttaaatattccaggaccaattgacattccatctcgtttatgtaaagggaattttgatgatgatatgtttaaccaccaagttccttatttgtggctgatttactgcctttgtcatcctcttcaatcaagtattaaagaaacagtggaggcatatgaggcagcattaggggtggctatgagatgtgatatagtacagaagatatggatggattatcttgtctttgcaaataatagagctgctggatccagaaacanagttcaagaattcanattttttactggattagtgaatagatgttggntacagtccctgcccgataccccatttcttttagcagtgcttgatactggtccaactatngaattcataataggggtnnatttctttaatttgagctgtgttccaaagacccagcattcnccctttggncgtnttttgtcagtatgccgc

SEQ ID NO: 314800 - DNA, 1192 bp, Homo Sapiens
  misc_feature (1020)..(1087): n is a, c, g, or t
acattataataaacccttagcacacccgtccactgggaagcagagcctaagctgaccccagccactgggctggtggggaccacatccaaggcatgaagtactggcagcacggggagcttgcaagagacagggacatgaagttgtggcatctctggcacgcaagttccttgggacagagcaatggaaacctacaggcatgagaatgagggttgcttgatggcaagatttcagctgctctgctcacactacctctccagcaactggcacaacgcaggcacctggcacatcccagcatgccatacatatctgttgaagccacaactcaacagtttaacctggactcacctgagagaggcctcctgcatgtgaagccctgccaatgacacagcctggagagcacctagggatgggtgttctctaatgggggaggaaggtgggcttaggaggctgctggctgaacatgcgatttgcagttattaggcaaggtggggggcctgaactcaattatagactctgtcagggctgtttgactaaagtggctaagggatcccatatcaggtctgctgtgttgaaaccaaactgcccttttaccaacgtttctgctgtgcagcccagagaagtgtcagggaaggagagggagaaatgggagaaatacatattttcaaaaacactgtctcacttcctaagggtaatcaaaagcaaccacgggtagctcttcccatttctgcaaccttatcgtagagagggatgaaggcctccaatggcgttaggaaacaaatccctcagttactgggaagctaaaatttatctatgatgtaagtgacttggagaaggggagttgccttgatgaaaagacccatttccctccttttgaatctaaatccaaggtttggtttctactgtgatgtcagaaagatgaccagtattccaaatgacactactattcctgcacctaccaagaactactcccctttgcctcaaaacagagttcgaaggttcttaattgggacttttgttttnnnnnnnnnnnnnnnnnnnnnnnnnnnnnnnnnnnnnnnnnnnnnnnnnnnnnnnnnnnnnnnnnnnncaccctgggcaacaagagcaaatctccatctcagaaaaaagacaaaaaacaaagatctcgggaaaggcaaagggtggcctcctgagggagatggccccaggtatt

SEQ ID NO: 314801 - DNA, 387 bp, Homo Sapiens
gcgagtccaccggaaccaaccttcttccttcgcaaagtaagctctaatatacgttccttcaaataaaagtaatgtcaacaagttaaatggtatcacagagctgttctcctgcacctccttggaatggtggctggatggcggcgttcttcactccagatttcagggagtgggagtcttcctgtagcctccgacccagaaccgatctcctcgcagtgtggccacagaattccaaagcccttgagctgggtgagcatgtgggcggcaagggcgcgagggaggcgtgtccaccgtgacactgggattcctggccggcaactgcggtccaaggcggtccctgcgcagtgcgggagtgcggcctccgctctcgcttcgcctctttcaccccgc

SEQ ID NO: 314802 - DNA, 1738 bp, Homo Sapiens
  misc_feature (863)..(871): n is a, c, g, or t
ctgactacatacgtattcaggtacacaggcatagtccatatatttttaggccatatagatgatccacataattccaagctcaaataaatgttttattctttactaatgtccatttttgaattcttggaatacctacctctttatttggtttctgcatcagttgggagtatctctgagcaggaatgtctattcagaactgagcttgggagtgaatacagggagacaggacagggaaatggggatggaaatagattacgaaagaaagtagctcctgctttcagggagattacactgtcatcttatactcagcttattactagacagtaggatgtgtaaataagtttaattttttagtttttcaatgacattcagtagagatagttatattggctatataacacaagtaaagtggtgtttggaaagttcctccattcatttgatttcctttagaaagcgaattccaaggtgtgcaatttatccatgaccacatacaatgattcaatgaactagataatgttaaatctctcaggtaactgttaaattttgaggtaggattaaaaaatacttcaggggttctactctgaccacgttctttactgatctgttgcccttggctttggggtcatgggaagaaagagggagaaaatgtcgagggagaaggataaggggatgagaggagtaccccttagaagtttgagcccattgggttgggacttttcctcccccaatcactgaagctgtagtaagagcaaatcaatgtcacatttacagttatctcttggttagccacactaattgagctaagcaaaaatgggaacatgccaaaaggatttttatttgaatttgaagtgcatcatgtgaannnnnnnnnctacagcagacacagggccctaataatacttaacccaggctattactaaattagtttgtattacttgatgattatatatagtttgtattacctgaatctacaggtaacacaatgaattgtagcacaggcaagtggctgaggcataaatcgacagactgggaaagaatttcctctgattaaacttttgccacagacagatcatatgtagacaaacaggaattaattgggcttaattcacagcaagggtcaaatgctgaatttctaagcatttctccaaagactatgaatgttgcttttccacctccacagaaaacaaaattaaagtactttaattcacactagcaggtgggtttggccccaggtaccctgacattggcctggtctttctaatcaacttgagtgtttctgccccagacataaaaatccccttgggttgaggcagtagagctctactggggaaccagacatacattttgttaatgaaggcctatccttctcaaagcacatttggtggaatcgggtctttatggatacgggtttcttcaccgactatttctccctcaaactcttggcctctgctttttctcttgtagcctggttctctggtgtgaacaggagcagatgaccaatagcacctagcttggtgacaacccataggaggtatgcctataaaatgccatgggccactgagtgttcactggaaggatgacacttattggcaaggatgggatgatttgaatgtgaactcctgtcggaaaatggtcccaagaaagcactgaccacccctctctatagttcacacaacctggctgagtttttgtggggtaagatctacttcccgatgtgttcaatctcttctggggcaag

SEQ ID NO: 314803 - DNA, 1194 bp, Homo Sapiens
  misc_feature (1121)..(1121): n is a, c, g, or t
  misc_feature (1131)..(1131): n is a, c, g, or t
  misc_feature (1178)..(1178): n is a, c, g, or t
tggaagaatgtatggactttgccactgagttgcttttagcagagaaacgtggtgacctgacaagagagaatgtgaaccagtgcatattggaaatgctgatcgcagctcctgacaccatgtctgtctctttgttcttcatgctatttctcattgcaaagcaccctaatgttgaagaggcaataataaaggaaatccagactgttattggtgagagagacataaagattgatgctatacaaaaattaaaagtgatggaaaacttcatttatgagagcatgcggtaccagcctgtcgtggacttggtcatgcgcaaagccttagaagatgatgtaatcgatggctacccagtgaaaaaggggacaaacattatcctgaatattggaaggatgcacagactcgagtttttccccaaacccaatgaatttactcttgaaaattttgcaaagaatgttccttataggtactttcagccatttggctttgggccccgtggctgtgcaggaaagtacatcgccatggtgatgatgaaagccatcctcgttacacttctgagacgattccacgtgaagacattgcaaggacagtgtgttgagagcatacagaagatacacgacttgtccttgcacccagatgagactaaaaacatgctggaaatgatctttaccccaagaaactcagacaggtgtctggaacactagagaaggctggtcagtacctactctggagcatttctcatcagtagttcacatacaaatcatccatccttgccaatagtgtcatcctcacagtgaacactcagtggcccatggcattttataggcatacctcctatgggttgtcaccaagctaggtgctattggtcatctgctcctgttcacaccagagaaccaggctacaagagaaaaagcagaggccaagagtttgaggggaggaaatagtcggtgaaggaaaccgtttccattaaagaccccgatttccaccaaatgtggcttttgaggaagggttagggcctttcatttaacaaaatgtatgtctgggtttccccgtaggagttttattgccttcaacccaggggggttttttatgtctgggggcggaaacattcagttgattaggaaggnccgggccatnttcagggtacccgggggccaaacccactggttagtgttgatttaagnctttaattttgtttct

SEQ ID NO: 314804 - DNA, 482 bp, Homo Sapiens
  misc_feature (420)..(420): n is a, c, g, or t
ggctacccagtgaaaaaggggacaaacattatcctgaatattggaaggatgcacagactcgagtttttccccaaacccaatgaatttactcttgaaaattttgcaaagaatgttccttataggtactttcagccatttggctttgggccccgtggctgtgcaggaaagtacatcgccatggtgatgatgaaagccatcctcgttacacttctgagacgattccacgtgaagacattgcaaggacagtgtgttgagagcatacagaagatacacgacttgtccttgcacccagatgagactaaaaacatgctgggaaatgatctttaccccaagaaactcagacaggtgtctgggaacactagagaaggctggtcagttacccactctgggagcattttctccatcaagtaggttcacatncaaaatcatccattcccttggccaaatagtggtcatcctcacaagtgggacaatcaagtggg

SEQ ID NO: 314805 - DNA, 424 bp, Homo Sapiens
  misc_feature (18)..(18): n is a, c, g, or t
  misc_feature (24)..(24): n is a, c, g, or t
acttgagtgttttctgcnccccanaccataaaaaaaatcccccttgggttgaaggccagttagagcctcctactggggaaacccagaacataccattttgttaaatgaaaggccctatccttcctcaaagcacatttggtggaaatcgggtctttatggatacggtttcttcaccgactatttctccctcaaactcttggcctctgctttttctcttgtagccctggttctctggtgtgaacaggagcagatgaccaatagcacctagcttggtgacaacccataggaggtatgcctataaaatccatgggccactgagtgttcactgtgaggatgacactattggcaaggatggatgatttgtatgtgaactactgatgagaaatgctccagagtgggtactgaccagccttctctagtgttc

SEQ ID NO: 314806 - DNA, 542 bp, Homo Sapiens
gggaattgccaacgtattttctgcctccggaaaacaaaggactcaggatccacgaactcagcagtgatgattattctacagaagaagaggcccaaacccctgactgttccataactgacttcagaaaaagccacactctgtcctacttagtcaaagaattagaggttcgcatggatctgaaagcctgccagatgaccatgcacgatctttcttatttcatgctattaataagccaaatgctcctatctggctcatactcaatgaagctggactatactggagagcagtaggaaatagcacttttgctattgcctgtcttcagagggctttgaatttagctccacttcaataccaagatgttcctcttgtcaacttggccaaccttttgattcattacggccttcatcttgatgccactaagctgctacttcaagctttggccatcaatagctctgagcctctgacctttttgagcctgggtgcttaccttgctctgaagaatatcagtggggcacttgaggcctttagacaaggcttggatt

SEQ ID NO: 314807 - DNA, 427 bp, Homo Sapiens
tggatctgaaagccaaaatgccagatgaccatgcacgaaaaattttgctttcccgtattaataactatactatcccagaagaagaaattgggtctttcttatttcatgctattaataagccaaatgctcctatctggctcatactcaatgaagctggactatactggagagcagtaggaaatagcacttttgctattgcctgtcttcagagggctttgaatttagctccacttcaataccaagatgttcctcttgtcaacttggccaaccttttgattcattacggccttcatcttgatgccactaagctgctacttcaagctttggccatcaatagctctgagcctctgacctttttgagcctgggaaatggcttaccttgctctgaagaatatcagtggggcattgagggctttagacagggctt

SEQ ID NO: 314808 - DNA, 457 bp, Homo Sapiens
agtgtggctttttccgaagtcagttatggaacagtcaggggtttgggcctcttcttctgtagaataatcatcactgctgagttcgtggatcctggcacaagaaaaaggaacaagattcatattttcaaagtttgggtgacttcaagataaagacttaacttttcaagtccaaggctggtgctctcaaagaaccgcttagatgacaatcatgcagaatcaggtgctttgccaaatccatcaccacttgcctgagtcctttgttttccggaggcagaaaatacgttggcaattccccaccaacagggactctagggtagctttctgtacaatctgctcttttaggccatagaatatgctgtttgtccctatatgcatcagagtccctgccccaaatccagagaatagaatgggctacgggagaagacttgaccgaatcattgatatcactctgatttga

SEQ ID NO: 314809 - DNA, 350 bp, Homo Sapiens
  misc_feature (183)..(202): n is a, c, g, or t
cttaatgatacacagtattgcttctttctcttctcagggtttatctctgcactgagcatttatggtggtagctttccaaaattatatagatacctcttacacaatctcaagctcttacagcaagcttgtccagcctgtggctcaacacaagtttataaactttcttaaaacattgtgagttcnnnnnnnnnnnnnnnnnnnnaagctcatcaactatcattagtgtattttatgtgtggcccaagacagttcttccagtgtggcccagggaagccgattggacaccccttataacatcttagaagtttttttatcttcatatccacatagctttacttactgttggccct

SEQ ID NO: 314810 - DNA, 1040 bp, Homo Sapiens
  misc_feature (149)..(157): n is a, c, g, or t
acgatcgcggccgccgcaagcaggggcggtgtttgtatcaccacggactattgacagcccacgggcgatggcggcctccggtttaattagtcatgaagtgtggggttaggtgcactgcgggcgagaaccgctcgctgtgcggcgggccnnnnnnnnnctagggaaaactggcgctggcttgtcccgtgcgtctaccatagcgctctctccgcgcgtccgctcggcgggccatgtcccccaccgcggcttttcgttagattcggcgccgggcgggcccttggcgggaatggggaaaggtgaccctccgtttgcccatttcgcattccccctttcccgcctggcccccttcaccattaatctttctacccctttacccaggttcgcggacctccaaaagccaaggctgttttggtcgtaggccttggggactcggttttgggataacccctggcatatatgggcccattctggaggttagggagcggagtgttgacgctgggttgggcatagggcccaggctccggcccacccagtggctgtgggtgggaaccctcctggttacctccaatcagagccgatactgaggcggaggcaggtctatacttctcgacgtaagggactggaatcatccctctcttgccttcgctgtcctccgcattccaccactgctcttcaggcttgtcccggattctcaagatgtctcctttcttaaagggaagatcttcctcatcattcccattaaagtcaaagagggctcgcacatactccgcctcctcctgcctgagaatcactccactaccctgcctggatctggaaactggttctatcaacgttgtagtgtccaaatagtgtattttgtagaattccagtaaagcaggcaatgaatcaaactcttgatctcctattcggagtctggaggggctcaccccgggcggaggctgggcgggcgacggtggcaccggcgggcgcgggccgctgctgttgatgatgtagtgggagacgcgcgagttctccctcgtgccgaattcgccacccaggcc

SEQ ID NO: 314811 - DNA, 946 bp, Homo Sapiens
cgtcgaaaaaggtgtttcaccgacacttagcttatctttctcccacaccaagatttttctcccctccctgtattcgctggcccagaggttggccaccctaagcctgccggtgtaggtgaagtgcaacctatctccaccctccacctcccggctggcctgaggtccctcctccattggggcccactggttccttgccctgctgttccaggaaatgaacctgggagagaccaagacgttcacgcaagtgtcccggcgtcggagccttgacctttctgcacgggaagctctgttttcattccgtccacagtgatgcgcagggctagattgagaatcaaactaggctgctgtagcccccaaaggtacctacagtccctctaccacatcccaagttagaaagtcttgagcccttggacagcagacatgggcctgggacttaagctgtaggaggtgaggctgtagtgacaggggatgggagttgagcccgtagtgacaggggtgggaggtgagcctgtagtgacgggtatggggcggagctgagaggaatgtgtgcggcaacagacgtgagggtgtttctccaaggagttgtggatcctcttcagtgtcaggggagcgtgggcatgtgtgagggctcaggcctcgccctcctctccactgtcatgcacgctggcctgtctcaccaccttccggaacctgggcgtagaggaaatgcagggctctccctgcccctgcccactgccctctgctcctgctcctggaaggcctgggtccggttggccaccacggcactgccctggagggtaaccactgactggcgggacttcagggcaggctgaggccccctgtccacctgctggcctcccttggttccttgcagctgtgggaagggctgcagaggctcttcatcgacgcgtggtcgacgatatcccgggaattccgaccgtccgcc

SEQ ID NO: 314812 - DNA, 1420 bp, Homo Sapiens
  misc_feature (1332)..(1366): n is a, c, g, or t
gcctgggtggcgaattcggcacgagggcctggtccccttggcctgttttgtttttctttccttgggctcagcaattcaaattctagttgttatttggtggaagcagtagcccaaccccagtttaggggaaggtagcacagggcagagcactgggcactttgtttccttggccctccgaagctcactgttgcaaatacccccaagcctttgctctaggccagatcttgtttggtgcaggtgatggagaacacagatgactcgggcatgggtcttggagatcttctgttcaaagtacagtgctggcactggggcacagagtcatcggtttagccccgggctctgatagagaggtaggaggcacgttcttggtcactgttccattgcagaccagacttgctggcctgaccacaagggagtggctgggaactcacagccagcatagggacatccccctgcagccttctgacctgcaatcaaggctgggggaggggtttgcaggcaggaatatgctgacctttcaccctgccatcccatcccaaccccagctcactagccttcatatatgccttatacttggagtccaccagggggcaaaggcctgagaccccaccctgcccccaaactggctaagacagctttcagttcctgactccccaacttggtctctgccctgaagcagggcactgaactctgggctgcttctctgtgtgtaaaatgggcacatcttcctaatctgttaatggtcagtggtgtccccaaggatagtgctggcttccatggaaaccctcactcctggagattccattccattttcaagtgtacagccacagcaaggagcccgacactgatttgatcgattctgtgacacaaaccccaccaattgttaatgcaagtttttatttggctgtatatacaatttaagctattaaaatttgtacaatatttacaaattaaataatcatctgaaactgtctccaacaactcttgtaacacaaaaccaaggggaaaagacaggggcaggcaggtcccagctcctgtggtccctccttggcacagagccttttctaaactggaaagaccaggagtctggcactcctgttcctctttcccgggattaagcattcaacttcaaaagacaaaatttaagccaaaagacactagtaaggaagtaattccaattctaaacttcagaagttctgccagttgagaagtggccttccttgggcgctgggattgcagtggtcaggagcaggcgcactggcccttgcctgggagtgcggctgggcagtggctgctgggtgagacaggtcagtctcacttgagaagctgcannnnnnnnnnnnnnnnnnnnnnnnnnnnnnnnnnntccctcagtgctgcccgcctgcacccccactcccaggcattcctttccctgacc

SEQ ID NO: 314813 - DNA, 556 bp, Homo Sapiens
  misc_feature (521)..(521): n is a, c, g, or t
  misc_feature (530)..(530): n is a, c, g, or t
tggagaaagaggcggcatcccctaggccaagtggaaagaggctggggttcccatttgactccagtcccaggcagccatggggatctcgggtcagttccagccttcctctccaactcttcagccctgtgttctgctggggccatgaaggcagaaggtttagcctctgagaagccctcttcttcccccacccctttccaggagaaggggctgcccctccaagccctacttgtatgtgcggagtcacactgcagtgccgaacagtattagctcccgttcccaagtgtggactccagaggggctggaggcaagctatgaacttgctcgctggcccacccctaagactggtacccatttccttttcttaccctgatctccccagaagcctcttgtggtggtggctgtgccccctatgccctgtggcatttctgcgtcttactggcaaccacacaactcagggaaaggaatgcctgggagtgggggtgcaggcgggcagcactggagggaccctgccccgccccttncccccaggnccccttttcccctgcagctttcttca

SEQ ID NO: 314814 - DNA, 382 bp, Homo Sapiens
aaaaaattaatgcaagtttttatttggctgtatatacaatttaagctattaaaatttgtacaatatttacaaattaaataatcatctgaaactgtctccaacaactcttgtaacacaaaaccaaggggaaaagacaggggcaggcaggtcccagctcctgtggtccctccttggcacagagccttttctaaactgggaaagaccggggggtctgggcactcctgttcctctttcccggggattaaggcattcaacttcaaaaggacaaaatttaaggcccaaaaggacactaggtaggggaggtaattcccaattcttaaactttcaggaggttcttgcccggttgagggaggtggggctttccttggggggcgctgggggg

SEQ ID NO: 314815 - DNA, 996 bp, Homo Sapiens
gcagtcttttactacaggaatgtgaagatatatttaaaaatagaatactttaaaatcaggaaatgtattttgctctcttgaagaaaatagatatgatttggcaaaggataaaattagccataaatgataaagatttttttaacatctgaacttgtcattagcactaagatgagctgcttaccaggaactaagaagaattaacatcatcaagtttaaaatcgatcattttaaatatgaaggagatttaaacatctcaaccccatgaatcaattgtgctgataactatccagtctcattggatagtgggctcatcaaattgaggatattcaggagttaaagagatcagcacagaagagtgagaccaaatgctttttcttcatttcatttactgttataatgactgatgagtataaagggatttataagggcttttcatttcaaattacatttttctttaaatatccaaagttcttatgtggaaacaactgcaatttttatgaataggctggtcttgcctttaaaaatatgtttttaaagagcaaattctgcagaattaattattaaaaagactatgggactttggagaggctttcattaacattgtccctaaactacccttagttctacccagtggctcagaacttggggcaatttttttccccaggttatatgtggcaatgtctggagacattggttgtcacaacttcgggggacagtaccggcatttatgcatagcggtcaggggtgcagctaaacatcctacagtacacaacccacacatcaggagcaagaacacatccaattcaaaatgtcagtaatgccaagactgagaacccctggagtaagcctcacaaaagctcttatgacctcacagggcagctgtcttattgtaatcccaaatctacctcagtgatttccttgacattcaaaacacctgtctctactgaactttagagttcttgatttaccaccactggaatttgctctaccaatggc

SEQ ID NO: 314816 - DNA, 485 bp, Homo Sapiens
  misc_feature (270)..(270): n is a, c, g, or t
  misc_feature (402)..(402): n is a, c, g, or t
  misc_feature (418)..(418): n is a, c, g, or t
  misc_feature (457)..(457): n is a, c, g, or t
ttgcagtcttttactacaggaatgtgaagatatatttaaaaatagaatactttaaaatcaggaaatgtattttgctctcttgaagaaaatagatatgatttggcaaaggataaaattagccataaatgataaagatttttttaacatctgaacttgtcattagcactaagatgagctgcttaccagggaactaagaagatttaacatcatcaagtttaaaatcgatcattttaaatatgaaggagatttaaacatctcaaccccatggantcaattgtgctggataactatccagtctcattgggatggtgggggctccatccaaattgaggggatattcagggaggtttaaggaggatccggcacaggaggaggtgaggaccccaaatggctttttttctntccattttccattttncctgtttattaatggcctggatggaggttttaagggggnttttataggggggctttttccttttcca

SEQ ID NO: 314817 - DNA, 578 bp, Homo Sapiens
  misc_feature (464)..(534): n is a, c, g, or t
gtatgttggaacgtgccccagaatgaggcagttggcaaacttctcaggacaatgaatccttcccgtttttctttttatgccacacagtgcattgttttttctacctgcttgtcttatttttagaataatttagaaaaacaaaacaaaggctgtttttcctaattttggcatgaacccccccttgttccaaatgaagacggcatcacgaagcagctccaaaaggaaaagcttgggcggtgcccagcgtgcccgctgcccatcgacgtctgtcctggggacgtggagggtggcagcgtccccgcctgcaccagtgccgtcctgctgatgtggtaggctagcaatattttggttaaaatcatgtttgtgactgtaaccatttgtatgaattattttaaagaaataaaaatcctggaaagagcaaaaaataaacaaaccaatgtgcaacactttaagtcaatagaaannnnnnnnnnnnnnnnnnnnnnnnnnnnnnnnnnnnnnnnnnnnnnnnnnnnnnnnnnnnnnnnnnnnnnncgtccggacttgggccagtttggcgtattatccggggcccccct

SEQ ID NO: 314818 - DNA, 1054 bp, Homo Sapiens
gtgggtacggtcccggaatctcgggatatcgtcgacccacgcgtccgagcagctcaagacttgttgcctggctgtggccacagatttccaggaatgaaagtgcagcagccctggctgctgcagccactcgacatttacaagaagctgagcaaaccaaaaacagtggcagtgagcactggtggaagatccatgaggcatgcatgcttgccctaggctcagtgaaggccatcatcactgacagtgtgaaaaatggcaggattcattttgacatgcatgggttcctgaccaatgtcatccttgcagacctcaacctctcagtgtctcctttcctcttgggccgggcactttgggctgccagtcggttcactgttgctatgtcccctgaactgatccagcagttcctacaggcaacagttagtggtcttcacgagacacagcccccatcagttcgaatttctgcagtgagagccatctggggttattgtgaccaactgaaagtctcagagagtacccacgtgctccagcccttcctccccagcatccttgatggcttaattcacctagcagcccagttcagctcagaggtcctcaacctggtgatggagaccctgtgcatcgtttgtacagtagaccccgaattcacagcaagcatggaaagcaaaatctggcccttcacatcgccattttcctaaagtacagtaatgatcccgtcgtcgcctcactggctccagacatcttcaaggaggctgtcccagattgaagcctgtcagggcccaatgcaaatgaggctgattcccactctggttagcataatgcaggccccagcagacaagattcctgcagggctttgtgcgacagccattgatatcctgacaacagttgtacgaaatacatagcctcccctttcccagcttctcatctggcaagcttttcctgctgtggcacagtgtacccttcacacagatgacaatgtcaccatgccccagaggcatgatgagcacggccacaatggactgctgcatgtgatgcaagtggttagccacctcctggaccc

SEQ ID NO: 314819 - DNA, 710 bp, Homo Sapiens
  misc_feature (20)..(20): n is a, c, g, or t
  misc_feature (404)..(421): n is a, c, g, or t
acatacaatggaaatcctanttggccctccaaaaagtcaaggcagattccccttgaatgttgaagtaagaaaaaataaaaatttcaagtaaggagattctgacacatgctacaacatggataaacatcaaggacattatgctaagtgaaataaaccagtcacaaaaggacaaatagtgtatgattccactcacatgaggtacttagtcaaatccacagagacacgacacagatagtgattgtcagggattaaggggaggaagcatgaggagttgttgtttaatgaatacagagtttcagtttcacaaaatgaatgaacggccgtgaaaactgcatagttatttgagtgtatttgatgctattgaactgtatacttaaaatagttcaaatggcaaattttacgtnnnnnnnnnnnnnnnnnnaccacgatttaaaaatgatttagtaaaaaacttaaacatatattgatggtacttatccctgatgaggcctgggaacagtattttaatcaaacacagcaacctcctgtaacaaacacatgaatatttctactaactgggataaataatgaccataatagctgcacttcacttaaagggatactgtgccaccatatgagctgatgaacacctctctgtttccagagccctgtggattccagaaatgtgtagagagacttgtagactgtgtcacatcatgtagacattccat

SEQ ID NO: 314820 - DNA, 822 bp, Homo Sapiens
  misc_feature (724)..(772): n is a, c, g, or t
agatttatttcttgcacttcatttttattattgactgatattttacatggtattttaaattccttattttaaaaaaatgtttgtcttgcacatagaattcagttgatctgtttattttgtttccaggaacctagttcaattcttttgaattctcataacttagctggacattgtaaatttaaaaatgaataaaacttcatggttactttgtgcacattgattgctgctaagccgacgagtgcctctcctgagcactccacacccctctccgtgtctcgcttcctctgccgccccatagtggccatcctggccttgggtctccccacagcgggttctctgaccctgcctgtcctggtcccgtttagcaaatgctctaatcctcttaggccagcacagcctcagcaaagcagagagagaattagatcagatgttgggggaagggagcacgtctgtgcgtgtgtgcgggggacagacttccaggatgtaatgaaagctcctccttatctagccgaccctggtagtaaaatacacacaaaaccaccggaacttcacaccagtcagactctgacagtgtgggaagagtagggaggaatctaatccatctattgtaggcgagggagcccctgtgcacattctgggggcatgggggagaggtggtccagtctgactgtagattcagaatcacatcctgggctctagggaagggacggtgtgtgctacaggnnnnnnnnnnnnnnnnnnnnnnnnnnnnnnnnnnnnnnnnnnnnnnnnngggccgcggattagtgtgctaatgtatggagatggagtgcgcctggtccc

SEQ ID NO: 314821 - DNA, 670 bp, Homo Sapiens
tttgcatctttctgtagatttacttcttgcacttcatttttattattgactgatattttacatggtattttaaatttcttattttaaaaaaaagtttgtcttgcacatagaattcagttgatctgtttattttgtttccaggaacctagttcaattcttttgaattctcataacttagctggacattgtaaatttaaaaatgaataaaacttcatgggtactttgtggacattgattgctgctaagccgacgagtgcctctcctaagcactccacacccctctccgcgtgtcgctttctctgccgccccctagtggccatcctggccctgggtctgcccacagcgggttctctgaccctgcctgtcctgggcccgtttagcaaatgctctaattcttttaggccaggccagcctcagcaagcagagagaggattttatcacattttggggaagggaggaccgctgttgcttttttccggggacaaactttcaggatgttaagaaagctccttcttattttcccacccttgtagtgaaatccacaaaaacaccggaacttacaccattagactttaccgttgggagaagtggagggatttattcctttttgtggccaagagacctgtggccctttggggcatggggaaggggggcccctttcttttaatta

SEQ ID NO: 314822 - DNA, 903 bp, Homo Sapiens
cctccattccagcttcctagagtctgggtctgggtttggccgggaggggagaagggaactggccctggcgctggagtctgctcagccacaccactagctggagggaggccacagcaagccccgccagagtctgaagggcctcgaaaggtgattcccagcctgggccaggagcactctcccagtgcagggctctggtctttgaagtgtatgggcccaacaccctgctcacacagagtggctgcccacaaggcccagccatcagcagggctctgccgacccatctctgtaaggcttctcttccacgtggctggtctgctccagaagccactgatgctcggactcactcactgtcagtctgagggtcacctcctgaaaaacactgctcgtagccacctgctcaaagtgaagtttctggaacatccggatgcttggttcatttccttgcccaattttagcctcaaacttggtcagacctagcgtggtcactccgtaagacagcatcgcgagaacggcctcagtgccaaggcccttacccctgcagctgggctctgcaatcatgacctcgatctcccccaaggtgaggtcttctagatctgtgaggaagaggttcacatctcccaccatgcagctctcttcggtggcgcctggctgggcctgccacttctcggcatccagcacaatgaaggtacacttgtctgcatcttcctgccagctgcactgcatggcatactcctgctccagggtcagcggctccgaggctgtcaaacgctgcagctcctctgatttcatccactcgtggtacctgggcacatgctccgaggtgtagggtacaaggaccaccttcttccccagcagcaaggtgttctgattcaacctcatggtagcagcctaccaccgacgaaa

SEQ ID NO: 314823 - DNA, 626 bp, Homo Sapiens
ccttttttttctgcgggggacgatttcgtcggtggtaggctgctaccatgaggttgaatcagaacaccttgctgctggggaagaaggtggtccttgtaccctacacctcggagcatgtgcccagcaggtaccacgagtggatgaaatcagaggagctgcagcgtttgacagcctcggagccgctgaccctggagcaggagtatgccatgcagtgcagctggcaggaagatgcagacaagtgtaccttcattgtgctggatgccgagaagtggcaggcccagccaggcgccaccgaagagagctgcatggtgggagatgtgaacctcttcctcacagatctagaagacctcaccttgggggagatcgaggtcatgattgcagagcccagctgcaggggtaagggccttggcactgaggccgttctcgcgatgctgtcttacgaaacttcactttgagcaggtggctacgagcagtgtttttcaggaggtgaccctcagactgacagtgagtgagtccgagcatcagtggcttctggagcagaccagccacgtggaagagaagccttacagagatgggtcggcagagccctgctgatggctgggccttgtgggcagccactctgtgtg

SEQ ID NO: 314824 - DNA, 704 bp, Homo Sapiens
aggttctgcgcgggcgcggaagacgggcggcgcgtggcggaaggcaggcttgctcctcggggtgggggagggtatccggcttaagggggctgcggtggacaccacttcttaatgtcgggggtcttcgcggcgctcacctcggctcctagggttcgggacggtacgcaccagccaccttcgcgccgaaggcggtagggcgccacggagaggaaccgctctaggcacgtaaggcctcgtgaggttgcgtcgcgcgcggagcactctgggacttgtagttctggagatggagcgagctgtgccgctcgcggtgcctctgggtcagacagaggtgttccaggccttgcagcggctccatatgaccatcttctcccagagcgtctcaccatgtgggaagtttctggcggctggcaacaattacgggcagattgccatcttcagcttgtcctctgctttgagctcagaagccaaagagggtaagaagccggtggtgactttccaaggtgggtatacctgtggagtctggcttcaggactttgggtgggattggctcactcagttctgcatttctctttagcccatgatgggcccgtctatagcatggtttccaccgatcgacatctgcttagtgctggggatggcgaggtgaaggcctggctttgggcggagatgctcaagggtacggagtcgggctcgggggctggggt

SEQ ID NO: 314825 - DNA, 1669 bp, Homo Sapiens
  misc_feature (297)..(298): n is a, c, g, or t
  misc_feature (301)..(304): n is a, c, g, or t
  misc_feature (306)..(307): n is a, c, g, or t
  misc_feature (310)..(310): n is a, c, g, or t
  misc_feature (315)..(318): n is a, c, g, or t
  misc_feature (320)..(322): n is a, c, g, or t
  misc_feature (326)..(329): n is a, c, g, or t
  misc_feature (333)..(333): n is a, c, g, or t
  misc_feature (336)..(341): n is a, c, g, or t
  misc_feature (343)..(347): n is a, c, g, or t
  misc_feature (372)..(400): n is a, c, g, or t
ccttgcggagaaagaaatgagttcttcccagggagagtatcctttgtggttctcgcgaaaagaaaaaaccccgccctcctttagggcgggtgtaaaatttccccgcgttttgtcacgccggttccattaaatcccgggttagccctggcttttcgaaaaaataattgcgccccccctttagggggacccgggagattttccccctttgttccaagaaaactgggtccgggaaccggttaggccagggggcattccattccctttttttccgcccccggacataaatgcctggagggnnttnnnntnnttnttttnnnngnnntttnnnnttgnttnnnnnntnnnnnttaaaaagcctgaaactttattgtnnnnnnnnnnnnnnnnnnnnnnnnnnnnncactctaaaaccctgagctggctgggggtgtcgtcagagatcagaaggacagggagaaggctcggtaacccaggttggtgaagacatccacccggcagctgttgcctgcagctgtcaggaccttgcactcaggcgcggcaggctgctggttgaggctgaggctgagcagccctggggaggagcccaggcacctgggctttcagctccccgttcagctgccactggttgacgcagcggccctggccagctgacagaatcaggtcctggtagaaggtgacgtgcttctgtggcgcccggatggggaagatggtggtgggtgtggaggatcggaggtgccagagggtgagggctgggccccctccacagaccatccagtcggaatcagttgccaaacatccaatccagcgcccattgtggggcctcgagcactcctcgtgcttatagacctcgatcgtctggacctccttggctgtgcgcaggtcccaaagtcgaacagctccatcctcgccacctgacagcacctctgggctcctttcccgcagtgccaggcagtggatgtagtctgtgtggccccgggaggaccctcgtgaaagtcccagtttcaaggtccatagtgtgcaactgacagtctcccccagccaggatgagggaattctccttggggaccagcagcaaagcgttgatctcaggcacttccaggctggtcctgtatggaggctgacgacgccacagctccttacagcccttcttgagcatctccgcccaaagccaggccttcacctccccatccccagcactaagcagatgtcgatcggtggaaaccatgctatagacgggcccatcatgggcttggaaagtcaccaccggcttcttactttcctctttggcttctgagctcaaagcagaggacaagctgaagatggcaatctgcccgtaattgttgccagccgccagaaacttcccacatggtgagacgctctgggagaagatggtcatatggagccgctgcaaggcctggaacacctctgtctgacccagaggcaccgcgagcggcacagctcgctccatctccagaactacaagtcccagagtgctccgcgcgcgacgcaacctcacgaggccttacgtgcctagagcggttcctctccgtggcgccctaccgccttcggcgcgaaggtggctggtgcgtaccgtcccgaacccttccgccacgcgccgcccgtcttccgcgcccgcgcagaacctcgcggctgtgcccgcctaaagcca

SEQ ID NO: 314826 - DNA, 1529 bp, Homo Sapiens
ttgccatataaaaagaggtttatttcgatgttagaatcatctagtgatcgaacaagattggacatgaacccacccaggcccagggctgggctgccgagcagctgccgctgacatctgtgtggatttgacatgcaacagggagtagccacgtgctcgctcgctggccactgtgcttcgaaacgtttttccagcggacggctgtgattgcagttttcagatgtgctctggcctctaaggacgtggggccgaggcggtgtcctctgtataaaaagtgctgtcctgggagcttcccaacggacatcttggggcatctgagtgattcccagggagggcagcttggccttcctcaggctaccactgcagccaccgccggccattctcaccagcaatcaaccaaaaagcatcagagcctctgtgaacctggctgtgatggtaagaaccaaatgtttcctaagctaagacttgtatgcagaacacagaaaactgcagttaggaacaccctacaaaattgaacaacagtattttccaaaaatatcttttacatcactttaaataatttacaaaaagctacaaaaatcatatttaccaggacacgtctgttaaataaaagtttcatgttggtgtacatatatacagggctatgtataatagactgtttcccttccttgcagccacggaaccatcacacacacgcacggctacgccgctttccacgaatgcacgcaacccaggacgcgaacccacagctcgagggcttagaccttcactactgagctgccgccactgtcctccgtggaggtgtcgctgaagtcactggcgtcactgcccaaggcgtcctgctcctggtcatccctgttgacccttcgtcgatacctcaggtctaaaatgctttcctccgagcccgagctcctcctgtcatgcaaactcagccctgcctgtgccttcctggttggccaggggccgccgtccttctttgccagcaagtgtgggcttccaaagacagggctgggtccggcctgggcctccctgaaggccgagaaggaggggccctgcagaggcagccccaggtgggggctgaagaggccagcctgcctgcccccccaggagacaccctttccaaagtggaagagctgggtggacagcagcggcgagaagcccgcaaggggcaggctgggcaggccccgggcggggccctcggaccccttgtctctctcgctcccgacgccccccctccacactgcatctctgccttcggagcgcagcacccacgggctgggcagccgactctggtgggcgaagtcgctccagggcggtgtgcggtcggcctgggctccagcgtccctctccgctcccgggctgggggtcaggaagctcgggctcccgcagcccatgtgaaaggttcctctggcgcctcctgcctcggtgcccgctgtggcacagctgggcagctgaccaaaagcacttttggcagcaggctcagcccctcgtgggctctggtctttgtgaacgtaaacatttctcctgctcac

SEQ ID NO: 314827 - DNA, 968 bp, Homo Sapiens
ttttttttcagccaatcacaaaaaacagactttattgaagtatttagcactaaaccccacacaattccagctctgtagctgaggacacagccacttggcaatggcaccaggtgttatacaagaccaataagttaatgtaaaggacgcttaggtgtggagggccagtgctcagccgtctcctggctcagaacaaggcactctgggctccagttaggacactgagaggccagggaaaccaacatgccctggagaaaggggcttagagacaaaccggaaaagcacagcatccaagcagggtattcacgcatggggggcagagtaggcccaaaagttgggggttgctgatgcggtaagagcacagtgagagatatgccaggtgcatcctttcagcctcgtgcatcctcccccaggttccttagactttccagtagagagacctgcgcctcttataggtcacacaccagagttcttgaacccttctgcatatattcacagtctgttccagtcccaggtacacatgggggcagagagttctgcacaggtggagtcagaactcagctctccctacctctccatagcctcaattcagttgctttctcattgaagcgagtgtcccctgacttggaacgcaaagaaggccctaggatgagaacccagggacatctgggtgtgtctatagcacaggcagcttccagacttgctccagtcgctgcagctgggacaattaatgaatgcccccaaagaaaattcagcatctcatcagcccttgggagtgagtatgtccatgtttgtataaataaccaccttctcagagcagaagcatagctggtggggggagtaggaactgtgactccctctcccaaccagaacatgccacaaaagtggtgcctttccaaaaccacttgtaaagtattggtttttgggactatgatgaaaaaacgttagaagggccaggtgcggtggctcat

SEQ ID NO: 314828 - DNA, 242 bp, Homo Sapiens
catagtcatttttattgactattttcacgttatttttaattattatttaccatttaatagtatgtctttatttttataaaggacatttctgacaaatagaacaatgtagtgatcaaattattctttctattggtatgcttttgctgcttatgtcaaataatatgtattggagattctatacagaaagattatatacaatagaatacctcacataatcgtgattaaagggtcccttgtcttgt

SEQ ID NO: 314829 - DNA, 644 bp, Homo Sapiens
  misc_feature (76)..(77): n is a, c, g, or t
ggttaacacacacaagggtttccagtctgacatttcatggcgtaggtaaaaagacacttttaacttacagatatannttcagcatgataaaaaactacaacttttatttttaacagaagtcactggttttaatttttacacattttaaaattactgtgataaaaaataatgaaaaagcttcttaataatgccatacacagtataatatagatttgtccccattatatagcatttaatatacaaaatagaatattgacacacttgaatctatatgtagttaagcaagttatttgaggagggtattttcatacagcctttcatcagaaaataaaatcctttcagacattttctagagagaagcaaatcctttcctgaaatcctggtcactaatcctgggtggaccaggttgcttgaaaatagtctgggaaattacgagactccacccaaagggtttaaagtgtcctccttacacttttatttcccttctgacactaaaaccagacacacacacaaaagaacacattcacctacagctacagtcagggagtgaccagccaagatggaaatctcactgaaggctaccatggttctggaagtttgacagatcaatgtattgtataacaatatttttcattccatggtga

SEQ ID NO: 314830 - DNA, 363 bp, Homo Sapiens
tcaccatggaatgaaaaatattgttatacaatacattgatctgtcaaacttccagaaccatggtagccttcagtgagatttccatcttggctggtcactccctgactgtagctgtaggtgaatgtgtttttttgtgtgtgtgtctggttttagtgtcagaagggaaataaaagtgtaaggaggacactttaaaccctttgggtggagtttcgtaatttcccagactattttcaagcaacctggtccacccaggattagtgaccaggttttcaggaaaggatttgcttctctctagtgtctgaaaggattttattttctgatgaaaggctgtatgtattctattttgtatatttgctatttggg

SEQ ID NO: 314831 - DNA, 1125 bp, Homo Sapiens
  misc_feature (459)..(459): n is a, c, g, or t
  misc_feature (1016)..(1016): n is a, c, g, or t
gggagtgacgcgaggcgtagcggaagttactgcagccgcggtgttgtgctgtggggaagggagaaggatttgtaaaccccggagcgaggttctgcttacccgaggccgctgctgtgcggagacccccgggtgaagccaccgtcatcatgtctgaccaggaggcaaaaccttcaactgaggacttgggggataagaaggaaggtgaatatattaaactcaaagtcattggacaggatagcagtgagattcacttcaaagtgaaaatgacaacacatctcaagaaactcaaagaatcatactgtcaaagacagggtgttccaatgaattcactcaggtttctctttgagggtcagagaattgctgataatcatactccaaaagaactgggaatggaggaagaagatgtgattgaagtttatcaggaacaaacggggggtcattcaacagtttagatattcntttccattttgttcttttccctcaatccttttttatttttaaaaatagttcttttgtaatgtggtgttcaaaacggaattgaaaactggcaccccatctctttgaaacatctggtaatttgaattctagtgctcattattcattattgtttgttttcattgtgctgatttttggtgatcaagcctcagtccccttcatattaccctctcctttttaaaaattacgtgtgcacagagaggtcacctttttcaggacattgcattttcaggcttgtggtgataaataagatcgaccaatgcaagtgttcataatgactttccaattggccctgatgttctagcatgtgattacttcactcctggactgtgactttcagtgggagatggaagtttttcagagaactgaactgtggaaaaatgacctttccttaacttgaagctacttttaaaatttgagggtctggaccaaaagaagaggaatatcaggttgaagtcaagatgacagataaggtgagagtaatgactaactccaaagatggcttcactgaagaggcattntaagattttttaatcttgtcagaagatcccggcaacagaacactgctctttttgatttaattgtactttttgcctgggatatggtttttggaccatggctgtacccttc

SEQ ID NO: 314832 - DNA, 829 bp, Homo Sapiens
  misc_feature (188)..(188): n is a, c, g, or t
gtttggggtgggagaaaatccccaaagcccctttagttccattgtccccaggggttttttccttggggaaaccccggtctagtggccccatgttccccctttcccctcagtgggcgccccgcgcggccaaaaagaaatggttttaagaaagttttcttagagggccagaggcgggcccgccatttttnaattgggatggaggtggtctctagtgggtggtattcatttctgcatgtatagctttattaattgctaatgaaaattagaacttttctgggatcttctgacaagatttttaaaaaatcttaaaatgccttttcttcagtgaagccatctttggagttagtcattactctcaccttatctgtcatcttgacttcaacctgatattcctcttcttttggtccagaccctcaaattttaaaactaaactgttgaatgaccccccgtttgttcctgataaacttcaatcacatcttcttcctccattcccagttcttttggagtatgattatcagcaattctctgaccctcaaagagaaacctgagtgaattcattggaacaccctgtctttgacagtatgattctttgagtttcttgagatgtgttgtcattttcactttgaagtgaatctcactgctatcctgtccaatgactttgagtttaatatattcaccttccttcttatcccccaagtcctcagttgaaggttttgcctcctggtcagacatgatgacggtggcttcacccgggggtctccgcacagcagcggcctcgggtaagcagaacctcgctccggggtttacaaatccttctcccttccccccc

SEQ ID NO: 314833 - DNA, 1542 bp, Homo Sapiens
  misc_feature (1020)..(1060): n is a, c, g, or t
ggcatgcccatttattcaacatgattaggtaactgtatcatatatgcaccatacaggaatatcaagtttttaaaaaaacagaacactgagtattaaaaaggtattgtggccttaattaaatccttgattcagaaggcacttcagtaactttcagtgcttcaaagtcattaacatcatcactgtacagtaatgaagaaaaaatttgtaccatgtgcaatttccagtatttatgcaagaaaaccttattttaggcatttttttctttctatacaattaaaataaaataagcattagtatgatttttacaaatattgtttattttaatgaagctggtacagacaatgtccatttaaaacccatatcccaggccaaaaagtacaaataaaatcaaaaagagcagtgttctgttgtattcatttctgcatgtatagctttattaattgctaatgaaaattagaacttttctgggatcttctgacaagatttttaaaaaatcttaaaatgccttttcttcagtgaagccatctttggagttagtcattactctcaccttatctgtcatcttgacttcaacctgatattcctcttcttttggtccagaccctcaaattttaaaagtagcttcaagttaaggaaaggtcatttttccacagttcagttctctgaaaaacttccatctcccactgaaagtcacagtccaggagttaagtaatcacatgctagaacatcagggccaagttggaaagtcattatgaacacttgcattggtcgatcttatttatcaccacaagcctgaaaatgcaatgtcctgaaaaaggtgacctctctgtgcacacgtaatttttaaaaaggagagggtaatatgaaggggactgaggcttgatcaccaaaaatcagcacaatgaaaacaaacaataatgaataatgagcactagaattcaaattaccagatgtttcaaagagatggggtgccagttttcaattccgttttgaacaccacattacaaagaactatttttnnnnnnnnnnnnnnnnnnnnnnnnnnnnnnnnnnnnnnnnngaatatctaaactgttgaatgaccccccgtttgttcctgataaacttcaatcacatcttcttcctccattcccagttcttttggagtatgattatcagcaattctctgaccctcaaagagaaacctgagtgaattcattggaacaccctgtctttgacagtatgattctttgagtttcttgagatgtgttgtcattttcactttgaagtgaatctcactgctatcctgtccgatgactttgagtttaatatattcaccttccttcttatcccccaagtcctcagttgaaggttttgcctcctggtcagacatgatgacggtggcttcacccgggggtctccgcacagcagcggcctcgggtaagcagaacctcgctccggggtttacaatccttctccccgacgcgtggtcgacgatatcccgggaattccgaccggtaccagcctgctttatacacaggctgttcatatcctaatgccttc

SEQ ID NO: 314834 - DNA, 1923 bp, Homo Sapiens
  misc_feature (115)..(205): n is a, c, g, or t
  misc_feature (587)..(587): n is a, c, g, or t
  misc_feature (595)..(595): n is a, c, g, or t
  misc_feature (1195)..(1251): n is a, c, g, or t
agtgccccaccccaaagggcatttcgcaggggtttcgcttggtagacagggtaatggccccattttggccttgccgggttgggcccgcgggcccaaagggaatggtgtagaaagnnnnnnnnnnnnnnnnnnnnnnnnnnnnnnnnnnnnnnnnnnnnnnnnnnnnnnnnnnnnnnnnnnnnnnnnnnnnnnnnnnnnnnnnnnnggaaatgaacgtaaatttattgaaactggttttggggcaggggatgggtggacagctgggggttttccaaagagaactgagggaggagccagcgcccggccaggtgggagcgggtgcctggccacagaccctatctcaggcccagcttcttcttttccttctgcttcttgcggaccacgtccagattccggtccttccacatgctcttgcgaacttgatggggcgcgagcccacatacttcccattcatctcacgcatggcgcgcacgtagtcgctggggtccttgaagctgacgaagccgtagcccttggtcttgcctgttcgcttgttacggatcaccttggccttaaggaaggatgggaagcggctgaaggcgcgttcnaagatgtnatcgttcacctcattgcccagatccctctatctattagatccggaagttatctgcatcccactccagcaggctggggtcctcccagctgctccctgccgctgtgcgaatgcccgtttcaatttctctggcttccccttcttcttgtcttcacccaggggctctggggccctcaagagccatgaggcctggggggtggttctggccgagggggccggggccgaggacgcagggacaggagttcaggaatgcgcagggggggcaggaggccgcggacgacctccaacgggaggggcaggggctcaggctcgggcaatggcatggccagggccagcggcaggctgggcccaatgactgcagggccagctggggcacctcctgcccccacggccacagccgcgctagcctcctccagcccagccgccgccgccaccactgcctcttccttctctttcaggcccaaccccaggcctaggcccagctctcggggtgctgctggctcttccagagggggcctcagtgcagccatggagcccagcgggggccctggagcccgagccattggtggcagcatcatgggtggtccagggggcccaggcagnnnnnnnnnnnnnnnnnnnnnnnnnnnnnnnnnnnnnnnnnnnnnnnnnnnnnnnnntgctgcagaggagagagcggaatctgctctctgtagcacgtgggggacgaaggctggacgcaggataggggccctctggggggccacagctgcccgccgcaggaacatggcttctcgagcctctgggctgtccaggtgactccgatcaccagggccaaagccaacagggcctacaaaaggagggccacccaccatgggaggaactactgtggctgcagcagctgctcgggcctccagagtctgctggacctgctggtatgtgttggtcgcgataattgggcggatcacaggagccgctgggacctgcatcgcttctactgtggggaccgtggggacagtgggcaccgcaggcacagcagttgggattccaggtactggagcccccagaacttcctgctcaaacagggccatctccgcctccatttccttcaagcgttcctcgccgcttttgcccgggatgccagcgccaggacccgggaccacgggtcctcctgcacccgggagtcccggggctggccccgccccagccatcgctgccgtcgtcgctgtcgccgctactacagtctctgcttagccgccgccgctggttctgctgtctactctcccccttcgtccgggtgggctcccgagcgacgcgtgggtcgacgatatcccgaaattccggaccgtaca

SEQ ID NO: 314835 - DNA, 1297 bp, Homo Sapiens
cagcgagaggcattacactatgctaaaaattttcagagcatttgccctaaatcatcagacattcaggttttgatgggaagccttgtgtacctgagacaagggattgagaactcaccatatgttcacctacttgatgcaaaccagtgggctgatatctgtgacatctttacacgggatgcttgtgcccttctggggctcttcgtggagtcccctctcagtgtcagtttctcagcaggttgtgtggcgctgtcagctttaattaacatcaaagccgtgattgaacagaggcagtgtactggagtttggaaccagaaagatgaattacctattgaagtggaccttggtaaaaagtgctggtatcactctatatttgcctgccccattcttcgtcagcaaacaacagataacaatccacccatgaaattggtctgtggtcatattatatcaagagatgccctgaataaaatgtttaatggtagcaaattaaaatgtccctactgtccaatggaacaaagtccaggagatgccaaacagatatttttctgaagagataactttagtttgcaatttgtaagtgaaactgaatcgtgggtgcatttcagaagagaacgttccatataatgcagctaaccaaggactcctgtgtttctataagctaatgctccagaaactttgccaacctgttagtgtacacacactgaggggagtgctcccggtgaatattatcatagggctttatcatattcttggtcttcatttctgatcaagtcaatacaccagcagttgtcattcaatgcaggtttttgtacttaatgtatatggtgattttctttactttttaagagccagataacggaaattgacctccccgccagtgtgtttaatagttcctcctgcttttacttttgtcattttcttgataatcgtaagccttgagagtgtttgtgaaaaagttttatttcctgttatgtatacataattaaagtgaaaattcttcagaaaaagtttgataaattgaattgtggttatgaaactaatttgcatttttatttgcttaagaaagaaagctgtgatagattccagatatgctttttgatgttttcctctgctccagctccaagaagtcagcacacctgcattttagctcagcatgcagtcccagtaggctgcttgtttaataatttcattgtttaactggctggtgtgagaattcttccgttaagcatagagtggaaggagtactattgtttggttgggtttttgtttgtatgatacttcctgggttttactgtcgaca

SEQ ID NO: 314836 - DNA, 436 bp, Homo Sapiens
  misc_feature (353)..(353): n is a, c, g, or t
  misc_feature (392)..(392): n is a, c, g, or t
  misc_feature (406)..(406): n is a, c, g, or t
  misc_feature (418)..(418): n is a, c, g, or t
aagttcaaaagtacatttatttaaaatgtgggcaagatatcaatataaaagaaaacagagtataagaaataaaaataatcaaagtacaaaacatttcaaatctttaacatccataatttagagatagcaaggtctttatttacaccattttatttctagttgaagtcccgtaacagttttgtgaaaacatttaaaaacctggcaaatgaatcataaaacctaatgtgggctcttaaagtcatataatacaaaacataatttatgtttcctcagaataaaattgcacatcttaaaaagatgcagtatatttattatatctgtcttcctgcttcacagtctggatcccccagggnaagcagctgggaaaacagggccatgtgaagggaagcgcngggctccctcgccngcccggcagccngccccgcaccgcggggtt

SEQ ID NO: 314837 - DNA, 966 bp, Homo Sapiens
  misc_feature (53)..(173): n is a, c, g, or t
  misc_feature (213)..(213): n is a, c, g, or t
  misc_feature (239)..(239): n is a, c, g, or t
gtggcgtctggctccgttctactgctctatgttctggttgtcggtttcgttcnnnnnnnnnnnnnnnnnnnnnnnnnnnnnnnnnnnnnnnnnnnnnnnnnnnnnnnnnnnnnnnnnnnnnnnnnnnnnnnnnnnnnnnnnnnnnnnnnnnnnnnnnnnnnnnnnnnnnnnnnaagggtacgtaccgggacgacgtcgtccaccaccaggtangttgcgcacccccggttgagcacggnccccacccgtattgtgcatgtagagaagggttcacaggtgccagtggtctcgactcccgactcagtgagcacccactcgcctccgagttgctggatacaggcattgaccactgcgccagcctgaaacactagtgacaagtgaggaggcctagtccattgagtatcagctagggctacaaccttccaaatcggtgaatcaggtccagagagggacaagtgccccagggttacacaatcatttgctgaagcagaggttgctgccatctttggcctcacccatctggaccacttccttgggcactgagtgacatagctccagcaggtctggattctgcagcttggtccttatcttctggctcagggtcagctccgggctcggcctgtgctgctgcagggcctccaggaccgagcgggccttctcaaagggggggatcttcagccggtacaggatctctgcccgcagatagttgccaatgccattgaagaacctctggtccaggagggcctcgcagatgggccggtcaaaggccttatccgctaggtttcgtagcacattctccctggaggaacacggtctgggtgcgtaagacccatccccaccctccatgggatggggagaggggctcagagaacctgtttctgggtgcaaggggaaggaaactgggagttacagttcctcttctccctgcccccgttttcctatctgttaaatgggaacatcaaggtg

SEQ ID NO: 314838 - DNA, 586 bp, Homo Sapiens
tgaaacacttattgcaagtgagagggcctagtctattgagtatcagctagggctcgaactttcaaatcggtgaatcaaggtccagagagggacaagtgccccagggttacacaatcttttgctgaagcagaggttgctgccatctttggcctcacccaactggaccacttctttgggcactgagtgacatagctccagcaggtctggattctgcagcttggtccttatcttgtggctcagggtcagctccgggctcggcctgtgttgctgcagggcctccaggtccgagtggtccttctcaaaggggggtatcttcagctggtacaggatctctgcccgcagatagttgccaatgcctttgaagaacctctggtccgaggaggcactattctccctggaggaacacggtctgggtgcgtaagacccatccccaccctccatggtatggggagaggggctcagagaacctgtttctgggtgcaaggggaaggaaactgggagttacagttcctcttctcgctgcccccgttttcctatctgttaaatgggcacgtcaaggtgccgaattcctgcagcccgggggatc

SEQ ID NO: 314839 - DNA, 591 bp, Homo Sapiens
  misc_feature (346)..(458): n is a, c, g, or t
gggctgcaggaattggcacgaggaatttttctggcacttcctgggttgtcttcctttctcatatttctacaactttacacctgttctttcctcctctgtagggttatttcaaatgtcactaaaagtaacagctcttctgctatcaccagggatgctgcattttctgtaggattaaatccctaatcttaatcaaaaagtgatgacacatttcataatgaaatgtgacctgtctttcctcaattctagcaccaccaccacctcactgcctgctgccttgcacaccctacatatcacactccgtgactgtacttaagagaacacattctggctgggcacggtggctcannnnnnnnnnnnnnnnnnnnnnnnnnnnnnnnnnnnnnnnnnnnnnnnnnnnnnnnnnnnnnnnnnnnnnnnnnnnnnnnnnnnnnnnnnnnnnnnnnnnnnnnnnnnnnnnnattaactgggcatggctgtttgtccctgcagtcccagctccacagaggcttagtaagaaaactgccttaacccaagatatggaggtttcaagtaacccaagatgccaccattcacttccaccgtggcaacaag

SEQ ID NO: 314840 - DNA, 758 bp, Homo Sapiens
  misc_feature (725)..(725): n is a, c, g, or t
  misc_feature (730)..(730): n is a, c, g, or t
caaccatcgacactatccatttctagaactttttcgtcatcccaaacagacgctctgtattcataaaggtaaactttgttgtgctctctgtctgtgtgaatttgcctattctaggggcctcatataagtgtaatcatacagtatttgtctttttgggtctgtctgatttcacttagcgggttttcagggttcattcatgttgcagcatataacagtactgcgttcctttttctggctgaataatattccactgtatggatagaccccattttgtttattcacacatcatttggacatttggattatttctggtttttggctattatgaacaatggtgctatgaacagttgcgtacaagtttttgtgtgaacatatgttttcaattctctcattatatacctaggagtagaattactgggtcatatggtaactgtatatttttgaggaactgccaaactattttcccacgtccatgcaccatttcacattcccaccagtaagtaagagggttccaatttctgcgcattcttgccaacactagttattatctgactttctggttataatcattctaatgagtgtgaagtagcctctggtgtcatttggatttgcatttctctgatgagtgatgctatcaagcacctttgctgggtgctgttggccatatgtgtatgttccctggagaagtgtctgtgctgagccttggccactttttaaataggcgntttgncctttttaatactgagttgtaagagttc

SEQ ID NO: 314841 - DNA, 1707 bp, Homo Sapiens
  misc_feature (893)..(893): n is a, c, g, or t
  misc_feature (1692)..(1692): n is a, c, g, or t
gtttgaaaaggctaatccagctgaagattttgttgttgttgttaaaccccatgttttctcctaactctttttatttttattttggaggactctatctagacttaattttagcataacaagtgacagggttagttagcctgttgtccttacaccattttctggctaatacagctattaactattgatctgtctattcacgtgccagttcctaatggttttacatagtgtaatctgcacttcaaaatagcgaagggaagccctacctcattattctacttttccagaattctcctggctattccaggctgcatgtttaccttaaccttccctgtgatgtcttcatgccgttgtcttcttatgcaagaataaggtacgtctttccatccactcacgtctatttaatttgactttgcattacacagaaagctggtcttggtctgtctacctcggcatctagttgtcctcactgccccctagccgaccccaccccatctgactgactaccccatcacagagtacttttatttacgttttgctctgcctaatggttacttgatactgtcacgccgacagtgtccagttcagtggtctttgcagttgaaatgctcccgtacacactgtcttgttaaaaatgccagtaagttcatacaaacccagcttgcacccaaggtcacattcagagagcgtagggctgggatgggttgttttccaagcttctgccactgtgtggctagctcttcccactgggaagttctgtgtacccggaatgtcggagtggagtcctgttctagtgtccagcacctgaccctgtgcccaacccctcaacagcctattcctgctgtccacagcctgctggaactttttacaaaatatgttgccatgctggaccctgngcactggacataagccccctggcagcctttttcatgtcacccaaaggggtaattgtcctactggtggtctgtaagatgagttagggtgacttgctaatagacattgtaaatcttaatatttatgtatgtattttattattaccggttttccatttatgatggtaatattgtttcttctaagaatatttatttttccttctaaatattgagataaaattcatgccttttgaaatgttctattcagtggcttttagtatatttgctatgttgtgcaaccatcgacactatccatttctagaactttttcgtcatcccaaacagacgctctgtattcataaaaaaataacttcctacctgtctctccccctagtctttggtaacctttgttatactggtaaactttgttgtgctctctgtctgtgtgaatttgcctattctaggggcctcatataagtgtaatcatacagtatttgtctttttgggtctgtctgatttcacttagcgggttttcagggttcattcatgttgcagcatataacagtactgcgttcctttttctgggctgaataatattccactgtatggatagaccccattttgtttattcacacatcatttgggacatttgggattatttctgggtttttgggctattatgaacaatgggtgctatggaacagttggcgtacaagtttttgtgtgaacatatgttttcaattctctcattatatacctaggagtagaattactgggtcatatggtaactgtatatttttgagggaactgccaaactattttnccacgtccatgcacc

SEQ ID NO: 314842 - DNA, 389 bp, Homo Sapiens
agacagaccaagaccagctttctgtgtaatgcaaagtcaaattaaatagacgtgagtggatggaaagacgtaccttattcttgcataagaagacaacggcatgaagacatcacagggaaggttaaggtaaacatgcagcctggaatagcgaagtgcagattacactatgtaaaaccattaggaactggcacgtgaatagacagatcaatagttaatagctgtattagccagaaaatggtgtaaggacaacaggctaactaaccctgtcacttgttatgctaaaattaagtctagatagagtcctccaaaataaaaataaaaagagttaggagaaaacatggggtttaacaacaacaacaaaatcttcagctggattagccttttcaaac

SEQ ID NO: 314843 - DNA, 1411 bp, Homo Sapiens
tgagaaataaaaagctttattattccctctaagggattaatgccagggaatgaatggtccccataccccccacccctgggggagactgacagaacagtgctggacaaggcatggcccccttcagtttgggctgaacttccaacccctgaagccatcactcaagctaaaatgagcagttctggtcctcagggaaacagccacctgggccaggcccaggaatccaagcctccaaagctcttggggaccaggcctgggggccaccacggctgggcaaggttcatccctggccaccagctactctagaggggctgggccccaacccaggagacctctcacacacagtgaaggctgggacagagctgcacgcttgggggtgcctgaaggtccagaaagagctgcaggatcgggtccggaggacccttggctggagtgtctcaagctgagtcgggtccgtggggccagggcaccccctaaggatcagatcagaatccgaggtggagacattccaggtcagggctgcggcccaaagatgggcctacttgtcaatgaggcctccctccttgagcttgaagtagaagaacttctccagggcgctggcacagcggcagtactcgctgtccggggggttgtactcgcgacagttggcgatgacccgctgcaggtcggccacaaagagcttccgggtcacgtagtagcggcttcgcagccgctcagtcatggtcttcaggtcaatggggaagcggatgacctcgtagtagtcaggggcctccgacttcttcacaggctccatgaagggccaggcactggggtgagacttgatttgggccagcaggtttttgagggttgtgtagagctggtcggggtccttcagctccttccccttctccttccccaatggcttccagcctgtctctcgaatgccaggaacgctctccacagggatctgcctcacgccctccttgaagcagctgagccccgggtagacttgcggatctgggcctgtttgcgctcaatcagcttcttgatgatctctttctgcttcttgatgatgtgggacagctccgtgtaggggatgcggggattcagctcacactccatcagcgtcgctccctcgtagtccttgatgtagcccaggtagcggctcttgggcaccttgatgtccttggagaaaccctgctttttgaagtagccgatggcgtactcgtcggcgtaggtgaggaagtagagaatgttgtgcttgatgtgatactccttcaggtggttcatcaggtgggtcccataacccttgacctgctcattcgaggtgacagcacagaagacaatctccgtgaagccctgggtgggaaacatgcggaagcagatgccaccgatgacccgcccatcctgatcaaggccagagtcttgtgcttcg

SEQ ID NO: 314844 - DNA, 620 bp, Homo Sapiens
  misc_feature (475)..(475): n is a, c, g, or t
  misc_feature (583)..(583): n is a, c, g, or t
ctggctcacaataatattattttaagaagtattttccaatattgaagaatctttgtgtcatccaagaacacatactacttacttctacatcacccgttaagaactctaaataccttattcattagtatagaaaatcttttaactctttcacagagaagaatgacataggcaaatggaatttgtatccccaggagtgtcaatttttttaccaaaatccaaacttaattttcatcagtgtgcccatttttataatgtgcttaccccagttgcaaatcactagttaacagtgtggagtgagaagttatactactgaagatttcaaaatgtgcctcagcttatctaccttattatgactagaataattataagaattaaataatatgcataaagcacttagcatattgcctattatcattactatgtagagagatagaaatgtgtgaaaatgggagtttttaccttaaggatgtaattnttcatccgtgtaagattacccaatattctattaagagatgttacataactagaaagttgtagccattcaaccctttttctggaactagctttattatcctctactttntttccagcagattctctccactgtctttctgctcttt

SEQ ID NO: 314845 - DNA, 973 bp, Homo Sapiens
acctaccgcaagagaaaaacaaaaagaacgaggcctgggtggcgaattcggcacgaggggcagcagccgcaggtgtggagggcaaggggacctcctgtcgggctccctgggcgtcctggtacactgggcgctccttgctggaccacagaaaacaaatgggtccagccctctcctggtggccgcgtttggcgcctgctctctcaccaggcagtgcaaccaccaagccttccagaagcacggtcgctccaccaccacctccgacatgatcgccgaggtgggggccgccttcagcaagctctttgaaacctgagcccacgcagaccagaagtaaacaggcaccttggacgggggagagcgtgtgtgtgatgggaaaatccggacccacgcgtgtgctgaaggcgtacggtgcttgccagattttcaacttgagcataaattggttgccattgagaatttaagaatctggaatattgcagctcttggttaaacttaatgcatggttggagatgttatggcgacactaaacaaagtattcctgaactttccttagctccttggtagtaactgggaagacagaaatgaagaaaatcacatgagaatgaagaattctttagcagctcaacagagtttctcggcctgctcccagatcggcgaagtttctacttgttactctctctgccgacgcccttcattccccccggcttcccttccctagtctttcctccggcagggagctgggcaggggtccccgggtgtctccctgagtcccgactgcactgactgggtccatcagagggctgcttcgttctccagctcatcttcttttaaagtggtgactaaccttggtggtatctggcttgctggtggtttgggcttattgaaatactccagggtaaatcaatggatgacctttggttgggaaaaccctttttggagggcaccaatgggaaccggaagggaacatgaattgacc

SEQ ID NO: 314846 - DNA, 1100 bp, Homo Sapiens
  misc_feature (39)..(39): n is a, c, g, or t
  misc_feature (71)..(71): n is a, c, g, or t
aaacccttcacccttgcccgtccccggttccggttcttnccttgctggggccggttgggttaatcatgggnaccccctttttaagaacacggaacaccggaagaagcgtgggacaggaaggcgtctcagagctcccccaccccacacactccaagggtcagcgtcactcatgtttccttctgttccccatggtgcctccaaaagggtttccaaacaaagtcatcattgattaccctggagtatgtcaataagccaaacaccagcagccagataccaccaagctagtcaccactttaaaagaagatgagctggagaacgaagcagccctctgatggacccagtcagtgcagtcgggactcagggagacacccggggacccctgcccagctccctgccggaggaaagactagggaagggaagcagaggaggaacgaagggcgccggcagagagagtaacaagtagaaacttcgccgatctgggagcaggccgagaaactctgttgagctgctaaagaattcttcattctcatgtgattttcttcatttctgtcttcccagttactaccaaggagctaaggaaagttcaggaatactttgtttagtgtcgccataacatctccaaccatgcattaagtttaaccaagagctgcaatattccagattcttaaattctcaatggcaaccaatttatgctcaagttgaaaatctggcaagcaccgtacgccttcagcacacgcgtgggtccggattttcccatcacacacacgctctcccccgtccaaggtgcctgtttacttctggtctgcgtgggctcaggtttcaaagagcttgctgaaggcggcccccacctcggcgatcatgtcggaggtggtggtggagcgaccgtgcttctggaaggcttggtggttgcactgcctggtgagagagcaggcgccaaacgcggccaccaggagagggctggacccatttgttttctgtggtccagcaaggagcgcccagtgtaccaggacgcccagggagcccgacaggaggtccccttgccctccacacctgcggctgctgcccctcgtgccgaattcgccacccaggcctcgcccttt

SEQ ID NO: 314847 - DNA, 696 bp, Homo Sapiens
  misc_feature (290)..(290): n is a, c, g, or t
gttccctgtgggaggctgttttctgagggagctgagtgtttacagccactcagccctgctctgctcagctgaagcagagaccatggctgagacacctagtcctccaggcactgaggaactccagggcattctgtgggtctcatgggaagccagcacctctacctgttcctcagaagatcgtggccacctgggaagccatcagcctgggaaggcagctggtgcctgagtacttcaacttcgcccatgatgtgctggatgtgtggagtcggctggaagaggctggacaccgnccccctcctgccttctggtgggtcaatggcacaggagcagagatcaagtggagctttgaggagctggggaagcagtccaggaaggcagccaatgtgctggggggtgcatgcggcctgcagcctggggacagaatgatgctggtactcccacggctcccggagtggtggctggtcagtgtggcttgcatgcggacagggactgtgatgattccgggtgtgactcagctgacagagaaggacctcaagtaccggctgcaggcgtccagggccaagtccattatcaccagtgactccctagctccaagggtggatgccatcagtgcctgcccctcccttcagaccaagctgctggtgtcagacagcagtcggccaggctggttgaacttcagggctcctccgggggctt

SEQ ID NO: 314848 - DNA, 1362 bp, Homo Sapiens
aaaggtgcttttggtcattttatttttattacaacttcattatttacaaaaccccccatccagatatattcacgttaacaattctgagataactgctgcatcacagttgcacaaaggctgatgagttgcaaatgttcatcagcaccatctgctaggcatttgtcaacttcggcaagtttttctgtgataatagacttctgtttatcagataagttattttctacaaccacatcatggagttgattgacgagctgagttgctgcatgaccctcatctattaaatccttgaccacagcttctagtttgtcaaaagagccactctgacaggcagcaaatactccatcaattttctcagctggtattaccccagcaatgtctgtaatcactttctctgtgatctcctttccacctgttaatcgagtagcgctttgaagaaatgtaatggcttttcttaagtctccttctgacactttaacaagataagctattccctcatcactaattttgacattttccttcttggcaatgtctagtaatcgctgctgttgaattttatctgacagaggcttgaagcggaattttgaacatctagaggtcaggggttcaattattcgactgacatagttacagataagacagaatcgggtggttttcgactccttctccatggtacgtcttaaagctgcctgagcagctgaggtcatagaatctgcttcatccagaatcacaatcttaaaaggcggacacggcttcccatctgagcgacttcctgacacagttaattgagcaaaatttttcactttctctcgaactacttgtattccacgttcatcagatgcatttaactcaagaactcttaatcggaaaagttcaggcccaaagagttctctagctgctgccaaaatagtggatgtttttccagttccaggtggtccgtaaaacaagagattaggaagatctgctccttctaaagattttttcagcactgcaaccacttcttcctggaaagcaacttcatccacacattttgggcgatatttttccacccagggaacgggtttggctttcttgttctctccgctacttcccgcactggcagctactcctcgatccttggtcagcgggggtttagtactgatggatgtacctttaagaaatgcttgcatggtacttcacccagttagcctggcttctcgtgcaggtcaccgccgccggctcgttcctcaggtttccgcgatacaaaaaggacgagatggtctcgaagtcttagctccgtcacctaatctgagaataacgggcccaggagacttacgatcactgatgtccccacagtcgcctcagttcccgccacggaacggcccc

SEQ ID NO: 314849 - DNA, 617 bp, Homo Sapiens
  misc_feature (528)..(528): n is a, c, g, or t
ctgaggaggacttcaggcagtcaccccaggagcatttccggaggccacctcaggagcatttccgtcggccacccccagagcatttccggagaccacctccagagcattttaggcggcctcccccagagcacttccggcggccacccccagagcacttcaggcggccacccccagagcatttcaggcgcccgcccccggagcacttccggagaccgccccccgcgagcatttcacggcggccgccgtcaggagcatttcaggcgctcccgagaggaagatttcaggcacccaccagatgaagacttcaggggccctcctgatgaagactttaggcaccctcctgatgaggacttcaggagcccccaggaggaagattttagatgcccttctgatgaggacttcaggcagctcccagaggaagaccttagggaagctccggaggaggaccctagacttcctgacaattttagacctcctggtgaggattttaggagcccgcctgatgattttagaagtcaccgccctttngtgaattttggtcgcccagaaggtggcaggtttgattttgggcataatatggggaagttttcttgaggggagatttatgcctgatctct

SEQ ID NO: 314850 - DNA, 2201 bp, Homo Sapiens
tttgagaaatagaaaaccattttattcgcatggtttacatttacagtttattagctagtcaacatcaacatgcaaaaataagcactaactacaaacctctacgatacggttctctgtcagctacggtggttcatttgttttgaaaagtcatcagtacttctttcaactgaacgattaatttctgtaatggatagcaattagactctacagttatggaaccatccggcaaggcctctgcagaaatttggtcccgtggatttccacgttatacattctcgaagcaggaagtaaggcggcacacagagggtgtgatatcgaaacgacgcagctacgaacacagccccgcgatgtgatatcgaaactatgcacgtacgaacacagtcccgcggacacgacccgcgaggcaggcgggcgtcctcgaagccagcccccgacggtggcggcgccaggcgttttggcagcagctctcgaatgaagccataagtgtccctcgtggcgcggcatcgcgggtcactgcaggtcagtccggtgccgctgccaccttccccggccaggccagggccaacaggaagtggtgaaggaccagcccgttctccaagtctcatcgttcacagaaggaaagaaactgaaaacacagggaaatcacggactcctatattttaaacgttcttaagtttccctcggtgtttaggtcagtctttaaagaagagtttccttcgcaagttgaaagtacttttcagaagcatcaaatggttgacgtgttacaaaatcctaccaatccaaatgttttcaagtacaaacttatgaaaccttattttctctcttcctaagagtatttatcgttgctcacggatctttggtcgcaagaaacagaaacgccgcggcaggctggagcgtgggacaggaggaaaggcgtggcctccccgcccactgcagcccgtccccgaggcgtgcgcttcacgacgtggggcctacatgatgtacaccttctcggcttgtgagaagtggaagacttctttggttctcgggcacacgactttatcatcttgacggatagaaagcagagaattgtagccgtagacgtagccgttgggcagcatcatgggcggattgttctcgttcatcacgtcgccagaaatcttgcagaccaggcgggagttggcacagtgggccatgggcaggggctgcgccagcttgttcagggagcggctgcacacagggcagtcagggctcttggagctgccgtcctccttgtagcactgtggtgtcttgatggctgagaggccagcctgcagggtgagggtgaacacagaattgtttcccagctggtgtagtcggtagttgtcgtaccggaactgctggatcagcatccgccaccgtgcagggtccagaaggtccttgtacggggagatgtgcgtgtcgggcgggaaggccagcatgcccatggcctggcgcacctcgtccagctggctcccttctgcttggctgaagtgctttcttgcatgtctcacagcgtccagtctcttattctgccggatgagttcaatgaactcctggattctgaggctgaactccaggcagctcttcatcttccggagccgggacttgttgtcatggcaccaggccaggcaggtggccgtctcacgcctctccagggactcctccacctctttggccgtcaggaacatctcaatattcactaggtcctcgatgccgctctggcgcgccagcttgacagccgtgttgtagtagccgcaacgcagcaggtgctccaccatcatgcgatccatgcgcttcctcttccacacgctggccgccgcgggctggtcgctgctatgctctttgaggtgctcgatccggcgcttgcacagcttggcgctctcgtcctcggcctggatggattccaccgccttcctcttgaggacgctgagcttctccaccacgccgtccagcaggctgaccacggagtccacggcggggcagccgctcaacgtcttctccagctcggccaccaccatggtgacgtggctggtctcccggtcaatgttcttctgagcggcgcgaaagcgtttgttcagcgtctcgtagggcaccttgagggtcgggtactcctggaccttcagggtcatggacaactgagccgccgactcctgcaccgccatctcctcgtgccgaattcgccacccaggcctcgctacctt

SEQ ID NO: 314851 - DNA, 423 bp, Homo Sapiens
  misc_feature (318)..(318): n is a, c, g, or t
  misc_feature (375)..(375): n is a, c, g, or t
  misc_feature (384)..(384): n is a, c, g, or t
  misc_feature (389)..(389): n is a, c, g, or t
  misc_feature (412)..(412): n is a, c, g, or t
tgagaaatagaaaaccattttattcgcatggtttacatttacagtttattagctagtcaacatcaacatgcaaaaataagcactaactacaaacctctacgatacggttctctgtcagctacggtggttcatttgttttgaaaagtcatcagtacttctttcaactgaacgattaatttctgtaatggatagcaattaggactctacagttatgggaaccatccgggcaaggcctctgcagaaatttgggtcccgtgggatttccacggttatacattctcgaagcagggaagtaaggcgggcacacagaggggtgtngatatcgaaacgacgcagctacggaacacagccccgcggatgtgatatcggaaactntgcacggtncggtncacagtcccgcgggcacggcccngcgaggcaggg

SEQ ID NO: 314852 - DNA, 1091 bp, Homo Sapiens
acccacgtggaggactaagtgtcgaacttccagaacacagccagagccccatacttggcctgggaagaagttgtactttcagggatttattaaggcattgagcacagtgtaatttctagccaagtgaaatgaatccaaggaaatatatcaggacctgagggatgtttttttaaagttactggaaaggatgatgagctgagagcacgtgtacagccacgcctgtgcgcagcgcccactctgtgcaataaacatgttctgcccatgttcctcagtcaggaggttcaggctcccggagagcacctgagggttccatcactttggtgcccaacaagcacatgccccccaacctggtgccaagaggcaggaatgacccccataccacatagctgcaggaaagcatccacggatggagggactcagctggcctggccgcagtgtggagcacagaggtatgaggcaagcaagggcagatctgagagcctctaatgctaggcaggtgcagctggtgcgaggcgggctcccaccaggtgtaaggaaggtgggagccacagcctcttcctgggcccagaagcagccggcgccaggagatgcaggcccagggaatctgtctaaggcagctgggtctgcaccagccttctttccactcacaactcactgctcctgggagagcaggaggggcacacctttaaagagaaactgataagggaggaaaggcaggaggagatgaggccagccccactgatgacaccttgggccaggcctcacagctgcaggcatcagccggaaaggtccttgatcttgagtccaatgtccactctcttctcaaagaagttctccagcacggactccgtcaggatggaggccaggatctgctcaaaggagatgcaccagtcggtgtcgacggtgccgccgatgcgcgctgtggggctgcaggcctccccgcccaccagcaccgtgtcgtctgcaaggtcttcacattgcagggagcccgtgctgaccaccgagtaggaggacatggacatgtcgtctttggtttcatcgtcagacagcagctgggagggtgagccctgtccctcgccgctgcccccctc

SEQ ID NO: 314853 - DNA, 1040 bp, Homo Sapiens
gggctgtacggtccggaattccgggatatcgtcgaccacgcgtcggagaaagaggctcagaaggagacgattaaggatcttcccaagatgaaccaggagcagttcattgagctgtcaagacgctttacaacatgttcagtgaagaccccatggagcaggacctgtaccacgccatcgccaccgtggccagcctcctgctccgcatcggagaggtggggaagaagttctcagcccgcacaggcaggaagcccagggactgtgccactgaggaggacgagccaacagcacccgaactgcatcaggacgcagccagggagcttcagcccccagctgcaggagacccccaagccaaagcaggcggagacacacacctcggaacagccccacaggagagccaggtggtggtggaggggggcagcggcgagggacagggctcaccctcccagctgctgtctgacgatgaaaccaaagacgacatgtccatgtcctcctactcggtggtcagcacgggctccctgcaatgtgaagaccttgcagacgacacggtgctggtgggcggggaggcctgcagccccacagcgcgcatcggcggcaccgtcgacaccgactggtgcatctcctttgagcagatcctggcctccatcctgacggagtccgtgctggtgaacttctttgagaagagagtggacattggactcaagatcaaggaccgaaagtggagagacagttcagcaccgccagtgaccatgagcagcctggagtttccggctgatgcctgcagctgtgaggcctggcccaaggtgtcattagtggggctggcctcatctcctcctggctttccttccttatcaggttctctttaaaggtgtgccccttctgcttttccaagagcagtgagttgtgagtggttcttggggccgcttggttttgggcccaagaagaggctgtggctccaactttcttacaacctgtgggaagcccgctggaacaaatgaaccttgctaagattagagcttttctggccttggtgctctctctgg

SEQ ID NO: 314854 - DNA, 741 bp, Homo Sapiens
tttacagtataaccgttacattttattattagttattgttgtcaatctcttaaggtgcctaattcataaacttaatcacaggtatgtatgcataggaaaaaacagtatgtataaggtttgttattatctgtggttttagacatccactgggggtctggttttagatatccactgtatcccctgtggataagggggtaactgctgtatcttttagtagaagcaagagcagccccatgtggggctaaacactggacactggtcagtttcagctcctcatgcaaagtgagggtatccttgtgggctccagccctgggggcccccctgcggtcacctttgggctccacagtctggttcttgaacccaagggcaggacagcttgctacagcccaggcctgaggatgcacttccttcaccaggacccacaacccctgcccatgaagacctgtggaagctcagggcatccccctgaatgcaaggttggtccaggacctgcccagcttgcaccagcaggttctgcgtctcccatctgaccctggcagaccttgcactcttcccacccactgtggaggactaagtgtcttgaacttccagaacacagccagggccccatacttggcctggggagaagttgggaggcctaagcagtggttgggggccacagcaaggcattgcacacagtggtttttatttctttcagggatttattaaggcattgagcacagtgtaatttctagccaagtg

SEQ ID NO: 314855 - DNA, 1435 bp, Homo Sapiens
  misc_feature (988)..(988): n is a, c, g, or t
  misc_feature (1244)..(1307): n is a, c, g, or t
aatagctatatgaagatagtgtactcgaggtgttaatgtgcacatctgaatatctgctgtctctcagataacgcaatggtctcttcaaatagcgttatgccataaactggtttcttgaccaacaatgtcgtttcagcatgcaatgaagtggttcattctaaagtggtcacggctgttgatgacaagtgaatgttaactattttctgacactttggagtaactgttgctcttcccatttccattaggtcgatatatggttcatggcaatactgtacaagtttaaaatttcatcacaggaagtagtctggggtacgacgagtaacatgtggctcgcctttacaaggtgctgggtcaaactgcaagaaagagtattttagagtatcgtcaagttccatgattgcagcttggttaccacaacgataccaatagtttggagcactgaaaatcgttactacattccggtcatggcaccagttatatccctccatcactagctggtgagctctagacaccaacgtgaggccattggcatgattaaatgtctcagaaatatcttgcccaaaggtgtaaccagctcctcgaggagatataccccaaccaccacggtcatctggatctgaccacagcaagtcacacattggaccctcatggggaacttcttgtaggcgatcaagtgctctgatatgatccagtgtatctatagatggcgagagaccaccatgtagacagaagatctgcccatccaccaaggcagtgagaggaagatagtcaaaagatcctgtaaattattccaaaccatttgcattcccatattttcttaaacattcatcatagaaaccataaacttgggtgatctgtctgctctcatgatcccctcgaagaatggtgatgcgttcacggtaacgaaccttaagagctacaagcagtgtaactgtttcaactgaataatatcctctgtcaacataatctcccataaacaagtaattgntatctggtgatttgccaccaattctaaacagttccatgagatcatgaaattgcccatgcacatctccacagacagtaactggacatcgaacctcttgcacgttggattcttttgtcaggatttctttagccttctcgcagaggctcttgacctgggactcggacagctgcttgcactcgttcagctgctcgatccactggtccagctccttggtgaacaccttctcgtccatgatgccacccgccccagccggctnnnnnnnnnnnnnnnnnnnnnnnnnnnnnnnnnnnnnnnnnnnnnnnnnnnnnnnnnnnnnnnnttcctcgtgtacttctggcggctgttgaggctggcgctggcccgctggctctcaccgcagtactcggccgtcggccgctgcgcctcctcctccgctcgctgaggctccagagctcggctctctgtccc

SEQ ID NO: 314856 - DNA, 1838 bp, Homo Sapiens
cagttcttagttcacaagtttattatgaaaaacactgcagtgctcttgtgcagtcacatcgtcttacaggaaggggaaaaaacagttctgttcaaaacaactcaccaggttctgacaataacaaagaacaacatggggctgagatttgagtagggaataaactgagtgcagacaaatcatataattaaattaaacggtatccctgaaaataaaaagaacaatttcaaaactcacaagtagaagggaggccttggtaattatttttaaaaatgttcattaagctccaatgattgtttgctgctatccttatctacagtcatgctgagtaaagctatagctaaatggaagttaaattgtattcacgaggtgttaatgtttacatcttattatctgcagtctctcagagaaagcaaaagtaactacaaatagcgctatgccagaaactggtttcttgaccaacaatgtcgcttcagcatgcaatgaactggttcattctaaagtggtcacggctgttgatgacaagaggctttgtatttttatatggcacatcttttggtccatgtgaaaacaagttttttgaatgttaactattttctgacactttggagttactgttgctcttcccatttccattaggtcgatatatggttcatggcaatactgtacaagtttaaaatttcattacaggaagtagtctggggtacgacgagtaacatgtggctcgcctctacgaggtgctgggtcaaactgcaagaaagagtattttagagtatcgtcaagttccatgattgcagcttggttaccacaacgataacaatagtttggagcactgaaaatcgttactacattccggtcatggcaccagttatatccctccatcactagctggtgagctctagacaccaacgtgaggccattggcatgattaaatgtctcagaaatatcttgcccaaaggtgtaaccagctcctcgaggagatataccccaaccaccacggtcatctggatctgaccacagcaagtcacacattggaccctcatggggaacttcttgtaggcgatcaagtgctctgatatgatccagtgtatctatagatggcgagagaccaccatgtagacagaagatctgcccatccaccaaggcagtgagaggaagatagtcaaaaagatctgtaaaatatttccaaacatttgcatttccatattttcttaaacattcatcatagaaaccataaacttgtgtgatctgtctgctctcatgattccctcgaagaatggtgatgcgttcacggtaacgaactttaagagctacaagcagtgtaactgtttcaactgaataatatcctctgtcaacataatctcccataaacaagtaatttgtatctggtgatttgccaccaattctaaacagttccatgagatcatgaaattgcccatgcacatctccacagacagtaactggacatcgaacctcttgcacgttggattcttttgtcaggatttctttagccttctcgcagaggctcttgacctgggactcggacagctgcttgcactcgttcagctgctcgatccactggtccagctccttggtgaacaccttctcgtccatgatgccacccgccccagccggctgccgctccgcgctcctcccgcgccgccgcccgcacacgggcctacacgcacacgccgccgccggttcctcgtgtacttctggcggctgttgaggctggcgctggcccgctggctctcaccgcagtactcggccgtcggccgctgcgcctcctcctccgctcgctgaggctccagagctcggctctctgtaatggcgatcccggg

SEQ ID NO: 314857 - DNA, 1090 bp, Homo Sapiens
  misc_feature (964)..(964): n is a, c, g, or t
  misc_feature (967)..(967): n is a, c, g, or t
  misc_feature (1002)..(1002): n is a, c, g, or t
  misc_feature (1004)..(1004): n is a, c, g, or t
  misc_feature (1007)..(1007): n is a, c, g, or t
  misc_feature (1019)..(1019): n is a, c, g, or t
  misc_feature (1027)..(1028): n is a, c, g, or t
  misc_feature (1030)..(1030): n is a, c, g, or t
  misc_feature (1035)..(1035): n is a, c, g, or t
  misc_feature (1038)..(1038): n is a, c, g, or t
  misc_feature (1043)..(1043): n is a, c, g, or t
  misc_feature (1052)..(1052): n is a, c, g, or t
  misc_feature (1054)..(1054): n is a, c, g, or t
  misc_feature (1063)..(1063): n is a, c, g, or t
  misc_feature (1068)..(1070): n is a, c, g, or t
  misc_feature (1075)..(1075): n is a, c, g, or t
  misc_feature (1082)..(1082): n is a, c, g, or t
  misc_feature (1085)..(1085): n is a, c, g, or t
gcacttccgtgtttaataagccacatcctcagttgagcctggggtgaaatgtgagatcctgactctgtgcagtagtattagtgggtgggccaggggctgtgaataacatcatcctcagtacagctgcaattccagggcccctctaccacaaagatggcttaagcaaaggcagccagatggaagtatgatatccaacaggaaggaagtaggcaggggtcactaaagtggctggtggcccagcagattggaaacagaagtatggccccgagggaaggaggcaggtccagggctacagtgctttcaggtactggtgtttctataggggcatttgccacccacatctttggaaactcccctggcctattgtgacatggcagggctgcctggttcttgaaggtagagaagatgctagtggggaggagctgagcctgtgacgtgcatttgtaccaggtccagatgggaaatgatgaggctgcaggctatgatggggccactgtgcactaaatgcttggtaccatcctatgaggggacaaggtgcagacccacattcccataggcacttaagcagtggtggataggaggctaccccaggggttcagctgtccttcaggtaatcagcttacccccaagaaggactgagaggaatatgagtaggacagttggcagatgacaattcctttgcctggctcacgggagaagtctggttgggccaggtatgtgggtgtttggtgcctccatctggatagtgccagcaggtacaccaccttgccttatacttgaatggccagctaaatacccatagagcttaaggtctggctcaggtcaggattccctggctccttgccaacaaagcaaacccagagattcagaaaactcagggcctaggagaaaacagacctgccttacaaaccccagagctggtcaactcaggcttctctcaggaaaaaattttttttgagatggnctnctctgttgccaggctggagtacacggggcatcttngntcntgcaactctgcntccaggtnnancaatntcntgctnagctcctgntngtggggttntgggnnngcacncaccggntanttttt

SEQ ID NO: 314858 - DNA, 814 bp, Homo Sapiens
  misc_feature (765)..(765): n is a, c, g, or t
ggccgctgctcactgacctctaccaggccaccatggcgttgggctattggcgcgcgggccgggcgcgggacgccgccgagttcgagctcttcttccgccgctgcccgttcggcggcgccttcgccttggccgccggcttgcgcgactgtgtgcgcttcctgcgcgccttccgcctgcgggacgccgacgtgcagttcctggcctcggtgctgcccccagacacggatcctgcgttcttcgagcaccttcgggccctcgactgctccgaggtgacggtgcgagccctgcccgagggctccctcgccttccccggagtgccgctcctgcaggtgtccgggccgctcctggtggtgcagctgctggagacaccgctgctctgcctggtcagctacgccagcctggtggccaccaacgcagcgcggcttcgcttgatcgcagggccagagaagcggctgctagagatgggcctgaggcgggctcagggccccgatgggggcctgacagcctccacctacagctacctgggcggcttcgacagcagcagcaacgtgctagcgggccagctgcgaggtgtgccggtggccgggaccctggcccactccttcgtcacttccttttcaggcagcgaggtgccccctgacccgatgttggcgccagcagctggtgagggccctggggtggacctggcggccgcccaggtgtggctggagcaggtgtgtgcccacctggggctgggggtgcaggagccgcatccaggcgagcggncagcctttgtggcctatgccttggcttttccccggcccttccgggcctc

SEQ ID NO: 314859 - DNA, 1162 bp, Homo Sapiens
gtccggaattcccgggatcgccccaccccttcctccggccatgtaagacctgcccgcttccgcttccaccaagatgctcgtactccccggggctggctggactgggcctctgctccaagtccccaccctccaccctcagccaaccacacagtggtgctgcccaccctgaagcccggggagccagggcctgtgctttcactgggatgcaaatcttcctgctacctcgagctcagattcccgactccagcccagccgcagcccgggaggcgcaccgtgggctgggtgaacaaacgacacaaacaacacaggacaagctgtggggaaaaggctccgcagccgcctgtgctcagggctgagtcggctcagggacagctgggccaaggctctagactctgccagggatgggagcggctcacacagctgcacggaggaggtgtccaggaggccctggaaggcccggggaaaagccaaggcataggccacaaaggctgcccgctcgcctggatgcggctcctgcacccccagccccaggtgggcacacacctgctccagccacacctgggctttggccgccaggtccaccccagggccctcaccagctgctggcgccaacatctgtggaacagagtcggtgaagaatgggggccaggaatgcaggatgaggcctgggagcagccagggacaccctagtttgagagcaaaggtaatgcagcccgtgccagcttcctgggacagcactggggtgacctgcctgggtggcacactctcgccagggcaagggctggcttggggcctgtcgcctggagacagcagggtttagaggagggactgaccgggtcagggggcacctcgctgcctgaaaaggaagtgacgaaggagtgggccagggtcccggccaccggcacacctcgcagctggcccgctagcacgttgctgctgctgtcgaagcctgggggaggaaggcggtgggatttgggggactcgggccaagatggggctcctccttcccggcccttgccttgccccgcaccaaacactcaccgcccaagtagatgtaagtggaagctgtaaggccccctaaggggcctgcgcccgcttaaggccctctcttgccgccattctctagcctacaatcaacgcacgagctgcgttggtgccccca

SEQ ID NO: 314860 - DNA, 511 bp, Homo Sapiens
gtggggaaaagtgagtgattcgtgttgtttccagtcagccccgctccgagtctcagggggactgccccgcacacagactgttcaccagggcctgcagcctctcggacagcaccacctgcagggagcagaggacaggagcggtgggcagggtgagggcgggggcgcacagggcagaatgacagggtgggcctccccccaacctggtactgtgcagggctccgcagccgcctgtgctcagggctgagtcggctcagggacagctgggccaaggctctagactctgccagggatgggagcggctcacacagctgtccctgctggaggcagagccgcagtagtggctccacctgggctggcctcacggtgcagggctcctgggcccctggaggccacaccctcagctcctgcccagcctgtggcactggctcttctgctaactgcagcatgtccatgagtggagacccgtcagagcccaggagccggaaagcagccttgctcccaggcaacgtct

SEQ ID NO: 314861 - DNA, 348 bp, Homo Sapiens
ggaatagctcctttatctgtgatgtggtttgtggtcttaagagatgtgttaaaaattctttcatagtatgggctccagatacttgaaggttccatatgataataatcacacaataaacttctgtgtgtcctctaagatgtcagtagagataccggagcacggtttgatgaaatatgtaaagaggcttattttgggcagggattggtttggcttggttgggtcaggggtgaaggcgctacttttcttttttctgagggattatctgagaagggctctttaggagctgaagcctttcgcctggacaggacggccggctgtgtgaggagccctggaggggagctgggtctt

SEQ ID NO: 314862 - DNA, 1359 bp, Homo Sapiens
  misc_feature (925)..(934): n is a, c, g, or t
tggtttttctaataaacatttatttcaagtgttatttgttaaacatttaattgttgagatttgaaaatgaacattattatttattagacacattttataggctcattcaaaattcttaacttttgagttcctgctttcttcacagcagtgcactcactactttctggtatacaagaagaacagcttgtccccactcttacagtgtaatgaaattagcagtataatgaagaaaagtgctgtgtaggaatgactgagctctaagacaaactggtaagaacaattaggtactaaacaatgggagtactagggagaagattcattttgagtgggagatgttggaacactttggaaataacactgaatttgggttctgaaagatggatataattttgatatgcaaagttatgaggaaagagttactgtataatccagccattctcctaggaatatacatccaagagaaatgaaaacaagtccacataagatttgtacacaaaagttcatagtagcattattcatggtagccaaaaagtacaaacaacccaaatgtccatcagctgatgaatggatacataaaatgcgacatatccatatgatagaatattatttggcaataaaaaggaatgagatgctgattcatgccacagctgggatgcaccttgaaaatatactcagtgaaaaagaccacatgtatgattccatttatatgaaatgtctagcatgggcaaatctatagagatggagagtagattagtggttacctagagttgtgagaaaacagagtgaatactaacgggcatagggtttcttttgggggtgagaaaaatgataggcacaactctgaatatagtaaacactactgaattgtatactgtataggtgaattgtgtggcatgtgaattatatctcaataaagcagttattnnnnnnnnnntgaagagaacagatagaaaccacaggagagagccactgagtgcaaaagcctgttgaggtaaaactgcagacctgcatgggtggggcttactcgggaaacactgaatatgggatgcatcatggaagcctccagaggagcatggccttgcccagtgaactgcagcccagtgaatctcattttagacttctggcctccagaacagaaagagaataaatgtgtgttgttttaaaccaccaagtttgtggtaatttgttagttatagcagccataagaaattaatacaggtccaaatcaaattaaccccataagagccacacagatttgagaagcattttatttgcctcacagttttgcctattatacagtttccagttatttagaatttaagccactaatgtcaccatataactatcaactgtgattcc

SEQ ID NO: 314863 - DNA, 684 bp, Homo Sapiens
gggcacgtccattgagctccctgtaacagaagccattaactgcatctcagcaaccaaattgtctttcatcttgtagtcacagaatccctgagttttaactcagcacatgactgcccagataagaggttctatgtcccagcatctctttcagcaaagtgtggccacagtgatctgagcaatgctcagtcatatctttttttaaaaatctgctcttttctctctctctttccccagtggaatgcagatatggagctgatgagtctgctttgatcttatgggtaagaaaacatactgggaatggctgaataagacagaaggaaacaaagttcctgataaccttgtagagttaaatctgccctagaccatctgataccctctctattattaggtgagaaaaaaacaaacttcgatcttatagcagtttggcctgtggcttaacatatttcacaacagaagggaaagatgtcagaaggagatttcaaaggactcaggcaacaccctaggaaagtcaattcgcaaatcacttcagcaaacaggtcagaaaatagtaactatcaaaccagttgtgccttctactccatctctaggatagaagcccagccacatcctctgagggaaggaagaggctcttattacagcacaatccaaacataaaatgcagcatgttcaccattggcctgggac

SEQ ID NO: 314864 - DNA, 828 bp, Homo Sapiens
  misc_feature (213)..(213): n is a, c, g, or t
  misc_feature (320)..(320): n is a, c, g, or t
  misc_feature (404)..(404): n is a, c, g, or t
  misc_feature (656)..(725): n is a, c, g, or t
agcctgttaagaaaggttttaaacccatagaggccaactgacaaggcatatccgctacaaggaataccatgggaccctaattttcaaggattgttacaagctggacgatttaaagtagtcaaaccagtttaccagcccaagagttgggctacatatccttaggtttaagcgcagtggcatagatcaatgcaatcaattcaatcagtgatcttnttttaagcacgaacaaagcagatgaaaagttatgcgttccacaagaagaatgcgattttcagagcatttatagacgtctagaaaccccatgcatagggacttccttntggaaaggttaagaaatcctgagaaaaaagcctcgtcaaaatgtgtttgtaaactctgacggtacaggaaaatactactggaancagaattaagtgtagaatcagggcagaccagaatatacatgctgattgccgttacatgaaaggtccagcgccaggcgggcaggcagccagccacagaaaagggagaggggctcaggaggaagtggctagacctgtcgctaggcaccaggggaggcggggaaggagggcagaggcagtagagttcactgtgagagctcaacaaggagtagctgctgccaaacatctacattcaacccgcatttcacagacacnnnnnnnnnnnnnnnnnnnnnnnnnnnnnnnnnnnnnnnnnnnnnnnnnnnnnnnnnnnnnnnnnnnnnnagctccagtgccctattaggtccaaatccactcagatggggaaatggagagtcagggacaagcaacacccaggggcccattcaggaaacatcagcctgccctc

SEQ ID NO: 314865 - DNA, 1001 bp, Homo Sapiens
tttttttcggtgtagcagacatttaattcttatttgccaactcctgagctaggacctgggaacacaaagttaaataggacacgattctagtcctctaggcaccaacggtcttggaaaggaaggcagacaagtaaactggccatttcaatactatgtggtcgttacaatgctagaggtaggcacagggggcgcagtgcaagggaggaagggcgttaacatctgccacctacttccaggtgccaagcactgttatcaacattattccactttattccctggtgattatgaaaggcaggtattgatattcacacttaacagacgaggaaacagcctcagggagataagcttacttgacccagtctctctcctagtccatatcagaaccaagattcaaacaggttttgtttagaaaatctaggatttttcagccataccaaaataaagtagcctcagggaatcaaaacattcacgaaagaaggtgacttctgaactgagtcttgcaagaattctggaaattaacctggcagttgtatcaggggtggtaaggggacggaacagcttgagcaagagtgagagttccttggggtttggggagggaggaggaaaaatgattttttacttaagaacaaatagcaaggaaggtttgtgagctatgattgggggctggaggggaaagcctgaattctatccagtaatccttgaagggttttcatccaagtggcctgatgggatttgcattttactctggaagatgacttggggattggcaggaagtaaggacactttttttcaagagaatatagccctaaactaaggtagtagcagtggggatataagtggataagttctagatatacttgggaaatataattggaaggacttgtggactgataaagatatatttaagatgtgcagtcagtaggacttgttgattgaggacttgttgattgaaggtggggtgaaaagatgacacaggtttctggcttggttggaaaagcata

SEQ ID NO: 314866 - DNA, 543 bp, Homo Sapiens
cggttgaactcttccaggacatctctacctctccagctaccacgttcctcttgcccttgacatgcagcagcttctggacgtcataggagttggtctccacgtgcttcatgccagaagccacgccccctttccggatcacaaggccttgcttgaagtagcctcggaaggcctcgctctcgttgccctggacctcgcggtgctgcacagcccggcccttcaggaagtcatccatctgtgtggtgtagatggcagctgccccctgctcatccagggatgagtcctggccaatccagtagtggatgtcataggacaggctgctggctgtcttgtggatagccaggatgatgtagcagtcaccatcgaagaagcttccaaaggtgctggaaggaacaggcaccatctgcatggcctcgatcctccatatctgcagccccggggtggtgatgttgagagagcctttgacttgggcgctcagcttggtcatggtgagtgagcctgtcttggggaggcagctgccacctgggagatctcagggaattgtgg

SEQ ID NO: 314867 - DNA, 1397 bp, Homo Sapiens
atgccaccagtgcccaagccctctcagcatccctttttgtgacaactagagtttgtccacgtccccatctgctattgacaagcccagagccagcgtaaaagtcttcgcttgaagatgcacgtcagggaaggagggtgggtggtggacctaagtgtgctctcctgtgcccagctcctggatcctggctccctctactgcccccgtcctggccctcacccacggagcccacagtgtgggttttgcctagggcctgagagtccgcgcttggactgcttgtccagcgttctggcaagagctgctgtaaacgatcggccgactcagccccgagtcattctgcacgctccggcctgtgtgcttggtgggtactgcgttggctgttgatgaagttcagcgcatggctcatggctcccttcttctcctgctcattggctttcttccctttccacacgtcgatcttcaggcccccctggtccaggatgtaacagtcctcgtgcactgaggcaggtcctgtgtcagtggccgtgtggcgactatcgcctcaccagccagtattcccctcgaagtcagacacatggtacagtttgagtgcagccttgagtgccggctccaccaccgtgtcgggcacggccgccttcagctccctgcgcttgcccagcacgtggttcatcacctccatcagcttcggggatgccaattcattctctccgtcccaccacgcctacataggtgcgccctccccgcttcctggtctcggatctccttggccagagtcatgcccctgagtctctccatacgggtgctttccggtccattccactggatgataagcttcccaaggtccaggaggaaaacatcccctcggttgaaactcttccaggacatctctacctctccagctaccacgttcctcttgcccttgacatgcagcagcctctggacgtcataggagttggtctccacatgcttcatgccagaagccacgccccctttccggatcacaaggccttgcttgaagtagcctcggaaggcctcgctctcgttgccctggacctcgcggtgctgcacagcccggcccttcaggaagtcatccatctgtgtggtgtagatggcagctgccccctgctcatccagggatgagtcctggccaatccagtagtggatgtcataggacaggctgctggctgtcttgtggatagccaggatgatgtagcagtcaccatcgaagaagcttccaaaggtgctggaaggaacaggcaccatctgcatggcctcgatcctccatatctgcagccccggggtggtgatgttgagagagcctttgacttgggcgctcagcttggtcatggtgagtgagcctgtcttggcctcgtgccgaattcgccacccaggcctcgcta

SEQ ID NO: 314868 - DNA, 2182 bp, Homo Sapiens
  misc_feature (199)..(199): n is a, c, g, or t
  misc_feature (309)..(317): n is a, c, g, or t
  misc_feature (540)..(550): n is a, c, g, or t
  misc_feature (752)..(763): n is a, c, g, or t
tgataacgggcggtacgtgctagtgcggggataaaaggcgcggggggataggaggcgcgcacaacgggtggggtggggataccgggggcgggaaataggtataacgggtatttacccgtgagcgcgccgtttccggggtcccggtgagggagagctgtagtgttaatttggcggattgtctacacgcagatggggacanaggcgcgcaacgctgggcgggattcgggagtgatgatcgcgcacgcctgcgggttgggaaaaagcggatctacgcgggcggttaacgacagagggcatgcttaataagcnnnnnnnnnccggccaaccggtagatcgggataaaagatggtgggcgacgtgatgggggcggcgggggcggggaaggtgtttagatatgcgtagagaacgcccggcccttatgggggtcccgcggcttggtgtgataaataagccccagggaaaggggaggccaaggaagaatgcgccgctgagggggatggtggctcgaaaaacgggtgggtttgtcggcggccggggcgnnnnnnnnnnngggggggagatgctcgcggccctctttgtggtgggcgcagggttctctgtagggaagacgagagtgggccccgttttgcgacttcgcctaggggggccgcgcgccacaaaagagaagttgtatagaaatttttctcgagggcgcggggtcgggcgcacaggatttttttgtattgggtcggagattgggcagggtttggttnnnnnnnnnnnngaccattatttctttgttttgtttttcctgtataaaaaaggaccccaaatataaaggtagggaaagggacaagagggaacataccccttagtgtagagaaatgggaaggagaaggagaagcctcaaaaggagaggtgggaggggaatgtcattaaggcagcaaagtaatctctgtagaaagatggaggaggaccctccatagcctcagagataaaggcaaagattgccctctcagtgtccagaagggaaatggcagcttttcttccttccatggcagccactccattgctcactccggattaccttcatccttatgtagataagagtgctgcagagctcgaaaggcagagattcgcttgtgtgggttaaaagtcagcatttccagcagcagctgtgctcccgactcctccatctcaggtaccaccgactgcactgggcggggccctctggggggaaaggctccacggggcagggatacatctcgaggccagtcatcctctggaggcagcccaatcaggtcaaagattttgcccaactggtcggcttcagagtttccacagaagagaggctttcgacgaaacatctctgcaaagatacagccaacactccacatgtccacaggtgttgcatatgtggactgcagaagaacttcgggagctcggtaccagagtgtaacaaccacgggtgtaagtgccatctggtagctgtagattctggccaggccaaagtcagccagcttgactgttccaccacttgtcaccagaatgttctctggcttcagatctcggtgaacgatgcaattggcatgaaggaaatctaggcctcttagaaactggcgcatcagatccttgatcgtttcggctggcaagcctggtgggggtgccttgtccagatatgtccttaggtcctggtctacatgctcaaacaccagggttaccttgatctcccggtcagttcgggatgtggcacagacgtccatcagccggacaacattgggatgctcaaaagcctccagtcgcctcagtaaagccacctcacgaactgtgctgatgggaaggcctcctccacctcctcctccattggggactctcacactcttgagggccacaaagtggccactgtggggatcacgggccttgtacactgtcccataggcaccgacaccaatttcagccactggctcatatcgagaggtagccattctcagatcaagggagaccctcacgccagcccggggtgctgtgggggcggcccgttatcggggccccggagccggttcctacggccccatacacccgagctcggtccggagcagctggacgcagagggcccgaccatagacacaggccgcaagctagagaggccccctcacccccaccctcaccatgtgaccagctgccaaagaggcgcgcggaaact

SEQ ID NO: 314869 - DNA, 351 bp, Homo Sapiens
gacgaggttgcagtgagccaaaattttactgctgcacctggggtgagactaccattaaggaaggaaatttcctttaaacagaaaaaaacaaaggtgctcatctatttcttctgaattctctctacatccttgacttaagaggccagcactcaagaaacagctttagccccagtgaatttgccattgaaagattaccctcccctttgccctcatctgcctgagctagaggccaggctgttgttaatgttttttcagttccaaagcccctgatgggacattcttgtttctgtgctactgctttctctctcttaaattaaggtgcaaggggattattactataactgggtgtgg

SEQ ID NO: 314870 - DNA, 918 bp, Homo Sapiens
gctttctagagggcaaaagtccttgctcaaaaagcacaggagttttctacaaaaccattgctgtggcttattctttgaagaaaatccttaaaacattttctgcctccatttttagttacttagatatactcttctggagtaatgggtttttcttccgttgcatgggtagaaatatcctagtgactggttgacttgcaacacgttttccccaagtaatgctgatgaaactgcttagaagctatagggaagttgtagttggtttaagtcataaagccaaggagaggccaaagaatgaccactgtgcagttttagctcccacttcgttggttccatataaaaccatttggtctcatggactttagctgctgatcagtgaatgactgatgagtaatagttttagtataagtttctcaagggaaagtctcaaactatatatggggttctcttgttatggggaggtcacactgatagtcttgaggtttgttctcagtctatgtttctgtttccgcagggcggtcctagccttgggtaggacccttgtcctacttgagtggcgatgactacttacacagctcacaatctcctgtgtgtgaaacagtctcctgccatcagcttctaggtagccagttgcaccctgcgcacaacgatgggaccaatgaaagtttcataacctcacctgagtctttagtgataagaaacagaaaagtcactgtgcactatgacgatggcacagccagccacatctcagtacactgctgagtttctcagagcaacaaaatacatttagtaattgccagtgaacaattaatgcttttgcaaagttactggaaaagcgtgggaaaaaacactccctaccacgttcctttttctgaaaagcaacaaaaatcacatcttctgaactccagtatctaagtaccc

SEQ ID NO: 314871 - DNA, 658 bp, Homo Sapiens
  misc_feature (49)..(78): n is a, c, g, or t
gaccagtatctttgaactgttaatctgtgtgtatgtacctactgtttgnnnnnnnnnnnnnnnnnnnnnnnnnnnnnngtggctaaaaccaatgagtcgaatgaaatttcctactgaattagctcctaggtggggcctggccagagatcatgagaataagagcattaatccttgcagatgttcatcctgtccagtggttcccaaactttttgtgggatcattaatgagtagcttttcttatttctgaagaagcctccttgtcactaggaggagggggggtcccagtgccatccccagcagccttctgatactttccccaaggagtcaatggagctcctgccaccctgcagattggccaacagcatgagatctgctggttgggaactttggcaatttaaaactttttgtgtgtgtggcattaaatacattaacaatatttaccattttaacgtgtacagtctgtggcattaaatacattcatgttgtgcaaccatcatcaccatgatctccagaacttttctcatcattcacaattggacacctctacccattaaacagtaacttcccattatcccctcttctggcctctgacagctattctactttctgtcattaagaatttgactactctaggctgggcgtggtgactcacacctgt

SEQ ID NO: 314872 - DNA, 1113 bp, Homo Sapiens
  misc_feature (70)..(155): n is a, c, g, or t
  misc_feature (401)..(435): n is a, c, g, or t
tatttcacattgcatttggttattacataacttttaatcaagaagagttacccattccacttcctttttnnnnnnnnnnnnnnnnnnnnnnnnnnnnnnnnnnnnnnnnnnnnnnnnnnnnnnnnnnnnnnnnnnnnnnnnnnnnnnnnnnnnnntagtggtgtcatttagtgctgctctatgccagcatttctccttaatttaaggaatgtgagcaccttccttctttttgattttgtctgaaacccatataatagccagtatgatagccactcatgtaccatgaaattaacatacttcccaaagcatcagcatcatcaagagaatctggacatatgggaggtggtgggggaattattggtggtccagaaggaaatggaggcagccagcatgatagtaannnnnnnnnnnnnnnnnnnnnnnnnnnnnnnnnnncattgaattttagacctggctttcctggtcccagtcttggccctggcatggggggtggtggagggagaaaagagttccatggagcagatttgggcttgatgttatctgatttatttccaggagacctggagttctcactttcatctgttgaaacttggctttcattttcattctcttgagcattttgttctatattattagctacttcacagattggggaaagtagatcggacagattttgctcctctctatttccatatccagtgtaaaccacaacacaggtttctctcttaaaatcaattgaagcaatggtagctgggtaaatgcaaccgtcttctgcccaaatggcagaacatttgtccccaactttccactgttgtaaggaagctgcagtattcttcttttggcttttattcttcttagcaggttttcttttaggtgtggtttttggtttacccgaagtttcacaaatgtcaccattctttagagcatgcttaaatgaagccacagctttatcatatgcttttatcagtgctgtatcatcccaaatgtcagaatcatcgctctggcctgtgccgcgccggaacagcacggaatcctcctgctccgggacgccgccaccactgccgccgctgctcatcgccatagcaaacccgcgggtgcgcagcgtggggcccc

SEQ ID NO: 314873 - DNA, 772 bp, Homo Sapiens
gtaagaaaaaattaaatatttttattatatacttttaaacatatagaagatagaaaaaaacagtacaatgaacagccatgtccaccagttagattctgtaacattttgccacatacgcctcacatacattttgttaaaccatttgaaacattttaagacactctaacacttcattcctaaatgcttaagtatgcaaattaagacagtcttttataaactacaacacccttctcacagctcataaaattaccaataattatccaatatcattcaaaatctaatccacattcaaattttctcaactgcctcaccaccgtgctggcctcccacccccaccccagtcttttacagatggtttttcaaaatagagtccagtaaaatatttcacattgcatttggttattacataacttttaatcaagaagagttacccattccacttccttttttctttcccaacacttgatattttgaagaaatgaggccagttatcttctataacgcttcacattccagatctggctgatcgtttctttaggggtgtcatttagtgctgctctatgccagcatttctccttaatttaaggaatgtgagcacctttctttcttttgatttttgctgaaacccaataatagcccagatgatagccactcatgtccatgaaattaacatacttcccaagcctcagctcatcaaaggaattgggacatatgggagtggtgggggaatattggtgggcaaaaggaaatgaggcccccccataaactaatt

SEQ ID NO: 314874 - DNA, 374 bp, Homo Sapiens
ccctggaattacaaaagaaaattgtattttaaatcttctaacagaaaaagaagtaaatattgttttgccaacacagtccattgttccaagaacttttgtgcttaaaccaggaatggttctgtttttgggtgctataggccgcatagatttcctgcagggtcagtcagcttggtttacagtcgtggcttccaacatcctccctgtgcatatcacctccttggacagggcagacgctctgtatcagaagcatgcaggtcatacgttactccagattccaatgggtgggaacgaatggcaggatttcctcctcttgttgctgaagacattatgttaggttgggtttcagtaacacctaattttggacagactgctct

SEQ ID NO: 314875 - DNA, 1664 bp, Homo Sapiens
ttttttaagggtaagaatgggagctttatttatgcgttatatgtttaatacaaattcaatgtattttgttgtgttcaatacagttaatatctggagtgaacaaggtcggtctcatacatttatctttcctttcttcttcctcacgttgtacataagggaaggaggcttcttggttttataggccacacttttcttgatgcgctgtcctttgatgttaacaatatatggcaagagagggggccggacggtcaaaactgttccttcaggtgtatagcctcggagatgcagtctgtccttaaaattaggtgttactgaaacccaacctgcagaggaaaacttgatgtcggccactgcttcagatgcccccagtccttcttttaacataatgtcttcagcaacaagaggaggaaatcctgccattcgttcttttccacccattggaatctggagtaacgtatgacctgcatgcttctgatacagagcgtctgccctgtccaaggaggtgatatgcacagggaggatgttggaagccacgactgtaaaccaagctgactgatttccctgcaggaaatctatgcggcctatagcacccaaaaacagaaccattcctggtttaagcacaaaagttcttggaacaatggactgtgttggcaaaacaatatttacttctttttctgttagaagatttaaaatacaattttcttttgtaattccaggggtgtcataaaaccagtgggcatctttcacatcttgtgcagtcaattctacttgtttggtggatttgtgtgtacccataacagggtcattttccatgtcaaaggcaagtgaatcagcatcaaactcaaagggaatgttatccttctgttcttctgaatacaagaatgtccttccaactcttcctacgacataaccatgctttttgaggacattaagctgattttgttcttgctcactaagatcttcttcagcttgagttgaatcttttttaagtctttgatgccttttaaacattctgtaaggagttgggttgcaaataggaaacttcagaaggtttaatgtagtacctggccaaggggagatggtggctctgtcgatggcctcggagcccttggcagtgcagtaatcggactccaggagcgtgttaaagagagtggatttgccggcgttggtggcgcccactaagtagacgtccccacggtagcgccaggagcgctgaagggcagagatcaactcttccactccatagccggtcttggcgctgatcagccgcacgtccctgaccactgtgcgggaccagttcggcggattcggattctccccgtcctgtggctcgtccttgacggggcgctgtggcccttggtggccaggggccagcaggagcccggcgcgggcacagtcctcccacagtcgctcccgcagcctctgccggtagccaggagcatcctggggcaggaggtccactttgtttcccagcacgatcagctgcttggggcccaccagcgcgggcaagtcgggcagcagggcgtcgggcaggtccagcaggtccaccatgtagagcaccagggaggggccgggccgccgcaacgcggcgctcaccagctccaggtactgctcgcggctcacctgcaggcgtagagcgcgccggtggtgcgacagcagccagc

SEQ ID NO: 314876 - DNA, 373 bp, Homo Sapiens
gcgccctgccctcctcccgccaggccgtcccgaacggcggccgtttcaacttttgggagcggtccacggcctccatcgtggggagcgcccgagtcctctcggccacgagctggacgctcttcaggacgtttcaccgccccctcgccccgcacctccagccttcccgactcgcagagtctcccgaggccccttttcgcctcgggtttatttattgactgtctttccccctgtcctcgacagaagagtgggaggtgagaagcccgtctcctcagtgagccagcatttcagggggagctggcggactcccactccccgctcccttccagccaagctgccttctcgcccctcggggctcccccagagctgtgccccg

SEQ ID NO: 314877 - DNA, 1167 bp, Homo Sapiens
ctaaatctgtatacatttaatgaagggattggctggtacatataccaactgtcagtctgtggtaacgtaaccttagacgctgcctgaccacaaagtttggaaattatatttaaccaaaagaaaataaataaatacagcaggttaccttgtgaagaaatgccatgtgttctaaacaaattaaacccacggtctgacatttgtatccatctatgcttttgaattgaggggattcctttagttataatgtgccaagtgagattagtaaccaacaggaggcttagaaaagcaaatccatactggttcatcacacacaagaaagaaatacctggctaaaatgaaatcactacagaagcatcgaggacattgttttttaaaatgggtacatgtgtggacaaaatgaatctaaaccgcaaacaaaaggactactgagtatttgaacatctaaaggacaaaaatatcagagagggtgtgcatgtgtatgtacaggcagggctgggtaaaaacagcgtgccaccatctgtcatgttgcttgctgcactctaaccaagcctaaccacagctcgcatttctaggtcaaaatctgaaacatggccaatgagagaagactaaattgagagggcgccatttttctttcaatgccctggaccttcaatttctcctcctctgcctagggtttcatgatcattataaatttaggcaacaatttatgggttttggaacaaatggtccaatggccggtccagtactgctttagtataataatatgtaaaccctttcaaattctagacagttttggtctctttctttataaatatattaattctagtctggtgatatctcatatggattatttccccagtacatattagccaagatggttttgacttaacaggttttaaagagtgattgttcaccatcttccattctttctcattgaccatttatctcactttttaatcttggtaacctactcatcaaaagaaagaataacaaaagaagggaatttcatgttggataaggcaggctctatgaagtatttttttaataggtcttcataagacattacaagctattgaattcccatcaagacaacctatttctatttaattgtgctaagtgctaaggttttactctttaggttttccatttttctccccctgtgcattg

SEQ ID NO: 314878 - DNA, 155 bp, Homo Sapiens
ggaagctactgtatgcgtcaggcaaaaggcagtgaggcctgaaccacatagtagaagtaagaaagaagtcaaatgcaaaacgtcctatggtattcaccgtctaagactagctctcaaaattcttctttaaaacaccttttgaaatatatatcctt

SEQ ID NO: 314879 - DNA, 809 bp, Homo Sapiens
  misc_feature (170)..(170): n is a, c, g, or t
gttggggggggaattccaaagccccttggtcattggcccggggatttccccttaaggaaaccaggttagtggccccgggtttcccgttaccctactggggcccccccgggccaaaacgaaaaggtcttagaaactttcttgaagggcccgaggccggcccaccacggccnccgcactaacgctacgggtgggtgggcgcaaagatagggtcatttattcacgttatattatttaattttaaaggcaaaaatacagttctgttttgaacaccaagatcagacacagccccctacacaatggtaaatacacacatttgcatacacaggaaatcaaaatacacagcacaacaggtctctgggacatgaaagccgtcatcctggctatgcagagcccccgcccctggcagtcagcagagaccctgtccaggctgaaggccagcacagcatctcctttactgtcctgtgccacctctgccctctctgatctttcccaaaggccagttcacacagagtcaccagcaataggatacacagaaacagaaaagggcacggcacatgacaacttcgcggtcataactcccaggaaaaggaaatgctccctgaacccccagccctgaaatccccagtaaggaaacaggacccgcggcatctcacggaccaggcaaacatccaggcctaactgtgccctggctgtgccttgggcccaggtgagcccatgagagcactacgtcagcaaatggggggagcagtatttcccttggttctaagaatgaaccacatacttgacatgaatgagaagctcccccccac

SEQ ID NO: 314880 - DNA, 622 bp, Homo Sapiens
gaattttgtgggcttggggagattgtgggttctctgatttcaaggggaatgatgtgatcctagagttgcaaagaacaagtgacagtggaggcgcttatgctttgtgattgcactagagacaaggaagacacaactagaataatggggagcaggaatggagcggccaacagaatatctgactgttagggatctttgatgaaggctgattctcagggagtgaactagatcagtgaccaactatttgtctttatataactgggtaatgtggatggattctaataaagggactacttacagcacagcaggaaagacacaaagccagacagaagagtgtaagtagtaaggggccaagcagtcacctgactagagagagtgccagcttgccaagaaggcaccagacagaagctgtgatcttcagcaaagggacacagtctgcctgtgctgaccctgcaggggcagaggtgggggataaacacactcttctctcacctgtcttctgccaccccctccattagctgaaccccaataaaagcatgagggtaagggagatctctgcagtatccaattcaggtgagccttctaaggaacacagcagaacgtagattaagaatgggtctgggtc

SEQ ID NO: 314881 - DNA, 1148 bp, Homo Sapiens
  misc_feature (371)..(371): n is a, c, g, or t
  misc_feature (382)..(382): n is a, c, g, or t
  misc_feature (387)..(387): n is a, c, g, or t
  misc_feature (395)..(395): n is a, c, g, or t
gaagcaactgctaagcacaatgaaacaatgtatgcctgtgcgtatggaggggcatggggaaatttgggaggtgatgaaaatattatcttgatttcacgagtgtatgcaggtcagattcattatacatcactgatatttcaaagggtacatgtcatcttctaggcttctggtccatactcatgttgatgaacaatcgtgctcccttttccacacgctgcttcttactgctcgccgcaattcttcccataaagaagtaaactgtgtcagcttctttgtggatcaaaatcagaagaccaagaggaaccaggttccaatttcttttcaactaaaatacttttagacttgcttttattcctctctgttctgagccntctgagaaaantgcanagtaagcnccttgtgtctaatctctacagtgtctactccagtctcagccctttgttggcctattcaggaaggcgggaacaacctcttttacttttttatccaatttcttctgtttcattttttctcggttttcctgtcggacttcctttgcttcttctaatgcttcttgactaccccaaacttcaagagacctcttcacaatctgtaactttaagtagagtttcatatcaccccattgtgaatgatgtggattcttcttcacaataaatttaagaggtggctctcttttttctaaatcacagtctttcagaagatattcttgttttgcctctgttttggttataagcttgtgtttatcatcagcatctctgcagttatcacaagttggcaaatcaaagtggttcataagataagaatccataaattctttcccacattcttcgcatattacataatcaaattccataacaggtcctggttgatgaacaacttttccaattttctgttcttcttcttcttcctcttctaaaatgaagcctcctcctgtgtcaattatctttggggctgcttttacattagccatgcctccagtagccgcagccgccgtcgccgagtagggccgggcagccagccgggcctggcgcagcatcagtgcccgctgccgcttccgctcgatactcgcccgcaccgaggcaggcagctccgcgggttgctctaaagccgccgcctccggcaaagccccgtcggccgccgccatctct

SEQ ID NO: 314882 - DNA, 1214 bp, Homo Sapiens
  misc_feature (83)..(83): n is a, c, g, or t
cggctcctaacgatgccaacgggactgcaaagccgccttttctcagcggagaaaacccctttgccactgtgaaactccgcccngactgtgacgaatgatcgctcggcacccatcattcgatgagaggacagccaaggactctcccgggcctctccggttctcccttgcggaatgatgggcgcatcctgtctgccacgtgctgacggtcgggaagcttcagtggagaggcctaactctaatgtcgcctgcttaagcaaatcatgcttctctgtttcacgtagttgggttgacaagtttctgcctttaagataaatgagtaatagtctaatgaccagctcagccatttaaaatattttcttcctattctgttcaagaaacagtaaacttggtttcaatctttactgtattttttaaatgaattttttccttaataacagccagaataagggatagtctatgctttcaggactggctttctgcacctgatatgaatgagaccagttttattttataaagcatgtgctcttaatagcattatgtctaaagaagatatcacgtaagtttgcatcttagcatgcaaatcataattttaagcaatataaattatgaaaatactatataaatgtaatttaacttaaaatgtttaagtgtagagcttccagagatggagaaacccccaccctccctccaaccacgccagagctgtagagtgctaagacgctttgcctgcccttatcacagccacacgtagcactcgacgaaatctcctccgagagctccttttcttggtagttaggagtcgccaacggattcgctgcacacggcccatccaggacacaggcttgggcgttcggagtcacggctccttgtgttcttcactcagctagttggccaaagctgcatccattaccagtacactcaaactgctcggggtcctggtttctccgtgtttgaatcaggtacagactctcaaaggatacgtgtaaagccaggatgacctctggtgcctggagaagggcgggtttttcagcctagcagccatgatgccctcggaacctggccctatggtatggatgtgaggactacgcactggctgccctgagcccggggctggaaatcatctctggctgccaaggatctggacctattttggagtggagagtcatggttaaaattcccagcccggcccaggtacgggaatcccagcattttgt

SEQ ID NO: 314883 - DNA, 366 bp, Homo Sapiens
cttttgtattacttattttttgtgcttgctgctataacagaatatctgaggctggttaatttataatgaacagacatttattggctgacatttcaggatgctatgaagtccaagaacgaggcgctggcatctagagagggccttcttgctgtgtcatcccatggaggaaggcatcacatggcagaagggcaaagagagaagaagggagagagccaaaggggccaaacttgtcattttataaggaatgcactcctaagataacagcattaatccattcataaaggcagagccctcatggcctaaccatctctctgagaggggacaaacattcccacagcaacagcctctcatgtggttttccctcgc

SEQ ID NO: 314884 - DNA, 370 bp, Homo Sapiens
gtaacaggtcattgctgggtgcacaagagggaggtgatttgcatcatggtcatgctgcatgggcttcactgggatgctgttaaacaccagaggagccaacctatcagaatcccagcagcaaaggattgatttcaaatgcctgccatgaatgatttgtaagtaattatgtaggatccatcaaagcagtattgtaggcttttgaattgtcccagtggatccgggaccccatttcactgtctctcttgatcgtgttaatgatgcaatcagagttcaagacaggccccatgaagtctgactgcactgggatggagaaatgaatttcttcccactgaaggctctttctcattcgcagccgacgggagtgccctgt

SEQ ID NO: 314885 - DNA, 1162 bp, Homo Sapiens
cagattgatgtgcaacctcggttatgacaggtgcgtccggtccggaatttacgggatatcgtcgaccacgcgtcgggatgcacaagagggaggtgatttgcatcatggtcatgcgtgcggtggcgcttcactgggatgctgttaaacaccagaggagccaacctatcagaatcccagcagcaaaggaaaactcagattttagaggctttttacaataaagtagcgtaactctaggtcatgattgatttcaaatgcctgccatgaatgatttgtaagtaattatgtaggatccatcaaagcagtattgtaggcttttgaattgtcccagtggatccgggaccccatttcactgtctctcttgatcgtgttaatgatgcaatcagagttcaagacaggccccatgaagtctgactgcactgggatggagaaatgaatttcttcccactgaaggaaactctttctcattcgcagccaagacgggagtgccactgttcctctcttcactcctgagatactgcttctggaagcgggtgtcacttcctctctagtacctcttctcttctctgaagtgtgtgactatctcctagtgtttaaatttggcagttactcgccatgtatgtcagcatagaaaaggaaatgtttttaccttatctcctgtatgtatgatagaacttaaaagaaatgtgcatttgttttcatagccccagcagagaaaatcctcttcatagattaaatgtgctgctgtggacaggagggcgcaaaaagaacctctacatatgaagggcaacacgtgtaactatctgacactgtgcatgatgcccaaaagagcaaagttgtagtgcatgcatccctggttcatttccccatgcgatacacagtgtcgtaggtgagtcccacggctgaccttgcaggtgattcaccgcaaaacgcatgccagctgcgtcctgccgcacaatgctgggccgcatctgtaagtgcgcccagacgccaagcaggccctgaagaaaatgatgggggtgggcagggacccgtcaaagggcgaatctggcctccgacagtccgcggaacgcggtagacaaatggttaaaacctgcaagcggtgcacataacccgcgcttttggccacacacagggaggggcacaaaccccaggggggcgacac

SEQ ID NO: 314886 - DNA, 1803 bp, Homo Sapiens
  misc_feature (144)..(147): n is a, c, g, or t
  misc_feature (150)..(150): n is a, c, g, or t
  misc_feature (154)..(154): n is a, c, g, or t
ttaaagttttcagactttatttcacagcgattgacacagaaacatactagagttagtaacacggcacccagccccaccgccgcccgcttcatcgggtcctgctcctaggaggactgggctggggctgggggtggggatgggatnnnngtnggtnagggacgggacgttgcagtttaaggcatttctggcttcggagccatccctgccacctctgcacctgccccttgaccttggtcagacactggctggcccctggtcattctgagacaaggacgactttcactgacgctgtggggaggatttgcagtgaggcagccctcagccgctctcaggcgagatgggaaagatgagacccaccactccaggggtcaaataaaatcaacacatgaagaacacagccatggccaggcccagatacccaggcaggcggcagaggtcaaccccatcccacagtgagctcctctcgatagcccctcgcagggcctggggtgtggcagagggatacggtcatgtccagggtggctgggcagggccagctgagggtcaggacacccagatcggccctggtctggcctctgctcctcagcagcctggggctggcgcaggcagcacgggagcaacgcagagctgtgcccagcagtaacattgtttggaagtcacagtattggcgcaggaggccgaggcagggtccagagcacacacaggaaggagcagctcaaataggggcttggaaaggccctgtggggtcacccggaggaagggccccatcagacctcagcagccccttcctctctgggacacgagtcccgcctgacggagcgagggtgattcaggagccggggctgcttcccggcggggacaccgtggggcaggcgcagtgcaaggcgggggctcagcaccttgaggcaggggtgtgtgtcctgaggctgccatccacgccgagccctccacgctgccacctcgcctgtccatccctcagcactaggtctgtctgcagcacggctgcctggacggaagggaggccgggccagcagtccctccggccaacactcaggcaagaaaatcatatcaaaaagcaacaagtttacaaaaatagaaaataattacagcgggcgcggggctctggtgccagctcatggggtggggcagggccgcagctctggcttggtgacggcgtcctccagcaggtgcagcgggtgccggcccaccaccacgtcccgcaagcagcccacaaagcctgtgccgtaggccttgggcagtgctgggcccacgggcagctccggcaggcccccaagccacagggctccatcagtgtccagctgcgtggcgcccagcggggaggagccggtcacaggggcctcattgcccacctgcagggaaccttccctctgctccctatgtgccacgacccgcaaccagcggttggtgttgacgggcacggtggaacgcagcaccacgggctgggagcccaggttgtagctcagttgcaggtgcccgtccacaatggccagtgccacatagtctgcccgctccgtggccttgccactccagagcaccagcccctgcgtggcctcagtgcgcaggctcagttcaaagtggttgctctgcagtgccttctcgctctcggtcacagcgttgaggtactcgacaaaggtccgcccgtcaaaggccaaggtatccacgtcccccgctgacttctccaccagccccttctcgcagtgcggtcctgagaatcccccgggacacaggcacacataggcagcctccctcgggacgcaggaggccccattgaggcaggggtgc

SEQ ID NO: 314887 - DNA, 2470 bp, Homo Sapiens
  misc_feature (674)..(674): n is a, c, g, or t
  misc_feature (686)..(686): n is a, c, g, or t
  misc_feature (712)..(712): n is a, c, g, or t
  misc_feature (736)..(736): n is a, c, g, or t
  misc_feature (749)..(749): n is a, c, g, or t
gagggcttctccttttttaatcaatgaccaacttatccagcttttggaaatctggacaaagagaaggcttgagaggaggcctggtccagtgtctaagggtctctgagtgagtctgtgtcagcatgttgggccccagcttgggccttgtccatcgggtttgggcacagcagtttcctgagtaagagccagccccaccctcagggcagcattccagcccaaaaagaaatccaggccctccaggttcggcctgttttcaaggccctcaggacagtcaataaataggttagattctgagccaggcccagccccgcagggtcctggaggaggtctcatgtctgttctggggctcctggggctccctcctcctttgggggtggctccaggaaaattggggtgactgagggtggcttcttcactgagtagggggaagccgggacccccaccaccaggaagtggttcttcttccgaaacaatctccacaggccccgatggttgccacgcacatccaggtcccatatatggaggcacttggcaagctgggtccaggtggtgaagtcatcatctttctccattcgaataaaggccacgtaggtgtggccctctgtgtctggcaggaaagagtcttcacaagggttcttgctgtggtccagaacctcagcctcactgagcagccntgtgaacttccnacttcattaagctttctttcttcagnactgtccacatttcctgagctggnacacctggaaccngtgttgaacttgtgcttcttgaagtaggcctcgtgaaagtagccattcatgttgaggccgacgatgccaaagtggtaggatcgggaaacgtcagggatgatgcactctcggccccggcgttgttcaggcatccgcatccacatgtcccaatcccagagcttttccggtgtaggccacttgggctcaagctcctccttgtacaaggacctcctgagcacccagcccagcccaggcatggtctccacacggtacagtagtgctgggtcctcagccgtgtgttcatacccctggtcattccaggcagagatgcagtacaggctgtcatcctccctccagtaggtggatggattggctcaggaaactgaaaaaatccacagcaatgtccaggtcctcttccagaaccacagcaaacttggcctccggaaacaggttgaaagtggcagtggggctggccttgtagtgctgagacacgcgggcattcttgatgctgatgggagtatgctggatgcccctcagaccaaacagtgccaccacatccatgggttcctcatagtagccgtcaatgaaaactgttatcatctgaggagacaccccctgggctgaaagcagagagcgcagcatcctgtacaggtaattgggtcggttccctgcaatgacagccacaggcacattgaggaccttgttgtctgggagtgggtcagggctgaactcgatgggtgtggggtccttgcagctgcatacacttccatagccctcaactttgctgcagaagcgccggcggcgacggttcagctctgtgtctgcccagtggcactctgcctcttctgctgagctcaatggcacatctgtcttcagcaggactgggtccccccaggaagagagggcaggtgatttagaatgtttctccccgaagacaggacctccttttcgtcccacgaaggcccatgtgtccctccagcccagggcagggccagcctggctgcccaggctcctcagcagagccttggctgtgtccttgaggtggaaggagccctcatccttgacagtgcagatgagcactcggccgggcgctaccatgttgaggaatagcaccatggcctcatcctcatgaggtgagtacgtgtcaaacacacgttttgccatcacgtggcccgtggcctggttgaggacaatgacatggatgccccggccctgctcccgggcctcatcctccagcaccgtggtgccatccactgccacatatactttgctgcgacttgaatacacctctacgtccaggacccgccggggaccactgcctctgcgccgtgggggctccaggcggcctagggcctcatcatagtcttgctctggctctgggtcttcattggcttcactgatggctcgccgagtgtccaggatcaacttgatattgacaatgacagtcaccagcaggaaaagcacggcccctgtctgacagaatctccgcagggcccgctggtttgtcagtttatacttccaggtaaggtaccagctccgcttcttccgagccccaaagggcttgatgagggggctgggcttccagtcgtccataccggattggcgggtcaccaatgtcctggccagcccatgacttcaggaatggcttaggggccccgggccccgctcgggccccgctagggccctcactgctcggcccggctcgccgcggcctccgcctcctccatgccgcttgcggcccc

SEQ ID NO: 314888 - DNA, 1122 bp, Homo Sapiens
  misc_feature (99)..(99): n is a, c, g, or t
cccaagggccgcccaaggggtgttggattacccccggggcggatttcagggtttccatcccaagcccggtgtttgggaagaggcgttccacattctcgngcccgagaaaggcgcttaaatggaatttctgccggccgggtgatctgggggaaagaactggcccaagggtccgggcgggcgtaaaattttggataatttggaagcctcccggccgtgggggcccttccccgggtggggattgagagttcccccggtgtaaaggggggcgcttcgagggagaacttccccaatttgtggggaattttttgttttgcaaagagaaccccccttcgcgggtgtgtgcccccgccccgcgcgggcgcgggtgtttttgtattattgtggggtgggaggaaagttcccaaaaagcgccttatgttccattggaccccaggggaattttcccttaggggaaaagcagcttaatgggtcccagggttccacctttaacctgtcggggggccccggcggcggccaaaaccgaaagggtctaagaaagtttgcttcgagggcccgaaggcggccggacatgttttttatctctgtgtctctgggttctgggggtttttgtttttccagagggcttctccttttttaatcaatgaccaacttatccagctttggaaatctggacaaagagaaggctgagaggaggcctggtccagtgtctaagggtctctgagtgagtctgtgtcagcatgtgggccccagctgggcctgtccatgggttgggcacagcagtttcctgagtaagagccagccccaccctcagggcagcattccagcccaaaaagaaatccaggccctccaggttcggcctgttttcaaggccctcaggacagtcaataaataggttagattctgagccaggcctggaaagtgagggtattcaaagggcaggatgagctgctagggatcgtaatgattcccaggtactctcctgcccttctccaacaaggaagtaaataaatagacttttaactcaggaacggggtgttggagcaggggaacccgccccttggagttagtaattaagtctcatgttaaaaacaaggtagccccagcccctaccagcatctacaa

SEQ ID NO: 314889 - DNA, 649 bp, Homo Sapiens
ccgcaaacacaaccccgagtctgctagctgctggtgcagaataaacactttggccccacactgtcctgagacaaagtcacccagcatatggcaaagctgctacttctcggctggaacatttgaggcaacagtgacttcctccttccccagttacctggacgctcagagccggccagtgaaacatacaaagggaggggaagagaagagggaagccatgtttcagtttcagtttatttcacagaaatgttttgaaatcctttatctctaatggaagcacaaacgggtgtgggggagtcaaaaatgggggaaaaatttagtctgtaagcaaatcattggatggcatcagaatttgagccagggtaaaaatgctggaccttggcccttatcagacagagaagtgcagaagaactcaggttgggggattctatttaaaacatgttcagttctgaggaagaggagtatgggcagggcagaggaaaaatgtaaaatgggaaactccctcatggacttaaggccccagccagagagaaacccatgtgctttctccctgcttccccgcttcccttctgacttggggcaaatgaggcagttcatgctccccttagggcttggaggcagtcttcaggggccagctgggcagagaagaagt

SEQ ID NO: 314890 - DNA, 505 bp, Homo Sapiens
ctccacgggttcttggaagtgaccgggatgggaatcccgtgttgctgtgcgtactccatcaggtcattgcggcccttgaaccggttgtagaattcaggcatcctccagggagcaatgacctttatctggggggccagtgagtagcagctgagctcaaaccggacctgatcgcccccctgtggcgccgtgggacacatacttggcctcctcccgctgggcgatttccacttgtttgcgggcgatgcagggcctggcaagagaggtgcccaggaggtagcggtcctcatacagtgcgctggactggatggccgtggccccaagcttcagtgccttcttcctggcttcctcgaagtcttccttctggccaatgttggccagataggcaatgacgtcatagccttgttccttcagccacacgaggatgcacgaggtgtccaggccgccactgtaggccagaaccacggagcctttgctggacatagcgtcgggctcgggcagcggtggc

SEQ ID NO: 314891 - DNA, 729 bp, Homo Sapiens
  misc_feature (29)..(29): n is a, c, g, or t
tcagcaaacaagcccaggccgtttgattntgcgcacttcccgggtccatggtgaaggcctcgatgtctaaatgagcatggtaaaggatggtgcctgctggggtctcgtagatacctcgggacttcattccaatgaagcggttctccacgatgtcaatacggcccacgccatgcttgcccgcgacttcgttcaggtacatgaagagctccaaggagttgaactcgatctcgagaatgtcaggggtgttgggggctttggctgggtcctgggtcttcgtgtagagacctggaggcgcttggttcttggggttctccaggattccagcctcgtagctgatgtgcatgaggttctcatccatgctccacgggttcttgggagtgaccgggatgggaatcccgtgttgctttgcgtactccatcaggtcattgcggcccttgaaccggttgtagaattcaggcatcctccagggagcaatgacctggacataggacaaggggtcagagccgggagggccgagctgtgggcttcccctggcctgtaagctgcagagctggcctctcctgggaggggcccatgggggtctccagcatgtccccagagaggatgctgttgtgagggtgagagggagccccatgaaggaggggaaggacacagactccctcaccggggctggctggacggagcctgcactccatggcagaatggtggtgtgttggggtgagaaggggg

SEQ ID NO: 314892 - DNA, 599 bp, Homo Sapiens
ccgcgacttcgtttcgggtacatgaagagctccaggagttgaactcgatctcgagaatgtcaggggtgttgggggctttggctgggtcctgggtcttcgtgtagagacctggaggcgcttggttcttggggttctccaggattccagcctcgtagctgatgtgcatgaggttctcatccatgctccacgggttcttgggagtgaccgggatgggaatcccgtgttgctttgcgtactccatcaggtcattgcggcccttgaaccggttgtagaattcaggcatcctccagggagcaatgacctttatctggggggccagtgagtagcagctgagctcaaaccggacctgatcgttcccctttcctgtggcgccgtgggacacatacttggccccctcccgctgggcgatttccacttgtttgcgggcgatgcagggcctggcaagagaggtgcccaggaggtagcggtcctcatacagtgcgctggactggatggccggccagatgaactcctccacaaactccctgctgacatcctcaatgaacacctttttggccccaagcttcagtgccttcttcctggcttcctcgaagtcttcc

SEQ ID NO: 314893 - DNA, 1519 bp, Homo Sapiens
ttagaaataaaagactagtgtctcttttaattgtcatttttatagctccccaccgcagctgccccccacccttcccttcgatgacaacgtttgcaggcttcagggggaccagggaacaaagctggggcctggcagccccactacgctgccagccggggagaacaagtcacaattacaaattatcacaacaattagcgcctgtacttgggggatctgcaaattgaggaggccccagctcctcattgtacacgggtctatttggcagtgaccttgctctggagacgatgatattccttcagcctgagggaattgatgttgatgaacccggtggcatcagttggctcataatcaccctgcacgttcatgctcaccagctcctcattgtagagagacagtggggactcccggccgaggatgtacacctggcccttgaggacggacacctgcactttcccttccactcgctcctgggacttggcgatgcagtggcggacaaattcacactcagggctgtgccagaaaccggtatacaccagctcagcaaatttcaagcccaggccttgtttgattttgcgcacttcccggtccatggtgaaggcctcgatgtctaaatgagcatggtaaaggatggtgcctgctggggtctcgtagatacctcgggacttcattccaatgaagcggttctccacgatgtcaatacggcccacgccatgcttgcccgcgacttcgttcaggtacatgaagagctccaaggaggtctggtgggtggtgccatccttgacgttggtcaccttcacagggaccccttttttgaactcgatctcgagaatgtcaggggtgttgggggctttggctgggtcctgggtcttcgtgtagagacctggaggcgcttggttcttggggttctccaggattccagcctcgtagctgatgtgcatgaggttctcatccatgctccacgggttcttgggagtgaccgggatgggaatcccgtgttgctttgcgtactccatcaggtcattgcggcccttgaaccggttgtagaattcaggcatcctccagggagcaatgacctttatctggggggccagtgagtagcagctgagctcaaaccggacctgatcgttcccctttcctgtggcgccgtgggacacatacttggccccctcccgctgggcgatttccacttgtttgcgggcgatgcagggcctggcaagagaggtgcccaggaggtagcggtcctcatacagtgcgctggactggatggccggccagatgaactcctccacaaactccctgctgacatcctcaatgaacacctttttggccccaagcttcagtgccttcttcctggcttcctcgaagtcttccttctggccaatgttggccagataggcaatgacgtcatagccttgttccttcagccacacgaggatgcacgaggtgtccaggccgccactgtaggccagaaccacggagcctttgctggacaatagcgtcgggctcgggcaagcggtgg

SEQ ID NO: 314894 - DNA, 406 bp, Homo Sapiens
  misc_feature (18)..(18): n is a, c, g, or t
gtcccatggtgaaaggcnctcgatgtcctaaaatgaagccatggtaaaaggaatggtgccctgcctggggtcctccgtaagatacctcgggacttcaattcccaatgaaagcggttctcccacgatgtcaaatacggcccaacgccatgcttgcccgcgacttcgttcaggtacatgaagagctccaaggaggtctggtgggtggtgccatccttgacgttggtcaccttcacagggaccccttttttgaactcgatctcgagaatgtcaggggtgttgggggctttggctgggtcctgggtcttcgtgtagagacctggaggcgcttggttcttggggttctccaggattccagcctcgtagctgatgtgcatgaggttctcatccatgctccacgggttcttgg

SEQ ID NO: 314895 - DNA, 642 bp, Homo Sapiens
  misc_feature (423)..(423): n is a, c, g, or t
  misc_feature (442)..(442): n is a, c, g, or t
  misc_feature (485)..(485): n is a, c, g, or t
  misc_feature (491)..(491): n is a, c, g, or t
  misc_feature (506)..(506): n is a, c, g, or t
  misc_feature (563)..(563): n is a, c, g, or t
  misc_feature (566)..(566): n is a, c, g, or t
  misc_feature (573)..(573): n is a, c, g, or t
  misc_feature (595)..(595): n is a, c, g, or t
  misc_feature (614)..(614): n is a, c, g, or t
taggctttgatgcgaccttgactgctgccctgccctgccctgccctgccctagacaaaccccactttcctgtccatctgcccatagcatcctcagaagcatgctttgatagccgacagtaacagagggtcctaggcattggggtcctaggttcctgtgtcccaccggtgcctctgatacttgccctcccctcccgctaagccacagggactccactatgagctcctttgcagggcaggttaaacaaggaaatagcatagaggtggagagaagcctttgttttctgtcaccatacctgagctgtaggtctagctggaagcatcctagccacgtggatctccatggccccaggagggtggtgcacgtcatctgaagtcactcagacctttgatcctctgctgaaggaatatcatcgtctccagancaaggtcactgccaaatanacccgtgtacaatgaggagctggggccccctcaatttgcagancccccnagtacaggcgctaantgttgtgataatttgtaattgtgacttgttctccccggctggcagcgtagtgggctnccnggccccngctttgttccctggtccccctnaagcctgcaaacgttgtcntcgaagggaagggtggggggcagctgcg

SEQ ID NO: 314896 - DNA, 389 bp, Homo Sapiens
ctcttttaattgtcatttttatagctccccaccgcagctgccccccacccttcccttcgatgacaacgtttgcaggcttcagggggaccagggaacaaagctggggcctggcagccccactacgctgccagccggggagaacaagtcacaattacaaattatcacaacaattagcgcctgtacttgggggatctgcaaattgaggaggccccagctcctcattgtacacgggtctatttggcagtgaccttgctctggagacgatgatattccttcagcctgtaaaccagattcaaaacaaagaaaaatgtaaattaacaataacaacacacactgggttcaattaattcaggcagagctggggtggctggggcagctgtttgttaaga

SEQ ID NO: 314897 - DNA, 1516 bp, Homo Sapiens
ttctgtgttttggttcactcctggttttttattagtccgctagcgtttttccgccttggccacccttttgtgtgcgcctcatttatgtactggacaacggttctctcttgcgtgcccccgccggtgagggtctacagttgccctgttccaaaccgcattgaggaactgggccgagaccttgtcgatgccagcctggtcttcccggcccgccgggaacgcccagttgggccttgccctaatacccttcgccggcacctccttagtaaccgcccctccactaccaagaatgtattcacactgatttcccactctaccgggaaaacttctcaataggggccactgcctacaattctttggtgtttttgtggccaaatgtgttacttgtgcaccaaagagttttttaaaaagagatttgcctacgggtgagcactgaagtatacattgtgccaatgtaattattgtcttggagaccttctagaacttgctaaatcatatagcaagaagagaatgagttcaggcccagtaaatctggtgagttaatttacatctgtgatactgccgtttttcccattaaatgtggttatggcaaagcattcttagggtaataaataaataaataaactttggacaatgcctttacttgtgccctatatacagaactattccatagaattttccaggatttcaagatactacacaaagaaaaaaactgtaaagcaatttggtcctttccaaatttcagcagctgagactgaattaagtaaatcagatgggagtggggagaagggcagaaagcagcctccccttaccctatcagcacaaccaaaccccatgaaatcccattaaaagttggtgagtctgagaaaagcgatctccacggtttctctacctctaggatgtcatttaaatttccattttgtcatccttccctgtcttgacattttaaaaatccacccctccccgacccaccctccagttatgctccaaattgtaactcaaaattttcatgtttgtgcagcaaagcacatctcaacagccacaaatgtgcaaacgtacaaccattcacacacgtccatacatgtgaagacagctgtaggcattgtttcagcatgcaggcatcgaacaataaatagctaaatctataacaacttcttaacagccaagggaaagtttaaagtcacttataaatagaaaagaacatctaccaaatggctaccatcaaagtccccattgttcagaaacgttcctggggagcagaccccttagagattaacggagagtccagtggtcttcattcttcagccagcccagccagcttccctctcggacccacagttgggctttgaatctccagcagcagctggtgtggaggcttcaagctctgtcctcagagagaggtgacaaccatttcaaattctacacataaatggtggggctctccctttgaggggctgattaacattgacattaatccacaattacaagacaaggactagatcacaggtttgttcattca

SEQ ID NO: 314898 - DNA, 822 bp, Homo Sapiens
  misc_feature (415)..(415): n is a, c, g, or t
  misc_feature (488)..(488): n is a, c, g, or t
tgtggacgtttcacagggtgagaattggtcaagtagtgagaccaaatgcctatatcgattcaaagagtgggagtccagaaagttccctacaggctggggccccaacccttaccacagctccctctggctcacacacagtaattaatagaggattcaagaacagaccccaactttgaaacagctgcagaaaattcatcctgctttcagaagccatgcagtgacacatacatctctcttggcagatttgcatcataaactacagagctgtaactgctacaatataaacgacactgactatgcccactgggggacaattagacatttgcattgcttagaacacatctaggaaccagggactgactgctggaaagtactgtgattcttttcttccaacagctcatttatttaggccccnaactacagccccactcattcctggccatggacggacaaacacaattagtcctaaagtacctaaggtggagagnaaatgttaaggatttatctgtcattagacaatgcaaacacagtcacaatgtaaaaggttgttatccagtcttaacccctattttctaaaatacagcaatgtgagaaacatggacgaaagcagttcgagttgcaaactttggtcttcccctgcacctcaggggaagcacctatttgagactagcactaatacctacgacggcacatgcttagtaaacaagcactccaactagcaaagaatgtattcacaactgatttccaactctaccggaaaacttctcaataggggccactgcctacaattctttggtgttttgtggccaaatgtgttacttg

SEQ ID NO: 314899 - DNA, 893 bp, Homo Sapiens
  misc_feature (123)..(123): n is a, c, g, or t
agcaaagtgtgaaacccagtgccttagcaggtgtcaatgtacagagatgcggttatagataatgaaatacagtgtccagaacttaaaaagaaacaccacttctactaaatgttctcactctgnctgtgttctccagtctctccatatgaggtggtgaaagagtgagggagtagctgggctagcaccccgtttttcttctcctcttttcacaacaacttattaaggaattatctaggctcccatttgtcttttttcctcaatcctcttcaattacacttctgtttccctcaaccattgaaattgttcttatccaggttgctagtattctccaatttgcgaaatctcatggtcaattctctgttctcatctgaccctacctctcagaagcactggactgctcactacttccttctcctttaaatgtctttttttggaacttggcttctgtgacacctgactctcccagtattcctcttatcttttttgactactcttttcttcaacctgatatctaaatattggaatcccctactttgggcctcttctcttctctctctaccttcacttccttggtaatctcacctagtccaggggctttaaatgccatctatatgctgatgacttccaatctgttctcgtcagctctgactgacctctcctttgaggtttaggctccaaatcagctgcctacctgacatgcttatggggtgccaataggcacccaaaacctaatatgcccaaactgatttctgccccccaccaacacacacactccatagtctttcccaattttagaacacaaatccaccagccactcagttgctgagtccacgaaagctgagtcattcttgaagcctcttttcccttccatactctgactgatatcattcatt

SEQ ID NO: 314900 - DNA, 886 bp, Homo Sapiens
  misc_feature (56)..(56): n is a, c, g, or t
tctcccatcagtccccaaccctggcttccctcttcacgaactctcaaagaaaaggnaaggattaaaacctaaataaaccagacagaagcagctctggaacaaaaagtacaaaaagacagccagaggtgtgcggagagggtgaggtggccgcgtgaacgtgggtagataatcgcatgcagcactggaactcctgatgaggggtggggtccccacctcctcaagggagggattgcggggagggggtcagctgactcagagaagtaggatctctgcactggaacttgaggcttcctgtctcctccatgggccccaccagtcacagggacatgaaatccgtggcctggaggagggagagggagagcaggagcagcagcagccacgaggtgttctgagccagcaggctgatgccctcacacttgaccagtttgtctctgagcactgtgacgttctgggaggagatgggtggggaatggccagagtggtggagtgcacacgtgtaggtgccctcgtccttgctagtgaaggcggataagtagaggaccttcatgttgtatttgctggtgaagttggttcgggagcggtatgtgtgctcaggcacccccacagtgccaaagagcacgtgcttctttgtctcacgggtcaggctgaactcgtactggatgggtgaactgctggtattctcatggcggcagtccagacgaaggctctggtccactaggcaggccgttaggctggtcaccttctgccctcgggagacctgcaagactgttagcaggagagcgatgctgatggccaggttcatggttctgggatctcagtcctggatctggactggggtcttccgctgctgcagcctcctccagacgcgcggccgcctccggttgct

SEQ ID NO: 314901 - DNA, 680 bp, Homo Sapiens
  misc_feature (511)..(511): n is a, c, g, or t
gcgttcttaaggctgcagagccctgggtcccccacccggccccggttgactttgagcggtcccaaggcctgagggcctactgtccagtccccaggttatcgtcctgagcaaagacagaccccgagccctgcggtcttggggctcaaacagtccctggatggccaaacaagcaaatattcgccatggcagtgggtgctggaagggtggctcacggagctgacgccctgcgcagagaaccgtggtctagtcctgcggtcacgaggcctatctgggacagtggtgtttgagctgagactttaacgaatagagacaggtgaggttcctgcatcccagggcttcaggcactgtgctaagcagttttcctggaagtgtctacctcatttcgttctctgaatagctctaagagcgtgaacaaccccagaaggcagtttctcacttcatctctgtgtgataaattttgacatatgtgtacatccatgaagccggcaccacaatcaagatgatgaacatnttgcttaccccagaagtttgctgtgccctgtaactcctgcgtattcctacatcctcagcatgaacgaacaaatatcatccatattgttgagctgctgatacccaggaggctgggacccatttctttgttcatggtggtggctactgaggtctcctcattgactcttgct

SEQ ID NO: 314902 - DNA, 732 bp, Homo Sapiens
gaacttcttcagaggtggttaaaaaacagattgcccaggtacacaattttgcagttattatgcaactggccagagaaaatatcatactgtcttctaggattgtgccatgattcttctggaagcgaatgacttcctgatcatcttcaaatgtactacccattaccatctgtgtaacagacttcatagcaaaaccaagcaatatgctggctgaggggcacgtgctgggtctctgggtaggagagccatttatctaataattcttctgaaagctttaggaggagggcaaagttactcttcagagaatcagtcacaccattttcatacaattttttcctcatgtggttttcactcacactgccgcctccagattgatccgttaataatgacttcagcatggtttcataagggtccgatgtctctattgggattgatatgctgcttcagtacatcaacagtgcccaatctatccacgaggcgcctgccaaccgagaaggagtccacaggcccatatctgtcatgcaaattagccaggaactcatgcaaacttcctctattcacaatatctggaagattaccatctttttcttcagttggagtaatccctggaattcctgcagcttgtctggaagccggatagaggtagagcacggctcccatctacgccagcaagaaggtcacggcgaagctcgcgaagtccaacatggttctgccgcccagggagccacgtcgcgg

SEQ ID NO: 314903 - DNA, 821 bp, Homo Sapiens
  misc_feature (66)..(66): n is a, c, g, or t
  misc_feature (295)..(295): n is a, c, g, or t
agtttggtctgagattggaaaaggctttctagatgggtcacttgataaaaacatgactcggaaaanacaatatgaagatgccctcatgcaactggagtctgttttaaggaacatcataaaagaacgaaaaggaaggaacttcagtcaacatattttcattgactccttagtacaagggaaccttaatgaccaacagatcctagaagacagtatgatattttctctggccagttgcataataactagcaaaagttgtgtacctgggcaatctgttttttaaccacctctgaagaangttcaaaaaagattatatgaagagataaaccaagtttttggaaatggtcctgttactccagagaaaattgagcagctcagatattgtcagcatgtgctttgtgaaactgttcgaactgccaaactgactccagtttctgcccagtttcaagatattgaaggaaaaattgaccgatttattattcctagagagaccctcgtcctttatgcccttggtgtggtacttcaggatcctaatacttggccatctccacacaagtttgatccagatcggtttgatgatgaattagtaatgaaaactttttcctcacttggattctcaggcacacaggagtgtccagagttgaggtttgcatatatggtgaccacagtacttcttagtgtattggtgaagagactgcacctactttctgtggagggacaggttattgaaacaaagtatgaactggtaacatcatcaaggggaagaagcttggatcactgtctcaaagagatattaaaattttatacatttaaaatcattgtta

SEQ ID NO: 314904 - DNA, 1311 bp, Homo Sapiens
ttttgaaatgtaagtatacagattttaatttatttttaagaataattgtatattttaaaaacaggacacgtactgtatgagtaaacagcgtggctaacaccaagtccacactggtaagcttttgagaaccatttacactatgttgacagtagtactgctgcaggcagacagcggaagaataaataatagtgcttcaagaagagtagtgattgagaggataggtaaagagggcgcctcatcgtggaagctagagcaggaacacctccccagtagtgacatgtgcaaagttccagatctccacgacaaagacagctcaacccactggaacaaacagactcccaatgtggctggcaactgcgggggtagaagaactcaggcaaagtaggcacaggaatgggggagatgagagccaagggacaaacgccgagaaagcgttccgacaagcatgtgtgttcatacatgcatacccccaacaaagggcaatgcactgtgtaacagaactgaacacaatttaacaaagctgctcccagccttcctgtcacctctttggcagtagggcaggccatctcaacttcggacacacaaagacattctcttcaggaggaaggctgtcctgtgtggtggggacaaggcttcaggtaagagcaaagctatgatagctacagcattaattgaacatgcctaaacaaaaaagatgttaattactagttacaggtatacatgccaaaattacccccagggatgggcatagtcaatcattttcctacagtggtgaaataaaacaagctttgatcatgcttcagcaagtagaattatgtggtagagaagtcaggccccatatgctaaaatttgcacttcttgccataaacttttcatgtatataagtcaaaaccaagtctcctaggaccactaaacctatgatgggctttcaactgtaacactcattcacatctttaagttaggcccatggtcatggaacctggccaaggtttcaagcacgcctaagctgaagaaaaactaaagtcacccccatataattaggtccagtctaggcacaggaagccacagctggttgactgatcagggcttctcaggactggatgttggttgaattgaggattccagaagtagcatcagatttggaagcctttgaaagttctcgcgcaaactcagaataggtgctggcaacagaattaatgctgaagttgcgctggaggggggccgagccagggtacccaccactcaggatgctgccgttgagctccaggttctccttgttggctccatgcctgccagtacggggtgtttctt

SEQ ID NO: 314905 - DNA, 2113 bp, Homo Sapiens
  misc_feature (45)..(45): n is a, c, g, or t
  misc_feature (66)..(66): n is a, c, g, or t
  misc_feature (72)..(72): n is a, c, g, or t
  misc_feature (221)..(221): n is a, c, g, or t
  misc_feature (422)..(422): n is a, c, g, or t
ctccatttcacattctttaagtttaggccccatggtccatggaanctgggccaaaggtttccaagncacgcntaagctgaagaaaaactaaagtcaccccccatataattaggtccagtctaggcacaggaagccacagctggttgactgatcagggcttctcaggactggatgttggttgaattgaggattccagaagtagcatcagatttggaagcctntgaaagttctcgctgaagcccaacagtggaactgtcagagagggacggatccttcgcaaactcagaataggtgctggcaacagaattaatgctgaagttgcgctggaggggggccgagccagggtacccaccactcaggatgctgccgttgagctccaggtctctccttgttggctccatgcctgccagtacggggtgttnttttcccctgaacaggtggaagcagcgactggcttgctgccagaaggaggaagtcgagacacgggggagtggtagactgtccctccaaagataggccgaatgctactattggccgtagcattggacatggtggtagtgttcagcttacgtgcgcccggtgtattgggagccagtcctcgccgcttgctaggtgttcgaggagcgctgccatacagcatctctgtctctgtctgttgttcttcagttgtctttcctgcttggctctctctttctccaatcgatgcatctcccattgttctgccacatactccatgaatttctgcccattcaccataaatgcctttgaatgttcctgttcccacaattcaattcggtgccttcaactcttcttccagcttgggcagcattttctggagcttggctcgttgtttttcttcttttagaagatttcctcctcggtttgtaaatcgatttggatctgaagcttttctctcaaactctaagaaaagcctccaggtttcttcccacttctggacaccttcaaagagttccttgtgaacttcatagtagttttttaaccgcacaatctcagcatcgtggagctggagcagactttctgtgtagtcctcagcacagaaaggggcaaaagcttgtctctgctcctggctataaaagcactggtcccagtactgaaccagctccactcgaattgcctcaatcactttcttcatgttttgcattttcagttcttccaaccgatccacttctaattgcagcgctttccggaccttggcctttgacccagacataatggtggccacagcttctctttcttcttcaggtatttgcaacctgtcccagagctctcggatttgagtacgcagcccctcacacactgcttcattttgtgatttctgcatttccagctgccgtagcaacttttgtagtgttgcaatattctccaaagacaaacaaaaggcatcttcgtcttcacacaccacatctctttcaaagcttgtgtctggggtgtggtctaattcttccatacacagtatgatctgtctctttatactgacaaactcctcacgcctagaagcctttgtttccctcaaagttgtcacatgttgcctgaactggttcagctcttctaagctgggcactgaggcactgtcaatatcatagtggggcatacaaagaatttcgcacagttcttgatcttgctcttgaagtagcttcagttcctgttttctctcctttttctgttttcgcatcaattccacttgggtgcgcaaatctttttctagttgcaagatggtcgtctctccttcttcctgaaatggctcaacatgtaactcgctgcacagagtgttcagctctttctgacagacggatatgcttttgatgagtctttccttcaggctttcctcttcagcaatcatcatatccaggagttccttgatatgcttctttaccacctcagttctttgtaaccgctggtcctctggaatcccaattagctcccatatttcccgaaggtgatttagggctttctgcagacatactatggactcctccgccagcacctcacttctcctcatggcggacgctccaagcagccgtgagtccaggtccagacctactccacacggccccgagagcaacaaccacccgcaaacaccggcgatgtcccc

SEQ ID NO: 314906 - DNA, 637 bp, Homo Sapiens
  misc_feature (591)..(592): n is a, c, g, or t
  misc_feature (595)..(595): n is a, c, g, or t
  misc_feature (603)..(603): n is a, c, g, or t
tttttagctggcaaaggcgtttaatagaaatgagatgagggcaggccgcccctcccccgcccagctagcgcaggaagttcctggggtagagctggaagagctttccctcctgtgtgggctcgaagccgtacttttccaggttgtcagggtcgaaggtaccgtccttgaagtccttttcgatggcaggcgccacggcttcgctgaagagctgcgcggccgtcaggggcgtctcctcgctctcaggggcgaggtagctcacgtagggcttgagcttgaagccggtcagatccgggacgacgaactccgggaccatctccttgatctgcacgaacctccagcccgaggtgaggaagccgatgcccttggcgccccggcccttgcggcccctgaagctgcgcgggccccgcttgctcgtccacttgctcattcggtccgcaccccggaccaggcagcgcgccgctgcggccaggacgcccatgccgcgccctggaccggagaccccacacgagctccaagcggccccggctccggcgccaacccggcctcgaccttgctccgcttcctcgtgccgaattcgccacgcaggccttnnganggtggggntgagggaggaaaggcgagagcggtaggcgagggg

SEQ ID NO: 314907 - DNA, 1416 bp, Homo Sapiens
  misc_feature (73)..(73): n is a, c, g, or t
gtaccggtccggaattcccgggatctgcaactaaacgtggccgggtctgcaagctaggtgccagcggggaaantccctgcttcttatcgtctgctttaacgccttaaatagcccgctgaaggctgcagcaggtgctaggtagcagcctcccggccctcgggaaaggcggggtggggaggcgagagcagcttagcctcctcgacctcccttcctggtgacggacgaacagttcccgtagaatttcgcttcaccgagtgaccttgagcccagggcgacggtcagcttgttaattcctggctgcaggaactttgtgagaattttaatgcatggaaaagctgtccatgttccaactgctgtacatccaaaagtctcagtgtaatagcaggaccaaaatattctgtcaatcagctgaccatatacttaatgactcctaaaatctcgtggacttctaagaaagcgccatggcctgtgctgctgttatgattcctgggttgttgcggtgctctgttggagccatccgtattgaggctgcgtcactgagattgacactcagcactttgcgccaccttactctaaccagcataatgaaatccaaaaggaaaactgatcacatggagagaactgcaagtgtccttcgacgggagattgtgtcagcagctaaggtgtgtggagctgccagtgagtcaccgtcagtgaagagcctccgcttgcttgttgctgatcaagacttttcctttaaagctggccagtgggttgatttctttattccaggagtctctgtggttggtgggttttcaatatgctccagtcccagactgctagaacaagagagagtgatagaattggcagtgaaatatacgaaccaccctcctgccctctgggttcacaatacgtgtacacttgactgtgaagtggctgtgagagtgggtggagagttcttctttgaccctcagcctgcggatgcctctagaaacctcgtgttgattgcaggaggagtcggaattaaccctctgctttccatcctgcggcacgcagcagatctcctcagagagcaggcaaacaaaagaaatggatatgagataggaacaataaaactattctacagtgcaaaaaataccagcgaactcctgtttaagaaaaatatccttgatttagtaaatgaatttcctgagaagattgcatgcagtttgcatgttacaaaacagactacacaaatcaatgcggaactcaagccatacatcacggaaggaagaataacggagaaggagataagagatcatatttcaaaagagactttgttctatatttgtggcccacctcatgacagactttttctccaagcaactggaaaacaaccatgtacccaaagaacacatttgctttgagaagtggtggtaggaggcagacaaaggcaga

SEQ ID NO: 314908 - DNA, 764 bp, Homo Sapiens
cctacaaattatatgaaatgtttcatgaagttagattctgattttgtttgtggaggtggaaagaagaaaatgctacttttaaattcccttactttaccactaatttactccaagtcattaagcactgaccacatatataacagtgctaggtgttgaagggtatgcaaaatttcttttgaaataaatgtaaaatagtggctgatctaaagcaatatgtagtatagtggggcaaagcagacatagatggcatatccaaagataatatggtactttctacacatttggtcagacttagaacaccgtaatttttccataaggtataaattactcagagttcattttaactaactttgatgggtattaaatataattaaagcttggtatatggaaattataaagacaggattatatttagttgttttattcctatgagaaggaggaggaagaggaggagaagaaaatagcccatggtttcggtttgatccacaaaagttttgcttagcttattcggtattagcctacagtatttttaacatacttgaaaatcccgtcattatttaaaaagtagatttctcattttaagaaattcaaatttgtgatttctcttgaaaaatcagatgatttgacaatgtaatctcatagctggaactgaattaatgtgattgtcctctttaaacacgtgctttccgattcaccacaaacaccaacactcccctattctctctccgaggttgtagcattcaggtccctctaggcatctgatt

SEQ ID NO: 314909 - DNA, 392 bp, Homo Sapiens
aaatgatattatgagttccctattttataagaaaaataagccaaaattaaatattcttttggatataaatttcaacagtgagatagctgcctagtggaaatgaataatatcccagccactagtgtacagggtgttttgtggcacaggattatgtaatatggaactgctcaagcaaataactagtcatcacaacagcagttctttgtaataactgagaatattgtttctcggagaaggatgtcgtaaagaagagtctctggctctttagaatactgatcccattgaagataccacgctgcatgtgtccttagtagtcatgtctccttaggctcctcttggacattctgagcatgtgagacctgaggactgcaaacagctataagggctccttt

SEQ ID NO: 314910 - DNA, 893 bp, Homo Sapiens
aaatgataagactagttccctattttataagaaaaataagccaaaattaaatattcttttggatataaatttcaacagtgagatagctgcctagtggaaatgaataatatcccagccactagtgtacagggtgttttgtggcacaggattatgtaatatggaactgctcaagcaaataactagtcatcacaacagcagttctttgtaataactgaaaaagaatattgattctcggagaaggatgtcaaaagatcggcccagctcagggagcagtttgccctactagctcctcggacagctgtaaagaagagtctctggctctttagaatactgatcccattgaagataccacgctgcatgtgtccttagtagtcatgtctccttaggctcctcttggacattctgagcatgtgagacctgaggactgcaaacagctataagaggctccttaatcatatctttccctttgagaatctggccaagctccagctaatctacttggatgggttgccagctatctggagagatcttcctcagaagaataggcttgttgttttacagtgttagtgatccattccctttgacgatccctaggtggagatggggcatgaggatcctccaggggaaaagctcactatcactgggcaacaaccctaggtcaggaggttctgtcaagatactttcctggtcccagataggaagataaagtctcaacttcctacacagcagtgcagagagctgagtcttcagcaggtgcaagaaatttgaacacactgaaggaagtcaggctttccacctgaagatcaacatgcctggcactctagcacttgaggatagctgaatgaatgtgtatttctttgtctctttctttcttgtctttgctctttggtctc

SEQ ID NO: 314911 - DNA, 423 bp, Homo Sapiens
cgccatggctggcaaagacacaggctgagcgctgaggagagggccagctgctgccaaacctgagggctgtggggtggaatgagctggaaggccgtgatgccatcttcaagcagtttcatttcaaagacttcaacagggcctttgggttcatgacaagagtggccctgcaggctgagaaactggaccaccatcctgaatggtttaacgtgtacaacaaggtccacatcacgctgagcacccatgagtgtgccggcctttcagaacgggacataaacctgggccagctttcatcgaacaagtagcagtgtccatgacatagaccctgcccttcctctttggaattctttcgggggaaggggtgactgaactcggagttcaggggagggagctgaggagcctttacaccttcaccacttcccttcc

SEQ ID NO: 314912 - DNA, 1045 bp, Homo Sapiens
atatccgggtattatatttgcccccgtttcttttaccgggtgagagattccctacctggttcctgtgttcacaccttgagagctgagactttccacacagcgtcaaagtttaccgggttgcccactgacaaagaaggtcgggagagcgtctccacatggaccataaaagtttctcccagggaagttcaacgttatatgagatacttcttctgccaagcgctggttcgacattcacaacatgtaaaaggcttcttccccaagaatgggatttttctcatgctcattaaaggttggaatatgccactgaaggtttttccacactctctacatacaaagggcttctctcctgtgtgagttctctggtgtctgatgaggtttgacttctgaatgaaagctttcccgcaatctttacactcaaaaggtttttctccagtgtgaattttctggtgcgtaaggaggttttccttctggctaaatgattttccacattcattacattcgaaaagcttctcgccagtatgggtgttctgatgtttaatgacatactgcttttggctaaaggcttttccacactcgttacattcaaaaggtttctctctcgtgtgaaaatgctcatgctcagtgaggtttgatttgtggctgaagacttttccacataccttacaggcaaaggggttttccccactgtaaattttctgctggctgaggtgtgacatctgaatggaagctttcccacattcacaaggtttctctccagtaaaaatttcttgatgagtgaggatttacttttggctgaagatatttccacatctcttacatttataaggcttctctgtgtatgatctcccaaatgcagagtaagggataaggtttgagaggaaatgttatcatactcagtatattcaatgctttctctctagaaaaattttctaatattcaatgaagtattgctaccttcactagtttctctccagcatgaattttctgcttctcaatgagattgtcatctagctaagggcttgtcaatactccttagaagcacacc

SEQ ID NO: 314913 - DNA, 552 bp, Homo Sapiens
  misc_feature (431)..(431): n is a, c, g, or t
  misc_feature (489)..(489): n is a, c, g, or t
  misc_feature (496)..(496): n is a, c, g, or t
  misc_feature (536)..(536): n is a, c, g, or t
cactgttgtcctatttttaatgggtgtgcatgtcaggattttctttaaccctaccccattccacccccagtggacagaaaggaaattgactgacttgaggggatgcagacatctgggttattccaacagaccagtggttcggcggcgggggtgggtagcattatggcctcgggcaggcccccccaccctgagcctctgaaagctgactttatctgtccgagggaggtcaggctcgccttctcaatagcgtgtatttggatgagatgagtttcttctggagtacacttaggcagagcagggctggcttagggctggcgcctcagcgtttcacaacttctcaccttctcttccatgtcttgataccaagtaggcagcctcttcagttgctggtgtccttgtggcctcatctttgatcagatccacaccaatgnagagcccaacacccctgacatccccgacgatgggatgtttgattttttgctgcccgangagctgnatcaggaagctgcctacactggtggcatgatcctggagcngctccttctccaagac

SEQ ID NO: 314914 - DNA, 1048 bp, Homo Sapiens
  misc_feature (1006)..(1006): n is a, c, g, or t
  misc_feature (1009)..(1010): n is a, c, g, or t
  misc_feature (1029)..(1029): n is a, c, g, or t
ggtttctgtttctgagcaggagttgcagccagataaggtgggacaggtggaactcgtgaaactataaaatgacagtctttgagacagttagggaacccagtggttattactccagtggacagtgatagaggcctttttctctatgtgccataatgggaaatgggtgggaagagcctctaaggcagagtttaagtgaaactactggtagtgagtcttgggagtaagtatatttagttggttatattcagtatttttaatttagtaggatagaatatatcagattgcattattttaatttgccaattaaaagtatgactgggacactgtaaaatgtactatttttaatgggtgtgcatgtcaggattttctttagaaatacactggtctggtctaatttatttaagcaggagcactttaaagtatcccaccctaccccattccacccccagtggacagaaaggaaattgactgacttgaggggatgcagacatctgggttattccaacagaccagtggttaggaggagggggtgggtagcattatggcctcgggcaggcccccccaccctgagcctctgaaagctgactttatctgtaagagggaggtcaggctcgccttctcaatagcgtgtatttggatgagatgagtttcttctgtaaagagaaaaagatgttaaaacctcattgtctaaggcccctcatctgagaagtcttgtctgaccctctagcccagcaggaccaaggtgtggtgcctggtcccagcctgtcctctgctcccctgggctgcagttggcccagttgcctgcctccattagatacggagttgctctggggctgagatgcccatctcaagtgcattctgtcggaagggttctctgctggaaggcctttggttttagttgggattccatgagctttagcccaaaggtggcctcccatactagcatattttgtttctcagcaaatggacctgatcaccatttgatgtttgtcgcagtgaaggtgtnttnntagtcactgccctgagttngtcctactggcctgacgcc

SEQ ID NO: 314915 - DNA, 1619 bp, Homo Sapiens
  misc_feature (21)..(21): n is a, c, g, or t
  misc_feature (27)..(27): n is a, c, g, or t
  misc_feature (48)..(48): n is a, c, g, or t
  misc_feature (57)..(57): n is a, c, g, or t
  misc_feature (91)..(91): n is a, c, g, or t
ccagggccaaagggtggaggnaagtgnccgagccccaaaagtccgcangagctgagntgtgggtccatatcgaatgggtggtggtacaggncctcccatgggggtgctcatgagagggactcctgggaaaggagggggcccctttggagccatataacctttgccttcatcgagtacccttggtaggggaagagcctcttgagctgctgttcatcatggtagctgtaccagatcctggatcagaaggagagggtttcccagatgcctcagctgaccatcgaggatgaggtagaggcccgtccactgatccaaattcacttctaggcatatctcttcgattgagagtagcagagagaggtctcacgggtggctccactgtcaatggaggggagcattctccaccactcacaggggatgggccaaaagacccattctggctcagaggacctctccgtggagggttttgtgtatttggttttcctggcattggttttacaatcacaggttcttcttgcagcattgccatcttttgtgttaattctaataatttgtgtctcaaattggcagcttcccttttctcttcagctatagctctttctgcagcacgagctttgagccagttttcatgagctttcttctcatgggtagcgatctggtttttaaaatgaccgctctgtcttctgtaattcatcctccatttcttcaattctccgcttgtaagtttttacttccctctgcagcccgaaactgcctttttcatctgcagctgacagccctgtgctctctttcttgccgttcatactcttcttgactcagtttcttttgcaaagccatctccttctgctgatagagctcattcagaatctccactttctgcctcaaggttttgcattcatcttccagtccagctttggcagcttgtagtgagttgcggtcatcttccaatttctttacctggtcttccaggttacatttagtggacacggaggctcttagcttaagctgtaaaagctttagatcctcttcaactaccgatattgcagtctgtgtccgagagacatccatcatctgcttaatttgatttttcatcttctcattccggtcacctcccacttctccatttgctaattcatctgaatcatttccacctttattttgaccctcagattcagattcacactctaacagattcaactgtgtaatgcagttagtcaaagcattaatattatcatccttgtgagtaagagctacttccaaatctttctgagacttctcaaatgatttgatttgctcactgagctcagcatgtaatttactccagtcttcgatttcctgctgcaactgctcttttttcttcttaagcctagcattttcttcttgaacccgatggcattcagacttcaccttctcttcactaagcttagcttcattaagtgcaatctgaccctctgaaaattctgaggcattcattgaaatacacatcctttaacttctctatagatttattgttttctgatatcaagtcctgattcttgacattctgttctctctcagattctagcataacacgaagatttttagctgtgtcatccagaatttcctgatttttttcgagtgtc

SEQ ID NO: 314916 - DNA, 1240 bp, Homo Sapiens
caaatagacaatgaggatcgtaaagaaagcatgtgaatgctatacaagtgggaaataaacttctttgaaataaaaagacgtcacttgtagagttcacaggtgacggaggagcagccggaagtgtgccaccagccaccatcttcagttctgggagcctgagtttacatgttccccaaatggcacaagcctcataacagtccaatgagtcaacagacacttgggaaatattaataaacaaatttttatgagctattactacaaagaacttcagcaagaggggagatagtttagtgatcttttagtaaacatttttagcgtaacagtctttgtgaccagatagtttaaaaaaacgcttataaacaccattgctccgtattcagctggtgtacactaaaaataggataatggaaatacatgttcttaaagcatttccacaggaaatgttcatatttttcatgacattctaaatcattttgcaattacatatgctacattagctaaaacacaggtattctttattgcacatttcaaagttgtaaggacgctctagcttaaaaggtgatttttatttagggaagaaatgacatttttgaattgtttggctcaaaaatgcacactgccaaggcagcttagttctaacaacaaaccttttaaaataaacttttggattttgaagccaatgaaatcctttactgtaatggataatgcacagtacactttctttccaatgaaacctcagaggtcatagttttatgggctctgttttaaagcctgtgaacagtcctggctagtgctctgagaggcaggtggaggctcatctctagagcctgacggcagtaagtctcttacagcaggtggtggtgggtattcctggggaccatgggttgggggtggtaatcgggtaccaggaataaagtactctcttgggccaagtgaacctaaaggtctaaatggtgcgtgtccaggtaaaaatccccgagggtggagaggcaggtcccgtcttcctggtggaacgcctggtgcaaattctcttaagcctagtggtggacgcataccagggccaaagggtggaggaagtggccgaggcccaaaaggtccgcagagctgaggtggtggtccatatcgaatgggtggtggtacagggcctcccatgggggtgctcatgagagggactcctgggaaaggagggggcccttttggagccatattaacctgcagagtagaaacaattgaagttttg

SEQ ID NO: 314917 - DNA, 426 bp, Homo Sapiens
  misc_feature (93)..(93): n is a, c, g, or t
  misc_feature (143)..(143): n is a, c, g, or t
  misc_feature (162)..(162): n is a, c, g, or t
  misc_feature (396)..(396): n is a, c, g, or t
aaaacttcaattgtttctactctgcaggttaatatggctccaaaagggccccctcctttcccaggagtccctctcatgagcacccccatgganggccctgtaccaccacccattcgatatggaccaccacctcagctctgcgnaccttttgggcctcggcancttcctccaccctttggccctggttatgcgtccaccactaggcttaagagaatttgcaccagggcgttccaccagggaaggacgggacctgcctcttccacccttcggggatttttaacctggggacacggcaccattttaggacctttaggtttcatttgggcccaaggagagtatttttatttcctggggtaaccccgatttaccacccccaacccatgggtcccccagggnattacccaccaccacctgttgttaaggaga

SEQ ID NO: 314918 - DNA, 945 bp, Homo Sapiens
  misc_feature (105)..(113): n is a, c, g, or t
  misc_feature (220)..(242): n is a, c, g, or t
aacagaagcctacaagagctattcagcatttcttcaaagtaggttattatataatagagataaatctttctgaattaggacatgatactgtaggcagttcaaggnnnnnnnnntagccataactttttctttggtgtaccaaaaaggatatccaaaggttagcaaatgttgacatttcaagtgacagaaaattgcctaatgaagttttaaactctggttnnnnnnnnnnnnnnnnnnnnnnnctgttgtaaaaggaaaagctccacccatagttctgtagtgcaagttttcaaatttaattctgaaaaataattttatttcataggcaggaaacaaattccagcagtgtatcacttactcctttccaacccttcccctctctctatgtccacaccatcacttcagttgtcaatgacctcagctgctactcaaggaggaaattcattaaaaaattacccacacttctaaaaatcaggctacaattgtgtgtatgtggctgcacagcagcaggcaccaggttacagcattgccacttctacgtttgtcatttttacaaaaaagaagcaaagtctacctcccccagaaaaaagtacctgaaccaattagtcacttagccccttcccagcctctccgtgctcaccagacctgcctcacctcagcagcacacgtgtgcatatatctgtgtgttctgtgcattaagaaccagcaactctactgcctctttcttgaagtaacatcttctcctttcttacaaaactcgctgatttctataaacgtaattctctgaaagcaattaccgcctagaccagaggactccgttactctaccaagcttaagtctggcttgctttcttctatttctgtacatgttgtttgtgtatatgtgtattttttaaaaattaaaaagtgtggaaaatgcacacatacacacccagcatttagcaaa

SEQ ID NO: 314919 - DNA, 785 bp, Homo Sapiens
gtgatgtggttcatcttaaccggcacaggctgtcccactctggggagtaagccctactcctgccctgtgtgtgggttgcggttcaagagaaaagaccgcatgtcctaccatgtgcggtcccatgatgggtccgtgggcaagccttacatctgccagagctgtgggaaaggcttctccaggcctgatcacttgaacggacatatcaagcaggtgcacacttctgagcggcctcacaagtgtcaggtaggggctgggtcagggcagagatgggctgaaggagatgatgctgttctcacggtcgcagccttgagccagccgctgcgtgtgccgggggcccggctgaccgcccaccgctttgcacacctcccctccgttcctccaccctccctctgctctcctcctttgttcttcccccaggcccccttcccccacagctgacgttcctccttcctggttgcttggtcctggttcccaccctgtctttgccttcactctgttgcttggcttccctctcctggtgtttgccggctccttggatggtgggccgtatcacacagatgttgtgttgggagacccggcactgcgctgggcctgactgttggtttccagcagtttgtagggactgcaggtttttttaaagggctcctggtggtccagccaaccactcttccccttttctgacctcagttagagctcctcccgggtcccctcagcttagggcacaaggcagtgggggaggtaggaggtcggggagctacccccccacaccccctttgtctctcttt

SEQ ID NO: 314920 - DNA, 2053 bp, Homo Sapiens
  misc_feature (39)..(39): n is a, c, g, or t
  misc_feature (50)..(50): n is a, c, g, or t
  misc_feature (113)..(113): n is a, c, g, or t
  misc_feature (115)..(115): n is a, c, g, or t
  misc_feature (126)..(126): n is a, c, g, or t
  misc_feature (129)..(129): n is a, c, g, or t
  misc_feature (131)..(131): n is a, c, g, or t
  misc_feature (138)..(138): n is a, c, g, or t
  misc_feature (141)..(141): n is a, c, g, or t
  misc_feature (1830)..(1830): n is a, c, g, or t
  misc_feature (1844)..(1844): n is a, c, g, or t
  misc_feature (1846)..(1846): n is a, c, g, or t
  misc_feature (2008)..(2008): n is a, c, g, or t
cgggatgtccggctgatgtagggggcgcgacggcaacancagaacggcgnggccgtggggcaaccgggagctgtgatgattcatcattattcagtctccaaggtatttggggntnttctggacttntcntntacttcncanatcgtggtgcgcttggagagctttcccgaactcatgacggccgccaagttcctgctgatgaggtcggttatcgagatctgccaggaagtcatcaaacagtccaacgtacagatcctggtaccccctgcccgcgccgatataatgctctttcgcccccctgggacctcggacttgggcttccctttggacatgaccaacggggcagccttggcagccaacagcaatggcatcgccggcagcatgcagccagaggaggaggcagctcgggcggctggtgcagccattgcaggccaagcctctttgcctgtgttacctggggtggaccgcttgcccatggtggctggtcccctatccccccaactgctgacttccccattccccagtgtggcatccagtgcccctcccctgactggcaagcgaggccggggccgcccaaggaaggccaacctgctggactcaatgtttgggtccccagggggcctgagggaggcaggcatccttccatgcggtctatgttgtaaggtgttcactgatgccaaccggctccggcagcacgaggcccagcacggtgtcaccagcctccagctgggctacatcgaccttcctcctccgaggctgggtgagaatgggctacccatctctgaagaccccgacggcccccgaaagaggagccggaccaggaagcaggtggcttgtgagatctgcggcaagatcttccgtgatgtgtatcatcttaaccggcacaagctgtcccactctggggagaagccctactcctgccctgtgtgtgggttgcggttcaagagaaaagaccgcatgtcctaccatgtgcggtcccatgatgggtccgtgggcaagccttacatctgccagagctgtgggaaaggcttctccaggcctgatcacttgaacggacatatcaagcaggtgcacacttctgagcggcctcacaagtgtcaggtgtgggttgggagcagcagcggcctgccgcccctggaacctcttcctagcgacctgccatcatgggactttgcccagcctgctttgtggaggtcgtcccattcggttcctgacaccgccttttccctttctctaaaaaaatcattcccagcccttgaaaacctgggcccagcacactccagcaacactctcttctgcccagccccgccgggatatctgaggcagggctggaccaccccagagggcagcagggcctttacccagtggcctgttggctagcctgggcctccctggagagggttgacagtggaagggaacaggaggggcatttggcctgagacccctgcttttgggagaggctagcagggtggttcctgcccagcatgcccagctcctccctgggtgactcggagtctttcccatgtcagagcccccaaatgggggtagcaaggagcacctttctggaaccccctatagcatccaagtttctttctgggctctcttgccttttcccccctttcacagatggcacccctgggcatctgtccttgcctaggtgattttggaggttggtgccttcctgggaactagccaccagcttatctgcttcccttcccctggcatcacttcccataggcctggggtttctagactggggcctggccacccctttccccactccacgagtgagtcggcctccagagaagactggcacaattccaactagantcaacccatgctgncntctgcccttcccactcagatctagatcctgctttcatttctggctagtgaagtagacttttgtgtttttgaggtttattagcaggtctgctcaggaaccaaactaatgagtagctttatattgggccaccccaatatatggctttgagagggctgaaaaagnagatgtagaccccctccctcggatccttattggtgtgccttttag

SEQ ID NO: 314921 - DNA, 798 bp, Homo Sapiens
accttttaaaagagcatctttattatttccccaggccgatcacagccctgaacaaaagcatccgatacacatttgtcagtctggtggctttggtgccatgactgcctacacaggctgatgacagccactcggttgtcaccagacgcggtgtgagggaagggggaggggacaggggaactctcagagcaaacaatcacaaacacactgtgaaatcgaaaataaattacaaaaactaaatagtataaataaattaaaatttaagttaagaagagtcccacagtgtggctgtttggcaacaaccagtccatagaagaggtagctgtggaggtcacacgcatgttcccaaggctcaggctcctgctcctccccactgggcccaccgaggtcgctgggcctcgaagcttctggacccctcaggcactcagctccaggtcgctgacatatttctggacccactcctcactggggtcagcacagacctgccggcttcgcttggttaggaagatgacactgggcttggagcactggctgctcgtctcaaagtagtcagctatgaaattctgtggaatctgccgggaggtgtagctgaagcagcaggcggtcggcgtgtcagcagcaagtgatgcagagaactggttgcagagagccatggtgcagaggaggacagcaagggcagcagtggagacctgcatgattctgagcaggtgacggaatgtgggctcgagtgtcagcagagccaagaaaggactgaccactgtctgctgcccgtgtccttctgaagtctgaaaccagctctct

SEQ ID NO: 314922 - DNA, 416 bp, Homo Sapiens
caggccaggcgcctgtctggaatggccgagtcagtgggtggccagatgggccctggaccctcctgacatgggagcctgagctccacacggctccagtcacctgccctggaccatgttgtgttccagcaggctcacctccctggtgtcaccccagctcacaggccacacaccctgctctgccacagaccctcacgccaggtcacacacgcagcctgtgtgcgggcagcctctctgcttggagggttcttcccagcggccttgggcaaggggtgccgtgcgcctctccgtgtaccctgtccacatgcaccacatcccctctgggtcacgctttgtgcagaggtttctagccccctctggactgttccatagagcaggaactaggggtcggaagtctttggtcttcagtccgcataggc

SEQ ID NO: 314923 - DNA, 884 bp, Homo Sapiens
  misc_feature (324)..(324): n is a, c, g, or t
cctatctgatggtctcacaccttcacacaagctacaatcccttggaccagccagggacagaccacttccagggttctctgacacagaaagtcctggaaaggcgcactcaaaacaaacccctacaccaccccaagggagggggattgtttcaggttcggggagacgctaaaagaaattgaacctaaactcttcatcaggcatgtccagagtggctttggctctccatatagagcgaggcctgcagaccctttggctcttctttctggtggctccatctacaggttgcacctgggctgaataagcagcagctctgagagcccgcangggcctcacgccattcggcttccatctgagccctatagtctccaaacaaggagtgcatcagctgcctcttccggggcaagggcgttcgctgcgcagggttcggattgctccaatagcctgctctttctgtttcggggtgggtttctgcctcttgaggcccagctccagttgctccacacaccaagccaattcctgggccaactgttgtgcctgggcctcagcgcttaggggaacttcttctggggcgagtttctctgaggccttctcgcctccatttgccacagaggccctgttccgcgttttcttcttattcttttgttttttcgacgctgtgccgccttcatcgcccaacgggtgcgctctggagtcagcgttactgcacgtaggttgctctgggcagagacagacagtggaaggattccgggcgctggaaactgggccgggaagccgggctccgcgggacgcgcagggagtacccgggcctggggccgccgctgcctccccagcaagatgtcccagggccgccatgcgccgcagtcgccaccggaactacgcggggc

SEQ ID NO: 314924 - DNA, 2013 bp, Homo Sapiens
  misc_feature (1166)..(1203): n is a, c, g, or t
tttttggattttaatgtatgatggtctttatttacaactttattggcaaaaaagaaaagggaaacttttaaacaatttaacacagggcattgtagctgatcctgtcagataaaagaagttccattttaaatgtccatctaattgtccaaagatacacaatactgaatctgcatacgcagtttcctttatgaagtacagtgctcatgttttaggcagtcttctaaacatacaaatacagaggaaattaaatcactcattaaaaactgtgtcaaatgaagggtattttaaatataagtttgttgtttctggtaatagcacatgcccaaatgaaaaccaaaagatggaaaggcagatacacttcttacttgggtggacagttacaacatcaatcattttctgcaatgaccattatattttcaatttatcatgaactactctgaacttactatgagatgtagccaaagtcagaagagaagatgtagggacaagatgccttttttgcaggaggttaactcctccagaatcagcataggaaataaacatcctgttgattctaggtggaaagaaattaatgtagtcaatttcaactcgtgctgagctgacttaattttttcagcgatgtgtttggtgtcattcttctaaatcaagtgtatttaattcttcttctagttcatccaaatcctctccagtgaaaagattttcatcaacaggaacagcatcaatggctccattttccgttccctccctctcgttgtcctcttccaagtcacttctttcaccattttcagccctacctccagaagcttcacttaatttgttttcatctttatctgaagtatatgtgctgaatctttcaagactggctacagtaatacctgtttcatctacatctcttgggatgtacaggcttaaatctatgtcatttacactcactgaatcatcaacctcatcaccacctgttccctgggtgtagcgggtatcatctgcttcctcatcatcatcattgaccagttcaggacgaaattcaaacacttcacgaccactgatcactagtgctttccctgcttgtcccttttcttccaggcaagaaaagattctagagtgattttggtaacatttggacctagggcagaacgctctctctcaattagatcttctaatgaaannnnnnnnnnnnnnnnnnnnnnnnnnnnnnnnnnnnnnaacacaaatccaggaggaaagtgcatgacgatacatgcaaatatcaccccctccagggcatacccaaaaccagccatacttgttgttttcaatagcttccaggaaatgcttgcacactatttgagtttttggttttttcttttccgcctcaccgtgcttcttgttcactacttcttccagctttttctcatcccaattatccatagtatctttttcaagttcttcatctcttgcatcaatgtaaacacttcgcttttcacattttctctccagagtcaagtcatgggagaacttacacttatctcctttagtacactgtccttgcttgaagaatgcacatactacagacttgggatctgcacctttacttattttttgagcagcaactacaggtttgaacagctcatttagctcctgcaattctttcttcttgtcatccttcttcaatttcttttcagcttcactctgtgctacctgacgtggattttgttgaccaaatttaacttgatgtgtgacagccttgataaacttctgttgctttgctcctttcttattcttcaaaccgaaagttttgtcttcgataatcttctccttctttttttgctccgcctttttgctgcccccggcctgagcctgtttcttggggggcattgcggagacagatggcaccggccagacttacgcgcagctgaataccgtcaggggttctggccctgcggcaggacgaggaggaagaccggggcctcactcgccgcaccgcacggaaagcgagtcgctcattggccccgcaaacgcggcctttgcgacccc

SEQ ID NO: 314925 - DNA, 397 bp, Homo Sapiens
  misc_feature (20)..(20): n is a, c, g, or t
  misc_feature (27)..(27): n is a, c, g, or t
  misc_feature (76)..(76): n is a, c, g, or t
cgtaggatttaagaatttangaacaanggaaaaactgtaatagaattccccccttaagggaatttgccccattgtncctacatattttaagataaacttcctgttgcaatttctgccacagaatagaggcctagacagagcacccttatgtgcagaaatgaatagaatgtacttgtgtaatataacgtacttgtgtgtatacttgttccatatactcaggcatttaccttggaaatggcctacactgagccaccgcttgtgaataatattgtctctataggtgtgcaagcatttcctggaagctattgaaaacaacaagtatggctggttttgggtatgccctggagggggtgatatttgcatgtatcgtcatgcacttcctcctggatttgtgttg

SEQ ID NO: 314926 - DNA, 985 bp, Homo Sapiens
  misc_feature (695)..(695): n is a, c, g, or t
  misc_feature (735)..(735): n is a, c, g, or t
  misc_feature (761)..(761): n is a, c, g, or t
  misc_feature (832)..(832): n is a, c, g, or t
  misc_feature (835)..(835): n is a, c, g, or t
  misc_feature (838)..(838): n is a, c, g, or t
  misc_feature (860)..(860): n is a, c, g, or t
  misc_feature (864)..(864): n is a, c, g, or t
  misc_feature (874)..(874): n is a, c, g, or t
  misc_feature (876)..(877): n is a, c, g, or t
  misc_feature (894)..(895): n is a, c, g, or t
  misc_feature (922)..(922): n is a, c, g, or t
gataaatcttcctgctttaagggagccctgtcatctctcctcttaatgcacgtttcccttggtattagtggaagctgtgttcaagatgggaagcctttcctgcagttcttagaaacacctgctttctaaggagagccttttctaggattagcttatgtgtgttttctctaggcgattttttatttcagttaccaatttaattttcaagttgacagatgctgtgtaaagtctctcataatgagagtagtccattaaattgttgaaagttgcactgcttttcatctttcaggtacctgaaatgagtgacatcaggtatttgggaaggagtaagatcataaactgtattcattttcttccttgtacaaagtgatgacttctaatgcttatatctcaaggtattttttaaaaaagcaacggtccctaatagagtaaaatttggttttggtccaagttcccaataatgtatttaatgtttctgttgtttactggtgcctcccgttgcatcaggtagagattgcctgcctctttgtagggcagccttgtggcaccttatgtccaacttggaggatagtatatggcttctttgtgcctctactatcttttcaaaagccattttataaaaatcctaggtagcctattttaatatttaaatatatatatttgtgaaagaacttttagaacagaccttttctttntactttaaaattcctgtatttccatttttaagagtaaatntaatctccaggatttagaagtgtctntccagagaagcataatgagaaagtcagactgaggtaataagaccagaattaagtgatagaagaaaactgtngtnggntaaaagacacagatttgaaggnattntgatgtacantnntttatgctgctcattannactgagtcttctagtcagcagctagcngactgtcacatgcttcagatgtactgtgcttggtactatgctgctatattctatgccgagcag

SEQ ID NO: 314927 - DNA, 443 bp, Homo Sapiens
cgccaaataccagatatatggctcatttactagattctgttatagtttgggtttgaaataatatgagcctcagcctggatctctttaaggtgcctccatttaaaggagcatagttaatgtgaatttcatgggtacgagccagaatggcttgtaggttcctttgcagaatccttcgatgcagtttgtgccagctttgtcacagcaagtttgtcgtgtatcaaggaaagctagtcattttatcgcaaatggacataatgatggattatatagacacgcatgcactttatagaaagagcgtaaggagttcttttggtgtttctgtaatagagcgtagtctgccttcacttcattccctcacttcatccgcttcactacatcttcctcgctcgcgtctctagtggagcgtggtgagacgcgagtgattggtgacgtcagagagatgg

SEQ ID NO: 314928 - DNA, 367 bp, Homo Sapiens
cctaagtaactttgagaggacaagataggcaaagttttttccctacatctcttttggccaaaagaatatctgaccatcacagagatccagagaacagaaacaagagcccctaagtcccagcctctgcaatacacagttaccagatgggaatgcagcacagtggcacagagaggtaactacggagcccatgccctggaggaactctgtagctgtgcatcatggaacgccacaggatttttacattagttgaatatgttcctgcatttcagcagtgcataatcgagcaggaggctggaatctggagacctttgttattcattctttttaaggttattttttattaactgtgcatatgtttccactcttt

SEQ ID NO: 314929 - DNA, 564 bp, Homo Sapiens
  misc_feature (479)..(488): n is a, c, g, or t
ttttaaagttgaatcattatctttgtattaaataggttgacttctgagtgatgaaccttactttttccaaggagctttcccacgtccctgctactacataacaaggtttatttaatatgtcttttcttaattttcccatagcacattttaatatttttatcagggatatgtaataataccattccataattaaaatagaatatgagatataaaaggtaaaacaataatgatggtgtaagtattatagaaaacataatacatgtactatctttgaaaaattttagagctgtagtttgcacgatagaaaatatatatcaacatttcatcacatcagaaatatatgcaatgttagatctattacattgtgacattttaggaaaaaaagaactgggattttacttttgtattcctaagattgtggccagattttgaatgactaatatttatagaattgaattaaatgtatttctaaaagtttnnnnnnnnnncaacccaccattgttgaacaatctccaaaggaaattaaggaaacagttctatgtacagtagcatcataaagaaaat

SEQ ID NO: 314930 - DNA, 454 bp, Homo Sapiens
  misc_feature (407)..(407): n is a, c, g, or t
  misc_feature (414)..(414): n is a, c, g, or t
  misc_feature (424)..(424): n is a, c, g, or t
  misc_feature (442)..(442): n is a, c, g, or t
gagtactttattcattttagctagaagtactttattcattttagcttatcagctacatgatttgcaaaaattttctctcattctgtggattgtcttctcactttgttgatggtatcctttgaaccacaaaagttttaaattttgatgatgtccagttagtctatgttttattttgttgtttgtgcttttggtgtcatatctaagaaatcgttgcctcatccaaggtcatgaagatttacctctatattttcttctaaagattttatggttttagctcttacatttaggtctttggtccattttgatttaatttttatataaggtgtgaggtaagggtccagcttcattcttttgcacgtgggatattggagttgtgccggcactatttgttcaagggctgttttccnctgtttnaatccagctnaaccctttttgggaattnaattgaccagaa

SEQ ID NO: 314931 - DNA, 1270 bp, Homo Sapiens
gggttttaacattcagagcgaggtcccagactccgagtcacacatcgcacagggacggagtcagctggagagaagagcgtagaattggagagcccacaattattcccaggagaaaaaagggaaaaaatcggctgatatccttggtagggggtagaataactgatttaacacttaggatttattgttaattgttgttgttgttgtttttttaatggataagctacttctgcaattttaaacgttgtagaaaaagatgctactagtctcctttcacccactaaggtgagtaaagtgggaggaaatgggaaaagactcaaatacttaagtgcgaggagtaaacatccaagtggctcaagttttgtgtcagaaggtttcattctttacattcaatgacaagttgacatttaggtgagagggaaaaggagaagaaagtctgccactctccgctggatccacaaacatgcagaccagcttctgttagcagaactcttccacagtgagagcgctccttccagtgtaggtaggaatgaggtttcctggtcggcttaattgttctagatgattcctcaatattcccttccctgctgctttccttccagaacactaactctgatgaaagaaaggggcacattcatgttacaattcatcttcaagatgtttctttctgaaggcatcacccgtcagcctttcctgagcttccttcatcccctgaacaacttgctcggcactgacataaaaatacttgtagctggggtttccattctcattgatgatttcaggatgcaccttgccactgggatccagaaaaaggattcgtggaatataacccccgtcagggctgaaatcttcatctttgggttcctcttcatcctcaagatttaccataacaaaattatgggagagttctgaaatttccgtagattctgcaaatttgggctttagagctttgcaagctccacaccaggatttatgaataatcaccatcaggggcagtccactggcagctgcttctttcttcccatcttccagtgtcctccaatgaatatgatctccaaaaccctttccaagcccattatgtccatcagaagagatgacgaggagcaggaaactgaagcccagcaaacaggtggccccgagacgaggccgcgtctccatggcagtaggtgcgcggggccacggggctgagcggacgcagggccggagtcccagcagacggtccacacagttcgccgagcgccgctcagcacaacacctctacttcccagatttt

SEQ ID NO: 314932 - DNA, 974 bp, Homo Sapiens
  misc_feature (232)..(240): n is a, c, g, or t
  misc_feature (316)..(325): n is a, c, g, or t
  misc_feature (374)..(484): n is a, c, g, or t
  misc_feature (943)..(943): n is a, c, g, or t
  misc_feature (957)..(957): n is a, c, g, or t
cccaaggcgccccaggtctcgcttccgcccggcgatttcggttttaccaaccccgtttgggagggtttccccgttccccggaagggttatgtatttccccccttcttcggataggggccgggcggggggttaatttaatttgagtccccttgggatcccttttgaaaatacccaaaaagacccccagaatccctttcggattttttcaaaccccccggttccccccgggggnnnnnnnnngtggggatcccaccccttgttcttgtcccggttttttttggaaccaccttggcccagtttcctttccttttggggnnnnnnnnnnaaaaaaaggtttttaaaaattttttgggggcggggggggcggccagggnnnnnnnnnnnnnnnnnnnnnnnnnnnnnnnnnnnnnnnnnnnnnnnnnnnnnnnnnnnnnnnnnnnnnnnnnnnnnnnnnnnnnnnnnnnnnnnnnnnnnnnnnnnnnnnccttttaaagttttattaaagtttaatggtacaatattttatctctttttttgttaatgccagtacaaaaatacagttgatgacttgacaaaatggctacacctagggcttgaaggtttgagtttctccaacagtaacaagggaaagcatgcttccacctggagccgagtccaagcacacagccagtcctgcacacgcatgcggccaaacagggaagctcaagcatgagaagaggaaagaggctgtagaaatttgggaagaagcccacaattattcccgggggaaaaaagggaaaaaacaggctgatatccttgggtagggggtaggattaactgatttacacttagggtttattgttattgttgttgttgttgttttttaatgataagctacttctgcaattttaacgttgtaggaaaagatgctactagtctcctttcaccactaaggtgagtaaantgggaggattgggnaaaggctcaatacttaa

SEQ ID NO: 314933 - DNA, 1262 bp, Homo Sapiens
  misc_feature (924)..(924): n is a, c, g, or t
aaccattgctcaggtaataatttattaagtcaatttaaactaaacattactaccattgcaaaagcatttgctctgaaaagggactgaaaaatgcatcataaagttacatagttcagcaacaatatcaatattgattatataaagtaaaactactggcaaacgtcatttaagcttaccctgtaatttttaataactttataaggagcaaatgtgtcaccttaaaaatgtaccagtggcatttacaaattccttcaaactcatttacaaatacagtaataaaaattcctgagctcccttttcttacaccagtattcaccaatcaacatccatgcggtgttttatttgacccacatcctctttccttttcttaagaaaatattttatcacattcgtaaaagtatctgtgcttcaagtcagtttgtaagtatctgtttttaatgtgaacctgatgataacaagagaaaaatgcttaacattagcaggggcagcaggaattgaggggtggtgtgggggacagtggaggagatgtaaatacaagaattccagtttaggtgttgggacttccaaaggtagaatacatctgacaatatcaaaaacagactcagtttcatctgcatagtttcgagggactttcaaaggtgaagccagcaggaattactctgcatattctggccaggaaggtccctggtgggggcttttcaataattctatttcttatccttctccctagtccccccactgctcccttaccccaagatttcaaagtttctattaaatggaagttgcatcttccagccccaaagaaactggggagatttagaatgtataaaacttgattagcaagttgtaggaaccctgacaaagttaaggtgtccagatgggattctggcaagatgtggcaatatttaatttcctgttttcctnttccggaaagtatattcaatgccttttgaaaaattagcctacatattacttctccagctcatcattaattgtatagaacctgtgtctggtgactgagacttcaaattttgcaccttaaaaatataagagggcccaagaattaaaggcagttggcttcaatataagcacaggagagccagcgtttctgtgactgaagccaagttttttagagcatgatactcaagtaagaaagaaatttctcattcttctgtaagacatggaattagagaattaagaggaggcagagaagaacttggaaagcaaaaccacacaccatttcacaattctggaacacggac

SEQ ID NO: 314934 - DNA, 1100 bp, Homo Sapiens
aaaacgctattctcttgggactaaactgttcagaataatcagtattcttattccctttccactgtactctactgctcaatgcaaaatggagaatatgtggtccaaatagaaatatggcatttgtgcaggtcaagctttgaagagacatggaccacatgattagcctgatttttaaaaagcaacaagaatggtgacacaactattacaccaaacacaaaattctggccattaatgaatcagaagtaataactgatgctcctactttaaattcatcaatgccatatttaagaagtcaagcaacaacacatacttggcaaaatcttctaaattctcaagttatcaaacaaaaaagttatttttaatactttaccccccttatatcttatgattcaatcacttatattttcctttgttagattattcagaagaaacaattctatttaaccttaataagtttttgtctcacacattttatataaagttactaaaatcacaattctgagaaatttatttttaatcatacaaacattatatgatttaactgcagtaaagaaattatatcttttcttaatctatttagaatgatattacaaaatctctaagactcttttccacagcttttctttatatgaacaaactcataattatgtaaaatgcatctcaactccacagtgaactagcatccatgcttattccacataggtactgccagtggtccctgcggtgtcctttcaacaatgacaaactcttcagggttgccaaatgcctcatagaaaaccaataaatcttgtatggcatgctcctcaatctgaatcagagccaacggtttttctcgacttctaataagagctgcttcttggtggagttcttcttctacaatagatgcaaaagtgactggggctaccatggatggagcagtcactgaagaagatagccagggattgggactgtctagaagtggtaaatctgaaatatggttgccttctggtcctggggtaccatgggtagagcatctgacaatttttggtgcctgagaattttcaattcctttaaaagaaacttttttgacatgatcgccttgactatggctagtaacagac

SEQ ID NO: 314935 - DNA, 1002 bp, Homo Sapiens
actcagaaacccaggttttaagaacatggtccccaatgtacccacatccataaaatcactcctcatttcctgcaactgtacaatgaatggctcccaaagtcattttatttaacaaaggggtcaaggcagaggaaagtttcccttaatatccccacaactgctccacatgtcttctgtggaaacacttcaccaggaactagctcaacactcttgctaacaatttagtgtctatacaggaaggctggtgtctctgttacaggtggcccgttccttaaagcctttagggttaatcgcagctgcactgagtggccaagcagaccctgttgggatgtgaaagcagtttgttaacagggcccctggccgggcccagaggctgtcagactcagcaagtaacactgaatgtccaaaaatacggctgtgttaaactaacaagccaatccttctgctcagatctctggatagaaatgatttttcttttatctatggggaatgcaatttcatcacagccccttacataaacgctcctgaaaccctttcagtagacagcatttcaattcagagaccaaagtgaaactatctttgaaaacagggacgtggctgggaaaccatgcacacctcggcgaacacttttccacccaccacgagcttggactttctgggaaggttgtcggttttctggtcaaaaacattcttgaagtcatcaggaatggaggaatggagactcggcatcccgggaaagtgagttcctggtttcatcgctgggattcaagagccgaacagcacaatcatgcagaacatcatgaagatgttccacagggcgatgaagattcgaaagtatctgaggctcagcaagaattcccggatgttgtcacctgtgctgggctccctggactcctccccaaagccctgcgtgtccttctttttcagcttaaagttcagcaccgccccggcattcatcagcaacgtcccgaacagcaggatgtctccgatcatcgttacggc

SEQ ID NO: 314936 - DNA, 848 bp, Homo Sapiens
tggattagaccaattttagggtgttattaccgggaaagggcggggtgtctctcgtttaccagggtggccccgttcccttaaaagcctttaagggttaattggcagcgggccatgaggtggccaaggcaggcccttgttgggatgtgaaagccagtttgttaccagggcccctgggccgggccccagagggctgtcagactcagcaaagtaacactgaatgtccaaaaatacggctgtgtttaactaacaagccaatccttctgctcagatctctggatagaaatgatttttcttttatctatggggaatgcaatttcatcacagcgccttacataaacgctcctgaaaccctttcagtagacagcatttcaattcagagaccaaagtgaaactatctttgaaaacagggacgtggctgggaaaccatgcacacctcggcgaacacttttccacccaccacgagcttggactttctgggaaggttgtcggttttctggtcaaaaacattcttgaagtcatcaggaatggaggaatggagactcggcatcccgggaaagtgagttcctggtttcatcgctgggattcaagagccgaacagcacaatcatgcagaacatcatgaagatgttccacagggcgatgaagattcgaaagtatctgaggctcagcaagaattcccggatgttgtcacctgtgctgggctccctggactcctccccaaagccctgcgtgtccttctttttcagcttaaagttcagcaccgccccggcattcatcagcaacgtcccgaacagcaggatgtctccgatcatcgttacggccgaagcgtccgtcagaaccggaagcccc

SEQ ID NO: 314937 - DNA, 369 bp, Homo Sapiens
acggcatactcccatcttctgtgtgtcacctctgataaacgcctgtaaaactcaatctggccatgttctttgaaggagagtttgatgtaggagttcttactactctgggcactcttcccaattccagccgcctgttcttcaatgaacacaatttgggaaaggagaatggccatgcaacactcatgatttttctgatctctccaaatcagtcggtgtgtactaagaaggagagtcccagcatcaaattttatcttctcctcgccatcgtagattcgcaccccgcgctgctggatcaccagggtctcgttgatctccaggaggccgctggtccaaacgaagcggtccatggccgctgccacccagccccgg

SEQ ID NO: 314938 - DNA, 1325 bp, Homo Sapiens
aagagtggtttcaaagttataatgcatggtttaaaagagagaaaaggaaaaaagacacaaagctggttacaggtctgagggagtctaaggagagaaaaatagagggagagtaaaggggggacaaatttagggaaaatccagtggcccaaaatcccagtatcccacccacagcccagcccttggagcaggagtgaagatttagatcagttttgtacaagagttttttaaaaaaaatcaaatcacaacaaagctgacttggcttctctttgagcctcctggatcaccgtatgtctgtcactctggccagtcctgcctcttcacaaacactgattcggctctcctaggcttccgcctgtgtcccagtctggggtttccatggagtgtgaacacgaagttaagagtgaggctgcttcagagcccctggcccatgtgtccatccagactccaagtggagtgtagggctcccagggcagagaggggtgggaggggcagaccctgcccaggcagtcctcacattggacagggcatcagacggcatcccaagggctcgccctccctttcccccccaccccaactcaggtggagggggagcagctgtcaccagagccgatgttggtgaaggtttcggctcagcacggaacgaacatcagcggtgaacctgagggcatccagcattgggagcaggttgagaagggctgtgtcgctggggtcactgaaccaggatttgatggggatggcattgtctggatggctcctgtaagcccctggggagttatccaggatcacaatgctggagaggtcactgtggaccacagagaggtccttgatgtagctgcccaactccaaagtgcagtgctgtctgtaatatctcctcttaagaatgcttctgctattgtccagtttatctgccacagcagagccatagatctccatgcttgctgtaaacaccaccagctcgtaccactggctcaccacttccaggaagaaatccacatggggcctcttatgtacaaaaaaccggacaggatgtttgtctattaccaccttgaggatgaagtcaggaggcgtaccaggccggactgtgggcctcaggaccccatcatggtgggagtgaataagtgtctcatccagatccagcaccaggatcttcctcttcacctgggctagccgattccgggacacaggagataaggggaggatatcatatcgaacagtttggtactgaattaccgtgcggatctgcctccgcaaaaggtaaatgaagaagctccagagcttggcggcgaaggccacgaacgtgcgcagccccagcagacactgcgtcc

SEQ ID NO: 314939 - DNA, 424 bp, Homo Sapiens
  misc_feature (20)..(20): n is a, c, g, or t
attcggcacagcttttgcgnaggagatcccagcggtaattcagtaccaaactgttcgatatgatatcctccccttatctcctgtgtcccggaatcggctagcccaggtgaagaggaagatcctggtgctggatctggatgagacacttattcactcccaccatgatggggtcctgaggcccacagtccggcctggtacgcctcctgacttcatcctcaaggtggtaatagacaaacatcctgtccggttttttgtacataagaggccccatgtggatttcttcctgggaagtggtgagccagtggtacgagctggtggtgtttacagcaagcatgggagatctatggctctgctgtggcagattaaactgggacaatagcagaagcattctttaaggagggagatttttacagacagcactgca

SEQ ID NO: 314940 - DNA, 1597 bp, Homo Sapiens
  misc_feature (57)..(57): n is a, c, g, or t
  misc_feature (61)..(97): n is a, c, g, or t
tactgattggttacatgttgaagaaaacatacaatacaaaatacagaaaaagttggntccnnnnnnnnnnnnnnnnnnnnnnnnnnnnnnnnnnnnnaatactcatcatcatgatttggtcagaacagggctcagagccagaggttggggtgaccgagggtggaggggttgtgggcaatgggttcgtggctgtcacaataatgctgtgataatgctgtggtttcccagcagggaggtgggagcggggagggggctgcagcctgatgagagccagctgaaggaagagctgcctctcccttcctaagccccttcccaaggtctgccccaccgcccaaaccaaagaccactccgaacaaagtgaggatgtggatgctcttgctgggtccgctgttccgcagagggaaagaaagggtagctgcactgaccccactgtccccatatacaagggttggggggcaagagcttgtggctactcccagcaagggaaaatgggagagcagtagaaaggggaggaagtgggaagagcagaagatcatatatattaaaaaagtgacttaagacttaaaattgaattagtatttgtacagaaaggtgcaggtggaatgactcactccggcctatgatcaaaattatatggagaaatcatggtggacccctccccctgcgccgccagtggtggcccgagtcgttaagtgcgattggttagagtggattccagtcgggtcattcaggcggaggaggcgggggcagcgggcaggcaaggggggctcagttgctgcagcactggctccggctggctgggttgttctcctggaggtccacacctcggtttcggcctggagcaccagttgcattctggggctcgttcttgggaagcttcttagctattgccatgaagatttcgttcacgttcattgcagtctttgctgatgtctccatgaacagcaaactgttgtcgtctgcataggcttgtgcttcctggaattccacggctctcttgctggccaggtctgccttgttacccgcgagtgcaatgacgatgttggggctggcctgcctctgtagctccttcacccagttcttggcccgtgcaaatgtatctgtgttggtgatgtcatagaccacgatggcagcctgggccccccgatagtacatgggggccaggctgtgataccgctcctgtccagctgtgtcccagatctcaaacttgactgttgtgtcatccaggcagacagtctgtgtgaggaaggccgctccaattgtgctctcctggtactcgtgaaactgtcccttgacaaagcggaggacgaggctggatttgcctaccgcagactcccccagcagaaccagcttaaattgacagatcttgttcccagcagctggtccattgggtcgtgtgcgcctccccgacccgccattgcccgtccagctgtagtggtccagagagcgtgcgggtggggactggtgctatgcaaagaggcacttagtggggagggggacctccaaggcggctccggggcggcggcgttacttggggccggggctcggacgggatccgcttctctccccgccggcggtgtcccaggctccggcatcc

SEQ ID NO: 314941 - DNA, 373 bp, Homo Sapiens
gcaccagggatatctaaaattttatctatgttggtatctaaaatttttcatgctgaagttaaatagttgacaaagtatgtatttgctgctgtcgtgtaaatattggtattttaaaatactgttacatgactattttagacatatgcagtacaatttacatatcacagcaatttgacacccttcattcatttatcttctgtatttccataccacttttcaggcgagaatcctatcataatgtaatctattatgcccgacatcttttaatcattcaccccattacttcatgtctcagaagatatatacgtgaaccattttcttagctcttgctttaagaaggttgtacttatctcagtccagaacctattatcgt

SEQ ID NO: 314942 - DNA, 696 bp, Homo Sapiens
  misc_feature (115)..(197): n is a, c, g, or t
ggggctacaataccggaaaatgctagtttttatttattttttaagtagtgcttcctaaatggtttgcatgagagccacctggggtacatgttgaaaacttatttggggtctaccnnnnnnnnnnnnnnnnnnnnnnnnnnnnnnnnnnnnnnnnnnnnnnnnnnnnnnnnnnnnnnnnnnnnnnnnnnnnnnnnnnntaagttgtccctcaactgtacttggagaaatcgtgttttaaagcagtagtccacaaagtattctgctcatgtgcccctaaaagtattttgaaaaatcatgtataccctcacccatctaagttgatatctaaaattttatctaagttggtatctaaaatttttcatgggaagttaaatagttgacaaagtatgtatttgctggtgtcgtgtaaatattggtattttaaaataaaaactgttacatcactattttaaacatatccagtacaatttaaatatcacaacaatttgacacccttcattcatttatataaatgagctagttctttagtagttaaacatttcttggcttttctccttctgtatttccataccacttttcagccaagaatcctatcataatgtaatctattatgcccgacatcttttaatcattcaccccattacttcttgtcaacaatctcagtccagaaccaatattatcgtaattttattggtt

SEQ ID NO: 314943 - DNA, 1585 bp, Homo Sapiens
  misc_feature (1258)..(1319): n is a, c, g, or t
  misc_feature (1333)..(1333): n is a, c, g, or t
  misc_feature (1354)..(1416): n is a, c, g, or t
accggtccggaagttcgggatatcgtcgaccacgcgtcggaagaggacatacactcactctcaatttcacgagaaatgcaacacgttacagcgtccagctcatgagttttgtttataacttgtcagacacacaccttttccccaagtgcgagctccaaagaaatcaagactgtggaatctataactgacatcagggcagatatagataaaaaatacagatgtgttagtggcacccaggtccacatgaacaacgtgaccgtaacgctccatgatgccaccatccaggcgtacctttccaacagcagcttcagcaggggagagacacgctgtgaacaagacaggccttccccaaccacagcgccccctgcgccacccagcccctcgccctcacccgtgcccaagagcccctctgtggacaagtacaacgtgagcggcaccaacgggacctgcctgctggccagcatggggctgcagctgaacctcacctatgagaggaaggacaacacgacggtgacaaggcttctcaacatcaaccccaacaagacctcggccagcgggagctgcggcgcccacctggtgactctggagctgcacagcgagggcaccaccgtcctgctcttccagttcgggatgaatgcaagttctagccggtttttcctacaaggaatccagttgaatacaattcttcctgacgccagagaccctgcctttaaagctgccaacggctccctgcgagcgctgcaggccacagtcggcaattcctacaagtgcaacgcggaggagcacgtccgtgtcacgaaggcgttttcagtcaatatattcaaagtgtgggtccaggctttcaaggtggaaggtggccagtttggctctgtggaggagtgtctgctggacgagaacagcatgctgatccccatcgctgtgggtggtgccctggcggggctggtcctcatcgtcctcatcgcctacctcgtcggcaggaagaggagtcacgcaggctaccagactatctagcctggtgcacgcaggcacagcagctgcaggggcctctgttcctttctctgggcttagggtcctgtcgaaggggaggcacactttctggcaaacgtttctcaaatctgcttcatccaatgtgaagttcatcttgcagcatttactatgcacaacagagtaactatcgaaatgacggtgttaattttgctaactgggttaaatattttgctaactggttaaacattaatatttaccaaagtaggatttnnnnnnnnnnnnnnnnnnnnnnnnnnnnnnnnnnnnnnnnnnnnnnnnnnnnnnnnnnnnnnccgctgtctctgangggtgggggtgccgctctctnnnnnnnnnnnnnnnnnnnnnnnnnnnnnnnnnnnnnnnnnnnnnnnnnnnnnnnnnnnnnnnggggtgctgctctctccgaggggtggaatgccgctgtctctgaggggtgggggtgccgctctaaattggctccatatcatttgagtttagggttctggtgtttggtttcttcattctttactgcactcagatttaagccttacaaagggaaagcctctggccgtcacac

SEQ ID NO: 314944 - DNA, 1394 bp, Homo Sapiens
  misc_feature (137)..(145): n is a, c, g, or t
  misc_feature (430)..(488): n is a, c, g, or t
  misc_feature (496)..(505): n is a, c, g, or t
  misc_feature (681)..(689): n is a, c, g, or t
  misc_feature (1107)..(1167): n is a, c, g, or t
  misc_feature (1207)..(1266): n is a, c, g, or t
accacgacgagggcggggcgcgcattatataattacgaaggcgcgccgctacaccccccgcgcttgatgggcgcccgccgaagaagatcgccgcgacgcccccctcgtgtgatttttgatcagaaccccgcgtggtnnnnnnnnnggggcgttgttgtttttggggggggaggcgaacacgcgcctcttggtgttgggcccgggtttttcttggggtggaaaaacatcgtggtgaccggtgggttctttttgtcccttgggggggcgcgccccgcccccgcggaagggtttgagaaaaaaggtttttgagggcgcgcgagggggccccccaataggggtgtcccgctttgtccgttcgtctgtcggggggcccgcggcggcacctcggtggcggcgtcgggtgtcggggttcggcgggcgttccgggctnnnnnnnnnnnnnnnnnnnnnnnnnnnnnnnnnnnnnnnnnnnnnnnnnnnnnnnnnnngttggtgnnnnnnnnnntttaaaagaaagaggctttttattacattgttacaggcaatgcattacgtgagctggtcccgtgtacaatccccaagccacggcaaaacatcaggagaacgcaccgatctcacattgtacacagcgcagaacaggatcaccccgaatgtcaacagaagaccaaaaatcactttacnnnnnnnnntaataataacacccatttttatatttaaaaaagtgccagcccttgagctgcagacattagagacgcccaaggacgtgccgccactggaacgaggccgccagccacgtgtggcccgtcctggcctttaaagctgaactgaagcgctccagacactcatctctggagttcctctgtcttaggattttccctctctactgttgtaatgtgtgagcatgtcagcctcaccacgagtgaccttcatgcgtcctacgtgtgacggccagaggctttccctttgtaaggcttaaatctgagtgcagtaaagaatgaagaaaccaaacaccagaaccctaaactcaaatgatatggagccaatttagagcggcacccccacccctcagagacagcggcattccacccctcggagagagcagcaccnnnnnnnnnnnnnnnnnnnnnnnnnnnnnnnnnnnnnnnnnnnnnnnnnnnnnnnnnnnnntcagagagagcggcacccccacccctcagagacagcggcnnnnnnnnnnnnnnnnnnnnnnnnnnnnnnnnnnnnnnnnnnnnnnnnnnnnnnnnnnnnaaaatcctactttggtaaatattaatgtttaaccagttagcaaaatatttaacccagttagcaaaattaacaccgtcatttcgatagttactctgttgtgcatagtaaatgctgcaagatgacctcgc

SEQ ID NO: 314945 - DNA, 572 bp, Homo Sapiens
  misc_feature (418)..(418): n is a, c, g, or t
  misc_feature (447)..(447): n is a, c, g, or t
  misc_feature (517)..(517): n is a, c, g, or t
ttgaaaggtaatttttttaatgatttaaaaattatcatgttacatgaatgaaccagacaactgtgccaggcactcgggccactcccaacaccattccctacgtctggcaccaagaccaccctcaccccccgtttccctgacacccttctctctgcaccgagaccaccctcaaccccgtttccctgacgtccttctctcatgagctcccattttagctgacagaaggacaaggcccaccccaaaaagaaagaggctttttattacattgttacaggcaatgcattacgtgagctggtcccgtgtacaatccccaagccacggcaaaacatcaggagaacgcaccgatctcacattgtacacagcgcagaacaggatcaccccgaatgtcaacagaagaccaaaaatcactttacaaaanaaaataaaaataacacccatttttatatntaaaaaagtgccagcccttgagctgcagacattagagacgccaggggacgtgccggcactggaacgaggncgcagcaacgtggggcccgtctggccttaaagctgaactgagcgctcagacctat

SEQ ID NO: 314946 - DNA, 659 bp, Homo Sapiens
aaaatgagataatatgtatgtcacagaattgttttaaggatgataaaggactaagtgagataatgtaggtgaagtttagtatgatgcctggctcatagttaagtgctgaattatgatagtaatcaatatctactcctaacctctttcttcacagattttaagcttctgtctttctagggggttaagagtcataaaccaaaattacactttcctctgctaggtttcctcactttcctcttcttgacagtctgatgggaaacaaaggcacacataagagcctagttccaagtagtcaagagcctgagaggaagggatatggagagtaatccttcatatctccaggagtgcctgtgaagaagctgaggaatgggactgggaaagcacacaaaataaggaaaaccccgtgtcaaaatgtttaaaagcctccaaagattgaatggaattgtctgggactggggaaaaggggctgggacctgggagagagagggaatagggagaagacggtaccctctaaaggcactagctgccattaaatgctccatgagtgccacagggagcaggagttacgttctctgggcattagccttggggaaaagcctgatatgccagtaatcagggttatcaaaggcagagtctgtagcctctaagctacgtagagt

SEQ ID NO: 314947 - DNA, 1086 bp, Homo Sapiens
tctcccccgttttgtccctttcctttccctgggcacaaagttttgggaatgggggaaaaacccaaaggggccacccccttaaaggaggcctttagtttccacaaagtaggtccaaggaggccttgaggaggaaaggggatatgggaggaggtaattcctttcatattctcccagggagtgccctttgaagaaagcggaaggaatgggaacggggaaaggcacacaaaataagggaaaccttttcctggggttgggaaagagaagaaagtgcacagctggctacataccataagaattttgtgtcaaaatgtttaaaagcctccaaagattgaatggaattgtctgggactggggaaaaggggctgggacctgggagagagagggaatagggagaagacggtaccctctaaaggcactagctgccattaaatgctccctgagtgccacagggagcaggagttacgttctctgggcattagccttggggaaaagcctgctatgccagtaatcagggttatcaaaggcagagtctgtagcctctaagctacgtagagtttttaggcgggcataatggacatggggggcctgatgtccaggcccctgaaaagctctcatctcttcatacccttgctcagatgctgggcaggcccccatggctgcataatcacccccaggaccacctccatctcgttgccgattcatatattcatagtcttcatctggagttgtgcctgcagtgggcatgatgggtacagggtggagtgggcaactctgtgtgctgcccagagaggcactgaggtctgaccccacatccatgtactcataacccagctcctcaagggaacttggcctagggggatgaggtggactgtgccttctcctccggttcatgtattcatactcctcatcttcatcttcttcttcagtacccaggacagaactgagacccactgaagaaagggtgccttcccgggaggagggagtacctttgaggtgtgtatctggcatgacataaccgttgacatcctcttcctctaacccgggtggggagagtggggtaacaggagtcagcagactgtggcgctg

SEQ ID NO: 314948 - DNA, 596 bp, Homo Sapiens
  misc_feature (586)..(586): n is a, c, g, or t
ccgggctcagacactgtctggcacacaggcccttccagacccaggcaagtctcctttaaggctacctgtgggtcatgggcacattgagggcatgctggagagtccctgggtaaagcaggtgactctctggggtggacaccccctccctgcccactgctgcccataccctccatccactggctgtcagggcaggtgcccagtggagggtgggaggtggtttatacccatcagcctcctaagggaggacactcagacttgtgccgtcatcacagtagaacattttcatcaccccagaaagacaccctgtacccatcggtcgtgacttccgtgcccctttcttccagccaccagcaaccaccgactggttggtgctttctgtttccacggatttgccaattctggatatttcgtataaatggaatcacatgacgtgtggccttttgtgtcaggcttctttcactcctcttgttctcagggtccagccacaggtaccctgtattgtgcttcattgcttttcatggctgaatactattccattgtgtgggtgggacacatggattccttcatttggtgctgtacatttggnatcgtttctt

SEQ ID NO: 314949 - DNA, 733 bp, Homo Sapiens
  misc_feature (12)..(12): n is a, c, g, or t
  misc_feature (28)..(28): n is a, c, g, or t
  misc_feature (84)..(84): n is a, c, g, or t
  misc_feature (93)..(93): n is a, c, g, or t
  misc_feature (158)..(158): n is a, c, g, or t
agcccagaaacntgtggctctcatgaancccagagatgaggtccagagattcctgaagtttaatgtcaagttctgccatagcanctagagtgnaggctgcctccggtacattattggtcatcagatattgctgaatgttatcacttagttcttcaatntgtgaaatccatttaaggtaagcaagatgacgttcgatctcttcaatctggctaatcatggttccaagatcgtccatccaaggttgcgcagtcagcaaatggctgttaatggcgctgaagagatttgaggcacttcgaattcaggaatttctgctgcaattgtaagtacctgttcttctaactgcaacttactgtcctctgttctatgagtttatcaagtttctttaaagatttaaggtcatttccaacttccttttctatgaatgcagacacataagaagggagatcaccattatctgtaccttcactgacttgtttacttccaataagaactgtaacatttatgtcacttttctcctcgaggttcttcctttcgtcaccactttcagagcagcacggggctgcaggagaggcgccgatctcgccggctggtagcatctcgcctccgcgcgagtcctcggctccattcgcagccagcgtggcctgtggagtctggctaaggccagcgacacactcactacccagcctcggaggccgtaggactgagtgccacagcgacttcctctcgatgtctc

SEQ ID NO: 314950 - DNA, 1171 bp, Homo Sapiens
  misc_feature (53)..(53): n is a, c, g, or t
  misc_feature (75)..(75): n is a, c, g, or t
  misc_feature (86)..(86): n is a, c, g, or t
  misc_feature (114)..(114): n is a, c, g, or t
  misc_feature (363)..(578): n is a, c, g, or t
  misc_feature (1156)..(1156): n is a, c, g, or t
ggcacgtgtcgattcctccagccctctaggggtgtgagcaggtagaatctggnagaatgaagagaagcacttagnctatatctaanaatcagcttgctatagcaaggcagaagnagatgctctcgattcccatctgagattcaactctattgataggctgcttctggcacagtagctaatattaccattgctactgtgacagccaagtcttagacagagagccaaaatatattgcacagtcaggagaaatataaaggcctcaaaagcctgccatggtcttaattcattccaaacacctgcttttgtcagttgcccttttctctgtaaaaattttcgtagttaacaccattttgtccatgtgannnnnnnnnnnnnnnnnnnnnnnnnnnnnnnnnnnnnnnnnnnnnnnnnnnnnnnnnnnnnnnnnnnnnnnnnnnnnnnnnnnnnnnnnnnnnnnnnnnnnnnnnnnnnnnnnnnnnnnnnnnnnnnnnnnnnnnnnnnnnnnnnnnnnnnnnnnnnnnnnnnnnnnnnnnnnnnnnnnnnnnnnnnnnnnnnnnnnnnnnnnnnnnnnnnnnnnntggttttctctgaaatgcagcttgaattattggggatggaggagggatttaaacttattttcagttctagagatgagttgctgtatagagacaaccatttagatgacaatcacaagacttacagtctagaaaggcaggttttatttctggttcttctgtgaacctatttgggtaacccccaccccccaagacctcagttccctcatgaagatgagcctagactacctcataaaaatggcccagagtgtctccatggcccccgatagtctctgacttcgccatttggttgaatcagttttcattaactcacggggaatatttgatctgctcatctcatagggatatagcaaaggcaatttgttgagtgttgggggaatggataaaggtgagtaacactaagttcctatttgataagtgtcattactgagaacttaaggccacctaacaccaaactgggaaaagcacaaaaaaatgcactaaaataaataataggcaagttgtgacatttgaatttcacgtatcttcattttcatttttatattttatttaccttttgctcccgtgccgattcttgggcncgagggccaattccc

SEQ ID NO: 314951 - DNA, 709 bp, Homo Sapiens
  misc_feature (46)..(294): n is a, c, g, or t
gtaaaataaggctcatctgatggtttgtttttgatacaagatctgnnnnnnnnnnnnnnnnnnnnnnnnnnnnnnnnnnnnnnnnnnnnnnnnnnnnnnnnnnnnnnnnnnnnnnnnnnnnnnnnnnnnnnnnnnnnnnnnnnnnnnnnnnnnnnnnnnnnnnnnnnnnnnnnnnnnnnnnnnnnnnnnnnnnnnnnnnnnnnnnnnnnnnnnnnnnnnnnnnnnnnnnnnnnnnnnnnnnnnnnnnnnnnnnnnnnnnnnnnnnnnnnnnnnnnnnnnnnnnnnnnnnnnnnngtgtctgagccactgtaatccaaaaactgcacctggcaggttttgtttttgatgtttaaaaatctaataagtaccttttcttttaataggtgagtgtctcatttacattctaatagatatgtttaaccctagtcctttcttttttctgctttacatgcttcttaattttcttacaattgctatgtgagaggtgttctttttgttttcttctttatggtattttggaaactatgtagtttatttagagttattccagtgattacttgtataactttaaataataggctgaaaattattggctttgaaaactaaaagtttgtataacttccataggaaaggtgaggagaccaggatacctcttattcccatgtgtctgagtctttcctttcctaggttccttaagtgttgtatctga

SEQ ID NO: 314952 - DNA, 1038 bp, Homo Sapiens
ggggttgttcccaacccggccgtgaacacccccagcagtgtttttcaatcagttctttcaaaggggcacaggacattttcttccttccacaggtgcaagggtgggtggacagggccagagatgttgaaatagttttggtgcctgagttgcgttcttttgccaaagccagcaaaccaggtacctccacggcgggcaggattgtgggggaccctgccactgtctccacgttggccacagttggtggggcagccaaaccacttcccacgtttgcggggaagggggggcttcaggcggggcttgccctgcttgccctcaatggactcgatgagcgctgtctcctctccacagatgtaggccccagccccgcgcaccacaaacacgtcaaaatcatagccagagccacaagcattcttgccaatcagacctgcctcataggcctctcggatggccacctgcagattggaggcctcattgtagaattcccctcggatgtagatataggcagcgcgggcgcccatggcccggccccccaccaggcagccttccagcagcttgtgaggatcatggcgtaagatctcccggtccttgcaggtgcccggctccccctcgtctgcgttcaccaccagatacttgggcctgccatctgagggcttattcatgaagctccacttgaggccagtggggaagccagcgcctccacggcccctcaaacccgatgtcttgatctcgcccaggatccagtcgggccccttcagcaggatctcctttgtcttgtaccagtcacctcgactcagggaacctttcagcctccagtcatggcggccgtacaggttggtgaaaatccggtcttcatccttcagcgagccaaatgaggttttcttgggtgctgtcgtgtcgccgctgaaacgcacagatacccgcgcgggaagcgaccagccgagcagccgccgtgttgccagcatcgcggcgggccagatgggtcacctcacgctgtcaccttcatagcactgaggctgaggaactggcgcgatagagacg

SEQ ID NO: 314953 - DNA, 1657 bp, Homo Sapiens
  misc_feature (210)..(211): n is a, c, g, or t
ttttatatggggtgaagaatatccaaagccctttatttccgtgtacccaaggatttccccttagggagaaacggctaatgccccatgttccggtgtaccttacggggggccccgcgcggccaaaacgaaagggttttagaaagacttttcgagggcccgagggcgcgccgacaaagggactgtcgcttcaaacgcgcgcatgtgccgtannggaggggtggggcagcacctcgcttttattgtcccagcattcccccatggatagacgcagggccagcaggccaggggtggtgggctaagaggccagcctgccggggcctgatgctgctgggcaaaccgctgcatccgctcctcgagctccggccgaaagtggcggatcagaccctgcacaggccaggcggccccgtcacccagagcacaaatcgtatggccttctatctgcttgctgatctcccacagggagtcgatctcggccggccgggcatcccccctcacgaaacgtgccatcaccttgttcatccagtccacaccctcacggcatggggtacactggccacagctctcgtgcttatagaactcaatgaggcgggcgatggctttcacgatgtccgtcgagcggtccatgacgatcaccgcagctgtgcccaggcctgtctgtgcctgcaccagcgcatcgaagtccatcagcaccgtctcacacacagacttggggatcagtggggtagacgagccgccagggatcacagcaaggaggttgtcccagccgcccgtgacacccccagcatgcttctcaatcagttctttcaagggcacagacatctcctcctccacagtgcaagggtggttgacatggccagagatgttgaatagtttggtgcctgagttgcgttctctgccaaagccagcaaaccaggtacctccacggcggcagattgtgggggacactgccactgtctccacgttggccacagttgtggggcagccaaacactcccacgtctgcggggaaggggggcttcaggcggggcttgccctgcttgccctcaatggactcgatgagcgctgtctcctctccacagatgtaggccccagccccgcgcaccacaaacacgtcaaaatcatagccagagccacaagcattcttgccaatcagacctgcctcataggcctctcggatggccacctgcagattggaggcctcattgtagaattcccctcggatgtagatataggcagcgcgggcgcccatggcccggccccccaccaggcagccttccagcagcttgtgaggatcatggcgtaagatctcccggtccttgcaggtgcccggctccccctcgtctgcgttcaccaccagatacttgggcctgccatctgagggcttattcatgaagctccacttgaggccagtggggaagccagcgcctccacggcccctcaaacccgatgtcttgatctcgcccaggatccagtcgggccccttcagcaggatctcctttgtcttgtaccagtcacctcgactcagggaacctttcagcctccagtcatggcggccgtacaggttggtgaaaatccggtcttcatccttcagcgagccaaatgaggttttcttgggtgctgtcgtgcctcgtgccgaattcgccacccaggcctcgctt

SEQ ID NO: 314954 - DNA, 665 bp, Homo Sapiens
tttttggagggtgggcagcactcgctttattgtccagcattccacatggatagacgcaggacagcaggccagggtggtgggctaagaggcagcctgccgggcctgatgctgctgggcaaaccgctgcatccgctcctcgagctccggccgaaagtggcggatcagaccctgcacaggccaggcggccccgtcacccagagcacaaatcgtatggccttctatctgcttgctgatctcccacagggagtcgatctcggccggccgggcatcccccctcacgaaacgtgccatcaccttgttcatccagtccacaccctcacggcatggggtacactggccacagctctcgtgcttatagaactcaatgaggcgggcgatggctttcacgatgtccgtcgagcggtccatgacgatcaccgcagctgtgcccaggcctgtctgtgcctgcaccagcgcatcgaagtccatcagcaccgtctcacacacagacttggggatcagtggggtagacgagccgccagggatcacagcaaggaggttgtcccagccgcccgtgacacccccagcatgcttctcaatcagttctttcaagggcacagacatctcctcctccacagtgcaagggtggttgacatggccagagatgttgaatagtttggtgcccc

SEQ ID NO: 314955 - DNA, 1155 bp, Homo Sapiens
  misc_feature (229)..(230): n is a, c, g, or t
ccgctgtttttttctgcgttgccctccgggtcttttcccccctcggggccgcccgtgtttttaaacaacggatttcatttccgccgcaatatcccatgcccacctttccccccgcttgatcccagcaaccttttcaaccaaactgggatcatggtaacaaaccccccggatcccccagaggtttccacccccgtgacacgcccaccatgcttctcaatcattcttcagnncacaacatctcctcctccacagtcaaggttgtttaacatgccagaaatgttgtatttagtttgtgcctgattgcgttctctccaaaccagcaaaccaggtacctccacgcggcagattgtggggacactgccactgtctccacgttgccacagttgtggggcacccaacactcccacgtctgcggggaaggggggcttcaggcggggctttgccctgcttgcccgtcaatggactcgatgagcgctgtctcctctccacagatgtaggccccagccccgcgcaccacaaacacggtcaaaatcaatagccagagccacaagcattcttgccaatcagacctgcctcataggcctctcggatggccacctgcagattggaggcctcattgtagaattcccctcggatgtagatataggcagcgcggcgcccatggcccggccccccaccaggcagccttccagcagcttgtgaggatcatggcgtaagatctcccggtccttgcaggtgcccggctccccctcgtctgcgttcaccaccagatacttgggcctgccatctgagggcttattcatgaagctccacttgaggccagtggggaagccagcgcctccacggcccctcaaacccgatgtcttgatctcgcccaggatccagtcgggccccttcagcaggatctcctttgtcttgtaccagtcacctcgactcagggaacctttcagcctccagtcatggcggccgtacaggttggtgaaaatccggtcttcatccttcagcgagccaaatgaggttttcttgggtgctgtcgtgtcgccgctgaaacgcacagatacccgcgcgggaagcgaccagccgagcagccgccgtgttgccagcatcgcggcgggccagatgcggacgcgtgggtcgacgatatcccagaggatt

SEQ ID NO: 314956 - DNA, 402 bp, Homo Sapiens
  misc_feature (371)..(371): n is a, c, g, or t
ccactgtgcagcctccttttatctaattgtccccacagcagacttgtctggtcttggctattttccggttgttaaggtgtttcaggatggaggaatcagttcctgagatagttattaagttctgcctgctagaaagggacagtaagtgggttgatatcattctagacttgttaagaaattgttcagaattttgattgtttttcatagcagcttgattaaaatacagattttaataatttccttactacttttataggtagtgctttcaaataaaaccagtgtttgctaaatccaaatgtctttctcccttgctaaattatagcaggagcatgcttatttcatcagactactggaatgatggttttacattntaatgtttgcataattttggttcttgcgtgt

SEQ ID NO: 314957 - DNA, 629 bp, Homo Sapiens
  misc_feature (542)..(543): n is a, c, g, or t
  misc_feature (559)..(559): n is a, c, g, or t
ggcacgagcccggatgagctgactttctgcagcgcccaggcggaagcgagagaagaggagcggcgagtgcgggagaccgtgcgcagggataaaacgctcctgaaggagaagaggaagcgacgcgaggagctgttcatcgaacagaagaaaagaaaactccttgcagacactattttggagaagttaaccacagcttcacagactaacatcaagaaatcgccaggaaaggtgaaagaaggtatgactattctaatttaactaacttctcatgtaagtgtcaagtgcacttgcagatgtttccagtcaaatatgaatggcccttagaaagccagcatgggcctgggcaatgttagctggggcctattccctgtatttgatacagataaaaactgcatccacattggtgtgtagtggatgcttaaagtgaaactccagtaaattttctgatttatttttacgtgaatgcttattagaaaatgttactctattttttaagctaatttgcaaaagaaaaatgaagactgtgaaaaagggaatgactnncagaaagtaaagtcanaaagtacagctgtcaggaatgagtctttgttcatttgggatgaagagacctttgagtgattgctactggg

SEQ ID NO: 314958 - DNA, 1375 bp, Homo Sapiens
  misc_feature (115)..(128): n is a, c, g, or t
  misc_feature (160)..(160): n is a, c, g, or t
  misc_feature (193)..(193): n is a, c, g, or t
  misc_feature (201)..(201): n is a, c, g, or t
  misc_feature (630)..(642): n is a, c, g, or t
ggccggtcggcgcagagccgcgagcggaggggcaacgacccggcggtctgcgcagggcgagggcggaagttgcccccacccacccttccgacagtgtagaagtcgtgacggcgcnnnnnnnnnnnnnntttggtggggcgcggcgatggttcgaggttcnacacgagcgcggggcggccggcgccagctcagnatggctcncgtgcgtacatttacggcggcggtaataggttcgttatacaatgttccgctcagtagacctccgggattgcggttccttgtagtccgggcattttggcgaccctttaaacggggaggagagaagaggtgctgtgctggatgcgggtatggctgaatttcagttaaatatattaagaagaaaacaattccttcttaaaccgctttttcctctaggattgcaaggcacagttctactccagaagaatgaaatgtggttgagcacttcctcaaattaggtttatgatttttataatgatcctttaaaatgatctatgaatgatttattagataaattctatacatacaaagtacagattcttcatttagcattgatttacttcttagttttcatctttctgaccatccaccgtcttttaaacctcttggcannnnnnnnnnnnnggattccccaagcattattcaaaaactggacagcagctcttttcactggtaacctcttgttggcaagagacaggaacttatttacagtagtcctgttggttcctggcccatataatgaattatgtatgaaggcttgtgctgcttgttgccttgaatctctcagatcttggtcttttagccttacggccaagtagcttttattctggctgacagactgtactttttgtactttaactttcttggagtcatttcctttttcacagtcttcatttttcttttgcaaattaacttctttcacctttcctggcgatttcttgatgttagtctgtgaagctgtggttaacttctccaaaatagtgtctggaaggagttttcttttcttctgttcgatgaacagctcctcgcgtcgcttcctcttctccttcaggagcgttttatccctgcgcacggtctcccgcactcgccgctcctcttctctcgcttccgcctgggcgctggcgaaagtcagctcctccggggcctcatcgtcaaactcatcgtccccttcctcgtcttcctccaggggctcggcggccgcgccgctgctgggctgcccgagcaacagcccgtgctccgcctcctcctcctccgaggccagctggccctcgtccaccatcgcctccgccgacgccggggcgcgagacgctcgcggtcggagctgcaccatggcccacgcagcgctagaccgtctccc

SEQ ID NO: 314959 - DNA, 604 bp, Homo Sapiens
  misc_feature (448)..(448): n is a, c, g, or t
aaattgtttttaataaaattgcttcttaggggtataaaaggaaatgcatagacacggtatcagcattctaatattttgccacttaggttgatttactttgctgataagaattatggatatcgagtgtacagtatgtgcatgtgtcacatatttatgtataattgtgtatggaaattgtagcacatatacatatactaattatgaaaaagtgtctgtatacactaaatttaaatcctaaccacatctgagtttgctatagacaaaacaattcgctagctgtcgtatggtggattgaaccttttgaggtaagaaacttgcagtgtcagcctagtgcaattcggtaagaaattgtgtgtgtattaaattggaactgtctgatagctgaataagagcctaagctcatcttctgtgtcttcctggccatccaatgaaacggagcagaacacanatttctttccccgctgctctgtagctcacctttctgaaatgtctttgaaatcctttcctctccatcttcatttttctttggtgattatttacatcataatttgatgtgctgtctttgcctttgatgcgtatccttctagtgttttatggctcactt

SEQ ID NO: 314960 - DNA, 545 bp, Homo Sapiens
gtaaacagaaagaagtccctttgatccctgttagcccatttcaagttgctaactccagggtttctcctggaagtagagttactaaggagagcgggttaggcaggacatgtttaagacggggttgagatccaagggctttcagatttgagtgctcagtcttctacttacgctcccccagttgccaactctccaggtggccgagacagggcagtccctcaggtaacaggggtgaacactggggggctgcgtgcctgggcagttgatggtggtttggtagctgtattcataattcccacaggtcactgagcactgcaaagacagggattgagaggaggattgagaggagaggttcgagcagttcctgggggcagcccacaataggcccctgacctccacaccaagcgctgaccgtgtgactatgctgcagaaagctcccacttcattagcttatttattcatttcaagtggcaggccctgagcgcacaggagacaggcaaccctacagggtgcctctgggatctggtgcttccactggcacctgcagc

SEQ ID NO: 314961 - DNA, 629 bp, Homo Sapiens
gacataacattttttatttaatgaatcttctgctgttgaacatttaagttggcttgtttgaaacagaacgtaatattgcagtccatatacttgtaaaaagtatttcagcatatggcagatgattttcttagaaaagtgtcccaaggtggacttaccgcatgtcctgattaatctctgtgtccccagatactctttgcagcctcccctacctttctctgtgcccccggagactgagccagccctaagcattgaatcacttaacttcccctggtactttgaataaggttcagccatcaggaggcaacagcaagggggacaggtgacaggaggggagggggtatgtatttgtcctgctccctccctgctttgctgtggttctggcagtgactgcagccctagggctgtaacttgggtgtggccgaccctccgaactgtctggggtgctaatggagtcctgctgttgcacaagcttcaacttcccctcttggttcccttaacctggcccatgtctctgaaaataataacttcactacaacatctcttcaaaatcccagctgggtagggagattagagggtctttctagaacacctgctaatatgaacaagttctccttcgctggccatttttt

SEQ ID NO: 314962 - DNA, 365 bp, Homo Sapiens
ggaagctggagttcaggacaaggaaagtgaaatgtgaaggagggatagataatttaaggatctgatagcgcctaggcagcaggtgttcaattccactagaacctttttaggaacctatggaatggaatgctctcagaactgtgtgcttaagtaccatatgcataactgcagaataagtttcaagagatatcctaatgcaggatgtgtattgagcattagcaatgaggcagtgtctgtctgcactgatgcacgagcatgaagccactgtgagcctgcttgagactagtcacatgcggcagtgtaggtagtgagcactggggcctagggggttggaagtggctttttagaggtgtcccactgtcagg

SEQ ID NO: 314963 - DNA, 353 bp, Homo Sapiens
  misc_feature (310)..(310): n is a, c, g, or t
gaagaatctctgtgtcaatatcaacgacaacatgcccagaatcctgtctcttgcgtgcagccccaacggggcctctttcgtctgttcggcagcagctccgagcctcacttcccaggtggacttctcagcaccagacatcggcagcaagggcatgaaccaggttcctggcaggctgctgctgtgggacacgaactgtacagccttcaatcacaacgggaacctgctggtcacaggggcagctgatggcgtcatccggctgtttgacatgcagcagcatgagtgcgcgatgagctggagggcccactacggngaggtctactctgtggagttcagctatgatgagcaccgtgtcc

SEQ ID NO: 314964 - DNA, 1384 bp, Homo Sapiens
  misc_feature (238)..(258): n is a, c, g, or t
  misc_feature (639)..(654): n is a, c, g, or t
  misc_feature (656)..(656): n is a, c, g, or t
  misc_feature (659)..(659): n is a, c, g, or t
  misc_feature (661)..(663): n is a, c, g, or t
  misc_feature (665)..(665): n is a, c, g, or t
cggccccacaagggctgcgaaccccaaggtgtgtggcgttgtatatatcccccccttggtgggcggaatttttcaaagggtttttcacatctccaatagaccccggttttttgcggaagaaagggggcttttcccacaattgtttccgggcaagaggaaaatcgcccttataaaattggaaaatttttgccccaacccccagttttactttcgccgaaatagaaaggtggcgccaacnnnnnnnnnnnnnnnnnnnnntaaaatattttgagatctattctccggagagctttccccgcctttggggaaactattcccctggttggggaaataaagatcttccccggggttaatattggagccctttcaaaggaaaacttccccctactttggagattttttgtttcacagaaaaacgcctttcggtgtttggccccgccccgggggcgtgttttttttaattggggtgagggaattcccaaggccacctatgtccaagggccccaggattcttccttaaggaaaaaccagcctatggacccatggttcaactttaccctaactggggccccgccgcgccaaaaacgaatgtgtcctagaaaagctttctcggagggccggaggcgggcccgacaaggnnnnnnnnnnnnnnnncnttntnnntnttccagtgtacagatacgtttattgacaaataaagtacatgtacccctacacaagtatcactgcgacatttcaggaaccttggagctgggaacgccccttcctccctgcccgcctcttctctagcctcctcctgattgggcttgggctctctagaaaagtgcttctggcattgtctcgctggaaactctgtaggtgtgctggttgggctctcagtgtttatcatgtccacacccttctgtccctgggagctgtggacaaggggcgatgagcctgctcagtcattcatgtccagcccaaactctggatacaactctttggtggtgacacctcggatcacagctagtttgcccatcagcatctgccccacatccttgatgtcattgtactcgtgaagctgggtaatgtggtcctccagttcatccacactgtagccttcagatacgaactgggagatctccttgtccagcatgtccctcttctccttcagtttctgaatgtcaaggtgcagagactcctcgctggtcccatcagcctggccagacttgggcaatggcctaggggatcggaaggccccgcggcaacttcgggtaagtcttggttcagtcctagagaggaatccgaggggaaagtctgattggacccacagcccgctgtgaggacggggtactgtggggatgcgggaggaggagcagttgggaagtaggagcgccagggactg

SEQ ID NO: 314965 - DNA, 405 bp, Homo Sapiens
ggacgggcatatgttcccatcgcacaagtgaaagatgtgtgcgtggtaacagatcagatttctgtgtttgtgactatgttccagaggaacgatcgaaattcatgcgacgaaacctttctcagagatctccccattatgtttgatgttctgattcatgatcctagccacttcctcaattattctaccattaactacaagtggagcttcggggataatactggtctgtttgttttcaccaatcatactgtgaatcacacgtatgtgctcaatggaaccttgagccttaacctcactgtggctggagcaccaggaccttgtccgccaccgtcaccaccacccagaccttccccaccccttctttaggacctgctggtgacccccctggagctgagtaggattcctgtg

SEQ ID NO: 314966 - DNA, 642 bp, Homo Sapiens
agccagacccggattcttctaattctggatttgacagctcagttgcctctcagatcacagaagctttagtcagcggaccaaagccacctattgaaagccattttcgaccagagtttattcgtccaccgcctccactccacatttgtgaggatgaacttgcttggctaaaccccacggagcctgaccacgcgatccagtgggataaatcgatgtgtgttaagaatagcactggtgtggagatcaaacgaataatggccaaagccttcaaaagccccttatcctctccccaacaaacacagctacttggtgagttggaaaaagaccccaaacttgtctaccatattggcctcaccccagccaaacttcctgaccttgtggcaaccctttagtcgctatagaaatgttgctgaaattaatgcagtcaagccagatcactgagtatttctctgtcctggtcaatatggacatgtctttacattcaatggaaggttgtaaatcgactaactacagctggtgatctacctcctgaatttattcacctttatatatcaaattgcatctctacttgtgaacagattaaggataaatatatgcagaatcggttggtgcgtcttgtgtgtgtgtttcttctctttgatccgc

SEQ ID NO: 314967 - DNA, 1458 bp, Homo Sapiens
  misc_feature (1376)..(1376): n is a, c, g, or t
ggcctgggtggcgcgtgtacagcgcgctttacggccgcggggacggagcgagccggcgccagggcccctcgggccgggaagaggggaaggggagcgaggttgatgcccggcggaggggcgagcgcggcgtctggccggcttctcaccgccgcggagcaaagagggtcccgggaagcggcagggtcggcgtccaggagcggcttcgggggctccggcggcggcagaggcggagcaagcggccccgggtccgggagcggaggcccggggggccccgcgggcaggatgagcttgaccccgaaggagctctcgagcctgctgagcatcatatcggaggaggcgggcggcggcagcaccttcgagggcctgtccaccgccttccaccactacttcagcaaggccgaccacttccgcctgggctcggtgctcgtcatgctgctccagcagcccgacctgctgcctagcgcggcgcagcgcctcacggcgcctctacctgctctgggagatgtaccgcaccgagcccgctggccgccaaccccttcgccggccagctttgcgcacctggtcaaccccgcgccgcccgcccgcggggggcaggaacccgaccgccctccgctctcaggatttttacctcctataactccaccagaaaagttttttctttcccagctgatgctgggacccccacgggaactcttcataaagacgcctcgccagattgcactgatgggacgttggaaacatgggccacgtctgtggacattatgtgggcttccgttagcccttggccgaacgccaatctgaattgccaacgcacagcagagcgagctttcccagtattctcagtgacccagacccggattcttctaattctggatttgacagctcagttgcctctcagatcacagaagctttagtcagcggaccaaagccacctattgaaagccattttcgaccagagtttattcgtccaccgcctccactccacatttgtgaggatgaacttgcttggctataccccacggagcctgaccacgcgatccagtgggataaatcgatgtgtgttaagaatagcactggtgtggagatcaaacgaataatgggcaaagccttcaaaagccccttatcctctccccaacaaacacagctacttggtgagttggagaccccaaacttgtctaccatattgggctcatcccagccaaactttctgaccttgtggagatcactgagtatttctctgtgctggtcaatatggacatgtctttacattcaatggaagttgttaatcgactaactacagctgttgatctacctcctgcatttattcacctttatatatcacattgcatctctacttgtgaacagattaaggatanatatatgcagaatcggttggtgccgtctgggtgtgtgttctccaatccttgatccgtaacttattgtacagggattgtttat

SEQ ID NO: 314968 - DNA, 604 bp, Homo Sapiens
  misc_feature (523)..(523): n is a, c, g, or t
  misc_feature (529)..(529): n is a, c, g, or t
  misc_feature (541)..(541): n is a, c, g, or t
  misc_feature (592)..(592): n is a, c, g, or t
actttttacattacaagtgcaataatatttcacaaaatgaaactcccgaatgggtggagtatgtgattattggtacctggtccttctggtgctatttttatttaagtctttgtttcaaaccacctttccctgaatcttaaagataatgttttgcatgtgagtacatgcagcccagcaagaaactaaactgaactctcttctcctatcctagtccattaaggagaagaaccagcattgcttttgtgtttggtgtgaatattcagtcaataaaaatgatttaccattataaagagctgtgatcttttcaagtatctgaaataaaacactgtgctgctgagttcatctcaaacattcttgaaagcagggcaccagtataagttaactgtattcctgtgggttaggccgtgaatgaatcatttcttttatacaatattcttttacaactaatagagataggaggccccaaggcaagaagtttggcaggtttacagtttggtaatttatttgttatataccttaattnttattntagccaatgaanttaaatattcagtataactatttgaggttactagatgcatttattaataanatatttgctgcc

SEQ ID NO: 314969 - DNA, 608 bp, Homo Sapiens
aaactttctcccatgaactaccaccatcagtatgaattgatgcaacaaatgaagaaatatttaaagacagcctctcaacagattgtatctcaggttaaatgctaactaattatgtctgtgttgggggttgcgaagagattcttaaaagtatctgtgtgttgatcatcagttttacaaaaacacctatttggctgaaatggaataaaatgtttgtgggtaaaagctaatggccaaaatggttgcaatcattcatactagttagaaaaattatgtgttgaaataagtggaaaagtgcaatccatccacccttatgattaacgtagatgatttttatacctttttctgatgtacctcttgaccttctccttcccttcctaccctttctgagtatttccagaaatacctgattttgaatcattcaacagtagaaaaagaggcatattttcattacttgacaatgtgggatgggtgcaatttattccatcttcacttaaatagaagcaattccatagggtaccataaacctattttaggtacccacaaggtgtctttttacacagcttatttgaatacaggtgttctgagggggtttctatttttataccatt

SEQ ID NO: 314970 - DNA, 676 bp, Homo Sapiens
gttccagaatatctctcaactttatttttagcattatggacacttacaagaaaaaatttgactgccaattttaaatgcaatgaaagtacttttaagattaacaccttaggactttacatttggcatgttttggtaacaaactgctttataacaataactataaaatgctcccatagaactatgagtttcaattctcctctatactcaaactcaagcaagtcagttgccacatctcttattgggaagtcaagtagggaaagtaaaagataaatacatgaaattctgaagagaaagacaagacagatttattggtaatcctccagattttagataaatattttgctgtgtagcaaaagccatacctgtgagaccatagatttgtttgatagtcttgatatcacctgaaagaacaaacagaagtattaatcattttacatatactggtggtttgggactgggtgaaatgcagcaggcagaggaaagagaagtatgtacagagtttgtgggagggaaggagcacaggaaggggtgtggatctacctgtgcaggccagagaagagagaacaccttctacaatgtgccaacaactgcctcatactatactctaggaccactactgatcagagtgtgtaatgagggagcaccaagttgaatgtgtaccacaggataccaccct

SEQ ID NO: 314971 - DNA, 1126 bp, Homo Sapiens
aacgctcccaagatgtcacgtttattgcaactgagcagagacaggctgtgcggaccttcctcaatcccgtccaacccccagcccctccccaagcccccgctgcaactacgccggcaggtccgcagagtgttgcttgacagcgcgtggcggtgcccggagtcttaagacaccgccagtctctggcgccttcagtcatggtaggggactccagagggcacgcccgcctcttgaagccctaagtccggcttggaggcagcggaacctccggagaggtcagaggtagagcgaggacactgtcggaggcggtggcgctggtctggagggtaccactaggggcgggattccagcccctgggcccgggcaggtcacccgatggggcaccggccctgggggtcggcaggcagtggcttccttgggggtgggggcttggctggcccctgagacttcgggcttctcaccaccgggtcagcgggcagagggcgggtagggggattgggtcggtcagccagctcagccttagtgcctcgtgccagcagggccctctgcggaggtcctggccgttcagagggaccagattgggctgccctgtactggcaggtgggtcccttgagctggcagagtcgctggtgcaggcgggcacggtaccagtagctggcaccaagcatcaccaggaccaataagaccaggaggctgaggagcagccctgtggtcagggagctggttgctttgagctgagtggtgcagtcagggggtgcccagccctcctcacagtagcagtgcctgttgctgtcacagaccccatgtccatggcatttgcttcgacattcctgtgcccccaggagatccacacgctggcatcgatggtctatacacaccaggccagggccacaggctgtgccaggcagagtcaggaggggctgggccacatcactgcccaggtccaggtgcacccagctgcagttcagctcagtcccattcacatctattgtctcccagagtagatcccggatggagcccagcagaggctgggtcctacctgtctggcactggagctgcccacaaatggcatctctaggggtgcaggacacataactgccactggggttgcgcccacagctcccaaaag

SEQ ID NO: 314972 - DNA, 1428 bp, Homo Sapiens
  misc_feature (1131)..(1131): n is a, c, g, or t
cggaaatatgtttgtggagccgggcgagcagtgtgactgtggcttcctggatgactgcgtcgatccctgctgtgattctttgacctgccagctgaggccaggtgcacagtgtgcatctgacggaccctgttgtcaaaattgccagctgcgcccgtctggctggcagtgtcgtcctaccagaggggattgtgacttgcctgaattctgcccaggagacagctcccagtgtccccctgatgtcagcctaggggatggcgagccctgcgctggcgggcaagctgtgtgcatgcacgggcgttgtgcctcctatgcccagcagtgccagtcactttggggacctggagcccagcccgctgcgccactttgcctccagaccgctaatactcggggaaatgcttttgggagctgtgggcgcaaccccagtggcagttatgtgtcctgcacccctagagatgccatttgtgggcagctccagtgccagacaggtaggacccagcctctgctgggctccatccgggatctactctgggagacaatagatgtgaatgggactgagctgaactgcagctgggtgcacctggacctgggcagtgatgtggcccagcccctcctgactctgcctggcacagcctgtggccctggcctggtgtgtatagaccatcgatgccagcgtgtggatctcctgggggcacaggaatgtcgaagcaaatgccatggacatggggtctgtgacagcaacaggcactgctactgtgaggagggctgggcaccccctgactgcaccactcagctcaaagcaaccagctccctgaccacagggctgctcctcagcctcctggtcttattggtcctggtgatgcttggtgccagctactggtaccgtgcccgcctgcaccagcgactctgccagctcaagggacccacctgccagtacagggcagcccaatctggtccctctgaacggccaggaacctccgcagagggccctgctggcacgaggcactaagcaggctagtgctctcagcttcccggcctccccttccaggccgctgccgccctgaccctgtgtccaagagactcccaggctgagctggctgaccgacccaatccccctacccgccctctgcccgntggaccccggtggtgagaaagcccgaaagtctcagggggccagccaagcccccaccccccaagggaagccactgcctgccgacccccccaggccgggtggcccatcgggttgacctgccccgggcccaaggggctgggaatccccgccccctattgggtacccctccagaaccaagcgcccaccgcccttccgacaggtgtccctcggcttctaccttctgaaaccttcttccgggaaggttcccgcctgccctcccaaagccgggactttaaggggctttccaagaagggcggggc

SEQ ID NO: 314973 - DNA, 405 bp, Homo Sapiens
  misc_feature (295)..(295): n is a, c, g, or t
  misc_feature (304)..(304): n is a, c, g, or t
  misc_feature (317)..(317): n is a, c, g, or t
  misc_feature (326)..(326): n is a, c, g, or t
  misc_feature (342)..(342): n is a, c, g, or t
  misc_feature (354)..(354): n is a, c, g, or t
  misc_feature (362)..(362): n is a, c, g, or t
  misc_feature (370)..(370): n is a, c, g, or t
  misc_feature (390)..(390): n is a, c, g, or t
tgttataaggcactttattaaaataaaagtgcttacatccctttaatgcattaatctatctcctgaataacacatgtaatatttgacaaatactgaataccaagtctgtcccttataataggaaaacatactattttagtaagttttctccttccaccttttacatttttgctcaccacggtattgactgtagtatagttaactgggccttaaaaggggtggtggggaggggatttctaggctagtgttttctaacaggcaattgccaaatggctacaggaaactataaaacaanttcaaaggnaacatcccggggnaacttaagnggaacaccagttttgnggaaaaccattngggatttntccatttnccacccggcttatccgtggngggggttatggtacc

SEQ ID NO: 314974 - DNA, 162 bp, Homo Sapiens
ccagcctggacaacaagagcaaaactccatcttaaccactgactttaatcactgtaggctgtagtccagattctccagtttgcagtgtgtgtttttcctctatcaggctcttaccctaatgaactcttctttcttcttagtggatgccatttatggttggcg

SEQ ID NO: 314975 - DNA, 1019 bp, Homo Sapiens
  misc_feature (100)..(121): n is a, c, g, or t
ggaagaattaattcagatctgtacctcattgctgctcacacatatatgtttcttaccttagcctgaaccttctcaggccttgaagtcattattctactcnnnnnnnnnnnnnnnnnnnnnnatggcactagagaatgaaaacctaaggtcttagaaaatcttaacttgaaaaagtctctaactggcatgatttgattacttttttcccctgtggacaaataattttctttcctatataatagatttttagtaagtgaaacctttgctgctgctttcctgggtttacattagttttttcctgcccttaagaataatttatctgtgcttctctgatgactgttaatttctaatagtgcaggaagggatgagcttttgatttcttctcactcccctcctcaccctacttccaaattacacactaacttctaacccttacagcctgttggcacatacacaagatccacgagaccatgctcctcagaagctacccatgtcctttctcaccatggtgtggctcttggagccttgagtatctgtgactacccactccaaaggttgactgtaagaggagagcggccttcttaattttgcatttcttaattttgtttttctccattcctgttttatgacttggccttcagatgcttcctactctggcctcctccttttttctcctaggaattgtttccaggtaacctaccatgtgcacttctcagctgctctgctcacctttgcccaccttcccgtgaaccctgaggagttacagatccgaataatgtggcctgtgcagagctcagagaactgtgaggactacccatgcctgtcagactctgctcagggacagagatggatgggtatggtgctgttggagacatttttatcttcataccaggctctgtttcatccctgcaccccgcacccccactcactcccctgagggggttggcctaccctggagtgctgcagtgtgtgagagctgctgcttgcttggttctccactaggcctgctcctgcttgcc

SEQ ID NO: 314976 - DNA, 606 bp, Homo Sapiens
agtccaaagatttttaaagcaaaaggaatcctctactgccacctcggattttatttattttaaataatccccctccccccatcctcaagcgccaaaagtactgggtggaaacagtcacttggagagctaatggaacctggtgctaagtcaccccgtaggcaactgtgtcggctccagagattggctaagcatttggagcaggcctagtggagaaacaagcaagcagcagctctcacacactgcagcactccagggtaggccctaaggcttgggaaggagggaatcagacccttcaggtcaaccacctctgcattttaccccctcagggaggtgagtgggggtgcggggtgcagggatgaaacagagcctggtatgaagataaaaatgtctccaacagcaccatttacccatccatctctgtccctgagcagagtctgacaggcatgggtagtcctcacagttctctgagctctgcacaggccacattattcggatctgtactctcagggtcacggaaaggtgggcaaaggtgagcagagcagctgagaagtgcacatggtaggttacctggacacaattcctaggagaaaaaaggaggaggccaga

SEQ ID NO: 314977 - DNA, 593 bp, Homo Sapiens
gggcctctggaaccccagcaaaaggacgacctctcaatcactgtgcacactctaggccaggggctctgctgagagatatggtaggagcagcaacccaggttatgtagagcccacagtgggtgtgaacgcatccgtagtggaacaaatatagggtcggccatccatctaggctcaacttgctcccataagagactttagccataacagggtggtcttccccatcagatgagggcggtccgacttgagctccccttggtctgctggcctctcccaaggccccagcatacccatgcttgcttgctgggcattctcaggttccctggaggcttgcactacaccaactgcactgacagaccgtgcctgactggcagagagtttcagcaaggtagcccctgtagccatgcaccagcccacacattccctccttacactgcagcttcctctgggcccacagcaactccccacatcactttgctggcacatgtatgcaagagtggggatttccttgccccaccagtgtgcgggagtgcagtctgcctcccttcccaccgccactctctatggcagacagaggcttgtctgtcacagagcca

SEQ ID NO: 314978 - DNA, 1718 bp, Homo Sapiens
  misc_feature (138)..(146): n is a, c, g, or t
  misc_feature (186)..(195): n is a, c, g, or t
  misc_feature (244)..(414): n is a, c, g, or t
  misc_feature (457)..(471): n is a, c, g, or t
  misc_feature (481)..(634): n is a, c, g, or t
  misc_feature (1694)..(1694): n is a, c, g, or t
  misc_feature (1696)..(1696): n is a, c, g, or t
  misc_feature (1698)..(1698): n is a, c, g, or t
aaagagggcgccaaaaagaacaaaatttttttcgcccccccttttctccccccgggggggaatatttatactccccaggcggcccaacggggggtgtacccccggggcggattttagggtttccacacaccccctgtnnnnnnnnntccccccctggccgccggagaggtttttaagaaattccannnnnnnnnntctcccaaaaggcgcccaggggcgggggggaatattaatattaaagagnnnnnnnnnnnnnnnnnnnnnnnnnnnnnnnnnnnnnnnnnnnnnnnnnnnnnnnnnnnnnnnnnnnnnnnnnnnnnnnnnnnnnnnnnnnnnnnnnnnnnnnnnnnnnnnnnnnnnnnnnnnnnnnnnnnnnnnnnnnnnnnnnnnnnnnnnnnnnnnnnnnnnnnnnnncttgggggccccgcccccaaaaaaaggttttaaaaaatttttnnnnnnnnnnnnnnncccgcccaannnnnnnnnnnnnnnnnnnnnnnnnnnnnnnnnnnnnnnnnnnnnnnnnnnnnnnnnnnnnnnnnnnnnnnnnnnnnnnnnnnnnnnnnnnnnnnnnnnnnnnnnnnnnnnnnnnnnnnnnnnnnnnnnnnnnnnnnnnnnnnnnnnnnnnnnncacatccaagaactttattggacacagctccgcgcagggccacgggcccggctgtgagggcggctccatccaggaagtctcagcaacaggaacccacaaggcgacactctagctaaggttatagatagctgggagacaagggccgctccgcagacgcaggaacaggccagatctttataaataaacatccagtaaagagaaatgacaattctaaatcatccgcatacacagagcactctagggggtggggcgccgggggcctggaggggcgatgagtgggcccagatgtccacggcacggggcgggcgggggcaaggccggggaaacagacgatgggcactaggacactgcgcatgtacaagaccaactactgggggcggcggccccgtgcgtatgtgtcaggctgttcgttctggaatgaggaggggtggtctttacataatattctgtggctggtgggctcggagagggtctactttgtggagaggatgagggcgacgatgagaccgtagaggccgagcacctcggcgaagatgagaatcaggatcatgcccacgaatagtcggggctgctgggcggtgccccgcacgccagcgtcccccacgatgccgatggcaaagccggctgccaggccgctcaggcccacgctcaggccggcgcccagctggaggaagctcttgtagaggctgatgtcgtcattcagggagttggcgatgaggactgccaccaccaggccgtagatggcgatgatgccagccatgaccactgggatgatggacttcatgatctgctccggccgcatgacagacatggccgcaatgccggtaccgctcttggctgtgccataggcagcgcccagggcgctgaagaccatggcggccgaggcgcccatgacggcgaaaaacgaagcatactcggggccgctcttggactcggacatgtctgcgggtggggagggggcaagctctgcgggccgaggcggtggcggaggcgggggcgaggacgggccgggcacgaaggtttgcgggcgggcggcggcgaaggcgatccggcccgtcangncngcgctctaaataccatcccg

SEQ ID NO: 314979 - DNA, 679 bp, Homo Sapiens
tacagggcaaggccacagagcggcaggaagttgtaagtgcaggggccaggcacagtctgagtggagagccatgatggcactcatccctggctggctcctgggcccaggcccttgctcagaatacagtgcccaggcccgcctgggcattgccttaattcctgtctgaggctgccttccgtcatcctcctcaagctgactgctatcagcaggagaagggaatgcagaaccacacccaccccaactccagtgtctccagaactgagcagggaccctccccatgacggagacagacaacccaatggcagggcctgggggagttctaacctcccgtgcccaagcctgacttcccttccctctccagatactgaggaaagtgggttggaggtgggccatgagggtgggggacagggggagggagagccatttcctaagaagagcccaggttgtctcagcccagggagactggtttcaggagctgttccttcagaaaggacgatggaaatggaagtcacagcagggctggggaactggggactggttaggttggacccatgggtgcagcacccttcaaactggtgtcatagcctgccgatgagtccccggaggagcggccctgcaggaagccgatgatcttctcaatggtgggcctctggtattgtgggaacacctgttggcacgg

SEQ ID NO: 314980 - DNA, 1782 bp, Homo Sapiens
  misc_feature (1749)..(1749): n is a, c, g, or t
gttccaaaaaactttatttattgtttcaagtggcaaaatgtcattggtctctgtggggtacctggcggggcagacggagacctggggtgaggcagggatacagtcccacccattataaaaatcaaaggcttttataaaaaatgctataaattggtatcaaaagaaaacccaagggaggctggaggaggaagcagagagggagagggaaggaggagaggaagggacaaaaccttcaaccactagtgatgaaatccagggaagggaaggtgtggggggatttcggagggtgatacaaagtgcataaatgtgcctccccagacgctcctcagaggtggaggggacagaggctgcagcctggggcatggtggggctccagccgtctcctcacccagggaccccacaggaatgggcactgcctgagactgccaggtgggaagaacctcagtgacttctcagaccttcttcttcttcagtttcagggcttgaagccagttgggcgacgatccttctgaccctgaggatttctctggcttgggaggtaacgtgaggggctttcccagtcctgggaccttgcaggatttcgaacgctggaccgcggactccttctggctcgacttgctctcagccagctctccctcctcagctgagcgattccgggggcgcagcttggccttcagggctgaggggctcaggccaggaaagaggttgactttcagccccttggtgcccaacgacatccgtgtccggcggctctgaggttcctccactacctcttcatctgaagatggcacccgagatgcccgtggctctgtagagtcctggaacaggtgtgcatccgagtctgctgcctccgacaggcccaaggtacccccaggccgaatgaccggggcccggtgcccacgcttgcgccccaagttggcacggctccgatacatggcactgtcgaggatctcggtgtcctcaatgaaggagaagtcctgactgggggatctggcaggagggccttgggagggtcgccgagaagtctgtgctggcccctgatcgctccacctggctgctgaagagccccaggtgccatccacgtcttctgtctggctggcctcaccatcaggctgcggcctccaggagggtggagagtccctgccaggctccagcacctcctcttgggcagcacctgccccggctccttcctcctccaacaggcccccaaggcccgaggccgctgactccctccgagccaccgccttggagctgctggctgccagcatctcctccagcaggccctgggagccggagggtggggggcgggccgggcacctgccagggcttgctccgaagctgagggcttctcctgtctccattccagggtctgcagggtgtggctccaaggaagacgaggagtaatcttcaccctgggtctctggcccacttgtctcaccaacccccagctccctggcctccaaggggtctctggcctccaggccaggagacaagctgccattgtgcctcaggccgggctctgggcactggctcaccccgcccaccccatgctccctggcttcacttggagccccaaagagctccacattctggggcgccaagtcctgggtccagtccatctgccccactccacatccccgtagcccctgagaacctccagagtctgggtcacaggtcacctccaaatccctcaggcccagattgttaccccagtccatctggcccaccccaagctctttggactctccnaggactgcagactgcccctggggccatgtttct

SEQ ID NO: 314981 - DNA, 777 bp, Homo Sapiens
caaaaaaatatgtaagttagaattgtaattctaaaggcactgtcgtttgcttacacattctaacatatttctaataagaaagtacctgctttcttaagagaaaaagggataagttaccaaaagcagcacgttctcctgggctcataccccggattcatccatgaggccacttccattgtaaagcttttagcatctcttgatttctcttgacactgaggcacaaaggcctgctacttataggcattacttcatttttccttatgaagggtactataccaacacagactttatagtatgtttaaaaatcccaactgcaagatacacaggatgctgtaggcctgatttcctgttgtagaacctccagccctgtgttgaatgaggaggtgcaaatatatagacccttaagatcagaccacagcaggcattcaggtggaggggatgaactccattcattccagctgtgcagtgggacatctgcgccctccgcatctcggctcattcctcatctgagccactcaagagggcggtctggtaagtgtcatctgaattcagcttctgaattccaatgatttctccccttccgtgtctcttcatccgagtcaaaaggcagtaaacaagagaatagttgacggccacaatgctgagggcagccaggtagtgccagcagaagcacatggtgatgaacatgaggttggcatcatccttctggtcccattcgggtgttccaaaaggtgggaacagcacaaacccaatctgccagaaccaggttccctgaag

SEQ ID NO: 314982 - DNA, 959 bp, Homo Sapiens
gctaggtgtgttgcccaattcgcgcgtccaacgggttgtgcccccgagatccctgggtttccccgtacgccctcagcatcctaattttgcggcattcttcagcgttgcccacaagttccagggagctccgaagaaaacatcttgggggtggcttggggaagggccggttctgtatagtaagagatggctccacatagggcaatcttccgaatttcgtcatctgccgataacagtgtttggaaaactcgcccacgcgtacagtgatcaagatgaacgaatcataaccatcagagacgcttcttcaaggtttcttccaaagactctaccgtcttgtagttaaagacgacatcaaatcccagcttttggaggtaggcaaccttttcatcagcccctactgctccaacaactttgcagcccttgagcttttgcaatctgccccacgactgagcccacagctccagctgctgcattaaccatcactgtttctccacccttcacaccacagatttcaagtaggccaaagtaggcagtcaggcctggcatgccaactgtccccagagccaaagacagtggtattgtgtctggccactctgtcagcagcttttccagatctttcccatcagaaatggagtgcgttgtccagcctggagaagccagtacaatagttccttttggtagggctacatttttactttccacaactttggccacttgctgccccatcattgtatcaccttccttcaatcttttggctgccactctcatgtagggatccacggtgaggaacaaagcttcaagcaggacctctccattttttaagggtgggagctcagatgtcttcaactcaaagtcactattagtaggatagccaacaaagtgcttcttcagggtccatgtcttagtacgaaccatcctgaagctcaggagcccgaaggttccactgcctggggaaggcggct

SEQ ID NO: 314983 - DNA, 723 bp, Homo Sapiens
  misc_feature (88)..(88): n is a, c, g, or t
  misc_feature (218)..(218): n is a, c, g, or t
  misc_feature (231)..(231): n is a, c, g, or t
  misc_feature (384)..(384): n is a, c, g, or t
gggggtgggccggggaatttggccgttggtaaattgaaaaatggccaacaatgggcaaattaccatcctaccatcaggagcgctttcntcaggtttccttcaaagcttctacgtcttgtagtaaaggcgacatcaaatcgagcttttaaagtagcaatgcttttcatcagaccatactgcttcaacacctttgcagtccttgagctttgcaatctgcnccacgactgagcncacagctcagctgctgccattaaccatcactgtttctccatccttcacacctcagatttcgagtaggccatagtaggcagtcaggcctggcatgccatctgtcatcagagcgacagtcagtggtattgtgtcaggacactctgtcagcagctnttccagatctttcccatcagatatggcgtgcgttgtccagcctggagcagtcagtacgatagttccttttggtagggctacttttttactttccgcatctcttgtgtttggagagagtaattgtgacgatgtcagtttcttctagatgtatctgtaaggtcactgaaatttcagtcaagatccatcgccgatttctaccgatggtattatcataactgagctagtcattgagactcataatttaatgaactatagaatgtgatgtctgcatattctaataggcaggctgatgcaatgctgctcaggctggtcatgaccgcctgaatcctagcaatccat

SEQ ID NO: 314984 - DNA, 476 bp, Homo Sapiens
agtaattaaaagtaaggatggcaaagtgaagctgaaaaaatgacaatttcacatccttccctcctttccagctagttaggaaggagacagaatttcccaagttgattccaagatcacacagtgagtcaacaacataggctgccgaagttgtagttgcaagttgacagagtgagtccccagcagtaggtactgaggagacatattttccaagcactgggacaaatggaaataattacttggccacttgctgccccatcattgtatcaccttccttcaatcttttggctgccactctcatgtagggatccacggtgaggaccaaagcttcaagcaggacctctccattttttaagggtgggagctcagatgtcttcaactcaaagtcactattagtaggatagccaacaaagtgcttcttcagggtccatgtcttagtacgacccatcctgaagctcaggagcccaaaggttccactg

SEQ ID NO: 314985 - DNA, 989 bp, Homo Sapiens
ccaagaatgaaatccaaaatttgtcgaaaggggcaatgtttaatactaggaagaccactgaaatttggattcttgtccttcgtccccggatgaccttaggcaagtaatctgtgcctatgaacccttcacttttaaaatgagagagttggttggctggttctctaaggtctttctagattttaactttcccatgattttaaaatctttgacacaggcttatttttgtgttgtaaaatgaaatctctaacaatactaacttggcagttgggtggaatccagtgccacccacacacatctgctcaaatagttctttaccttctgagccccaagacagcccagtcctcaaattaacaatgatggcaggcttcaggaggctgatggctagttctccgccagacacaaatgcaagatagatagttttaaagctcctgaagtcatggttatcagaagaaaagctataaaggaagaactacagggaaaacctacaacactctctttggaaaaatgacaaaataacacatttactgatgcactaacggaagaaggtaggtgcatatattaactataacacataattaattttaactgttattggtgaatatgcacaaaatatacatacaaattagaacttgatcaataaatataaattcaaggtctagatgcaaatgggaagctctctgatgctggtaatttgaacaagaagtttattgtactttcacatgtttctaattctatgggaagaagttgggattccttttactaatgttggcttctgctccattatctgtaaagtccacctctttcacataatcgcagaaattaaagatgtccaaggcccctgtagggcatttcatccatgtcatactcttatcagatgactgtctttttgttctgaaagactgaatgagtgggttttcatcatctctccatttgaaagtcaagtaagctttatctcttcggattcaaggtctaaatttgtccttgtttct

SEQ ID NO: 314986 - DNA, 581 bp, Homo Sapiens
  misc_feature (377)..(377): n is a, c, g, or t
  misc_feature (483)..(483): n is a, c, g, or t
  misc_feature (547)..(547): n is a, c, g, or t
ccagttaatttagtcctttatttttttcattctccatagaatattggttttgtaacatcgaatacaatccaatatataacattaaaacaatccgatacataccattctgctttatgaaagatcagcaaaaatacataaacaaggatataactagtacatttataaaatacatcataacaatgaaaccaaaggatcccacacaataatcttcacatttgacatgctgggttacagctgaggagagccagtgtctttgggcaaggtgattcatatacataaggcggatggacactgactaatcctaacacttctggaaatggttcattctttaccagttaaacctaaattaaatcagcaagagtactgaaatataacangaatgaaatccaaaatttgtcgaaaggggcaatgtttaatactaggaagaacactggaatttgggattcctgtcttcgttcctggatgatcttaggcaagtaatcnggtgctatggatccctcacttttaaaatgagagagttgggttggctgggtccctaaggtcttcnagatttaaccttcccaggattttaaaatcttgac

SEQ ID NO: 314987 - DNA, 523 bp, Homo Sapiens
  misc_feature (452)..(452): n is a, c, g, or t
  misc_feature (471)..(471): n is a, c, g, or t
  misc_feature (486)..(486): n is a, c, g, or t
agcatcagagagcttcccatttgcatctagaccttgaatttatatttattgatcaagttctaatttgtatgtatattttgtgcatattcaccaataacagttaaaattaattatgtgttatagttaatatatgcacctaccttcttccgttagtgcatcagtaaatgtgttattttgtcatttttccaaagagagtgttgtaggttttccctgtagttcttcctttatagcttttcttctgataaccatgacttcaggagctttaaaactatctatcttgcatttgtgtctgggcggagaactagccatcagcctcctgaagcctgccatcattgttaatttgagggactggggctgtcttgggggctcagaagggtaaaggaactattttgaggcagatgtgtgtggggtgggcactgggatttccaccccaactggcccaagtttagttnttgtttaggaggttttccnttttaccaccaccanaattaaggcccgttgttccaaggttttttaaattctg

SEQ ID NO: 314988 - DNA, 1007 bp, Homo Sapiens
ttccagttaatttagtcctttatttttttcattctccatagaatattggttttgtaacaacgaatacaatccaatatataacattaaaacaatccgatacataccattctgctttatgaaagatcagcaaaaatacataaacaaggatataactagtacatttataaaatacatcataacaatgaaaccaaaggatcccacacaataatcttcacatttgacatgctggttacagctgaggagagccagtgtctttggcaagtgattcatatacataagcgatgacactgactaatcctaacacttctgaaatgttcattctttaccagttaaacctaaaataaatcagcaagagtactgaaatataacaagaatgaaatccaaaatttgtcgaaaggggcaatgtttaatactaggaagaacactgaatttggggactaattcttgtccccaagtacatttggattcttgtcttcgttcctggatgatcttaggcaagtaatctgtgctatgaatccttcacttttaaaatgagagagttggttggctggttctctaaggtctttctagattttaactttccatgattttaaaatctttgacacaggcttatttttgtgttgtaaaatgaaatctctaacaatactaacttggcagttgggtggaatccagtgccacccacacacatctgctcaaatagttctttaccttctgagccccaagacagcccagtcctcaaattaacaatgatggcaggcttcaggaggctaatggctagttctccgccagacacaaatgcaagatagatagttttaaagctcctgaagtcatggttatcagaagaaaagctataaaggaagaactacagggaaaacctacaacactctctttggaaaaatgacaaaataacacatttactgatgcactaacggaagaaggtaggtgcatatattaactataacacataattaattttaactgttattggtgaatatgcacaaaatata

SEQ ID NO: 314989 - DNA, 933 bp, Homo Sapiens
  misc_feature (22)..(22): n is a, c, g, or t
  misc_feature (31)..(31): n is a, c, g, or t
  misc_feature (43)..(43): n is a, c, g, or t
  misc_feature (59)..(59): n is a, c, g, or t
  misc_feature (73)..(73): n is a, c, g, or t
  misc_feature (78)..(78): n is a, c, g, or t
  misc_feature (94)..(94): n is a, c, g, or t
  misc_feature (135)..(135): n is a, c, g, or t
  misc_feature (152)..(152): n is a, c, g, or t
caaaaacaaacaactgggcttnttccccaangaaccctttggncaaggggaaactgccntctccctggaaccnatctnccccctcaataccctnccccttgcctcttcctcttccctcctccgtgaagccctaanagtggcccacgaggtcnagaggtcagaggaagcacgcaggtccaacttcccaggcggtactgcttccctgatgaggcaggagggaggttgtccacactgatgatgggcagctgttgggggtcttgggtccggaaggtgaagagtgtctgatgccagcggccatcttggaccttgcagccatccatgtacacctcgggccggaactgacccccagcttcaaaaatctgtccattccaggcccgtaagcgtacggcctgcttggctggggtctgcccagtgccctcctgccacacggtcatgttaaggcagtggatggtgatgtgctgggtcacctcggagcttagcaggtgcaggaaattcatctggacccggctgatggcaaactcgaccttggaggccgtgatgggcttgagacacgtctgtccaccatgagtgaagttgcaggagacctcgatggtgtcagaggagcagccaaggggatccacccagtaggtaccatccaccatcttctgctcacagtccatgaggtccttgcagacccgggcggggttctctttggtaaagatctctcctccctggtccagcaccagccggtctggatagctgtaactctctggcctgagtgctccactggtgtccatccacgtctggaaagctgccccaagatcatcttgttgcaattggataggaccccctgagaggacccgggggcccgggccgccctctggggccgggaggacccctcggaccttgcaatccacagtccccgcggctgcctgtgtcacccttcggacgcgg

SEQ ID NO: 314990 - DNA, 1818 bp, Homo Sapiens
  misc_feature (1759)..(1759): n is a, c, g, or t
  misc_feature (1767)..(1767): n is a, c, g, or t
  misc_feature (1807)..(1807): n is a, c, g, or t
taatatttttatattttataaataggggggaccgcacaccgcccgaggcctgggtggcgaattcggcacgaggctttgcttgcctttgcctttgaggctctgtggctgtggggctgagtggcatcatggcggctcagaaagatctctgggacgccattgtgattggggcggggatccagggctgcttcactgcataccacctggccaaacacaggaagaggatcctcctgctggagcagttctttctaccacactcccgaggaagctcccatggacaaagccggataatccgaaaggcgtacctggaagacttttacacccggatgatgcatgagtgctatcagatatgggcccagctggagcacgaggctggaacccaattgcacaggcagactggattactgctgctgggaatgaaagagaatcaagaattaaagacaatccaggccaatctgtcgaggcagagggtagaacaccagtgtctttcatctgaggaactgaagcaacgtttcccaaatattcggttgcccaggggagaagtggggctcttggacaattccggaggagttatctatgcatataaggccctcagagccctgcaggatgcaattcgacagctaggaggcatagtgcgtgacggagagaaggtggtggagataaacccagggctactggtcacggtgaaaaccacctccaggagctaccaagctaagagcttggtcatcacagcaggtccttggaccaaccagctcctccgtcccctgggcattgagatgcctctccagaccctgcggatcaacgtgtgttactggcgagagatggttcctggggagctatggtgtgtcccaggcctttccgtgcttcctgtggctgggcttgtgtccccaccacatctacggactgcccacaggagagtacccagggctgatgaaggtcagctatcaccacggcaaccacgcagaccctgaggagcgggactgccccacagcacgcacagacatcggagacgtccagatcctgagcagctttgtcagagatcacttacctgatctgaagcccgagcctgctgtcattgagagctgcatgtacacgaatacccctgatgagcagttcattctcgatcgccacccaaagtatgacaacattgtcattggtgctggattctctgggcacgggttcaagctggcccctgtggtggggaagatcctgtatgaattaagcatgaaattaacaccatcttatgacttggcaccttttcgaatcagccgtttcccaagcctgggcaaagcccacctttgacctctggccagaagcctcccttctgtgcacaggagccagtttcacagatggagaagatgtctcagatgaagggagtgtccctgagatatcatccttttcttctgcctcgcctgaatcccccataaacaccagatgattgagtctaccttctttccttggcccgctccctttttcttctgcctcacttgaatcccccgtaaacaccagacgattgagtctaccttcttttcttggccacctccccattcacaactactttctcgctcccagaaggttgatcagatattctacaatcacagagtagcaaggacgtttgagatgggtatatcagtaagaagagggcacaagaactggctctggagaccaaagcagttgttaaaaattctctttgctgggggccgggtgttggtggctcacaactgtaatctcgggcattttgggggggctgagacaggcgggntcacctgnagggccagggatttcaagaccagcctgggccaacattggnggaaaccctta

SEQ ID NO: 314991 - DNA, 725 bp, Homo Sapiens
  misc_feature (424)..(424): n is a, c, g, or t
  misc_feature (552)..(552): n is a, c, g, or t
  misc_feature (613)..(613): n is a, c, g, or t
  misc_feature (655)..(655): n is a, c, g, or t
gctgtaggaattctgcacgagctgtgctagtatctcatgctaaaatggtgaaattattttttctcatattcttatgtgaaccaaattaagggttactcgtgtctattttttctcaaaatggaaatgttttttattataaaatccatgctctttgaaaaattcagcctgtattgaagtacataaaatacaaaaatgaaagtcattttgactcccactccccagagataatcaccatgtacagttaattccttgtttcgagagaaggcaacatttgatcacagctgtgtgtgcctcactctgcctggggatggcctgtggtgattcatggactcatgttctctgttcacattactcaggttggtaagaattgccaggtagaggggggagtgttttgcattgggctgatttttatttgattaactgngctgctattttaggtttgtccttattaaatacttactgtatcatggtgggctatttttcatactttgttcatgttaatgttgttgcccagcctctgatggattgatttacagcagccaaacacatganaactgggtatacttgccatgaagaccactgccaatatatccctgtgctgatatgggatggngttcctcttgatcagcaccaaagattgcatgctgaacatatnggaaaggaaattggacggaagggtcaatgacccgctgtttcagatgttgcatggaagagactgatactgg

SEQ ID NO: 314992 - DNA, 1826 bp, Homo Sapiens
  misc_feature (51)..(51): n is a, c, g, or t
tgcaaacaagatccatttagtggggaagaggggactattaaaagctgctanaaaactgaataaagcaaatcaagactgagaacagttctaactcgcatcaatctcgaaacagtgacaagtcggcagcaactcctttcctttatttcttccccttgtaaagggaaattcaagttcagcagcattcctttcctgccccaagtcctcaaccagacaagaggctgcaggcaccaaatcttgggctggataatggcaaaggcctcagaagctcacctccagctctgagcttcaacagctgtttgtaccagtgagtcagcattaaatccaccagaaaagaacagcaccacccaaagactggggggcagctgggcctgaagctgtagggtaaatcagaggcaggcttctgagtgatgagagtcctgagacaataggccacataaacttggctggatggaacctcacaataaggtggtcacctcttgtttgtttagggggatgccaaggataaggccagctcagttatatgaagagaagcagaacaaacaagtctttcagagaaatggatgcaatcagagtgggatcccggtcacatcaaggtcacactccaccttcatgtgcctgaatggttgccaggtcagctgcaggccagaggcagtcttcagaggaggggagaccacagaggacttctaggccacacaaatatgtctctcgggagacttctgggaaggaaagcttcactctcggggccggctgaccatgacttcacccagggcctccaacacctcccgcttgtagtcttcaaagtcaccatcgatttggctaacactctgctcctccaccacccacagctggcaattggtttctgtgatgagtcgggcatcatggctgacaacgatcacagcacccttgtattcattgatggcctcccctagagcatcaatagactctatgtccaggttattggttggctcgtccaagatgaggacatcaggttcccgacaggccagctcagcaaacacaactcgcgccttctgaccaccagagagtttgcagatctggatggtgtgggcgtgactctccaggccgaagcggcccaggcacttgcgggcatcctggtagggcaggttgaagccccgctgcaggtactcagtgggcgtctcctccatgcgcagctgctctgcatactgctggttgaagaagccaattttcagccggtggttctttctcatttccccatgggtcggtgtcagcttgccagtcagcagcaggagtagcgtactcttccccacaccattagggcccacaatgcaaatccttgaatccatgtcgatgccaaaatccaagttcttaaagagtggtttctgtccctggtagccgaatgtcacaccatgcagacccagcactggagggctgagtggtggggggtctggaaaagtgaagcgcacagtgtactccttagggcgcttcaggagctcaggggcctcctgggattcctcatcttggtttttccgtcggcatttctgctgcttccgagtcagggcttccttcgtttgtttttccgcctgcttggtggacttcccgcctgccttcagctccttcagctttttctcttgcttctcatactgtttcagcagttctttctgcttctgctggtacatctttttgaaggtcatgtaattgcccctatagtagtggagccgctgggcatcgaggtggatgatatcagtgcagacatcatccaagaagccctggtcatgggagacgatcagcaaggtcttcccctcgtgccgaattcgccacccaggcctcgctgcgtggggcctgggggg

SEQ ID NO: 314993 - DNA, 621 bp, Homo Sapiens
gtgaagctaagagaacagcaccaagtatagtgtatgttcctcatatccacgtgtggtgggaaatagttggaccgacacttaaagccacatttaccacattattacagaatattccttcatttgctccagttttactacttgcaacttctgacaaaccccattccgctttgccagaagaggtgcaagaattgtttatccgtgattatggagagatttttaatgtccagttaccggataaagaagaacggacaaaattttttgaagatttaattctaaaacaagctgctaagcctcctatatcaagaaagcagttttgcaggctttggaggtactcccagtagcaccaccacctgagccaagatcactgacagcagaagaagtgaaacgactagaagaacaagaagaagatacatttagagaactgaggattttcttaagaaatgttacacataggcttgctattgacaagcgattccgagtgtttactaagcctgttgaccctgatgaggttcctgattatgtcactgtaatgcaaccaatggacctttcatctgtaatcagtctaatctgtagtaatgccttagaatacaatccacatagagatcctggagaacgctttag

SEQ ID NO: 314994 - DNA, 2195 bp, Homo Sapiens
  misc_feature (18)..(18): n is a, c, g, or t
  misc_feature (97)..(97): n is a, c, g, or t
  misc_feature (99)..(99): n is a, c, g, or t
  misc_feature (255)..(255): n is a, c, g, or t
  misc_feature (273)..(273): n is a, c, g, or t
  misc_feature (316)..(316): n is a, c, g, or t
  misc_feature (322)..(322): n is a, c, g, or t
  misc_feature (713)..(725): n is a, c, g, or t
  misc_feature (847)..(855): n is a, c, g, or t
cccgggcgcacatgtgtngtgtgaccacagggggtcgtaacagagcgggcggatgatgcagggggcacaacccggaggcggttgcgtaccccgtcgncnttgcatagtgtataacgcgaccgcgccagcgagctccccagcgcggagtgcgacccctcactagcacagagtgggcgggcgatgtcgccgtgcattgttctgtggtggcctcaggccatcgagagcgcatgtaggcgcaagccgcaggcgcgcgcngcgtacataaactagcanaaagagacgctgtcggacgcgcagacagcgtgatgcgtgagcntcgctnctctaagggacagatgaaggacactatagcggggtgggccggaacaaacagaacgcgctgctcgtggtctttgtccgagcaacggagagcggggggatgggcggtcagagcactcccgggcgcgggtgtgtgtttttcggtacgccgcaccgttagggcgggggcgtcatgttggggataacagccaaggggtagagtcaatcggtctgggcggacggagggccaaacggcacaccggcgttttctgttccttgttccccgccgcctcttttttgtctctcgcccgacaaggaaaaggagtatatgtgggttatttattgccgggggggaggcgacgtgggggaaaaggcctgtcttgcgtccgtcgttttataaggagacacgaggttgnnnnnnnnnnnnncttcgaaatttctttgaatgcgccgcaacggcggggtagtttctctcccccacaggggggtgttcccccaaagtcgcccctttttgtgttcggtgtgttgcgccaggggggtgtttgggggnnnnnnnnngtgccaaatttcccccaagttttgctctttgggagaggcccttttgggggtggtttttcaattttttgttccccccccgaaaaggttttcccggggtgtttcccgggtcgcctttagggattcgccccccttgggtcgggaaagttcccttcggaacccttcccacaatttgggggaatctatggcattttggcttatccattccctttgcctggggaaatttttcccttcgcttttttttatggtgcctaaagtacccagtttgacttttttgcgaattttcctcttcaactgagcaggagtgctgcaagccacaggagtactcggtgtctttagcttttcattctgctctgggtctgatcttttatcaccaacaagagtggaattttgctttggcatcacatggtagtaagacggggcatatttggaggagctacaacctcttttctttatagattcctgaatttcttcacagagctgctcaaagtcttcatcaagttcttctttaattatggcataggcagtatctcttaaagcacaggctctatgcgtaataagacgatctccaggatctctatctggattgtattctaaggcattactacagattagatcaatatctctcaaatagtctttcacagtcagatacttgtgtagatcaattttactgattacagatgaaaggtccattggttgctttattacagtgacataatcaggaacctcatcagggtcaacaggcttagtaaacactcggaatcgcttgtcaatagcaagcctatgtgtaacatttcttaagaaaatcctcagttctctaaatgtatcttcttcttgttcttctagtcgtttcacttcttctgctgtcagtgatcttggctcaggtggtggtgctactgggagtacctccaaagcctgcaaaactgctttcttttttgatataggaggcttagcagcttgttttagaattaaatcttcaaaaaattttgtccgttcttctttatccggtaactggacattaaaaatctctccataatcacggataaacaattcttgcacctcttctggcaaagcggaatggggtttgtcagaagttgcaagtagtaaaactggagcaaatgaaggaatattctgtaataatgtggtaaatgtggctttaagtgtcggtccaactatttcccaccacacgtggatatgaggaacatacactatacttggtgctgttctcttagcttcacgaatcacctgggcacatgtttcttcaggggatgtagtactaactccaaaaagaacaggaatgtctaatgtatatacagtaaacttttccaaagcatgaatgacag

SEQ ID NO: 314995 - DNA, 591 bp, Homo Sapiens
tgacaaaacaaagaagtcggagggtgatggggacaaggaagagaagaaagaagactccgcagaaggaagccaaaaagagtagcaagaagcggaaccggaagcacagtggtgacgacagctttgacgagggcagcgtgtcagagtctgagtcggagtcatgagagcggccaggctgacggaggagaaggaggaggccgaagaagcgctcaatggagaaggagaagcccaaggaagaagaatgggagaagcccaaggacgccgcggggctggagtgcaagccgcggccgctgataagacctgttccctcttcatgcgcaacatcgcgcccaacatgtcccgggccgagatcatgttcctttggaggtttttccgctgtggttgggtgactttcaaccgcagtgttaacattatagagatcctgtgagaccttcagaacattcctttccgggcgtgggaggtgcacctctggggtgtaccggtatctgaaccggtgccgtttgaacataaaccgcactaccccagtcaagttgtttggtgcgaaccaattaaagctggcggccaatctggtacccctctggactccacccttct

SEQ ID NO: 314996 - DNA, 795 bp, Homo Sapiens
  misc_feature (16)..(16): n is a, c, g, or t
  misc_feature (47)..(47): n is a, c, g, or t
  misc_feature (62)..(62): n is a, c, g, or t
  misc_feature (95)..(95): n is a, c, g, or t
  misc_feature (111)..(111): n is a, c, g, or t
  misc_feature (174)..(264): n is a, c, g, or t
tcctccggcatccccnaaagtttggaatgccccccagaatcccttcngtctgaagaactggnttaaacatttttttaaagcggatccttggttangaattcccctcagctngccttccattggagaatgtctttattttatttccattcttttattcccagtaaaatagaaatnnnnnnnnnnnnnnnnnnnnnnnnnnnnnnnnnnnnnnnnnnnnnnnnnnnnnnnnnnnnnnnnnnnnnnnnnnnnnnnnnnnnnnnnnnncagtctttcaaagaattgttcacctgaatgaaatgtatcgtttttctctggctgatcttatttttcttggtctttagttttcagaagtttctttatgatgtgtctaagcttggacttttgttgttaatttatccagttgtgtggttcactgagcttcttggtttgtaagtttatatctttttccaaactatcatctaatttatggactccatgctttgtcatttccattctgtttaagaatattcaccaatactttctgaaggctggttataaatagctgctttgaagtctgtatctgactcccatgttaagacctggttttcatacactgggttattttggataaccttccacaaggccagactcctctccacaaagctgtggtctgcaccagctcctctggctctcctcctctgcctgctgagggccgcctcctagcctggcgcctcgtgatggtccggcacggcgagagcacatggaaccaggagaaccgtttctgtggctggttcctcgtgccgaattcggcacgag

SEQ ID NO: 314997 - DNA, 879 bp, Homo Sapiens
  misc_feature (446)..(446): n is a, c, g, or t
ggcacaaatcgaagcaggaattccccacttttggagcgggccagcctcggccaggcctccatccagaatggcaaagacagcacagccccccagcgtgtccctgttgcctccccatccgcccacaacatcagcagcagtggtggagccccagaccgaactaacttcccccggggtgtgtccagccgaagcaccttccatgctgggcagctccgacaggtgcgggaccagcagaatttgccctacggtgtgaccccagcctctccctctggccacagccagggccggcggggggcctctgggagcatcttcagcaagttcacctccaagtttgtacgcaggaacctgaatgaacctgaaagcaaagaccgagtggagacgctcagacctcacgtggtggggcagtgggcggcaacgacaaagaaaaggaagaatttcgggaagccaangcccgctccctccgcttcacgtggagtatgaagaccacgagctccatggagcccaacgagatgatgcgggagatccgcaaggtgctggacgcgaacagctgccagagcgagctgcatgagaagtacatgctgctgtgcatgcacggcacgccgggccacgaggacttcgtgcagtgggagatggaggtgtgcctgccgcggctctctctcaacggggttcgatttgcggatatcgggcacctccatggccttcacattgcctccggcgggccagctggacgggctgccggccgctgcgccgccccacctgggcgagactgcagcgatggattggtgtgtctcccctgctggcacttctcccctccctggcccttctcagttttctcccacattcacccctgcccagagattcccccttctcctctcccctctg

SEQ ID NO: 314998 - DNA, 673 bp, Homo Sapiens
gcgaagaccaactcccaaatgatcctaatcaaagttccactgatgatttcggcccaggcccagtgactcatgagtaaccttgaccagtgttctcattagtgaccctaatgatccaccagtgatcagtgattctggccagggtctccatcatcaacctggattaatgactgatccgtggcgcaccgtacctgctctgggctctggatgacattgaatccaggaatagactccagcttatccaaggtgcctcctgtgtgccccagaccacgtccgctgatcattggcacctggtggtcagggatgctgagtaccctgcacagtacccctcccccacctctgtgcatcccttcaccttccctggctaggagtgcagctggatttggaaagtatttaagcagctataggggtgcccagctggtgagggaatggaaaggaagttttcttggttgagaagtgtcagtaggggaggaggttggtacctgtccttggggaaacaaggcttggggcagagggagggaagtcctcagctcctcccttgggggagctgtctggggacccaaggggaaaggggtctgaattccatcagtggatctttttcctgctccaaggggcctggtctggagccagaggggccccaagcgctgtgctggggaacggggtggggagaactgtg

SEQ ID NO: 314999 - DNA, 1562 bp, Homo Sapiens
  misc_feature (281)..(281): n is a, c, g, or t
gcaggctggtaccggtccggaattcccgggatctacggtcccgacccgcgggcgaggccgggtacctgggctgggatccggagcaagcgggcgagggcagcgccctaagcaggcccggagcgatggcagccttgatgaccccgggaaccggggcctcacccgcgcctggtgacttctccggggaagggagccagggacttctcgacctttcgccagagctcaagcagctcctggagctgatccgcatgaagcgagacggaggccgcctgagcgaagcggancatcaggggcttcgtggccgctgtggtgaatgggagcgcgcagggcgcacagatcggggccatgctgatggccatccgacttcggggcatggatctggaggagacctcggtgctgacccaggccctggctcagtcgggacatgcagctggagtggccagaggcctggcgccagcaacttgtggacaagcattccacagggggtgtgggtgacaaggtcagcctggtcctcgcacctgccctggcggcatgtggctgcaaggtgccaatgatcagcggacgtggtctggggcacacaggaggcaccttggataagctggagtctattcctggattcaatgtcatccagagcccagagcagatgcaagtgctgctggaccaggcgggctgctgtatcgtgggtcagagtgagcagctggttcctgcggacggaatcctatatgcagccagagatgtgacagccaccgtggacagcctgccactcatcacaggttggcgtgggagccagcctagggcttcgggtcgcggcagcgctgaccgccatggacaagcccctgggtcgctgcgtgggccacgccctggaggtggaggaggcgctgctctgcatggacggcgcaggcccgccagacttaagggacctggtcaccacgctcgggggcgccctgctctggctcagcggacacgcggggactcaggctcagggcgctgcccggggtggccgcggcgctggacgacggctcggcccttggccgcttcgagcggatgctggcggcgcagggcgtggatcccggtctggcccgagccctgtgctcgggaagtcccgcagaacgccggcagctgctgcctcgcgcccgggagcaggaggagctgctggcgcccgcagatggtgagcgtcgggggagtccccgtccttccgccttcgccatccccttcccttcccgaggccccgccccttcccgagcccgcgcctctcatcccctctccccgcaggcaccgtggagctggtccgggcgctgtcgctggcgctgttgctgcacgagctcggggccgggcgcagccgcgctggggagccgctccgcctgggggttggcgcatagctgctggtcgacgtgggtcagaagcctgcgcgtgggaacccctgcttcgggtgcaccggacggtcccctgcttatgcgcccgcaaggccggcctggaggagcgcttgtattttcgaccgggccgcattgccgcccctggcccttggaaagtttggttcgccgccgagctatataactctcttgccg

SEQ ID NO: 315000 - DNA, 1586 bp, Homo Sapiens
tttcgcggcaaaggagctttattgctgcggcggcagaacgagctctgcgaagggcgaggtggcggcgaatggcgcgcggtcggagagtacgagcgcctcctgcagggcgcggctctgcgggccgctgagcgcggggccgtcccggtgcacgcggagccagggggtcccacggcgcagcctctgacccacgtcgaccagcagctctgcgcccacccccaggcggagcggctccccagcgcggctgcgcccggccccgagctcgtgcagcaccagcgccagcggcagcgcccggaccagctccacggtgccatctgcgggcgccagcagctcctcctgctcccgggcgcgaggcagcagctgccggcgttctgcgggacttcccgagcacagggctcgggccagaccgggatccacgccctgcgccgccagcatccgctcgaagcggccaagggccgagccgtcgtccagcgccgcggccacccgggcagcgccctgagcctgagtccccgcgtgtccgctgagccagagcagggcgcccccgagcgtggtgaccaggtcccttaagtctggcgggcctgcgccgtccatgcagagcagcgcctcctccacctccagggcgtggcccacgcagcgacccaggggcttgtccatggcggtcagcgctgccgcgacccgaagccctaggctggctcccacgccaaccagcgtctttgccagctcccgggcctgctcctggttggggaagacggcggcccctccgaacttaacgtccaccaccagagcggacagcccctccacgagtttcttactgagaatggaggctgtgatgagtggcaggctgtccacggtggctgtcacatctctggctgcatataggattccgtccgcaggaaccagctgctcactctgacccacgatacagcagcccgcctggtccagcagcacttgcatctgctctgggctctggatgacattgaatccaggaatagactccagcttatccaaggtgcctcctgtgtgccccagaccacgtccgctgatcattggcaccttgcagccacatgccgccagggcaggtgcgaggaccaggctgaccttgtcacccacaccccctgtggaatgcttgtccacaagctgctggcgccaggcctctggccactccagctgctgtcccgactgagccagggcctgggtcagcaccgaggtctcctccagatccatgccccgaagtcggatggccatcagcatggccccgatctgtgcgccctgcgcgctcccattcaccacagcggccacgaagcccctgatgttcgcttcgctcaggcggcctccgtctcgcttcatgcggatcagctccgggagctgcttgggctctggcgaagggtcgggaagtccctggctcccttccccggagaagtcaccaggcgcgggtggggccccggttcccggggtcatcaaggctgccatcgctccgggcctgcttagggcgctgccctcgcccgcttgctccggatcccagcccaggtacccggcctcgcccgcgggtcgggaccgtagggttcagggttcgcgcacagcggtccact

SEQ ID NO: 315001 - DNA, 312 bp, Homo Sapiens
caatgaattaaagcagtttatttaacattaattgcagaatgcagaatttacagcactaccatttaatgataggaataaaaatagaaagaatccagtgtaagcgatgttgcagacaaaacattggggtgggaaatgagcaaaactgtgcaattaacattcaaagaaatcttcctcctcatccccaccaggatttcagggcagccactgaacatataccctgttgaccgtccctggaaagtctttcagcacagtctgacttaacatgtttgagatggggcaatatctggattattacactttggtatagcgcgg

SEQ ID NO: 315002 - DNA, 565 bp, Homo Sapiens
  misc_feature (55)..(66): n is a, c, g, or t
tgaaggtctagttgctggataataacatggccaaagatgtgagggagagacagcnnnnnnnnnnnnaatatataacagatccattcttgttcttatagcttaattaatttttaaagggtccacctcttaattctatcacattggctattttatcctaaattttggagatgacattcagtctacagaagtatctgtttagtagataatttaatctttttatttgtaaggtagtgataggtaagcagttactattgtacatttgtagttttctgtccattttaagtttgcttcttttttttctggttctgtctttcctgtgggtattgttcatttttgttgagacaaagttatgctttcttgctcagactgaagttcagtgggcatatcacagctcactgtaggccttaatctccgtgggctcaaggtaatcgtccccccttaggccacccaagtaggcttgggactgcttgggacatggtaccacaacacccaaggggggcttatggattcttccaccttggggcctccgaaagtgttggggattattaaggcaggggggacacca

SEQ ID NO: 315003 - DNA, 356 bp, Homo Sapiens
taaggatcctacctactttcttagtgtttttagcaggtagtgcccactactgaagactgtcacttggaatgctcatgtgctcctcaattctttaagcatgttcctgtaccacctttgctttagagcagtgggatgatattcactaagtgccccttgttttggacttaatatgcattaatgcaattgtccacctcttgttttagactaatagttgatctccacatattgcccttgcatcaggggcatgttaattatgaatgaacccttttcttttaatattaatgtcataattgtatttgtggacctgtgtatgagagaccctatgttctctcccattaccctttggattgtgcttg

SEQ ID NO: 315004 - DNA, 748 bp, Homo Sapiens
tttcagaatccaaaaggactttattttctggcactgggaggcgccctgaggccacagcttttcccagggctgctggcagggtcccagggctgctggcaggggttgtggtcctgttgagcagaggagcgacgccgctgccctggcccccgctgtccctatgatcctgcactctggggtgggagctacatatcatccttggacaccaggcagtagaagtctgtgcgggcactgtagtttcgcgagccgagatccgagacgtccacttcgctgctccggctctctcccagcgagaccccactggtgtgcggtggagctgatggctctccaaaaacaggcccccggacacccaggtcgccctcagggtccgggtccacctctgagtccagggcccggccctcagggactcggcctcgaagaatcagcatggggtccttgtcgtcctgcagctgcgtctgggggtctccttccaccggcctgtaccgcaccttccgcggcagcgccagctgcacttctttccaaaaatcggaggaaggagtcacggagccgggcctccagagcagcaaggtcaccaggtggcggtgctggcgcagcagcggagcgccggggtgcgcggggtcgcgcctctggccctcgaaggtgatgaagatgggtctgcgggtgagctccagcagccgcacaggccctcccggaagctgtggctgcaccaggaccggctcaggaaggcgtccgaaagcaccaccgatgaggc

SEQ ID NO: 315005 - DNA, 1052 bp, Homo Sapiens
ttgtcggcttaaggaaccgagctttattggagcaaagagtgtggacactgtttacaacaaaacgtttccgggaaaacttggatttcccaagacccgaagactcctccaagttctcactgttagtaaggtcaatttgggggcagaacaggaacatgccttagctgctgtcaggaaatagaagagcagagcagagttgggcatggaggctccagctcagacttgggaagatggagaagagccatcccaagtccagagtgaataggtttcatagcacccatctcctctatttgaaggaagcaggcccctaaagggaaacacaggatgcccaactcataagaatcagactgttatgagagtcctttgatatcatgtgaaaaccatgatgggagagagagactgagggtgcagcccaccttcctggccagtgttaaatcaggaaactattttgtttagatcaaaaaatgatattccattttttggtctcccaaggtcatccaaagtttactgacatgcagggacccctgtgtgatctagtgggagtccagagctaggggagtccagctggagcagaagagtctgcaactaggaagggaactcttgtgtgtatgagggttggtaataggctctttttgtatcaagaggaagggaaggaagtcatatcccaagagggcacttaaccttagtcctaattctaggagaactaagaggggctggggcagaaagtcaaagggtcggggtagaaggattggatgccacaaagcattactggggctcattttcccctaagccacttcttggaggaaaaactccatggaacacattagtaagaaagtatacaattattcctgttttatgtgaagattggaataaaaaacagttttgttatttaatattacaaccgctttgtaggaagtgtggatcctggtaaatgatccacctcctgtatgatgactcccctcatcccttttttttctgctggatccctaggtggcttagttatgaagatgggtactatgaactgctgagagtcaaatcatccgactaattaagaa

SEQ ID NO: 315006 - DNA, 621 bp, Homo Sapiens
cttccagaaagtctgtcagtacttcaggttagagatgacttcaatatatgtcgcagacctcccaaggtgagcatcacacagcacttatcataaccacgaagcagctccacagaggctaagatgaaaacaaaaatctcaggaaatttatgtttataaaaatgatacttgcaaaaaaatgaatggaaccatctccattgcttatttagagtgttgactcactgaataagattttaaattagtcaatagtattggatgcctctatatctgcatatcaataggctcataaacaaggttgctcaaagaactgcccatcaaccacggtttcatctctggacaccacactgttatcttcctttggcctctgtccataacgggtccaggctacgtgcaccaaaggaaaagaattgggtccttctcccctcccctggtttggttaggagggcccagaaagaagtcaggacagaccaggtgtgactgtccctaacccaaagcaggctaccgtgcagaacccaacccaggacataatcaccagccatgcgggaacatggttagcatgacccaaaagcaatgttctaccattccccaccttctaacagtaatgatcagattagttactaatag

SEQ ID NO: 315007 - DNA, 659 bp, Homo Sapiens
  misc_feature (160)..(449): n is a, c, g, or t
acctagctgagaaagggggatgtactacaagtcgatgaagctgggtcccgcaggggtcagtcagtcagtaaatcgacgtgcagtgcaggatgcgactcactataggactaatggaggacggggctgttcctcgagatagctttcttaactggcgactgcnnnnnnnnnnnnnnnnnnnnnnnnnnnnnnnnnnnnnnnnnnnnnnnnnnnnnnnnnnnnnnnnnnnnnnnnnnnnnnnnnnnnnnnnnnnnnnnnnnnnnnnnnnnnnnnnnnnnnnnnnnnnnnnnnnnnnnnnnnnnnnnnnnnnnnnnnnnnnnnnnnnnnnnnnnnnnnnnnnnnnnnnnnnnnnnnnnnnnnnnnnnnnnnnnnnnnnnnnnnnnnnnnnnnnnnnnnnnnnnnnnnnnnnnnnnnnnnnnnnnnnnnnnnnnnnnnnnnnnnnnnnnnnnnnntcaacatgtattttgttgggtgaatgaagcaagactgaaaaggctacatactgcttgattcatttatatgacattctaggaaaggcaaagctgtaaggaaagataatagatcagtggttgccaggggttgggatgagggtggattgaggacaaaggtgcacagcgagggtggatttgtggtgattacattttggggtaatggaattgtcc

SEQ ID NO: 315008 - DNA, 410 bp, Homo Sapiens
  misc_feature (146)..(173): n is a, c, g, or t
ggctgcaggattcggcacgagagagagagaacatctttggtttgattgtttaaataatatttcaatgcctattctctgcaaggtactatgtttcgtaaattaaataggtctggcccagaagacccactcaattgcctttgagattnnnnnnnnnnnnnnnnnnnnnnnnnnnntgcaagtttctttcaaaataaagagacatttttcctagtttcaggaatcccccaaatcacttcctcattggcttagtttaaagccaggagactgataaaagggctcagggtttgttctttaattcattaactaaacattctgcttttattacagttaaatggttcaagatgtaacaactagttttaaaggtatttgctcattggtctggcttagagacaggaagacatatgagcaat

SEQ ID NO: 315009 - DNA, 361 bp, Homo Sapiens
  misc_feature (238)..(264): n is a, c, g, or t
attgctcatatgtcttcctgtctctaagccagaccaatgagcaaatacctttaaaactagttgttacatcttgaaccatttaactgtaataaaagcagaatgtttagttaatgaattaaagaacaaaccctgagcccttttatcagtctcctggctttaaactaagccaatgaggaagtgatttgggggattcctgaaactaggaaaaatgtctctttattttgaaagaaacttgcannnnnnnnnnnnnnnnnnnnnnnnnnnaatctcaaaggcaattgagtgggtcttctgggccagacctatttaatttacgaaacatagtaccttgcagagaataggcattgaaatattatttaaa

SEQ ID NO: 315010 - DNA, 1004 bp, Homo Sapiens
  misc_feature (522)..(522): n is a, c, g, or t
  misc_feature (619)..(619): n is a, c, g, or t
tggagccatacttgggtctgaaatattttgacacagatgaagcaagtctttgcaatttccaaaggaaaggcttctgtgacacactctcttgtttgaaggagtgacaataacctgagaattgctggtagaattatttgttgttattactgtcatcaaaagatatttaattagaatctcttttatatgtgactgataaagccagtgaaatggtcacactgattctacagtaagccatttttgagcacctattatacacaaagcactgtgcaggaaggttgcatagtaagttgagtgtgacccagactccaactctgagaagcttataatagggtgaaggagacagagacagaaaggcaggctcttaatccagggaactacaggaggtaagcacaagggagacagaagcagaggcgggagacgtgacttagccttaccttccgaaactccacactggcatgaggaatagtgatatgcacttgtggaggaatggtctatagaatgaggataaagaggttaaagttntgcgatatctttcaattagtgattctgtaaccaaaacccagagaagcaggttatgatggagtcatcagcaacacatccctttttagcttaacttagngagttctcttaaatcagggtgctaagtgggaaccaaaaaaaccccagctttgtctgtccgagcttgcactgactgggccacgtcgggtgggttgcttattcatttgcccaacgtattttattccagtaatcattcatggcagtcactcaatgtctctgagcactagtttctgcaaaactttatgtatgacataaagtataacatactttatgcccatagaagtatctactctgttgtgagggtaaattagacaacatagccaacctgaaaagtctaattctaatgaatttgtaatgaaatattatcctaagtgattatttcctaaacctgtaaatgtaatcagtttcttaattatctgtgcatgttcacacatagttaaagacat

SEQ ID NO: 315011 - DNA, 910 bp, Homo Sapiens
  misc_feature (211)..(211): n is a, c, g, or t
  misc_feature (573)..(573): n is a, c, g, or t
tagttaaaactgtttaataggaacaatcttgcacaagcagaaagagctttgatttggaggattatagcaacatacaactgagagagtccacagggacagtcagacgggatgtctgcacctcttctagagactctgtgttaaaaacacgaccgactgaacattctgccccctttcaaggcacatgccacttcttaaaagggtcagctttccnacacaggctacccagatattttatttacatttaaaaaataggttttccttccttcaacgtagtggaaaggcccggagcccagtcacagcggtgcctgcctagcacaagtgtaggacagctttattgatctctgggtttgtccagtcattccgaatgtcatccaggtggttatcgaaatccacgagcgtctcgtaggaccggctgtccaggagcgaggctgagatcctctgtgcctgtggccatgtcttcacagtagtcatggtgtgggtctgtgcaccgccatctgttctcatggtgctcgtacacgtggatcgtaggcgctacgcagtccatcgtaaccttggtgttgtctaccatgatgnagcgcagtgtcgctgaagccctcggcgattctggaggccaccttctctgcaacctggtttggactggcatcctttactcgctcattagcttgataatacccagcattcacgtagctatgatctttgcaccatgactcactcagggtgagagccacctccagcatgggggcgagggccagggtgccgtggaagaggggtatccagtccacgaagagggtgtggtgggcgccgggcccgcccaggggaaggtgctccttacgcggcttctgcttctcggcccccaggagcccgttgacggcacagtgcgggtacttggcgccgtgcagcaccatcgtgc

SEQ ID NO: 315012 - DNA, 615 bp, Homo Sapiens
ttttttttgagaggggggtcttgctttgttgcccaggctaatcttgaactctcaggctcaagcaatcctgcagcctgtgccccccaaagtgttgggattacaagcgtgagccacaaaaacagaaagtaccagaaagcacagaacctcaggttgtcacatttctagtggtgctaagatggatcagtaggtttatggggtgtcaacctgatcctgccattatagggttgcctatcaaccattcaccttatgggttttaggcattcattgggtgatgattacaggtgattattatttcagtgatgctcaaactttaggcattcatcagaatcacctggaggactagcaacttagaatgttggaccccacccccaggaatttggatttctaacaaggttttaattagtgctaatgttgttagtgtaaggaccacactctgagaaccacaatatgatatcattagaggttgctaatgatttgataggttgcatttcttctgagataagttttttcagtgaagatagtgtatatgtgttatataccagatttctggtgagatatccttttggtttttaggatttgattcagactgttgcagtcatgattgtgtttgtgtct

SEQ ID NO: 315013 - DNA, 986 bp, Homo Sapiens
  misc_feature (354)..(355): n is a, c, g, or t
  misc_feature (942)..(942): n is a, c, g, or t
agccactgtgcctagccccaccttgctgttttttaagttggaggagaaggctcccacctccctgaacctcaccctgtgtcctttgcagctcctactccaatgtggccagatgacctgcaaaaccacacattcctgcacacagtgtactgccaggatgggagtcccagtgtgggactctctgaggcctacgacgaggaccagcttttcttcttcgacttttcccagaacactcgggtgcctcgcctgcccgaatttgctgactgggctcaggaacagggagatgctcctgccattttatttgacaaagagttctgcgagtggatgatccagcaaatagggcccttgatgggctgnntaacctcattgatctgtacactgaataattccccttgataccagcttcccatctcaaatactttctggttctcttcatcaccttaatttttccaccagtccttggtctgcaccctgtgttcttttggtgggccgaagtacctagcatgtagtaggcattcagaactatgtattgaatgtgatgaattcaacaggtaccaactgatacctactgaattattaacacttgtgctactatgcccagcaagatggatgggaagagtggaaatatctgatgacgtgactatgtcttagtgagaagacagtgcatggttagacatcaatgtgagctctagacaggaagtgctgaaggaagtcatggtggaggggtccagagtagcctgggatctggctctgcttctatgtctagctgcagtccttgcctgggaagaagacctcccttcagagcccagctcctcgctcatctctgtctcccaaagcctgacccactgtgttcttctctgccctcccctccatatgccatggcccctccaaacacagagataccattttaaactagtctcttttttcccccctacaatttcaatnccccccaccagggttttccttattcgttgaagtgtttcaaggtt

SEQ ID NO: 315014 - DNA, 589 bp, Homo Sapiens
atttcggcacaggggaggagggctgcattaacctcattgatctgtacactgaataattccccttcatatgccatggcccctccaaacacagagataccatctaaactagtctctttttccccctacacttcaatccccccaccagggtttcctatcgctgaagtgttcacgctgaagcccctggagtttggcaagcccaacactttggtctgttttgtcagtaatctcttcccacccatgctgacagtgaactggcagcatcattccgtccctgtggaaggatttgggcctacttttgtctcagctgtcgatgggacttagcttccagggctttttcttacttaaacttcacaccagaaccttctgacattttctcctgcattgtgactcacgaaattgaccgctacacagcaattgcctattgggtaccccggaacgcactgccctcagatctgctgggagaatgtgctgtgtggccgtggcctttgcgtgggggtgtgctgggcatcaatcgtggggcatttgttctcatcatctactttcccggaagccttgctcagggtgactgattcttccagaccagagtttg

SEQ ID NO: 315015 - DNA, 342 bp, Homo Sapiens
ccaaactggaacctcacaccagccggcaaaggaaggaagaaaggttttagagctgtgtgttctttctctggcattgattcctctttgagttctcttacttgccacgtacaggaccattatttatgagtggttgtagcacattccttttgcaggtctgagctaagcccctgaaagcagggtaatgctcatttataaagctactggccccagatgctcagggtaaggagcaccaaagctgaggctggctcagagatctccagagaagctgcagcctgccctggccctggctctggccctggcccacattgcacatggacccggcatatatctgcgttgtgtggt

SEQ ID NO: 315016 - DNA, 1523 bp, Homo Sapiens
attaagtggccccttttggggttccaggggcccatccatcttaagcttccaaatgtcttttggagagccaacacaaggctttctttgtgggcgggccagccttagcttgcttcggccagaggttgcattctttccaggccccaggtttccattgaagcttttctctaacgttgtcatctcccacctcagtgaagatttggtccatctctgggaggagccgggcccccttgaggaacatgctggaatggttgaggagattatcgagggcagacagccgttcgggccacttcttgcgctcctttagccgaaaaaacagcccttggcacagcttcctcagctcagccagcttctccttcaacatcactgtggtggctccaacaccctcatcctccagccaggtggatgcggcgctgagcttcccagagatctcctcacgctgctcctctgtggacacttcctggtacttcgggctggtacagcttgtcctgggtctcaaatatgaacgcttccaagctgtgggcagctttttcccgttcctgcttctccaggtctcggagtgtcaagtcctgaagtttctgcaccgactgagccagcttatcctctggcaagtcaggcaggtccagaacaaccagctcccaccccgatctcctctaccattcgccgcttcctggcgggcttctgcttcttctctccctctggggctggagcgacgccctcaggccctgcctctgccttctcacttggtttctgggcctcagacttgtccccattttctttttctgtggccttttctccctcaggggttgcatctcccttaggttcagggggtgggggctgagagccatcctccactggggcctcagcttcctccttgagctccacctgctccccaggctcgtccttgctcccctctgcagggctctcctcttcctcctggacagtatcagtaccattctccttggcatctggtgtggtaccgcctccaaacaggctggaaatggtgttgccaagtttggtgagagtagattcctcttctgcgctgtcctctaccagtgtctcaaatacagactccaccctgtctagactgagcacgccactctcatccaggttgaagtgagccttgatgcccttggactcgtagtcaggatacttcttgaagctgtcacccaccccttttagcttcactgtggtcagattctgggagccaaatacccgaagatcttcaggccccaggaagcccaggtcgccgtagttgatgtggaagttgaaatcatggctgtagcggttaaaggtgatgactttgcgttgagggtagggccccatccgagagaagagtacccgtttattgtgcttcaggctgtgaatcccaggctcctcctccacctccctcgtgaactccaccaggatggggtagaccactgcatctcggacgacaaatggccctcgtgccgaattcgccacccaggcctcgtaccgaggggagggggtgtgctcgattgcgaacggggaagccggcgccgggc

SEQ ID NO: 315017 - DNA, 1623 bp, Homo Sapiens
gttccacctgttggcccccttccccttctttttggccccactagggggttgggaaaataacgagttgagaattctttcccagatttacttccgccaatcccagaggtacaggcttttaggcaaggggcagagaactgcccaatttgctgcaggaagccaaggaaacccagggggaaaggagctgcatgggaatggggaagggaggctcagagcaagagaagcccgcagagggaggaaagagcacagataggcactcagaaaccaaacctggtaactgaggctctgcagacactggcctgaaaggatgctcatcgcatggtgggagaggaagggagggaaggaacaatcaccagagaagagtggaaactccccagcaacctgatacccttcccatcaccgggacccatcagccactggcagccattctcttcctacccacaggcaaaggattcagaaattaatagtgatttttcccaaatttagggcctatatgggtagggaacagggagtggggctggggaggagaacagtttccatttttaaccacagaggtactgcagaaggaaccagtgagctgtccctcccttccccttctccacacctccaaatcacaggggtgagaaaggaactccagccgagggcaggaccaacccctcccccaaccctcgatgttaaataaatagaagtggtgggggaagggggtggagatgaatggggaaaacagaggtgggggttatagttcgtcgttcttcaaaggccgcttctgtcctgtcgattgttctttctgttcaggttctgctccaggacctcctaactcccaaaggctcagtgtctcctggctcggatccagtctctactttctcaggttctgaaatgggctctgcatcttcagtctggcctgctggagggatgaccttctcccccctggtcactggcactggcattgaggggtggctctgcccgggtcccattcttgtccttaggccggggccggggcttggtaaacttggccttattgagcagatactgcacctctcggtccagggccatcatcttagcttcaatgtcttttgagagcaacacaggcttctctgtggcgggcagcttagcctgctcggccagagttgcattcttccaggcccaggtctcattgatgactttctctaacgttgtcatctccacctcagtgaagatctggtccatctctgggatgagccgggcccccttgaggaacatgctggaatggttgaggagattatcgagggcagacagccgttcgggccacttcttgcgctcctctacccgaaaaaacagcccttggcacagcttcctcagctcagccagcttctccttcaacatcactgtggtggctccaacaccctcatcctccagccaggtggatgcggcgctgagcttcccagagatctcctcacgctgctcctctgtggacacttcctggtactcgggctggtacagcttgtcctgggtctcaaatatgaacgcttccaagctgttggcagctttttcccgttcctgcttctccaggtctcggagtgtcaagtcctgaagtttctgcaccgactgagcctcgtgccgaattcgccacccaggcctcgctacctt

SEQ ID NO: 315018 - DNA, 653 bp, Homo Sapiens
  misc_feature (238)..(238): n is a, c, g, or t
aactgctgatagtaaagtttcttaggttgtctaggcttgaagaactgtagaagatctcttaaagtaccttcataataatgtctaagaggatacctgggcaatccctataaccttgagacttgaaaaactgcagcaccattggatctgtgttgagcctctgtgcaactgtctttgcaacctgaaaataatcacagataatgacatcaacgcggtggtagagatctcggaaatactcctntgcggtgggtaattcactgttatcacagggtcatccttctgaaatactatgatgtcaccatccattagttcatcaagggctttatcaagagacacgtcatagtcctgaattctctctgttaaattcggtttaacttcctcatagaggataaggctagtatcttgaataaatcctgctctgtcacacataactgggagcaagtcacgtattttacaggatattggtgtgtagatatgcccacagtaattcaagctccgcgttttgggatcatacatcttcaaaaataacattacatcatgatctttatcaaacttgggtaaggtcgctccactagcagccagctcgggatcaactgtttccaggaatattgtccaagggttttcattatcactgagctcaatcattgtttctcgtg

SEQ ID NO: 315019 - DNA, 976 bp, Homo Sapiens
aagactcgccgtgtggtcgcgcggcgcaagcgtgcgccctgatcgtcgcgatcgctcagggggtcagtggttgccggaacagttggctgcggaggtcccccattccctataggttgcatcacggggccttatcaaggaggaccggttcatagtccctgaattctcttttgttaaatttcggttttaccttcctcatagaggataaggctagtatcttgaataaatcctgctctgtcacacataactgggagcaagtcacgtattttccaggatattggtgtgtagatatgcccacagtaattcaagctccgcgttttgggatcatacatcttcaaaaataacattacatcatgatctttatcaaacttgggtaaggtcgctccactagcagccagctcgggatcaactgtttccaggaatattgtccaagggttttcattatcactgagctcaatcattgttttattgccgtcggcttcattatctaacattgctggtcgttttgttccattactccttgcttgcatgggccacaatcgaatttgatcttgtggaaatcccatggtctgagagaggctctgaacaaactcagcaagcgaggagttcttcaatactttgaacacagtgtatttcactttttcttcatcgtacatgtcattcccttggtggccacaaaactggtcctctgcgactatctgcacttgcatatagagatgggcttcctgccgctccttccgcttctgagcctcgatccttttctcttcttgtaatcgctccaccaactgctgaggaatatcatggtcggtgaccgcctgtaaaacttcactcagttttgattccctgatgtagactaacatgtaagcattagtgcagtgtcgaacagacaggtcgtcatcgtgacccccataattgtgctcaatcgcttcctctttagtacaccttgacaccaccctcgtgccggaatcgccacccaggc

SEQ ID NO: 315020 - DNA, 2194 bp, Homo Sapiens
  misc_feature (19)..(19): n is a, c, g, or t
  misc_feature (433)..(433): n is a, c, g, or t
ccccgatcccactaacctncttctccccccattgcgctgaacagttgccttgacactgtggttacccataaaataactctcattggcatccaagctttataaaaacatcttcatttttgctcaaaaagggcggtcaatagatccagggaagccaaactgaacagcctcaataaaataaaattaacaccagcagcgactcctcttgctgaagacttcgggctagagggcacgtgcaccaaagttctaggctgttaaggggccacccacacaccgtcctcgccttgaacacaccagcttggaaatcagttatggattttaatggccttttcaaggtaagtgtagcgactcctctttggggctttgttgaagtggtcgagccctagccaaggccgaggatgagacatattaccgggctgtggctcaaaagtctttncaaatttacttccatactcgtcttcatttaatgtactggtgtcgggcccatcattacaattgcaaaatttaaacttctcaaactccttctccctggatgtccagcaggctctggattcgcttcatcacttctcgaaaatgctcgccctggtgtatcctcagcaaaaacgggattccgaacgttccgaagacctctttgtggaaatgcgccactgtgacaagcatctcattctctttgtctatgtccacctggtccaaagggatttcctctattcgaaacgtccggctcgttgcaggagataaacattctaatagttcatcttcttgatgaacaccaatgattttgtagcttacaatttctagcagcctaagtttccctgatgctttctccccaagctccacggcctttttacattcttctaacaggtcccggacacacccatgcttgtctggatatagtgttatttcctcttccctaaattggctgtttaaccatatacatttaaaacttcgcctgttctcaaagtctgtgattttcatcttaagctgctgatagtaaagtttcttaggttgtctaggcttgaagaactgtagaagatctcttaaagtaccttcataattatgtctaagaggattacctgggccatccctataaccttgagacttgaaaaactgcagcaacattggatctgtgttgagcctctgtgcaactgtctttgcaacctgaaaataattcattctatttgataacgtaaccacaaatccaggatcattagggattgttttatcacagaaaatgacatcaacgcggtggtagagatctcggaaatactcctttgcggtgggtaattcactgttatcattttcagggtcatccttctgaaatactatgatgtcaccatccattagttcatcaagggctttatcaagagacacgtcatagtcctgaattctctctgttaaattcggtttaacttcctcatagaggataaggctagtatcttgaataaatcctgctctgtcacacataactgggagcaagtcacgtattttacaggatattggtgtgtagatatgcccacagtaattcaagctccgcgttttgggatcatacatcttcaaaaataacattacatcatgatctttatcaaacttgggtaaggtcgctccactagcagccagctcgggatcaactgtttccaggaatattgtccaagggttttcattatcactgagctcaatcattgttttattgccgtcggcttcattatctaacattgctggtcgttttgttccattactccttgcttgcatgggccacaatcgaatttgatcttgtggaaatcccatggtctgagagaggctctgaacaaactcagcaagcgaggagttcttcaatactttgaacacagtgtatttcactttttcttcatcgtacatgtcattcccttggtggccacaaaactggtcctctgcgactatctgcacttgcatatagagatgggcttcctgccgctccttccgcttctgagcctcgatccttttctcttcttgtaatcgctccaccaactgctgaggaatatcatggtcggtgaccgcctgtaaaacttcactcagttttgattccctgatgtagactaacatgtaagcattagtgcagtgtcgaacagacaggtcgtcatcgtgacccccataattgtgctcaatcgcttcctctttagtacaccttgacaccaccctcgtgccgaattcgccacccagc

SEQ ID NO: 315021 - DNA, 458 bp, Homo Sapiens
cgaccagtacataaatgaagacgagtatgaagtaaatttgaaagactttgagccacagcccggtaatatgtctcatcctcggccttggtagggctcgaccacttcaacaaagccccaaagaggagtcgctacacttaccttgaaaaggccattaaaatccataactgatttccaagctggtgtgttcaaggcgaggacggtgtgtgggtggccccttaacagcctaggaactttggtgcacgtgccctctagccgaagtctttcagcaagagggtttcgctggctgggtgttaattttattttatttgagggctgtttcagtttgggcttctctgtatcctatttgactgcccttttttgaggcaaaatggaaggatgttttttattaaaggtttgggatggccaatggaggagttatttttatgggtaaacccccagtggccaagggcaaactgttc

SEQ ID NO: 315022 - DNA, 1260 bp, Homo Sapiens
cataggcagagtgaggggggattcccacatttttttaagccagaaagtggggggaatcagtagtactggaaagaataggcaatgcctgactggatagaaaaagattctatgcttgtcaaatttcacaaaagtgacttaagcctatactgcgggatgttcacactacgtccctttagtgcagttacggtacttcaggctgcaagtaaccaaatacacctaaaattgtcttatacaataagggcgtaattatctcatataacaagaagcttggcatgaaggaaatttcaacaatttcacagcggcaacaaaaactctgtttcttctacctttccaccattcctgtgttctcagttccaatatggctgctaacatccatatgtcttccccgcacatctctttaaaagctacaaaaagatttcccaaaagcgtcttggaaaatttcctgtcccatctccattggccagacccacctcccatgggactgcctcttgtgaagcacacaaagggcagataccaaacggtaccgttagggagacccagaagatggaccatccaggatagagacatgaagggcagaagagggcccagggatgtgtgtccctcagctggactacagggaaggagttttggtcaggggaagaaaagcctcatttcctatcagtcactggtggaatgactaaagatgctaatggactcaaccaaaaaaatggccggaggcgtgagacagaagaacaagaaaaggtgtgcaggtgcactccgtccacagcgctgtagaaggagacattcccagtcccacgatccaggtaaacccccactcggtggagagctggctcttgctgggtgggagttccagggaagcctatcaagggccaatagccagcagcactccaataaatcgcccagatgcccacatctggggacatttttgaacgatcagtaattcccatgacgtcctcccgacacaccccaacagcaacctccagactatctctactctcaacttcccagtaatgtttccctgaggtgaaaacgttttttcccagaacacagggtaagtgctgaaatctctctacaaaagcagtcttctgaggattcctccatccagcaaagtagttccatgctgaagaaaacactggccaagaactggctgatgctgtatttttcacgtatctcccttcctgggagaagacgagtttgggatgagctgtgtcttcagctaggtttacagccacttggaatcgctttagcatttccttcatc

SEQ ID NO: 315023 - DNA, 872 bp, Homo Sapiens
gttttatcaaccaatgaaattttgcaccagtcaatgtaaaattgagtacgaaattttttatcacatgttattacaggctccatttcttgactacatctcaattgattctgtggattttcaacttctcgtaaacaagaagaaaacgggacatctgcaccaaccatgacataaacgccctccttcaggtcattaatgggaagtggcaccctgccacccctgtctagggccgatgtgatgtttatggcgttcaggcgctctggctgccacacatttttcactgcgccaagaaagtctccaagaacctcactggccaacatttcttctacattcatattcttaatgaagaattctgcttgatatggcaacgggaagtcttctgcagacattatattaattatcaaattatgccttgcagtctcaaaggtgcgcctgttgtaggcagttatctcaatgattgttggcttccccacattttcagctgttggggacccatataggactccatcactatatggtgtccggatatatcgaagccatccaggtcggtctgggtaacccattaaatttgtattaaatgttatgggatcattactaatctcgccagggggtaaggtggaaattcccccttaaaatattctctttccagaccatgaccaaagaggacacctgctgatgggtatacattccgatcggagtgtaccttggagaaaatcctgtacactgtcagcaagaatgtgccagtggtcgcggggctcatcgtgcgtgtcccgcgaccctgtcccgtccgagcacaggggtctcccagctcccaccaccggggcaattgcattcttggcctggctaggccgtccgtcctcgattctcccctcccc

SEQ ID NO: 315024 - DNA, 772 bp, Homo Sapiens
  misc_feature (29)..(29): n is a, c, g, or t
  misc_feature (110)..(110): n is a, c, g, or t
  misc_feature (120)..(120): n is a, c, g, or t
ttaagccaagtatgggtggcaattccacntgcaagacagctgaacgcacgaaggccacactgagtatgtcatcaatctgccgactgttgaagttggacaggcccagcgcntgcaccagcnccttagccaccagtgcctccagagccttccaagtctccttgtagtgggtggagtcgtagcatatagtcccatcagcattcttggggaaggggttgtctcaccgctcaaaggcataaggccagtgcatcaggtacaggtccagatactccagctggaggtcagccagagtcccgaagggcaggctccacatcctcggggtggtgcttggtgttccacagcttgaatgtcacaaacagctcctcccgaggcaccgccttgcctggtcccacgtcctccttcagggcctccccaatctcaggctcattgccgtagatagcaacctgaccaggctcactcttccaggtacccagaccaatcagaggcatcttctgcccagtgtgcagtagaacacaggaagccgccattgcccccttggcacaagcacagagcgtgaatagggtactgtggcctgggctcagttctgcaccccgccagagatccaacgatcctcagcttaagtctggcggtgagggggaagttccacccggagggaggggcaggggccgggcatgaaggatcacgcgcagggtggaccgccttcgccgcctcccgaggaaggactccgcagcgcgggtttggagaactcctgggcacaatgaggcaggtggcgctg

SEQ ID NO: 315025 - DNA, 1386 bp, Homo Sapiens
  misc_feature (148)..(148): n is a, c, g, or t
  misc_feature (150)..(150): n is a, c, g, or t
  misc_feature (152)..(152): n is a, c, g, or t
  misc_feature (156)..(156): n is a, c, g, or t
  misc_feature (160)..(161): n is a, c, g, or t
  misc_feature (166)..(166): n is a, c, g, or t
  misc_feature (169)..(171): n is a, c, g, or t
  misc_feature (173)..(174): n is a, c, g, or t
  misc_feature (178)..(178): n is a, c, g, or t
  misc_feature (180)..(181): n is a, c, g, or t
  misc_feature (183)..(195): n is a, c, g, or t
  misc_feature (199)..(201): n is a, c, g, or t
agccctttaggttcagtggcccagggatttccctttgggaaaacccggttatggccccaggtttccctttaccttaaggggggcccgcgggccaaaacgaatggttttagaaaactttctcggagggcccgaggcggccgaccatgtntntntttncttnnttttnttnnntnnaaancnntnnnnnnnnnnnnntttnnnttttgatgctccaatggctttattaactccctctttccgttgtggcaggacctcattagctgcagagctggaagggaggccaagaagctgtggtctcagtacgggtcattaaaggggtacagaggatgccctgcatcccttgggactctcttcccatccaccgtaagcataggcacaatatatctccaatttttgttcagggcatttagctgcttcatctcttctgggctaaaggtgaagtcaaacaccttgatgttctgaaggattcgagaaggagtgatacttttggggatgcagatcactttccgctggacctgccacctgagcaagatctgagctggagatcggccatacttttcagccaatgccaggactactggttcctccagcaggacaggctcatcaggatcacgccatgcacgatcagaggagcccaaagggctataagcagttacctccaggccacgtgcttggcagtgggcaattagctcattttgagccaagtatgggtggcattccacctgcaagacagctggacgcacggaggccacactgagtatgtcatcaatctgccgactgttgaagttggacaggcccagcgcctgcaccagccccttagccaccagtgcctccagagccttccaagtctccttgtagtgggtggagtcgtagcatatagtcccatcagcattcttggggaaggggttgtctccccgctcaaaggcataaggccagtgcatcaggtacaggtccagatactccagctggaggtcagccagagtcttccggagggcaggctccacatcctcggggtggtgcttggtgttccacagcttggatgtcacaaacagctcctcccgaggcaccgccttgcctggtcccacgtcctccttcagggcctccccaatctcaggctcattgccgtagatagcagcacaatcaatgtggcggtagcctacgctaagggcatacttaacagctgcttttacctgaccaggctcactcttccaggtacccagaccaatcagaggcatcttctgcccagtgtgcagtagaacacaggaagccgccattgcccccttggcacaagcacagagcgtgaatagggtactgtggcctgggctcagttctgcaccccgccagagatcccctcgtgccgaattcgccacccaggcctcgctacct

SEQ ID NO: 315026 - DNA, 809 bp, Homo Sapiens
  misc_feature (42)..(42): n is a, c, g, or t
  misc_feature (80)..(81): n is a, c, g, or t
  misc_feature (123)..(123): n is a, c, g, or t
  misc_feature (147)..(148): n is a, c, g, or t
gactgtgaaagtgggacaggcccagcgcctgcaccagccccnttagccaccagtgcctccagagccttccaagtctctgnntagtgggtggagtcgtagcatatagtcccatcagcattctgngggaaggggttgtctcccgctcannaggcataaggccagtgcatcaggtacaggtccagatactccagctggaggtcagccagagtcttccggagggcaggctccacatcctcggggtggtgcttggtgttccacagcttggatgtcacaaacagctcctcccgaggcaccgccttgcctggtcccacgtcctccttcagggcctccccaatctcaggctcattgccgtagatagcagcacaatcaatgtggcggtagcctacgctaagggcatacttaacagctgcttttacctgaccaggctcactcttccaggtacccagaccaatcagaggcatcttctgcccagtgtgcagtagaacacaggaagccgccattgcccccttggcacaagcacagagcgtgaatagggtactgtggcctgggctcagttctgcaccccgccagagatccaacgatcctcagcttaagtctggcggtgagggggaagttccacccggagggaggggcaggggccgggcatgaaggatcacgcgcagggtggaccgccttcgccgcctcccgaggaaggacctgaaggggatggaaaacagagctgggaggtagtaccgtctccacctctggatcctcgaggtcgaactggccggaacttggtcactcactccgcagcgcgggtttggagaccc

SEQ ID NO: 315027 - DNA, 657 bp, Homo Sapiens; identical to SEQ ID NO: 126350

SEQ ID NO: 315028 - DNA, 1027 bp, Homo Sapiens
cagagaacttttttttactgcagaaaacatttttataactttagaacttttctaaaatactactttgtcagctgaacaatatagaaaagtgcagaggcaagtgcctttccagaaccgcgtggtgacttagaagcggggcttgcgcttgcggccggtgtactgggtgtcaggtctgacttccctgccctggcgcctgtgccgctccttcttctccagcacccatgcccgactcttcctcaccattccccgcctcgacatccttaatgggaacctctcattggtgaacacagactccctgggttcaacttcatcctgattttcactcagcccctctggtataaaggtcgaaggcccagaaaacaagcagaggtagaatttctttgctttggcactgttagggtagtctaccaccatgccaccggagaagcttgcctttgtggcctgggttgtgatcagctccaactgctctgagttctcagggtacagctgcaggacagctcgggatccccggacgagaacagaaaaaagagaagcaaaaaagcagtacaggcgcttggcagggttttcagacttcttgttagcattacagagccactgcacagcagaaatgctgatgcaaccatcaaatgtgcctggcttgaatgggatgccctggcccatatcccccagcagcaggtctccctctatctctcggtccacagcctcatccagcatggcagggctgatatccaggcccacccaatagtgcccttcatctgacagataacttccactcagcccagtgccacagccaatatccagcaggtaacagggcttattctctggcagataaagaagctccaatgctcgcccagccatcctggtctggatatcaatcatccgtgagttgcgaacgtatttccgggcttctgtctcgtcataaaacagctctgggggtccgccatgctccggacgccggccgcgggacgccattctcacgcctcagcagcacacctgcgactggcgcctgccggcacccggtttttat

SEQ ID NO: 315029 - DNA, 797 bp, Homo Sapiens
  misc_feature (50)..(50): n is a, c, g, or t
  misc_feature (73)..(73): n is a, c, g, or t
  misc_feature (88)..(88): n is a, c, g, or t
ccccccgggccttgggaccattccttttaaattggggaacccttctccanttgggtgaaccaacaagactccnccctggggtttcaancttcatcccctgatttttcactcaagcccccttctgggtataaaaggttggaagggccccagaaaaacaaggcagagggtagaatttctttgctttggcactgttagggtagtctaccaccatgccaccggagaagcctgcctttgtggcctgggttgtgatcagctccaactgctctgagttctcagggtacagctgcaggacagctcgggatccccggacgagaacagaaaaaagagaagcaaaaaagcagtacaggcgcttggcagggttttcagacttcttgttagcattacagagccactgcacagcagaaatgctgatgcaaccatcaaatgtgcctggcttgaatgggatgccctggcccatatcccccagcagcaggtctccctctatctctcggtccacagcctcatccagcatggcagggctgatatccaggcccacccaatagtgcccttcatctgacagataacttccactcagcccagtgccacagccaatatccagcaggtaacagggcttattctctggcagataaagaagctccaatgctcgcccagccatcctggtctggatatcaatcatccgtgagttgcgaacgtatttccgggcttctgtctcgtcataaaacagctctgggggtccgccatgctccggacgccggccgcgggacgccattctcacgcctcagcagcacacctgcccc

SEQ ID NO: 315030 - DNA, 1523 bp, Homo Sapiens
ttttgagtgttgcacttttatttaggtagggaggcatgttgaatgagccaggaggtctagaactggagcttagtccagctggtacaataccaactccccttctagttcccaaaggcgatgtccagacacagactttatgattattatatttttcaatgccagtgctgctcagccctcagcagaacttcagtttccatgaaataaacaatgactatataaaattccacctttctgaaactgcagtctgacctcaggtgaagctcaggtgaaagtttctttcccaagcagcccatctgtgttccatcaagagagtcaaggttctccaagtgaggggagctgtgcctggatcctgcctccaagtcacatgagcactagctcatagtggcagggtgggggtgggaggggcaggtctaaactcacagaagtcaagtcttaagacagtgggtgacccagattgccatagaggtcaggcctgcggtgctgggaacacaggcaggtgtcggcgcaactgtcgcagatagttgaggtctattcgggcaaggcagaggcctggcccctcagagcagcgggccaccactgttccccaggggtctaccaccatgctgtggccataacttgctctcttctcatggtggcgtccacactgtgctgctgccactacatagcactgggtttcgatagcacgggcccgcagcaacacctcccagtgggctgggcctgtaatggatccaaaagctgaaggataggtaagtatctctgctccagcttgagccaatgccagagagagttcagggaaccgcatgtcatagcagacagctagaccaatcttgcctgctggtgtgctgacaggtgactcaagactgggcccaggcatggtagagttgctttcacacataggcccctgccctggaatctctacgtcacacagatgtgtcttcctgtaagtggcccactactgcccctttgctgttcagcagcacgtgacaattgtagattttctgagtctgctcccagtcttggccacgctcatggaaaccacccaaggacagccagagtccacattccctggcaagctgggtgtattcttccaaaagtttcccacccagtggttcagacaggtgtagcgtctctgcagggtcccgtgcaatgaagtcaaatgcctcaggcaggaaagccaggcaggcacccagtctggcagcctctcgaaccagctcagcacatgttttaaagttctgttgcttgtctggcgtcgatgttacctggcacacagccaccaggggcagttcgcaggaggaagaggagatagccatggctctgggcctgggctgagcacaaagtactgagagttgaggtatccggagtccaggacacagaagggacaggaatctgtgaggaggcctggtgatgaagcccagcatgaagatatagccaaaaccattcgcagggtccgatccggagggcggtctggagccagaagcgccgcagcgagtgggcggtaactcgcaggccggacgtgacgcaag

SEQ ID NO: 315031 - DNA, 483 bp, Homo Sapiens
  misc_feature (89)..(89): n is a, c, g, or t
  misc_feature (173)..(173): n is a, c, g, or t
  misc_feature (431)..(431): n is a, c, g, or t
aagcctctcgaaccaagctcaagcacatgttttaaaagtcctgttgcttgtctgccgtcgatgttcccctgcacacagccacccagggnaagttcgcaggagaaagaggagatagccatggctctgggccctgggctgagcacaaagtactgagagttgaggtatccgggagncccagacacagaagggacaggaatctgtgaggaggcccctggtgatgaaagccccagcctgaggaaaggtgagaatatgaggacacccaaccccttcttcaagcaataaatttctaggattctctgacttctctctttatactgtgagcctgaatcagggccctgccagtaaaaacctagttttcaaaacgctctttataagaaattataggctaagggacaagaccatacagtgggaagatggagaaaggggctctntcgccgcctgaatagttcaacttccaatgatctcacattaaactgaagcctc

SEQ ID NO: 315032 - DNA, 420 bp, Homo Sapiens
agtggtgcacccgggctgcacgagttcggcacgagggggtttccagctggctttgtcactatgccaacaggtgaagaggtcaaaagtaccctgagcatgctgcccatgatgctgccaggcatggctgctgtgccccagatgtttggtgttgggggactcctcagtccacccatgtgaaccacctggactttcactgctccggcgtctctatcaagcacaacgagtggtacggcagtgactggactgcggaagacaagccgagtagccatgatgtgtctgaacctgcaataactactagaagtcctgtggcttttaacccatttctcatcccaagagtatctcctggactcatttacccatccatgttcctctcccctgggatgggcatgggtctgtcaggcatgccagaagccccctctg

SEQ ID NO: 315033 - DNA, 826 bp, Homo Sapiens
  misc_feature (473)..(473): n is a, c, g, or t
ggtttctcttctcccacttagcattttaaatgtaaaactgaagctttaaattctttgagccattcagctcttaactgccagctcacactatttcacagcatatccatagatatgagggcgcaccaactcccaggacagtggggcctggatgtgctgcagcttcagcttagagaagctggcccgctccagggccttccagctctctctggtcaggttgcacccatcacacagaaggtgccaggcaggatccaggacttgttgccagaagtaattccaagtcgaacactcagctgccacatgctccatgaaatagaaagcccctcccggtctcagcactctgcacacctcgcggagaatccgctcctggttcttcacagagcacagcaccagggtgcagaccaccacatccacagagccatcagccacctggtgcatgttctccccggcagctaccacaaagcgcctcaaactgncaggtgtcggttctctgcaatgctcttgatcaaaaacttctcaaagttggggttggggtcaatacaggtcaccctgcacccaggtgggtagaacttgaagttggcccccgtgccacagcccacttccagcagggagagtttcccggaggggcccgcaaactcctgcaggttactgaagagctcccgcttcttgcttgccatctgttcgttgtatatcacagtgaacctcaccaagaagtaggggaaccattttttgcatatccagctccacaagcccagaaagttcagcaggtacaagggaaatgtcaggatgtaaatggccagtctcaggataaagatggtaagctccattg

SEQ ID NO: 315034 - DNA, 797 bp, Homo Sapiens
tttgtaattatagatttatttctttaattgttttgggggtatctgtttccttgttctgaaatagaaactccatgaagaaggaaagctggggagggggtgcggggtctgggtttccaggcaatttggggctgatttcagcgaatggggggtgggacatgactgtggtgaacttgacaaagggcaggatgctggccttgcagctgtgtgggcagagctgggcggggctgggggctgctggagtcgcctctacacaggcaggctctggccacgaccctgagccatgaacggaggagggagtgggctctcgtccctggcctcccagagaccacagcttgctagggccagctggcaggtgtgattctgctcctaaagctggatctttcctctgccggtggaaatccatcgctctctggctgctcgagaactcctggctacatttggcaagattcggatctggcttctttaggattaaggagctgccgggagtcacaagcagagacactcatgtgggttccgaaggtccgctctctgggcaccccaggctcggagtattctaaaatcctgagccatccacaggttccctaacaggacccttctggccactccaacagacccactgcccgcgtcggggaggcccacgtttcaggcactgtagaccagcggggaggaagcgcctggtgggtcttgagcctgtgggctccaccgcccctcgggagtctgcacagggtcccagcgactcacccatctggacgcccttcctgcggctgcctgttcaccttggcttatgcgtggctcgt

SEQ ID NO: 315035 - DNA, 412 bp, Homo Sapiens
  misc_feature (350)..(350): n is a, c, g, or t
aaatttcttcactcagctctcagaagagaattttaaagcaggcctgtaaaaacttcttttcaactaggacattggttatccagtgtggtcttggggccccagcgggcccctaaggtcctttccatgggttcagagggtcaaaactgtgttcataataatgacattatttgcttttcactctcattctctcaagagtgtacagtggggttcttcagaggctacgatgtgatatgtgataacccaaccaattgaatgcagaagctagatatgagaacctagttgtcttctgttaagccagacatgaaacaggtttgcaaaaatatcaaacaatgccacttttctcataattntttttgttttggccagttattttcacatgtgttattcatatgttaatgtattgggttttttt

SEQ ID NO: 315036 - DNA, 560 bp, Homo Sapiens
  misc_feature (72)..(72): n is a, c, g, or t
  misc_feature (231)..(231): n is a, c, g, or t
gaaataaatatccttttaatagttatatatccagatattcaactgttagctttaaattggcagctctcttcntttttcttcttttcactggctttttacttggtgctttttcctgttttgcactggtggtctgtgttctgtgaataaagcaaagtaagaatttactaagagtatgttaagttttggattattgaaataagaggcatttcttagttttccagtaggatctanaatgtgtcagctatgagtaagactggcatccaagaagtttatattatagatttaggtcctaatttttataaatcacaaggtaaaaaaatcacagaacagatggatctctaatgaaaaagggatgtctttttgtttatagtcatgtggcaagatgagagtaaaaccagagagcaaacctctataagtgttgagtatatgtatacatttgaaataaaccagaaatttgttaccttattttctttggattcttgtctggttccaaaatgatcatttcttcttcttcactatctgagagtattatgggagcatctttgtttttttattaattt

SEQ ID NO: 315037 - DNA, 981 bp, Homo Sapiens
  misc_feature (630)..(725): n is a, c, g, or t
  misc_feature (793)..(875): n is a, c, g, or t
caataagcagctttttattgaaggactgaaagaattaaatagaaggcacagtagcactgtaaagctttctcagaacataataatctttttctatgtatgtgtggaacccagactttcttttttgttgttaaaaatgtcttctggacaatcagaaaatctttatttgtcatccttccctttggtctttctgtaaaccatttctcgaaaactggccagaatcttgttctctctctttcgtctctcttcttggttaaaggatgcaagggctctcttctcatcagcactgtagatctggttctcttttcgcagtcgcacagcctccattcggcgatgcctgctaccactcattacataacttgagcattcaaatgatgcaatttcttcacttgtcaagccaatttcacctcttcgtgggatacgttttccagcttttacatattcagccatagctgcaccttcaccaggtaacagagcatggccatagttcaaaggtttatcatcttgagaggtaagtgtttttggagcctctgggccaattaaatctgatggttcttcagcctttgttcgatccttccagggattttccagaaactcttcttgggattctttagagcttgaatcactggactnnnnnnnnnnnnnnnnnnnnnnnnnnnnnnnnnnnnnnnnnnnnnnnnnnnnnnnnnnnnnnnnnnnnnnnnnnnnnnnnnnnnnnnnnnnnnnnntatcttcatcactggagtctgtttcagaatcagagtcactgtcgctatcttcagaatacttcttatgnnnnnnnnnnnnnnnnnnnnnnnnnnnnnnnnnnnnnnnnnnnnnnnnnnnnnnnnnnnnnnnnnnnnnnnnnnnnnnnnnnnaagtagaagctgaagtagtgcttttctttggctcttcatcctccactggtgtatgttcatcagaatctggttcaggattctttggagaaagtccccatacttcagg

SEQ ID NO: 315038 - DNA, 355 bp, Homo Sapiens
  misc_feature (158)..(158): n is a, c, g, or t
ccccgcttgccccatctgaacaagaaagaaaacgagatgctcatcttcccagctttggcttctcaagcaagaatataaagcctggaaggcagctggctccatctgcagagcactctccaactcggacaccgggatgttgagcgcccctgggatggtcnccactgccgcctcctcgcgagagcgcacgtcgaagagccgggcccgtccggaggctaggagtgaacggagttcaggaagcgagaccgtgggcgctccagccatggtgccgtagcaaccgcgagtctccggagtgcggccctggcccgccctctcggcgcctgcaacatctcccgttccctcccagagctgagaccgg

SEQ ID NO: 315039 - DNA, 360 bp, Homo Sapiens
cccggcccctcagaccgaacgggctcctgcttcatcttggccagctctctcctggtgtgctcgtcttgcctcaggtccttcttattccccaccaggatgatggctgtgtagacatgcaccaacaggtgtcggtgcctccacttaagctagaaagctcccctgggggggccctcatcttcccagagcagtcttagaagccattcagcatgatggtccccacagctcaaaacctcaacagtagtatgccctcagagggccagttaccacagtaaaggagaccaacagggcctgagtgctcccctgcatccccacccccacctctgaagatgactgaagacaggccaaggcacgagacctctg

SEQ ID NO: 315040 - DNA, 1052 bp, Homo Sapiens
ttttggggagcctgtagcctttattcatgcccccctgaccaaatgcagtgagagacaaggcccctgccgaaaacaactccaggggcctgggactctgggtcccctactgcagacactttcctgtgagccagaagtgtataaagtgctggtgtgtgaccatcctttggggaaggtcaaagggggcaagatccccaggggccctgaggaagggcagggcataggcgtggctcccagagcgctgggagggagggcccgtgccaccacctcggggctagaaaacaatgcagtcctgggcaggagggaactgaaaatgggagccttcagcatggagccctcaggaggctggggttgtagggggataatttctgtacccctgtgaagggagggggcatgtaggaaaggccttggggatctcagagaatgggacagcccctccgacgcttgttcttgcggacctggaggccagcccgagtggccatctcaaacacctcccgcactccctccttggtcttggctgagcactcaaggtagccaaaggcactgatccggttcgccatgtcccggccttcctcagaccgaacgggctcctgcttcatcttggccagctctctcctggtgtgctcgtcttgcctcaggtccttcttattccccaccaggatgatgggcacgttggggcagaagtgcttcacctctggggtccacttctcaggaatgttttccaggctgtcagggctgtcgatggagaagcacatgaggatgacatcagtgtccgggtaggagagaggccgcagtcgatcatagtcttcctgccctgctgtgtcccacagagccagctccacctgcttgccgtccacctcaatgtccgcaatatagttctcaaagacagtagggacgtagacctccggaaactgatccttgctgaagacgatgaggaggcaggtcttcccacaggcaccatccccaacgatcaccagcttctttcggattgcagccatggtggggcttccgctccgccgcctccagctgcgcggccggtgccggaggctcagact

SEQ ID NO: 315041 - DNA, 912 bp, Homo Sapiens
ggcctgggtggcgaattcggcacgaggggcaccggccgcgcagctggaggcggcggagcggaagccttgacttcatctcagctccagagcccgccctctcttcctgcagcctgggaacttcagccggctggagccccaccatggctgcaatccgaaagaagctggtgatcgttggggatggtgcctgtgggaagacctgcctcctcatcgtcttcagcaaggatcagtttccggaggtctacgtccctactgtctttgagaactatattgcggacattgaggtggacggcaagcaggtggagctggctctgtgggacacagcagggcaggaagactatgatcgactgcggcctctctcctacccggacactgatgtcatcctcatgtgcttctccatcgacagccctgacagcctggaaaacattcctgagaagtggaccccagaggtgaagcacttctgccccaacgtgcccatcatcctggtggggaataagaaggacctgaggcaagacgagcacaccaggagagagctggccaagatgaagcaggagcccgttcggtctgaggaaggccgggacatggcgaaccggatcagtgcctttggctaccttgagtgctcagccaagaccaaggagggagtgcgggaggtgtttgagatggccactcgggctggcctccaggtccgcaagaacaagcgtcggagggggctgtcccattctctgagatccccagggcctttcctacatgccccctcccttcacaggggtacagaaattatcccccctacaacccccagccttcctgaagggctccatggctgaaggctcccatttttcagttcccctcctggcccaggacttgcattggttttttagcccccgaagttgggggcacgggcccctcccctcccag

SEQ ID NO: 315042 - DNA, 1001 bp, Homo Sapiens
  misc_feature (131)..(131): n is a, c, g, or t
tggtggggacccatcctttggggaagtcaaaagggggcaagatccccaggggccccgaggaagggcagggcataggcgtggctcccagagcgctgggagggaggccccgtgccaccactcggggctagaancaatgcagtcctggcaggagggaactgaaaatgggagccttcagcatggagccctcaaggaggctggggttgtagggggattattttctgtaccccctgtgaagggaggggggcatgtaggaaaggccttggggatttcagagaatgggacagcccctccgacgcttgttcttgcggacctggaggccaggccggagtggccatctcaaacacctcccgcactccctccttggtcttggctgagcactcaaggtagccaaaggcactgatccggttcgccatgtcccggccttcctcagaccgaacgggctcctgcttcatcttggccagctctctcctggtgtgctcgtcttgcctcaggtccttcttattccccaccaggatgatgggcacgttggggcagaagtgcttcacctctggggtccacttctcaggaatgttttccaggctgtcagggctgtcgatggagaagcacatgaggatgacatcagtgtccgggtaggagagaggccgcagtcgatcatagtcttcctgccctgctgtgtcccacagagccagctccacctgcttgccgtccacctcaatgtccgcaatatagttctcaaagacagtagggacgtagacctccggaaactgatccttgctgaagacgatgaggaggcaggtcttcccacaggcaccatccccaacgatcaccagcttctttcggattgcagccatggtggggctccagccggctgaagttcccaggctgcaggaagagagggcgggctctggagctgagatgaagtcaaggcttccgctccgccgcctccagctgcgcggccggtgcccctcgtgccgaattcgccacccaggcctcgctacctt

SEQ ID NO: 315043 - DNA, 855 bp, Homo Sapiens
accacctttggggggggtttgagaaaaacaccaattgccagttcctgcgggggcagaggagggggaactcttgaaaaattggggagcccctttcaagtcattgggaagcccctccagggagggcctgggggtttgttaggggggggaaaaatgtttctgtaccccccctgtgaaaggggaggggggccatgttaggaacaggcccttggggaatctcaagagaagtggggaaagcgccttccggacgcttgttcttgcggaccctggaggcccagccccgagttggccatctcaaaacacctcccgcactccctccttggtcttggctgagcactcaaggtagccaaaggcactgatccggttcgccatgtcccggccttcctcagaccgaacgggctcctgcttcatcttggccagctctctcctggtgtgctcgtcttgcctcaggtccttcttattccccaccaggatgatgggcacgttggggcagaagtgcttcacctctggggtccacttctcaggaatgttttccaggctgtcagggctgtcgatggagaagcacatgaggatgacatcagtgtccgggtaggagagaggccgcagtcgatcatagtcttcctgccctgctgtgtcccacagagccagctccacctgcttgccgtccacctcaatgtccgcaatatagttctcaaagacagtagggacgtagacctccggaaactgatccttgctgaagacgatgaggaggcaggtcttcccacaggcaccatccccaacgatcaccagcttctttcggattgcagccatggtggggcttccgctccgccgcctccagctgcgcggccggtgccgccc

SEQ ID NO: 315044 - DNA, 630 bp, Homo Sapiens
cacttggcatttttatttattccagttaattgtccattccgttcagaattgggactattaagatgattaagaaaatctgccctcggggagacagcttatgtttcacttgggatacccaggctgtgccatcagagtgaggatggaggcagagcaggtcaggaggtgggagacgctcattcagggcaagagaaccaggggctgtgtgtgggaggaggtggggctgcatgggaatggagggagtagactggagggatttttggatccctggccacgaagctgcccagggtagctggggcctgggcgctttctgggtcagggctggaggaggaggcatttgttccagctgctacacttatgggtgaggcaggagaggttcatgtagtcaacagcttcctttgacccctcatcttatgtcttctcaggagcccgttcggtctgaggaaggccgggacatggcgaaccggatcagtgcctttggctaccttgagtgctcagccaagaccaaggagggagtgcgggaggtgtttgagatggccactcgggctggcctccaggtccgcaagaacaagcgtcggaggggctgtcccattctctgagatccccaaggcctttcctacatgccccctccct

SEQ ID NO: 315045 - DNA, 728 bp, Homo Sapiens
attatatgaatattttaatgcaaaatgcttaacacttaaaattagcaaagcgtcatttaaattaaaattccatttaactaaagatggttaaccccaagaaattgtacagtagttgatttctgctatataatgccagtcctatgccatacaataagaactgcaacattagctgtcacttcctccattgctcttctggaccctaaggtatgagggaggggactcagacacaaaacacaacccaaataagctgtgcagtgattcctaatagttataaaccctatctaagttgtccacacagctgaagaataactgcaggtattgttccagagctgatacgaggttttgcttttacagcctggtaagagttctgcactaggtgagaagtcacagtttaaggatgcatgttctgtaaatagttactacatatacacatttactgtctgtacactctagaaatatacattagacagagtaccctcacaagttgggtacagtttaaaaaagaagatgaggtcacatgaatctcagagtccacaggaatcctgcctgaagagtttcacaacagcctgtaattcatttccaatgtgcagggagattaaggtttgccaaaactggattcactggctttcagcatagcagctgcatctttcactgcatggtagataacattcttcacctgtaatttatcttcgtgattggtatgagtgtgtgacagatctcggaatacc

SEQ ID NO: 315046 - DNA, 357 bp, Homo Sapiens
gctcaccagctttttacctgcacctactcagctatctcaggaccagcttgaggctgaagaaaaggcaagatcccagagatcacggcagacctcactggtctcctcccgaagagaaccttccccgtacggataccggaaaggctggatacctcggttattagaggattttggagatggaggtgcttttccagagatccatgtggcccagtatccactggatatgggacgaaagaaaaaaatgtcgaatgcgctggccattcaggtggattctgaaggattaaatatgatgcaattgctcgacaaggacagtcgaatgcagatgatccagacctgcaaaggcccgatgaaggctattgg

SEQ ID NO: 315047 - DNA, 2117 bp, Homo Sapiens
  misc_feature (1251)..(1251): n is a, c, g, or t
  misc_feature (1267)..(1267): n is a, c, g, or t
  misc_feature (1288)..(1288): n is a, c, g, or t
  misc_feature (1291)..(1291): n is a, c, g, or t
  misc_feature (1295)..(1295): n is a, c, g, or t
  misc_feature (1298)..(1298): n is a, c, g, or t
  misc_feature (1302)..(1302): n is a, c, g, or t
  misc_feature (1310)..(1310): n is a, c, g, or t
  misc_feature (1315)..(1315): n is a, c, g, or t
  misc_feature (1324)..(1324): n is a, c, g, or t
  misc_feature (1327)..(1327): n is a, c, g, or t
  misc_feature (1330)..(1330): n is a, c, g, or t
  misc_feature (1352)..(1352): n is a, c, g, or t
  misc_feature (1355)..(1355): n is a, c, g, or t
  misc_feature (1395)..(1395): n is a, c, g, or t
  misc_feature (1400)..(1400): n is a, c, g, or t
  misc_feature (1410)..(1410): n is a, c, g, or t
  misc_feature (1414)..(1415): n is a, c, g, or t
  misc_feature (1417)..(1417): n is a, c, g, or t
  misc_feature (1421)..(1421): n is a, c, g, or t
  misc_feature (1423)..(1423): n is a, c, g, or t
  misc_feature (1426)..(1426): n is a, c, g, or t
  misc_feature (1429)..(1429): n is a, c, g, or t
  misc_feature (1432)..(1432): n is a, c, g, or t
  misc_feature (1439)..(1439): n is a, c, g, or t
  misc_feature (1441)..(1441): n is a, c, g, or t
  misc_feature (1474)..(1474): n is a, c, g, or t
  misc_feature (1486)..(1486): n is a, c, g, or t
  misc_feature (1854)..(1854): n is a, c, g, or t
gtctaaatgtttttatttgaaacaaatagttgcaccaagcaagaggttactttgcccactccaaattaaaacagagcacaataggggcaaaatttatttggcaggacagttccagtatgtgaacatcttcctcctcactgtggttggggtaactttactcatatgcagctgttcttacacaaaacattaaccccaaactactagtgtcacataaaagtaagtggtcttgactttgtatgtggggcagcatgttctataaatgctgaaaggtgggagaagcacaaacacaacccactctttaaaaaaaactaaataattcaaagtagaattttctatcccccccatttctccagtaataaaaagtagtgctgggatctggcacccagatttggtttttatcctgaccatttacaaagtgttcccccatatgacttgcatcattagggttatgggtaagagttcattcactttggagagacctgtgcctattccttcctcctcttcttgccttcatgctcgtgttccttggggcggctgctatctgagggtcttttagagccaccatgctgtttggcttcttccaaaaacttgtccaaaccaaaaggatcttcctcaaactgaactggtccttctcggcctctctgtctacggtctgaaccagaaaactccttgtcgggaacaaatctgttggtctttattctggcttctaggtcatcaccatacatgtccttgtccagatttttactgggcctataaatactctgggccatatctttaccacctctccaggcttgatcataaacattataaatttcatcttctccacctgcaaatccactgtccatacccttggattggttgaagagcctttggtcatactgaacttcattggaagtccgaggattaggaacaccgagagcaataacttcactgatatcccgattttcatttctctgaagtttcgacctcttatcaggagctgccctggaaagattccggtcatgctgtctctcttttcgcctgtcatgccggatttcatccctctcacgtgcctccccatcctctttttccacatgagttttgatcccagctcttctttccctggctttctgggccatttctctaagtttctcttcatgtttttccttttctttctgagccatttttctctctacttgtgcacgcatttccacagcttcacgtgccttccgatcagcaatgtagagggcttctgccaatttgtcgaaaatntcatttatgtgtactntctttagtcctcttccatcancanccanacntttntctaatgnaattntataacccngtncanttttccagttagaaatacaagnagnaatcttccactcttgttgttcctttacagtcatctttcgnctagnagaatgcatnacanncncagnantanaanttnttccccntntaattttcttattaatcttgaaccttggaggcnccattggacctntctgcatttctaccatccgaataaccctctgtttagctccagagttgaatgccactccttgctgagatggtgtgtatcggatatactgagcaggagccaatttgtcagctgctcgaactggcatggctgcggcgaccttctgtgatacagatttttctaaggctactcttgtcttttctgttatctctttaatagcttcttcatcgggcctttgcaggtctggatcatctgcattcataacctcctttggaaccaggtcagtgtatttgctataaatgaccttgtcttttgactgtccttgtcgagcaattgcatcatatttaatttttccttcagaatccacctgaatggccagcgcattcgacatntttttctttcgtcccatatccagtggatactgggccacatggatctctggaaaagcacctccatctccaaaatcctctaataaccgaggtatccagcctttccggtatccgtacgggggaggttctcttcgggaggagaccagtgaggtctgccgtgatctctgggatcttgccttttcttcagcctcaagctggtcctgagatagctgagtaggtgcaggtaaaaagctggtgagcgccatcttcttccgcttcttccagcg

SEQ ID NO: 315048 - DNA, 1700 bp, Homo Sapiens
  misc_feature (46)..(46): n is a, c, g, or t
ccttcatgctcgtgtttcttgggggcggctgctatctgagggtctnttagagccacccatgctgttggctttcttccaaaaaacttgtccaaaccaaaaggatctttcttcaaactgaactggtccttctcgccctctctgtctacggtctgaaccagaaaactcctgttcgggaacaaatctaaggaaaaggagaaaaaactatgaactactttgctttcaccagtgtaaacactgaaattgagttgtatggcttggcacctgttggtctttattctggcttctaggtcatcaccatacatgtccttgtccagatttttactgggcctaataaatacttgtgggccatatctttaaccacctctgccaggcttgatcataaacattataaattgtcatccttctccacctgcaaatccactggtccatacccttggattggttgaagagcctttggtcatactgaacttcattggaagtccgaggattaggaacaccgagagcaataacttcactgatatcccgattttcatttctctgaagtttcgacctcttatcaggagctgccctggaaagattccggtcatgctgtctctcttttcgcctgtcatgccggatttcatccctctcacgtgcctccccatcctctttttccacatgagttttgatcccagctcttctttccctggctttctgggccatttctctaagtttctcttcatgtttttccttttctttctgagccatttttctctctacttgggcacgcatttccacagcttcacgagccttccgatcagcaatgtagagggcttctgccaatttggcgaaattttcatttatgtgtactgtctgtagtcctcttccatcagcagccagacgtttgtctaatggaattgtataaccctttgcatttttccagttagaaatacaaggaggaatcttccactcttgttgttcctttacagtcatctttcggctaggagaatgcatgacaggcgcaggaggagaaggtggtccccggggaattttcttattaatcttgaaccttggaggctccattggatctttctgcatttctaccatccgaataaccctctgtttagctccagagttgaatgccactccttgctgagatggtgtgtatcggatatactgagcaggagccaatttgtcagctgctcgaactggcatggctgcggcgaccttctgtgatacagatttttctaaggctactcttgtcttttctgttatctctttaatagcttcttcatcgggcctttgcaggtctggatcatctgcattcataacctcctttggaaccaggtcagtgtatttgctataaatgaccttgtcttttgactgtccttgtcgagcaattgcatcatatttaatttttccttcagaatccacctgaatggccagcgcattcgacatttttttctttcgtcccatatccagtggatactgggccacatggatctctggaaaagcacctccatctccaaaatcctctaataaccgaggtatccagcctttccggtatccgtacgggggaggttctcttcgggaggagaccagtgaggtctgccgtgatctctgggatcttgccttttcttcagcctcaagctggtcctgagatagctgagtaggtgcaggtaaaaagctggtgagcgccatcttcttccgcttcttccccc

SEQ ID NO: 315049 - DNA, 839 bp, Homo Sapiens
aatttgtaataaccccctttggcattttttcccagttaggaaaatcccagggagggaattcttcccactcttggttgttccctttaccagtcatctttcgggctagggagaaatgcatgacagggcgcaggaggagaagggtggtcccccggggaattttcttattaatcttgaaccttggagggctccattggatctttctgcatttctaccatccgaataaccctctgtttagctccagagttgaatgccactccttgctgagatggtgtgtatcggatatactgagcaggagccaatttgtcagctgctcgaactggcatggctgcggcgaccttctgtgatacagatttttctaaggctactcttgtcttttctgttatctctttaatagcttcttcatcgggcctttgcaggtctggatcatctgcattcataacctcctttggaaccaggtcagtgtatttgctataaatgaccttgtcttttgactgtccttgtcgagcaattgcatcatatttaatttttccttcagaatccacctgaatggccagcgcattcgacatttttttctttcgtcccatatccagtggatactgggccacatggatctctggaaaagcacctccatctccaaaatcctctaataaccgaggtatccagcctttccggtatccgtacgggggaggttctcttcgggaggagaccagtgaggtctgccgtgatctctgggatcttgccttttcttcagcctcaagctggtcctgagatagctgagtaggtgcaggtaaaaagctggtgagcgccatcttcttccgcttcttccagcgcgagcgccc

SEQ ID NO: 315050 - DNA, 443 bp, Homo Sapiens; identical to SEQ ID NO: 132951

SEQ ID NO: 315051 - DNA, 482 bp, Homo Sapiens
  misc_feature (431)..(431): n is a, c, g, or t
  misc_feature (464)..(464): n is a, c, g, or t
ataggctgcagtctcaaaaatctttcttttcatcatcagatgtttgcggaagttttggccttctagtgtgaacctggacctttactgtaacttacttgctctttgcattgtactgtgatgatgcctgtaatttccttaaagtggaactgatgaagtgaaagctaaattcatttgttttctaaatttctctaaccattcagaaagtccaaagtcccctgaatgtccaattcattagctaaatacctgagtcaaacccagtgggtacacattccaaacgggtaaccttttcatatgaaggatgactagagagcccttctgaaaaggagcttcactccctgctgagttcagccaccgccgtgtgccatgggaacaagtcactggggacttctaggagggctctgggtttccgtaatggttcccaaggacacaantgtggcacctggggttaggagcctattaagggnccccaggttctgaggttt

SEQ ID NO: 315052 - DNA, 1279 bp, Homo Sapiens
  misc_feature (63)..(63): n is a, c, g, or t
  misc_feature (365)..(373): n is a, c, g, or t
ggggctgggggaaccgggccataccctaaaacaagcaccaaaactgccattccataacacggnttccctgctggggcctagactggcaaaggctggaaagacaccccagctttgaaggaaccactcagacttactggggaataactggaagtcactgtttgatgtaactgggactcactctagaaacgggtccctctgacagttttggcaaagtgctggtagtactgacattaatactcacaaattgatacaaactcctctagggcctcagaaaacatcaatcaaaacagactctctaaccccctcctaaggttgcataggactttgaactctggttccctcatgtattcaagttctgtggtttnnnnnnnnntcctgaagcatgctcaaggtgaaaggcacgtacacagtcaatacagtatgacaagggctgatgcttcaggagtcagactagcaggagactgagtagtgttggttcttagaaatctatacacatttaaaatattgcccacactcaaatgcctacagaatctataggaaaggtacaaaaaaatatgagccttgcaaccaagcaggtgagagattgggttctagaatacaggagcctccagaaatataggtaaacaaaaggccttttaaaatttgagccaaatgccctataacttaaactcttcccccaccagaaggatcatgggcaccacacaggactgagcctaggtcccagctggcagtgaggagtaggcaagaagggttggagggagattcagctcttggaggtgccgaagaccctaggctggctgtgaagtgcccaagtggtagctggaagaataaagcaactaggttctgaaggagaacttgggagaggagcaaggctgtcaactactggggccctagtggactggcgtgggagctttgatccgtttttagtgttaatttggcttattccctggaataggagaccccatcaggtcttcctctgtcctcatcccagcatccatggggataccccatcccttccccacataccccccatgaggcctggggctatagggtcagggagggcagctgcctttgccctcatgggaatgcagagttttctccaagcttcagcttggctgtgaggcctggaaacctagagttggggtgaggggaggacctatgttcataggtaccaagaagtcttaaaagttcctaggaagagtgagcacacactagaaaaggacggctagaaagaggaaatgggaagcaactcagggcatcccaagaggctgttgctggt

SEQ ID NO: 315053 - DNA, 632 bp, Homo Sapiens
  misc_feature (567)..(567): n is a, c, g, or t
aatttttttctcccatagaggaatagcattacagtctaacaatcagaattctgttacacacatacacaggcatgccacatgacccagttgaggtggttgtctccttgagtctgttgacacgtcacatggtcaaagtctcctcatttcagccagtctcaacacaaaacacccaacagggatgcactcaacttgttggttccatgtggaactaggtggcagggcgagagggaaagtagtagaagggggctatggtgtgtctgcattcagtcccctcacataaagccacatgggatctaggggggtatccaagagctctggtgggggtccgtgttgcacctaagacattataggtcagagcaagttgctcagagggttccaggcaggggggctggggagcaggcatactctaaaacagcaccaaactggcattcatacacggtggccctgctggggctagactgggaaaggctggaaagacacccagcttgaaggaaccactcagacttactggggaataactggaagtcactgtttgatgtaactgggactcactctagaaacgggtcnctctgacagttttggcaaagtgctggtagtactgacattaatactcacaaattgatacaaactcc

SEQ ID NO: 315054 - DNA, 376 bp, Homo Sapiens
atcacttctttacttcttttatttcacttctggctttctgtcctcccacgctgaggaagactgatttggtggacatgtatttattctgctgagtaccagttgatgtggaagtagttgttttatagtcaacatgtttttatgactaatgatctgtcttatgacagtttcacctataagaggtatacttatgtctaggtggactccaatgtgtctgtttactgatacttatttattcattattttcaagttgtagaagtgaataacttaagagaataactatttttatgagagaatattgaacatgtgaggagtgaggcctgtctagctcttttcctcatcttccactcctgtggcctcttattaggtacctttctcg

SEQ ID NO: 315055 - DNA, 1001 bp, Homo Sapiens
  misc_feature (32)..(32): n is a, c, g, or t
  misc_feature (185)..(185): n is a, c, g, or t
ccattcccccatgaaaagacattttttccaanaacttaggaaggattccaataaaagtccaactacaattgaggcttatcatgaaacctaaaattcataaactaaactgaagtgaattcagattttcaagccctggaaagcaagcagagggagctcgtgtcagaaggtgactcagaaccgtgttncctggagcatcactctccctgcaaggctgaagcacggggtggggcgggggagaggacgatcggctctgggagactgtgaagtgttttcatcctctgtaaacgtggtgctggtagtgtcttgttgagtgtgaattctctctcatacaagagttataaatattctctattcagaagtctggtccacatgacacccagaggcaatgttcttaagcgcggcggccgggagcacccaagggtgcgagggcccagtctgtgggctctgtgtggcaccattcacagcaagtccatcttgggtctgtagtgcagcaggagcggcgctttcttgaatctccacctagtgacaaccacgaacttgagtgtgtggtccttgcccaggatctcctcgttgcataaaatgtccagctcgttaaagtatgaaaggttgagttttttggcgatgaacttcttcagatgcaagacggtcgcctgggctgagcagcggatccacttccgcttcagcccgcgcagtttgctgctgttacactccaggcagatgctcacctgctcgtcgctgcggtggtagtcgttgtcctcctccggcttctcctccgcggcctctttgtttgaactgtcgtctgctttggtttcaccattccgatgggaatctaagtgctgttttgcagagcaggtctcccccttgatgtctcccggcacctccatgcccaatttgtgatagaactccctctgctttctcatttccgcttcttggaggcctggtaccaatttgtaaacaatatcttgcatggttctgtcatgaccgatgtactgcagggggtg

SEQ ID NO: 315056 - DNA, 414 bp, Homo Sapiens
tttttagtttgcttttaaattaattttttatataacttctaaatcttcaagaagctaaaggcaacataaatattgtcattcaccatgaaaagacattttttcaataacttaggaaggattcaataaaagtccaactacaattgaggcttatcatgaaacctaaaattcataaactaaactgaagtgaattcaggattttcaagacctggcaagcaagcagaggcctggtaccaatttgtaaacaatatcttgcatggttctgtcatgaccgatgtactgcagggggtggctctggtggatcacaatcctgcaggtggggcaggtgttgttctcctccaggtacttcaccaggcagctcctgcagaaggtgtgcagacactcggtcaccgtggtggcgtcgatgaggtacacgcc

SEQ ID NO: 315057 - DNA, 1631 bp, Homo Sapiens
attttgaaagagaaatgagacttttattagctccaagagcatttttcaatactaaggcaaaaagtaaaaagaaggacaaggaaaaccaaggcacaaagaagggacctaggcgcaccccagaactcaccacggacacacagcagagggcttctcttcatatcaagggtatgggtaaacaagaaaggctgctgtttcactgagacaggacgaaccaccaagtccaaatgagaagacaagcagagacgtagtgtcagaccaggagggttagaacttgctagtgtagagggcaataatccacttgggcacacggaggaaggagggcaggtaggaggccagccagcccaggccggacacgtgtgagagaacagagctcaaagacaaatagtcttggacggggcggccgtccacatcccgaaggccatagcgtcgagcaaggtcacaggatggcagcaccttaccactcaggctcaggatattgggatctgttgccaaagccaccacacatttgccactcaattctgtggtttccgcagatgagaaggctgatttgaactgcttcaacacaggatcctgcaggacctcctcctttgccatatgctccttcagcagttctgtctgcacaatccccggccacagagacacacagctgaccccatggcgccgcagctcgtgggcacagtcagcagccagcttgtcacactgtggagaggcggaaggcagggtaagagccacctagccatgtcactttcctgccctgccctctctgcttctactgtgaatgctccacccaccctgtccttcccaggagccccaaggtctcagctgcccacgctccccagtgtgatgcctactttagccaaccaagaggagcacaagcaaaggaactgtccatggatgaggcagaggaggagctgagaggagccagccttaccattctgaccactggggattgtacctcctgagctataggtaacatcactgtcttttacctcctcagctcctatgccactgggtcctcaccgcagctttgcccacaccataggggacattgaacatatactgcaggcttcctgagtccgacgttgttgatatcatcccacatggaggcaggggtttcccagaatgccttattcctggtgttcaggatcgtctggacccctgcataagcattgttgaccagcacatctagacgcccttgctgttcccgatccacttgctcaaacaggttcgcacttcactctcctggcttgaatcgcacaccacaggcacacattggcccccgagggattgtgcctcctgagcaacaacgcgaagggtgtccagatggcggccagtgatgtaaactgtggcgcctgctttgcagagctgcaaggcaatgccacggccaatacccctggaggcaccagtcaccacacacacttggccattcatgggagctgccatgactcacaggcaaaggaggcaggtctgccacctgcgctgccgctgaggtctgcagattgcggggctgcggtggaagtctgggttctcgcccagattgagccggcgacgtggaggcagtgttcaaggattgattctgtagtaggacccggggcgattctgtgctgaggtagaggggcagagatcccggg

SEQ ID NO: 315058 - DNA, 857 bp, Homo Sapiens
gtttccgcagatgagaagctgaatttgaactgcttcaaccccaggatcctgcaggacctccctcctttgccatatgctccttcagcagttctgtctgcacaatccccggccacagagacacacagctgacccccatggcgccgcagctcgtgggcaccagtcagcagccagcttgtcacacgcagcttttgcccacaccataggggacattgaacatatactgcaggcttcctggggaggagatgaccacgatgagcccctggccagctggtaccatcagccgtgccccatacactgagcaaaagtagtggcctctgagtccgacgttgttgatatcatcccacatggaggcaggggtttcccagaatgccttattcctggtgttcaggatcgtctggacccctgcataagcattgttgaccagcacatctagacgcccttgctgttcccgatccacttgctcaaacaggcttcgcacttcactctcctggcttgaatcgcacaccacaggcacacattggcccccgagggattgtgcctcctgagcaacaacgcgaagggtgtccagatggcggccagtgatgtaaactgtggcgcctgctttgcagagctgcaaggcaatgccacggccaatacccctggaggcaccagtcaccacacacacttggccattcatgggagctgccatgactcacaggcaaaggaggcaggtctgccacctgcgctgccgctgaggtctgcagattgcggggctgcggtggaagtctgggttctcgcccagattgagccggcgacgtggaggcagtgttcaaggattgattctgtagtaggacccggggcgattctgtgctgagccc

SEQ ID NO: 315059 - DNA, 1866 bp, Homo Sapiens
  misc_feature (55)..(160): n is a, c, g, or t
  misc_feature (1558)..(1558): n is a, c, g, or t
  misc_feature (1807)..(1807): n is a, c, g, or t
gggattacaggctcatgccaccatgcccagctaatttttgtattattattattgnnnnnnnnnnnnnnnnnnnnnnnnnnnnnnnnnnnnnnnnnnnnnnnnnnnnnnnnnnnnnnnnnnnnnnnnnnnnnnnnnnnnnnnnnnnnnnnnnnnnnnnnnnatgagctaccacacctggtttggagagtcttaattaaggaaatttccctaatgttcatttattttctaaatccagaccgtgtttcagaataatccttacttgagagtagccattttcttgcctgtacttgtcagaactagaggaaatagccaagactaatgaaaaagattactctaacccttaaaagacttttaaattcactactagagtggtcattttaaaaatacatccatgttttaacttatttgagccttctttatgagtaaatgattcctccttgttctgtctttcaaaccagctaaatatttgtcacaaaagtgcttttttctcactgttgcctattttcatatatcaggttttaaatagttttaattttttaataaaattttctctacgttctatatgcaattgttatatatctatttgaatagctgaaggactaaaatacttttttaagagataacttcaggaaaccattatattttactatctgcatgctgttaactgtggtacactgtgaaatatgttgattacaaacccattcattacatagtataaggaattcacagtatattgactatatagtgtctaatgatcttgggcagatactgtcaaacttacaatatctatatagatgtaggtctttttaaatttacctagtcattcttctatcatgtatattgatgctgaaagaggaactggtcagctcctctggacaacaaattcttagtctataatattaggagacatcttctgttttgcaaatgtctgtgaatctgagcaacctggcattctgcttactggccagaaagctggcgggtgacatttgtaacatttcctctttgagactctgagttcacctagagaagtctaagcataacagctttctttcccagcacgagcctttatagctctctttagctcaaccactctgtccatccagccaatggatgtcccttcccctgtaccccaatttcaagcttattttaggaagccttgaactaccatgtatcctggctcctagctgagtttattagaggtatggagcagtgcaacttaaactcaagttgcacttacattttgaattttaaaatgatggttttatctgttgtgtgaagtggttcacccttgaggaccaggagcctccatatcctgactgaaaaccttttctgagacttagagtaacagtacttttggttccttgagttctcctgtctccagataccaaatgaccttgacttttctgccttgtgaattcgtagtccaatcagctgaaattaaatcacttgggagggacgcatagaaggagctctaggaacacagtgccagtgcagaagtttctccaggtggcctccctttccaacaatgtacataataaagtgtatgcactttcacccngggaaaccaatcacaccgagattgtataaatgtggggccgcctgcggccttcgagaagcttcctagaccctttgttttggccgcggtgggcccagtaaggtaaatggaacatggtttataaccttgtttcccaaagagaaatcctgggcacaggattaaggggtttggaattcccccccaaataaaaaaagcgccccgggcggttcatcccgagccgttcttgtaaaaacaattcccgagatgggcggntttcttggaggtgcactctcaccggggcattctctttcacccgcgagaatttccccgga

SEQ ID NO: 315060 - DNA, 477 bp, Homo Sapiens
tattagtgaaagtgcatacactttattatgtacattgttggaaagggaggccacctggagaaacttctgcactggcactgtgttcctagagctccttctatgcgtccctcccaagtgatttaatttcagctgattggactacgaattcacaaggcagaaaagtcaaggtcatttggtatctggagacaggagaactcaaggaaccaaaagtactgttactctaagtctcagaaaaggttttcagtcaggatatggaggctcctgggtcctcaagggtgaaccacttcacacaacagataaaaccatcattttaaaattcaaaatgtaagtgcaacttgagtttaaggttgcactgctccatacctctaataaactcagctagggagccgggggtacatgggtaggttcaagggcttccctaaaataaggcttggaaattggggggtacagggggaagggggacatcccttgggctgg

SEQ ID NO: 315061 - DNA, 467 bp, Homo Sapiens
tattagtgaaagtgcatacactttattatgtacattgttggaaagggaggccacctggagaaacttctgcactggcactgtgttcctagagctccttctatgcgtccctcccaagtgatttaatttcagctgattggactacgaattcacaaggcagaaaagtcaaggtcatttggtatctggagacaggagaactcaaggaaccaaaagtactgttactctaagtctcagaaaaggttttcagtcaggatatggaggctcctggtcctcaagggtgaaccacttcacacaacagataaaaccatcattttaaaatttcaaaatgtaagtggcaacttggagttttaagttggcactggctccataacctctaaattaaactccagcttagggagccagggatacatgggttagttcaagggccttcctaaaattaaggcttggaaattggggggtacagggggaaa

SEQ ID NO: 315062 - DNA, 1364 bp, Homo Sapiens
tttttaagagtgttttcagtattttattaacaaatgagctggcaagaggacaagtgatctagtagtatcacccccaccctcatggagcagccaccacaagcccaccatggtggggggtgtccaacatgctctgctggcccagttcccagccgatcccctgagtcttggcgcccgtttagtcacccttcagctgcttgggaggcaggaagagacttcccctcttcacgaggtaagggagacaaaagcagccatttggatgccagggccacaggggcaagccatgccctatttctttggagggacagaatcacttcttcccaaggccagacactgtagcccatggtactcagccttctagaggagggtagcctagcagaggagaagccctgagtggaagcagcattttgaaggcatcgtcattcttagaccagctaagagctgagggcattctctatctttgccagcagacagtgagactccaagattaaaattaaaagcccgtggtgcatcctttccttgacattaactttccacaaaaccttggaggagtcaaatcccacactgcacatactccggtgtctccagctgtgaagtgggaccagtatccaatacatgggaaagtgcctgagaaggaagaaaatatttcaggtataatactaatccatcaaacacgttttattcaagaagcttggcaccaactttgtgccacatcctcaactcttcaatgaaaagagcggtgaccaactcgctcccgttggtccctatggcaggtgttggaatgaggtgaggctggcctcctctgtttgctcacagctttattcctctagcttcagataaaaataattataataggcaataaagtctcttcacagtgtatttactgtaactacaacagctcgcaagacacattctttttctgcagaattgtagcgggtacttagggagtttgccgaccagaccttctgcacaggaagctggcttgcatcatggaggcagtggactcctgatagtcccgcctgcgcaggcccctttaagacactgacacaaaagactgcccagagtggcatttgctgctgaggctccagggcaaaaaccccatgaacaggaaagcatcctctcagaaacagataatccgcttctcatcttcatagactttggcctcctctggttttatcaggtttccatttaggcaaatctctgttatgccagtgttgctctgtaacgcatctgccagctgggcagtccccttagctgtgatctgattctggataagcctgaaagaagacataacttgtataaaatccataatactggatcacttgtcctcttgccagctcattttttaataaaatactgaaaacact

SEQ ID NO: 315063 - DNA, 568 bp, Homo Sapiens
tctttgctttgtagaagctgttttaactctgcagcattaatactcatcgtccgtgatgtatgagctccctctacttccatgagaccattatcatctccacagcatccaattgtgtcagagttaagaatttgtctcataaattctaaaaatgaagatgcaagctctcctgtgtccttactaaatgtgctgaccactcgtttcagtaaactatgcagagcactactgtttttccttaaagaactttttaaatgaaataatccataatcatgctctgcaagaaacatcattgttctgacacatgtcagtaaacagttgtaactgctctcagagttagctagcgtagccaacagacagtcacagattgaggtcatcaattctttatttggtagagaattggagagctgctccagttcagaaatagaaccttcagaagagcttggtaagataagtgcaatgtcctgatcacagagagactgcaaaatggatgtgacatattcaacacactgttggcgaataacactgtctccaggagaccgcaccaaagctaaaagatcctggaatatctctg

SEQ ID NO: 315064 - DNA, 381 bp, Homo Sapiens
  misc_feature (21)..(21): n is a, c, g, or t
cacatggcaagctcacagccnccgccaaaggcaagccagacagcagcgatgactggcttcttgacctgggtgaggtggtcccagtgcttcaagaacttgctggagtaacagtcctggaaactcaggttctgcaccttgatatcagctccagctgcaaaggccttatccccgccggtgaggacaatggcccccacggccgggtcctcctcgaagatcttcagggcctggttgagctcgtcaatcaggccatcgcaaagtgcattgagttctgcgatgatgtactcaaagttagcacccgaggcgaagggacgccaggcgggacagcgaaccgggggcctcagcgggccgcgggcgcaggacagcaggacacgcagggcggcc

SEQ ID NO: 315065 - DNA, 1321 bp, Homo Sapiens
ttgtaatctgaatcgctatcactttaatcagcatctgtatgaaggcagcagacagcgtttccctcagagcagccccattcttcagcggcagggacacaaggacccacaggccccgctttccgtccgagcacagcatgcccagagggaccagcgggggctcctcagcagaatcttagatttagaaggtgctccagtcaggaccctcacaggctgggtgacgaaggctgtcatgccgtgagaggtcgggccacgaccacgcagcaattggagaggaactgcacaccacggacactgctcttgaaaagaggatgatttacttgcttctaaaactgacaggctgcacttgtcctctccaagcagaggtgtgaagcaggggcagctggttctcactggtctttgaagttggcctttctcttttccacaaacgcggtcatcccttctttccggtcatcagtggcaaaggttgaataaaagagtttcttctccaacttacttccttctgttaatgtcatttcaaaagctgcattcactgattctttggccatcgctactacaattttagaattgctggcaattttttctgcacactggatggcttcttccaccagtgtctcaacaggacaaatcttgctgacaagacctgcttgcttggcgtcctgggctgagatccggtcaccggtgaggaccatctccatcgccagcgacttcccaacagcacgggtgagtctctgggtgccgcccgcacctgggatggttcctattaagatctccggctgtgcaaactgggccttctcaccggcatagatgatatcacacatcatggcaagctcacagcccccgccaaaggcatagccattgacagcagcgatgactggcttcttgacctgggtgaggtggtcccagtgcttcaagaacttgctggagtaacagtcctggaaactcaggttctgcatttccttgatatcagctccagctgcaaaggccttatccccgccggtgaggacaatggcccccacggccgggtcctcctcgaaggtcttcagggcctggttgagctcgtcaatcaggccatcgcaaagtgcattgagggccttggggcggttcagttggatcaaccccacggtgttattcttccctcttttttctgcgatgatgtactcaaagttagcacccgaggcgaagggacgccaggcgggacagcgaaccgggggcctcagcgggccgcgggcgcaggacagcaggacacgcagggcggccatggctctctggactcctcgcccggccccgcggagccgccccctcgcctatagcctttcagggc

SEQ ID NO: 315066 - DNA, 409 bp, Homo Sapiens
  misc_feature (15)..(15): n is a, c, g, or t
  misc_feature (26)..(26): n is a, c, g, or t
  misc_feature (42)..(42): n is a, c, g, or t
  misc_feature (60)..(60): n is a, c, g, or t
aactggccttctttnaccctgggttnaagttggtccccaatncttcaaaaaacttgctgnaattaaaatccctggaaactcaggttctgcatttccttgatatcagctcccagctgcaaaggccttatccccgccggtgaggacaaatgcccccacggccgggtcctcctcgaagatcttcagggcctggttgagctcgtcaatcaggccatcgcaaagtgcattgagggccttggggcggttcagttggatcaaccccacggtgttattcttccctcttttttctgcgatgatgtactcaaagttagcacccgaggcgaagggacgccaggcgggacagcgaaccggggcctcagcgggccgcggacgcaggacagcaggacaccagggcggccatggctctctggac

SEQ ID NO: 315067 - DNA, 839 bp, Homo Sapiens
  misc_feature (448)..(448): n is a, c, g, or t
  misc_feature (606)..(606): n is a, c, g, or t
  misc_feature (617)..(617): n is a, c, g, or t
  misc_feature (626)..(626): n is a, c, g, or t
  misc_feature (673)..(673): n is a, c, g, or t
  misc_feature (675)..(675): n is a, c, g, or t
  misc_feature (704)..(704): n is a, c, g, or t
  misc_feature (706)..(706): n is a, c, g, or t
  misc_feature (803)..(803): n is a, c, g, or t
  misc_feature (817)..(817): n is a, c, g, or t
gccaccttccacccctgcgctgtgctgaccccagggctcagcaccaggctgaccccaccgcctcttccccgatccctggactccgactccctggctttggcattcagtgagacgccctgcacacacagaaagccaaagcgaacggtgctcccagatcccgcagcctctggagagagctgacggcagatgaaattaccagggcggggcacccgcgagaaccctctgcgaccttccgcggccctctctgcacacatcctcaagtgaccccgcacggcgagacgcgacaggcggcagggcgacccagcgtgcggcaccgcggctccagtccttggaaataattaggcaaattctaaaggtctcggagcacagtaaaccgaggaggacataggccttttcagatgagactctgcttacgagaagatccaaagataaagctctgtagtcaggntaggtgccgaaggcaggctacctctggcttaattcttttaagccacgtaggaactttcttgagggataggtggaccctgacatccctgtgtgccttgcccaagggctctgctggtctttctgagtcacagcttcgaggtgatgggggctggggcaggncgttcactccncagaggacnagctgagccccctgccttggctccaggttggtagaagcagccgaagntncctgacagtggccagggacccctgggccncnagggccttgcagatgtttctattgaggggcagactcctgggtacatccatgtgtggctctgcttccacccctgttgccaccccagagccctggggtngttggttttccatngcctggccaccttggattcggt

SEQ ID NO: 315068 - DNA, 411 bp, Homo Sapiens
gaaagtgtgagttacatctgcttaatttaggctgtgaattcagtctaagttcagttcatgtatatacatagtgggcagtactgcttctgttatttatatgccattcttttggtcgatagccctcgattagaagacatctcactggctgtggataaggtatatatcattatcgcactcgtaatggactaagaatttatagataaagtctctgtagcattaaaggattaatatgtttttacattgtgattaggcgtagtacttagatgcacccatatcggattagctgtaaggatgcatgcagttaatgtcactaatgaggagggaggtacttgcctggcaacagtgacccgtacaaacgaaggactgagacgagatggaggtgtctcaattgtgaactcatagaacagtcgt

SEQ ID NO: 315069 - DNA, 404 bp, Homo Sapiens
cagcagtggcaggtgtacactgagccctggttgctggccccggccggtcacattgactgatggccaccgcctgacgaatcgagtgcctgtgtgtctacctctctgaagcctgagcaccatgattcccacagccaggtcttggctccaagatgagcacccacaggaagccgacccaggcctgaggggccaggaacttgctgggtcagatctgtgtggccagccctgtccacaccatgcctctcctgcactggagagcagtgctggcccagcccctgcggcttaggcttcatctgcttgcacattgcctgtcccagagcccctgtgggtccacaagcccctgtcctcttccttcatatgagattcttgtctgccctcatatcacgctgtcccacggtgctgctgtg

SEQ ID NO: 315070 - DNA, 420 bp, Homo Sapiens
gaacagtggtaatagtagtcatattgtgcaggttgaggagccatgaaccgtcactagacactctttcagatttgagctcttttgccttcacaagggcatcatagtatttgtcagcacactccgggattatgtcatttgcattagaagtggaagacttcaatacagacaaaatatcacttgatttttttccttccaaacactgattaacatcaaccaccagagtaacccattgttttgctctgtcctcgtccacgttggcctcatcgacggcttgctgtatctcatccagccaaagcactttggaaacactctcagagtctccgagtttctgtgatttagcatggtataaaacatcctggtagtgctgggcatgggctgggtccacatcactaatattcgcagtaggtaggagcaaagttt

SEQ ID NO: 315071 - DNA, 2264 bp, Homo Sapiens
  misc_feature (63)..(63): n is a, c, g, or t
  misc_feature (333)..(345): n is a, c, g, or t
  misc_feature (380)..(390): n is a, c, g, or t
  misc_feature (527)..(527): n is a, c, g, or t
  misc_feature (535)..(538): n is a, c, g, or t
  misc_feature (544)..(544): n is a, c, g, or t
  misc_feature (548)..(638): n is a, c, g, or t
ccccccaccgccgtgtatccgtctccggggcgcgaatattctgtatattcctcacaggggcanaacaaagtcgcggttatagcacgggcgtgttccacatgtagggggcggagcacctggtcccagttttattatttggggttttctcattttccagaggaaagagcgcccgagaagcgagctcttaaaacaatttttcttccgaaaatattttcccacagggctcgcggcgcgttaaattttctcttatatgagggctcccccccgcgggcctcccctcttgggataaagagtcccggaaaaacggcccctcgagaaaaccctccagtttgnnnnnnnnnnnnnagaaaacgatatcccgctgccctccccgggggggnnnnnnnnnnngggggaggatacccaggcctttagtttctttcccggtttctctcttggggcacccggctacgaaccaaatttcgttttaccctatttggggccgggggccccaaaagaaatggttttgaaaagtttttcgttggggnggtggttnnnncccaantttnnnnnnnnnnnnnnnnnnnnnnnnnnnnnnnnnnnnnnnnnnnnnnnnnnnnnnnnnnnnnnnnnnnnnnnnnnnnnnnnnnnnnnnnnnngagatttaccaaaaactgtttattgcgacttccactggaagctgttaataagccacatggcagccaagagccaggtgtgacctagatcagctggatgcaagtgcctgtcccttcatccacacaacctgctgctcggggaccctgctaggatgcgcttgctggcaaactggctaaaacccaacagggagaaatgatgctactgctcatcatttccacctccccacatcccatgtccaagacaatacaggaaaatgccacaagtacccctccaaaataaacccgcctgcgtctgtctgtcctactgaggagccaggagtgtcctacggctctgcagcaaaccagagacccagcaccagcgaggcaccagtcccttgctcgctgttccagtgacctcccctgcagagaccccagcctcaccggtgtactcagtcagctccacaatgcaggaaaagtgggaagccacactcaaggaagcgcagggtttctgattggagctgtagttggtcccaggggacctggcagagccccaacagctgtagccctcatcaactcttctggaagacacggtgcaggctttgggccaggatgtctgtctcctcgtagccttcacagctttgctgccagctctctggcacctgatccatcccatagtaggcaccagcaatggccccagccatggtggcaatggtgtctgtgtccccaccaagtgagatggaataaatgagagtcctttggaggctattgaaggcagaagggatctcagggtctggctccatgcagcgtaggaagcagtagatggcggtgggtaccgactcaaaggcagcaatgccattccctagctcagacaccacttcctccctggtcaccgatgcctggtctagaagctctccaatcttcttcaggcggctggagtatggacgctcctccatgcccaactccctggcatccaagacggactgggcatcaccctccagatcctccatgtggcccaggagttgcttgagaaagtgctcgctggaagactcgccctgcaaggccaggtgcacagccagggcctgcaggatggcgccattgtaacccagggaggaggcgtgtgtcagctgggccgagagccgggcaaacttctgcacatcctggacactgctataggccagggagatgccagccacccgcatggcacctccattgccataggagcctttcccgttaaactgggcccgggcaggctcaaagacatcgcgacatttggggttcaggagcttcttgaagacagtgactactccagcaccatagcccctgtcagggtctttcttgtactcctgagcaaatctgtgagccatgtccacctcgtcaaaggcctccttggctagcagggactgcaccagggccctggccatggctgtgtcatctgtgtagtacaaggcttctgtccgctcactcccgggcgtgccggggtccggctccagactctggacatgacgcaggactgacgtcaggtcgacggtgtcgtgggcctcgtagaaggagcccacgcagtccccgagcagcgcgccagccaggcagcctcggaagcgcgagagggagcgggccgcgccagcccctccacctgccgctgccgccatcgcc

SEQ ID NO: 315072 - DNA, 1931 bp, Homo Sapiens
  misc_feature (51)..(51): n is a, c, g, or t
tggctgtcaagtcaactgaaagcaaacgcgttccggttcttcaatcctccnatctcccatgatgtcgaaaaacactctcccactcccttgtctgtgcaacgtttgatatgctcagaggtgaagtgtggcagctgcttcaggtatgagtccttggaccacatggcttgggtgaccatctgggccagttccatagctgccagagcagggctgagccacccattgctggaaaggacatccacgcaggcctggatgagccggattgccttactaaggatttcctccgtatctgactgcaactcagcactcagctgcatgcgagacaagtgagcctgcaggagcaggttggtcttgacgtgcggatcattgaacttagggttattcagcttgtgggggaccttctgagccaactgcctcaggagattgtcttcatggtgccggatgggaatgttctcatactctgctgcattggagatgatctcgataagccctcgcaccttggtcttggcattgagggacatgctgaagagctcaatggtggtgtagttgatgtaatagtaggcggcgatcatgcctaggttcagaggcgccacgtccatctcgtcctcgatgctgatgcacttggactgctccaggtcactcagggtctgctccaccagctctgacaagtggtccgacaagtgacgatgggagatgccctgcaagttgtagtaattggggttctgtgtcatgcggcggtacagaaaggtccaggtgaggtagtccacagcatcctgcttgttctcaatggtcttggtgacgatctcagcattgaagtggtcatgcatacagtggtccaggtgagattctactggcaatggctcatataagaacttcttgaagaaatccttcttggagccctgacacatgatgacacagcgcccctcatcgtcctgcaaagggcggttggcgtggcccaccatctgaagcacgtcatagatggggtaatccacataggcgtggatcttgccattgtagtactgggtatccatgatgattaccaggtgggcagccacgttcatgccccagcagagactccgagaagccaccaccacctggatagcccctgagctgaagagctgctccaccaggcgtcgctccatggggctgagccctcatgcaggtagcccaccccatttagcagcgtttccttgagcgtgctgtcacttagcttctccaggtacggaatcagatccttctcggtgcagtgcaagaacctctgccgttggatgtctgctgcacaggtggtgaggatgtcaatggcagtgaggcgggtctgcttgcgagacggcacaaagacaatgacaggcttcttgggcgagtgcttggtgatagcatggtacacaggcttggccatggagagcaggcgggtttgtgtatggctgatgttgaagccctggatgtgcagctccaaggggacgggacgcacattgggatggaagttgaaggtggaggtggcactgcagcccagccagtgggccacatccttggcattggagagcgaagagctgagtgccacaatgcgaatgggccgctcaatctgggaggagatgtagcgcattcgggagcagatcacttctaagacaggcccattctcgcccccgataaggtggacctcatccaccacgaagaggttgatgttctgcacgttcttgcgctgcttccatcgccgggaaagtatgtcccacttctcaggggtgctgatgataatgttccctttgcccagcagcttcaggtctgtgctggtctcgcctgtcaggagtaccaccttcttgttgagcctgtcctggaacttctcgtaccagtccatgtatacctgctctgccagggcctccatgggggtgatgtacacacagcgcccctccgagctctgcagcagcattcgcaggatggca

SEQ ID NO: 315073 - DNA, 1064 bp, Homo Sapiens
ctggtttttttctacaaattattttattagaatgtcagactcaaaagaactaccaggaacatgcctgaaaatgctatatatgatttatgcttgacccatgacacctgctgtcactggatccagagtgagcaagggaaaggaagtggaggtaggcggggacagcaccagccctggctggccagacctgaggcccacagacctggtccccacaaccaggattcctacaatgtacacattcctaattcaggctcaactctcctttacccaaaagtaaatgcctcaggactcaatctgaatcactgtctgtctcagcttctttcacatccacgctgaatttgtactcctggtcacatcccatgtaagcgtcactcatgaagtacagagtgtagttgtgggcaccagtggctggggccacaaagtccaacttcaccttggccttctgctgcaaggtcagcctcttgatggagatgaggctattggacttggcatctccaatcaccacccaccagccctcttcacgtttctgcgggaagagaggcgcaatgacagggcctgtgacttcctcctctcgctccagctgcaccagcaccacaactggcccgccactgcggatgctgtccttatctaccacctcataagatagttcgatattagggtagcggttacaaaagcgagccacatctgcaatctggctgtcagtcagctgaagcaacgcgttccgttcttcatcctccatctccatgatgtcgaaaacactctccactcccttgtctgtgcaacgtttgatatgctcagaggtgaagtgtggcagctgcttcaggtatgagtccttggaccacatggcttgggtgaccatctgggccagttccatagctgccagagcagggctgagccacccattgctggaaaggacatccacgcaggcctggatgagccggattgccttactaaggatttcctccgtatctgactgcaactcagcactcagctgcatgcgagacaagtgagcctgcaggagcaggttggtcttgacgtgcggatcattgaacttagggttattcagc

SEQ ID NO: 315074 - DNA, 1794 bp, Homo Sapiens
  misc_feature (418)..(426): n is a, c, g, or t
  misc_feature (1253)..(1262): n is a, c, g, or t
  misc_feature (1322)..(1322): n is a, c, g, or t
  misc_feature (1350)..(1350): n is a, c, g, or t
ttttttaatttttccaaagaatttgtggatcttggtataaagtcattggaacatatctgttttaacagcaagagatcctaggcagatacttcaaaaggttaaaaattcttaatcctacagaattttaaatgaatcttatcaatgttttgtaaacaaacaatatgaatggccaaaaaattgccctccattttactggcaggtaatttatattgtcttacttaagaattctcccctagtttttcaattgtactttatcgtgttgttttcaatgagataagtattttcatagggaaagcattttccagcataatatttgcttgggtagcatccgggttttagtatttaaccaagagccttttaaatattgaaaacccatagttcagaaaatgttagtattgctgcccttcttcacataaannnnnnnnnaaattatactattattttgcttaattttatattgggttaaaacaaccttcaagaaggttaactaggaaagaagacctttttgttttatttttactatttatatatagaagacaaatcagcatttggtgatagttttacatgaccagttatcaaacggtcatagtatgaagtgtgcagttgttcattattagtaaattatgtttgatttttaaactatttagtactaatagttgagatgaaaactgaagaaaaatgccaatgtgacgtttgtgtatagctagccttaaaaaacttcccatgtttttaggtgacttttttccccctcttagtactctggagaaacaatgaagatgggccatctcaattccagatgtaaacaaaaagtagtttttatttcaacatttaatgtaactgctattattgtggattcttgtcttgtgtattttctttcccttattcaagtaatatagaataactttccttaaaatgatttgatccaagatacgtcatttctgtattggcaaaatgccactattaaagtgtaattcttgaatttaggttgaattgatgactttttaaaacaaaacaaacactggacagttctacattgtattgcgtttgcgaatgtgcgtgaacacacgcacacgtgcaggagaatgtagtgccataagaacactggcgctttttaaaactttccaagctagctacttattttcattttcagggttgagtactctaagctctctacttactgtgagaagttttctacattgtaaaattaaaagattatatttaaaatacttctttaggatgttattcagccatcnnnnnnnnnnccaactaaaatgtcttaccagtaaagtattattaaaagcctcatttgtggagattcgctnacttccttggttaagctgtcttgtattnacttaatttgtcccctcaaccaggtgttttcttttcagcctgttactgtcctgtgccatttttaaaaatagccatccatgagtaggggcttctttaaaataatccctgacaatatctttggcattaatacgacataaagacaagacagtatatgtatgttttcattcctgttttgtacgagtgcctcattttgtagtcatgaaagtaacatagtaccttaaataaaaatgtaatgactaatctaaggtctaggaataactattgtagaagctaagtagaacacttagtttggggtgtcaattttctatcaacgcaaacaccttagggtacccagaccaattttatgtatatatattctgaaatgctccctttttaatgtggtcatttgttgccttctaagttgagaggacaaaactgaataaagtgaatgttaattgtagtcta

SEQ ID NO: 315075 - DNA, 532 bp, Homo Sapiens
  misc_feature (385)..(385): n is a, c, g, or t
  misc_feature (415)..(415): n is a, c, g, or t
  misc_feature (456)..(456): n is a, c, g, or t
  misc_feature (466)..(466): n is a, c, g, or t
  misc_feature (472)..(472): n is a, c, g, or t
  misc_feature (497)..(497): n is a, c, g, or t
  misc_feature (509)..(509): n is a, c, g, or t
  misc_feature (519)..(519): n is a, c, g, or t
agttttgtcctctcaacttagaaggcaacaaatgaccacattaaaaagggagcatttcagaatatatatacataaaattggtctgggtaccctaaggtgtttgcgttgatagaaaattgacaccccaaactaagtgttctacttagcttctacaatagttattcctagaccttagattagtcattacatttttatttaaggtactatgttactttcatgactacaaaatgaggcactcgtacaaaacaggaatgaaaacatacatatactgtcttgtctttatgtcgtattaatgccaaaggatattgtcaggggattattttaaaggaaggcccttactcatggatgggctatttttaaaaatggggccccagggacagtaacnggggttgaaaaggaaaacccccgggttgangggggccaatttaaggtaaataccagggcaggtttaacccnggggaggtcnggcggntctcccccaatggggggtttttaanaatacctttacnggggtgggcnttttaggtggggg

SEQ ID NO: 315076 - DNA, 771 bp, Homo Sapiens
  misc_feature (6)..(7): n is a, c, g, or t
  misc_feature (21)..(21): n is a, c, g, or t
  misc_feature (32)..(32): n is a, c, g, or t
  misc_feature (37)..(37): n is a, c, g, or t
  misc_feature (42)..(42): n is a, c, g, or t
  misc_feature (49)..(49): n is a, c, g, or t
  misc_feature (54)..(54): n is a, c, g, or t
  misc_feature (66)..(66): n is a, c, g, or t
  misc_feature (102)..(102): n is a, c, g, or t
  misc_feature (114)..(114): n is a, c, g, or t
  misc_feature (124)..(125): n is a, c, g, or t
  misc_feature (130)..(130): n is a, c, g, or t
ggtgtnnttggcctgaacccnaggaagcgggncttcncacancaacagngcacntcagatactacnacacgctcacctgcgatttgccagcgtcggggcagntggcatgcaganttcatagccnngatcnctcagacatgaacatggtctctggcggcgatatggcaaggagcccagcgctgtggtcaggttgatggaggagatggcagggtgcaccatgaacttaagcagctgctccaaggctgccttgccctcttcccatagcacgttgtactggatgtaggggtggtcacgagggatgcggtccaggctgatatcatgctcctggcgtcggggtatctctgagtcagccatgcggggtgacagggtgacaatgaggccctccacaaacttgatggcgtgggtgcggatgccgtcagtcagagtccaatagcaggatgatgtcccccgccatggcagataccatgtcccagcaggcctcctgtagctcgctaatgacccgtgacaccatccactgcagggccaccttgtagagctgggtcatggtgaggatagccttcttcaccacgttcacattctcgtccctcaagagcatgttgaggtttgcaatgagtttcagccgcacttcgattgacttgtctgcttggaatgcgatgatctcatccaggaagttgtccagtagtgtggggtctttgttgatgatcagctcctggacctgtttgagcactgtgatctttgagtcattggtgatcagcgccgcctggttcagaa

SEQ ID NO: 315077 - DNA, 379 bp, Homo Sapiens
agccacactactcaagtgcctgaaatacccctcattgtcttcttcaggtggcaagggctctggaacagccacataaaggtgagggcaatatttttactgtagttctttcattgattggttgattgatttttttctcttagagggttagcatacatttatctgaaattgaaattcaagaggagagacaggcacctgtactagttttctcttgctgcctattatcacattaccacaaaccagtggtttgaaaccacagaagtctggaatgaagtggccgggttctctgatcagagtcatgtgaggctcaggttcactacagataatggagttcctattcttgtttgtggggggctggggccctttttctgtgctggctgtc

SEQ ID NO: 315078 - DNA, 903 bp, Homo Sapiens
  misc_feature (19)..(19): n is a, c, g, or t
  misc_feature (96)..(96): n is a, c, g, or t
  misc_feature (110)..(110): n is a, c, g, or t
  misc_feature (803)..(803): n is a, c, g, or t
agaacatcctctcaagttncctcaggttgtcagctgagttcagttccttgtgactgtaggactgagatctctgttttcttgctggctgtcagcggnggcctctcgctgcncctagaggcctcccatgttcccactgcatgcttcctccagccagcagaggaggatcgccctgcatggaaaccctcctgcacttcacatctctccaggaagtcctcagtccctccaaggaactcacgttcactaggtcaagctcatcagataatctgtctatcttaaattggaccgatttgggatctcgattacatctgttaacttgtttttgccataaattgtaacacaatcacaggagtgacatctcctcagtagctttgtctacactctggaggaagtgattatatatgagcacagatcactgggggtcatcttaggattctgtgtaccataatattataaagacacagttattaaaagagtataacagatttctgcttctgtctgttagaataaatcatatcagactaaccctgcctgcatatacaaacgtttgttttcagcagtgtacaacaggcagtccaagaggcagctgcatattgagctagagtccactcagggcagggcagctcactgagctgagaaagcagagatcagagttcaagacagctgaagcaactgcaatctgcagggcagggcaccagtgaggagacagctgatcaaaggtgcagctctcatagtctatgtggggttgcatgtgcatacttatcaaggagtggactctacctgcacaagggaaagactaacagatntaacacaggaggtggctgctatgttgagtttggaccacaggtacttgatgtggaggaggagtggggaatgtatattggagtttctgcctccatggtgggg

SEQ ID NO: 315079 - DNA, 1706 bp, Homo Sapiens
  misc_feature (17)..(17): n is a, c, g, or t
aaatttgtgacctgctntattgtggtagtctggaagcaaaccctacagcatctgaggtatgcctgtccagtccctgttcccacagaatgtgaatggatgctagacattcacttagtattccgaggaaacaagatgggtttggcacctgagctgaagccatgctggctccagagcgatagaacattctttcccactatctcccaggaggctgaataacggcatcctactgtgtctaggcaatcactaagctcactggacttgatttctccgttaaaactgctctgggatctcacaagctccccatctgtctggggttcaacaccctttttgtcctcccctatcctctccaatttgcacaaaggacacaggacacaggctggcttactattcaaagtttactgacctccccagccaggcaggccaacccttccgagcaggggaaatgtccatctagctgccctctgctgggttgcagcctatgccatgagagggtactggaagcaggagggagccctggctagggcaggccttaaacgcaagggaagctgagcagagatctgcacactcaaccccatttgatattcttctcctcctcagtcatggccagcgtgttggtgactagaccggtgccaatagtccggttgccatctcgcagggtgaaacgctggcctttctctaagatcattggctgccgcaagattaggttgaacttcaggtcctccccgggcatggcaagctccttctctgggggcaggataatccgacaggccatgtcccaagtcagggagaacatgacaggcatgaagtgggacacaaagggcttgtggcggccaccttcctccttgctgaggatgtaaacctgggcctccaccttctggtggggcttgatggaacctggcttgaccatgaccaggccccgccgcaagtcctcccgcttcaagcctcggaccagggccccgaggttatctccggcctcggccctctccaggctcttgtggaacatctcaatgcctgtcaccacagtgcggatgttcttgctatgtcctaggagctcacactcgtctcccttctttaaaatgccacgctctagtgtacctgtcaccacggtgccacggccagggacggagtacaccgcctccacaggcagcaggaaaggcttctccaggtcccgggcgggcactgggatgtaagtgtccacagcatccagtagcttctgcacagacttcaggcctaactcagggtcccgaccctcaagggcacagagagcagagcctacgatgactggggtctcctcccctttatagccaaactcggtgagcagctcccggatctccagttccaccagttccaccatctcagagtcctggacagcgtcagccttgttcacatacaccaccacatgctccaccccaatctgtctggccagtaataagtgctctcgggtctggggcatggggccgtcattggctgctaccaccaggatgcagccgtcgaggggtgcagtgcctgtgatcatattcttaacataatctgcatgacccgggcagtctgtgtgggcgtagtggcgggcggcagtgctatactccacatgagccgcattgatggtgataccccgagctcgctcctccggggcattgtcaatctcctcgtacttcttgaacttagccccacctccctcagccctcgtgccgaattcgccacccagc

SEQ ID NO: 315080 - DNA, 1017 bp, Homo Sapiens
ttttcccggccttttttgtggaacatctcaaatggcccggtcacccacagttgcggattgttcttgcttatgtccttaggaggctcaccacttgttctccctttttttaaaaatggccacgcttttagttgttacttgtcaccacgggtgccaccggccagggacgggagtacacccgcctccacccaggccagcaggaaaggcttctccaggtcccgggcgggcactgggatgtaagtgtccacagcatccagtagcttctgcacagacttcaggcctaactcagggtcccgaccctcaaagggcacagagagcagagcctacgatgactggggtctcctcccctttatagccaaactcggtgagcagctcccggatctccagttccaccagttccaccatctcagagtcctggacagcgtcagccttgttcacatacaccaccacatgctccaccccaatctgtctggccagtaataagtgctctcgggtctggggcatggggccgtcattggctgctaccaccaggatgcagccgtcgaggggtgcagtgcctgtgatcatattcttaacataatctgcatgacccgggcagtctgtgtgggcgtagtggcgggcggcagtgctatactccacatgagccgcattgatggtgataccccgagctcgctcctccggggcattgtcaatctcctcgtacttcttgaacttagccccacctccctcagctagaatcttcgtgatggctgcagtcagcgtggtcttcccgtggtccacatggccgatggtacccacattcacatgtggcttgtcgcgcacgtaagtcttcttggcctccacggccaggccgcggcacaagagaggcaatgccggggctttcagcagccgcaacagaccctgcagcaggaaggtccggccggcggcgagaccgctgaagtggggcgtcgcgcgcagcagggcctcgtgccgaattcgccacccaggcctcgctaccgtaaaccgtagagtactgccgtc

SEQ ID NO: 315081 - DNA, 956 bp, Homo Sapiens
aatgccttttcccccccaggggggaggttcctgctatgtccctagggagctccccattggtcttcctttctttaaaaatgccacgctctagtgtccctgtcaccagcggtgccacggccagggacgggagtacaccgcctcccacaggcagcaggaaaggcttcttccaggtcccgggcgggcactgggatgtaagtgtccacagcatccagtagcttctgcacagacttcaggcctaactcagggtcccgaccctcaagggcacagagagcagagcctacgatgactggggtctcctcccctttatagccaaactcggtgagcagctcccggatctccagttccaccagttccaccatctcagagtcctggacagcgtcagccttgttcacatacaccaccacatgctccaccccaatctgtctggccagtaataagtgctctcgggtctggggcatggggccgtcattggctgctaccaccaggatgcagccgtcgaggggtgcagtgcctgtgatcatattcttaacataatctgcatgacccgggcagtctgtgtgggcgtagtggcgggcggcagtgctatactccacatgagccgcattgatggtgataccccgagctcgctcctccggggcattgtcaatctcctcgtacttcttgaacttagccccacctccctcagctagaatcttcgtgatggctgcagtcagcgtggtcttcccgtggtccacatggccgatggtacccacattcacatgtggcttgtcgcgcacgtaagtcttcttggcctccacggccaggccgcggcacaagagaggcaatgccggggctttcagcagccgcaacagaccctgcagcaggaaggtccggccggcggcgagaccgctgaagtggggcgtcgcgcgcagcagggcctcgtgccgaattcgccacccaggcctcgctaccttgga

SEQ ID NO: 315082 - DNA, 1362 bp, Homo Sapiens
tggcggcgaggcgccacatgtgtctcccccaaagtccacgaggggggaaccccttgtccccggcgcactgtaaagtgtggggccccccaaaggggcgtttgtgggggggcgccaacctttccttccctttggtgtgaggggatggtaaaccttggggccttcccctcctttttggggtgggggcttggatgggaaccctgggctttgccccatgacccagggccccggccggcaaatccttccccgtttccaagcttcgggacccgggcccccgaggttattttccggcttggggcccttttccagggtttttgtggaacatttcaatgcccctgtcaccacagtgcgggatgttcttgctatgtcctaggagctcacactcgtctcccttctttaaaatgccacgctctagtgtacctgtcaccacggtgccacggccagggacggagtacaccgcctccacaggcagcaggaaaggcttctccaggtcccgggcgggcactgggatgtaagtgtccacagcatccagtagcttctgcacagacttcaggcctaactcagggtcccgaccctcaagggcacagagagcagagcctacgatgactggggtctcctcccctttatagccaaactcggtgagcagctcccggatctccagttccaccagttccaccatctcagagtcctggacagcgtcagccttgttcacatacaccaccacatgctccaccccaatctgtctggccagtaataagtgctctcgggtctggggcatggggccgtcattggctgctaccaccaggatgcagccgtcgaggggtgcagtgcctgtgatcatattcttaacataatctgcatgacccgggcagtctgtgtgggcgtagtggcgggcggcagtgctatactccacatgagccgcattgatggtgataccccgagctcgctcctccggggcattgtcaatctcctcgtacttcttgaacttagccccacctccctcagctagaatcttcgtgatggctgcagtcagcgtggtcttcccgtggtccacatggccgatggtacccacattcacatgtggcttgtcgcgcacgtaagtcttcttggcctccacggccaggccgcggcacaagagaggcaatgccggggctttcagcagccgcaacagaccctgcagcaggaaggtccggccggcggcgagaccgctgaagtggggcgtcgcgcgcagcagggtggcggccgccattgtggtcatactcgcgccccggtaaccggggagccgggaccaggagcccgagcgcacagaagaagaagggcgcctgcggctggaaggcaccctcgtgccgaattcgccacccaggc

SEQ ID NO: 315083 - DNA, 402 bp, Homo Sapiens
  misc_feature (389)..(389): n is a, c, g, or t
aacagcttgaagaccgttcatttttaagtgacaagagactcaccttcaagaagcaattgtgttttcagaatgattttattcaagcaagcaacttatttcatttccttgtttgctacagtttcctgtggatgtctgactcaactctatgaaaacgccttcttcagaggtggggatgtagcttccatgtacaccccaaatgcccaatactgccagatgaggtgcacattccacccaaggtgtttgctattcagttttcttccagcaagttcaatcaatgacatggagaaaaggtttggttgcttcttgaaagatagtgttacaggaaccctgcctcaaataagtgcttgccatcgagacatttatggagttgatatgagaggagtcaattntatgtgtctggtt

SEQ ID NO: 315084 - DNA, 351 bp, Homo Sapiens
cctccagacggaacactctcagtgtgtggtcggtgtgcacagggcactgtgtgggtcaggtgacaggccactgtgtcgctgctgctgtacactggagaggcaggggaactgccccgccctggggtccctctaaactgcagggggctgagggcagtgtgggtctccaaggagaagaaatcaagggaaccgttgagccgtgcagccacaatccgtccaagaacaccagagcggtaatgcctgaggagacctcctcgctgctgcagcacagcaccccttcaatggcgtcccacacctccagccggccgctgctccgccccaccacgatgaggttgccctgcagctccaagctcc

SEQ ID NO: 315085 - DNA, 630 bp, Homo Sapiens
  misc_feature (451)..(451): n is a, c, g, or t
  misc_feature (485)..(569): n is a, c, g, or t
aacaacttccttctttcctactttaaattttatatttattatcatgatcttatggattcttctttctttcttattcttaagtggactgtgaattattatcactattctttttgatttcccaattgatttgaccagtgggaattccttcaaaccaattcctatgttcttttgatatttcgccatcaatctttgagtacctctttgttttctgacaacaagagattctcgacttaccttatattttctttgccccagagccagaatcagctgtttctctaagaggcagtggttctttttagtggagaatggtatttagaaatcaagatgtagacataatatgtgctctctgctactggggtatcattgcttctgggccctttcattacagagcttaaataaatgtatgtatatgtatttctgtctctatcttcatctattggagtctctgatnggttagtttatatgtcagcttgggtggatcacannnnnnnnnnnnnnnnnnnnnnnnnnnnnnnnnnnnnnnnnnnnnnnnnnnnnnnnnnnnnnnnnnnnnnnnnnnnnnnnnnnnnttacatgaagccagataccccttcttaatgtgtggcctcattcaatcagtccgagccctgt

SEQ ID NO: 315086 - DNA, 367 bp, Homo Sapiens
ggcacgagaacagcaagaaatctcacacagtgtcaattggaatgtgaaaaatatcagaaaaaattggaggttttaaccaaagaattttatagtctccaagcctcttctgaaaaacgcattactgaacttcaagcacagaactcagagcatcaagcaaggctagacatttatgagaaactggaaaaagagcttgatgaaataataatgcaaactgcagaaattgaaaatgaagatgaggctgaaagggttcttttttcctacggctatggtgctaatgttcccacaacagccaaaagacgactaaagcaaagtgttcacttggcaagaagagtgcttcaattagaacctcgctgattttcaggccttt

SEQ ID NO: 315087 - DNA, 386 bp, Homo Sapiens
tgcaggaattcggcacgtgaatcccgtggccattttttgtggtactttggcctcaattcttcaccaggaatcactgtgtttacatgaaatgacaatttgatactgtatttgatagaaaactatttttttgttaccggggtttacatagaagcacgttgtttataccactaagtgactttggcggggctctcccatggaaacggatggcactccctgaagctccctggtcacaggtggatgaaaacgtgtccgtgggtgacatcaggtggtgtctccaccaccaaaagcagttagaagccaaggagattcctttatctacctagggttcattttcaaaagaaaatttaaactataatttaaacaattcgttcttttctcttgctttt

SEQ ID NO: 315088 - DNA, 664 bp, Homo Sapiens
tgcaattaaatatatttattcacatcctcactgtcttaaatgtgtatttacagactccagcaggtaattatgtcagtactcctcagactcccagaaatttcaaatgatccaggcaactcttgtgaagatcaaattttcaaaatcctcaccaaggacatccttcaggtcacctttatgctcccagatggtattcagctagcagcagtctacacttcaggcatccatcttccacctgtagggtaggtgatcactcccgacgagcaccgcacgtggaaacagctgtaaccaggcacgctgcttttaagttattttatacggggggagggcaagcataaagtcagttatacggtaaggccttttcactgacgaaaataaaaccaggcttatctggagaactccctggcatagtcgatgatgtaaacacaaatcgacgaagctccccgtttccaaacgtgggaacgcaggcctgaggccaggccgctgcccttgttcacggccccggacacttcggacacaggccgccgcagtcgactcaccagactcagggtggccgcgttcccccgcccggcgcccctgcgtgagagaccacgcggccacagccaggcgccatcccagaggacccagagcaaaaaccacagcaagctcgcaccaaaaggaagaaagg

SEQ ID NO: 315089 - DNA, 420 bp, Homo Sapiens
cgtggaaaaatccggggggtcctggatactgaacaaaatggctcaggtctgagctctggctgccccactgattgtgtggcttggccaaggtgcaagtctctcggcctgcttcctctgaaacaggagtggcaatcctggccgacagccctggtggcaccccctccccactgaaggcagagaacatgtgggaaatagtctaactcaggccctgggctgggctggcccgacccttctcctatgcctcccagggtactgtgtcttaaagaacctcttccctcctggaaccattttccactcctctttctttcaaacaagtcccccagcctgactcacaacccctgcttgctaccctcagccggcagaggcccctcatcagtggtaaagacagttcatctcagctgcctgccagcctatggtctt

SEQ ID NO: 315090 - DNA, 1412 bp, Homo Sapiens
  misc_feature (42)..(46): n is a, c, g, or t
  misc_feature (48)..(48): n is a, c, g, or t
  misc_feature (63)..(63): n is a, c, g, or t
ttagaaaagtttctcgaagggcggaggcggccggacaggggnnnnntnctctccctccttctnccgtttggaaaacaaatcaatgggaaagagactttaatggcaaagtgcactggagagttaaaatggttacatgggtaatttaagaaaaaatttagtgggaaaaagggaaagggctgaactgccaaaataattttcttatccagttttacatttgctttctccatgtgctacaattatagacacctgatagttcctagccttagacataacttgcagcatcagccactctgctgcactttagatcacattagttagggctagagcccagccccatttacacggcatctgatgaatggttagctgtggcagttctaccataatgccattttgctccaaagaaatccagttaagtggctgtccatggcccagtagtttcacctctgttgcccccagaatagctttgggatggccaaggaacagctgtcctgatgtgggccatttaagaaaaatggcatagactaatttttctttaggcttggatgtgtaccacacatctggggtgacagtgtcattctgggatcgccaggtatgggtttcataaatagcttctccattgacttttagccaggaccccatttgcctcagtcgctcctcaaaaactacagaaatggtgccatctagtgtgggcccaatattcatcaaaagatttcctccacatgaaactgtctctacaagttgcttcaccaattcttcaattgtaagatagtcagagattccagcttccctcctatagccccaggacagtttgtctattgtcatgcagttttcccatttatgtggcaaaagatgtcctgggttataacgatcactgcaggtatagaagccaccatgcttacagatgctaccagctccccaacgatcattggtgactactgtgccccgaactgggctttcattatataaccaggccaagaagcctgtgctgttccagtattgatccggtgctcctccgtcaccatccgaccacagaacctcaggctgatagttgttcactaactcatagagctctggcaatgtcttagaaactggaaattgccgcttatggaatgaactggattcatcctcaaggaagagcggatgaaaccattcaaaaagggaatagtacagtccaaaacgcaggtcagttctgttcctaatggctacctcaagttccttgacaatgtccctcttgggcccctcatctatggcattccagttccacgaatattctgacccccacaaggtaaagccttcatgatgtttggaagttaagacaatgtatttggcaccagaggcctgaaaaatatctgcccactggttggcattaaaaaattttgctgtaaatagtggtccaaaatcttcatatttcc

SEQ ID NO: 315091 - DNA, 926 bp, Homo Sapiens
gggtaatagaaagcccacccatgcttaccaagatggttaccagctttccccaacggattcaattggtgattacctgtgccccggaaactgggcttttcattatataaccaggccaagaagcctgtgctgttccagtattgatccggtgctcctccgtcaccatccgaccacagaactccaggctgatagttgttcactaactcatagagctctggcaatgtcttagaaactggaaattgccgcttatggaatgaactggattcatcctcaaggaagagcggatgaaaccattcaaaaagggaatagtacagtccaaaacgcaggtcagttctgttcctaatggctacctcaagttccttgacaatgtccctcttgggcccctcatctatggcattccagttccacgaatattctgacccccacaaggtaaagccttcatgatgtttggaagttaagacaatgtatttggcaccagaggcctgaaaaatatctgcccactggttggcattaaaaaattttgctgtaaatagtggtccaaaatcttcatatttgaaactaggagggtaattatctttcataaattccacatacttcggtatcttttccttttgccaataccaccagaaccactcgctaccgaagctgggcacggaaaacactccccagtggatgaagatgccgaacttggcctggtcaaaccacgcgggcagctggcgggcgtccagggactcccaggtggggtcgaagcgcgtggcgctgtgggcagggcacggcggcggcggcagcagcagcaacagcaacagcagcaacgggaacgcgagcctggggagctcctggggccgcatgtcccggcgcaggccggctgtcctctctgcaggctcccgcggcctcgggagcgctgttcttccgtctctgccgctgagtat

SEQ ID NO: 315092 - DNA, 1233 bp, Homo Sapiens
  misc_feature (489)..(489): n is a, c, g, or t
  misc_feature (630)..(641): n is a, c, g, or t
  misc_feature (1022)..(1022): n is a, c, g, or t
  misc_feature (1156)..(1156): n is a, c, g, or t
  misc_feature (1160)..(1160): n is a, c, g, or t
gaatttctctattttgtttttctatctttgccagttttaatggtgcgggacttcctttaaagcggttatttaattaaaaaagtggtttatttaataaaaagttcccacacagtatttaaccgttttaattcatttagggtagcaggggatataacagaactgctgggttccacaggaggttgaggggccaggatccccaacactagatatcttccttagcggggagaaagctggaaattacaagatgactcaacggagaaatgggcttcagtgggtaactttcagaaaattataaacccatatcagtgcacatagccgagggaaaggggagtttacttgaggtttgggttactgtgagcagactacttggggtgactagtattggcatcagaaccagaaatccaggcgctcagggcagcccctgcaggtggggtgggtctccaggctgctccatactcagcgcctgtgttcctctccattcttcgggantccatcagacatactccattgagtacccccatcccacccccttttcagcttcacaggtttcacagaaatttctcaccacctgtttaaaaataaaaataattcagcctcttgacatagcttcttctaggtaaacggtcttcnnnnnnnnnnnngtttccttctgctcataaaagaagggtatttccttgtctggtttttagacagaacactagcagtctgcagagtgtcaaagatgttctcctgggggattacactggcgctacagggtggcaggatcgtggagtcagcattagttggtgtccatgctgcaagcctcatcatccccaaagccctgctgagagctgcttggtcgtgtccctccatcagaggaaccagaactgctaagtgaaggtgtcttatttcatcatctcgacgttggtttggacacggcaatgaggtcgtacacataaggccttgctgacaggttacagacaaactcggacatgttcagccctctgattgggaattctacgactgtgtcgagcttatccctncagtatcttgtgtaggagaaacgtttgaggtggaccaccaggatctttgggcaggaccataaggtcaacttttttgtggccttttgatgcttcttacagttgggacagtaccaggggtcatgcctccccagggntctncatggtggtgaagagctcgatgcagtctctcagggccactgtggtcttctttttcttctgaggctgccatgct

SEQ ID NO: 315093 - DNA, 947 bp, Homo Sapiens
gtctaggtagcgaggcctgggtggcgaattcggcacgagggagcgattgcgggtggagctgcagcgggagcggcggcggggtgaggagcagcgggacagctttgagggggagcggctggcctggcaggcagagaaggagcaggtgatccgctaccagaagcagctgcagcacaactacatccagatgtaccggcgcaaccggcagctagagcaggagctgcagcagctcagcctggagctggaggcccgggagctcgctgacctgggcctggccgagcaggccccctgcatctgcctggaggagatcactgctactgagatctagggccctcagcaaccagctctgtagggagctctgccagaggggcagcagctgcagatccacttaggccccagggtccacggatggccccaaaggctgagggccccaaagccacttgtctcctaggatccaggcctctgggcttctgccaagaactcagggtggccctatgacttggaggagcaagatcagaccgctcaaaggtccccgtgttcactgttacccagaggctcttgttactacccacttcattccccaccgctgccagtgccactgccaaccctgttcacaggcgcttccagcccactccagccaggggagcagggaagaagaaggggctccctcctcttcacattccccccgagcccaaagccagagaaagccagatggcaccagctgctccggattgtgcctgcccacatttggggggacagggccggggcctgggcctcggttcccagggtttgagcttctgcagcctctctcctggagtgaggggggctgaagtcagaccaaaggaagaactcagaaatgtcctgtttatttgtggttgggacccagcagcctctcccttcacccaggtttatgggcccgctttcacctggaatattttttcccactggac

SEQ ID NO: 315094 - DNA, 397 bp, Homo Sapiens
ggcacgagggagcatggaataattgtttcacagaagagggaccttcttcagtcaggtttactcctgatgggaagtacttgattgtggcccagctgaatcttagcaggctctcagtcgtagcagcacccccagtgggaagcattggggagtgttctgtgatcagcacaatccaactagcagatcaagttttgccacatctcctagaagtcgacagaaagactggagcagtctatgtagcagaaattggagcaaaacaagtacaatatgtccctttgaatagctatgttccttcatttggttcataatgtttctttcccgggaatatttcaagtggcagttcagattctcaattcactaagtgcttatgatgttcaagcacaagtttatttttctagtt

SEQ ID NO: 315095 - DNA, 1619 bp, Homo Sapiens
  misc_feature (187)..(203): n is a, c, g, or t
  misc_feature (1443)..(1485): n is a, c, g, or t
gtttctttttctttaaaattactagactattcttagagcagttttaggtttacagaaaaactgagcacaaagcacagagttcccatatactccctgtctccacacccagaatgtcccttattataaatgtcttgtctttggtgtggtactcttcagtctctcttcatctgtagcagtgcccatgccnnnnnnnnnnnnnnnnnaatgtcatttatttgttgaagaaactgggtcatttgttgtgtagaatgttccacattctgggtttgtccttgtgctagtgtttaacacacccctcctctcctatatttcttgtgtgttggtggttagatttagaaacctgattagattcatgtcccacatttttggcaagaaaaattcccaggtggttctgtgaacttcttcttgcgtcacatcaggcacttggtgtctggtgccccagttgtagtgatgtgaagattgattagccatctgcagcactcctaacaacctctcttgatcgcatcctgggatcactgccctggaaacatcctctcccttttcttagcccctgctttcttcccttgcctgcctggcttctatgctcccaagcccatcttctaggcacccagattgaggctccatggcaagcagcagggacaggggcagcaggtagcctgaccccaggaaagagatgtgggtgaccttgcatgtctccaggttacatccactaccagcctgcccaggaccggctgcaaccccacctcctggagatgctgattcagctgccggccaactcagtcaccaaggtttccatccagtttgagcgggcgttgctgaagtggaccgagtacacgccagatcctaaccatggcttctatgtcagcccatctgtcctcagcgcccttgtgcccagcatggtagcagccaagccagtggactgggaagagagtcccctcttcaacagcctgttcccagtctctgatggctctaactactttgtgcggctctacacggagccgctgctggtgaacctgccgacaccggacttcagcatgccctacaacgtgatctgcctcacgtgcactgtggtggccgtgtgctatggctccttctacaatctcctcacccgaaccttccacatcgaggagccccgcacaggtggcctggccaagcggctggccaaccttatccggcgcgcccgaggtgtccccccactctgattcttgccctttccagcagctgcagctgccgtttctctctggggaggggagcccaagggctgtttctgccacttgctctcctcagagttggcttttgaaccaaagtgccctggaccaggtcagggcctacagctgtgttgtccagtacaggagccacgagccaaatgtggcatttgaatttgaattaacttagaaattcatttcctcacctgtagtggccacctctatattgaggtgctcnnnnnnnnnnnnnnnnnnnnnnnnnnnnnnnnnnnnnnnnnnnaaaaagatttccatcaccacagaaaggtcggctggcagcactggccaaggtgatggggtgtgctacacagtgtatgtcactgtgtagtggatggagtttactgtttgtggaataaaaacggctgtttccgtggt

SEQ ID NO: 315096 - DNA, 803 bp, Homo Sapiens
cgtcatcctaggcactcggaagacctatgccatctatgacttgcttgacaccgccatgatcaacaactctcgaaacctcaacatccagctcaagtggaagagacccccagagaatgaggcccccccagtgcccttcctgcatgcccagcggtacgtgagtggctatgggctgcagaagggggagctgagcacactgctgtacaacacccacccataccgggccttcccggtgctgctgctggacaccgtaccctggtatctgcggctgtatgtgcacaccctcaccatcacctccaagggcaaggagaacaaaccaagttacatccactaccagcctgcccaggaccggctgcaaccccacctcctggagatgctgattcagctgccggccaactcagtcaccaaggtttccatccagtttgagcgggcgctgctgaagtggaccgagtacacgccagatcctaaccatggcttctatgtcagcccatctgtcctcagcgcccttgtgcccagcatggtagcagccaagccagtggactgggaagagagtcccctcttcaacagcctgttcccagtctctgatggctctaactactttgtgcggctctacacggagccgctgctggtgaacctgccgacaccggacttcagcatgccctacaacgtgatctgcctcacgtgcactgtggtggccgtgtgctatggctccttctacaatctcctcacccgaaccttccacatcgaggagccccccacaggtgggctgggcaagcggctggccaaccttatccggggcgcccgag

SEQ ID NO: 315097 - DNA, 773 bp, Homo Sapiens
ttggaaatgggcaaagaatcagatggtgtggacacctcgggccgcgccggataaggcttggccaccctgcttggccaggccaacctggtgcgggggctcctcgatgtggaattctcggttgaggacgattgtagaatggagccgtagcacactgccaccacaagtgcacgtgagtcagatcacgttgtagggcatgctgaaagtccggtgtcggcaggttcaccagcacggctccgtgtagagccgcacaaagtagttagagccatcagagactgggaacaggctgttgaagaggggactctcttcccagtccactggcttggctgctaccatgctgggcacaagggcgctgaggacagatgggctgacatagaagccatggttaggatctggtttgttactcggtccacttcagcagcgcccgctcaaactggatggaaaccttgttgactgagttgtccgtgcagctgaatcagcatctccaggagttgggtttgcagccggtcctgggcaggctggtagtggatgtaacttggtttgttctccttgcccttggaggtgatggtgagggtgtgcacatacatgccgcagataccagggtacggtgtccagcagcagcaccgggaaggcccggtatgggtgggtgttgtacagcagtgtgctcagctcccccttctgcagcccatagccactcacgtaccgctgggcatgcaggaagggcactgggggggcctcattctctgggggtctcttccacttgagctggatgttga

SEQ ID NO: 315098 - DNA, 1419 bp, Homo Sapiens
ctcaggtgacagtggggccgggtgttggtctgtctctggaagacaccagttccgccctaccttccctgtctccagcccctatgtcaccacagtgggaggcacatccttccaggaacctttcctcatcacaaatgaaattgttgactatatcagtggtggtggcttcagcaatgtgttcccacggccttcataccaggaggaagctgtaacgaagttcctgagctctagcccccacctgccaccatccagttacttcaatgccagtggccgtgcctacccagatgtggctgcactttctgatggctactgggtggtcagcaacagagtgcccattccatgggtgtgcggaacctcggcctctactccagtgtttggggggatcctatccttgatcaatgagcacaggatccttagtggccgcccccctcttggctttctcaacccaaggctctaccagcagcatggggcaggtctctttgatgtaacccgtggctgccatgagtcctgtctggatgaagaggtagagggccagggtttctgctctggtcctggctgggatcctgtaacaggctggggaacacccaacttcccagctttgctgaagactctactcaacccctgaccctttcctatcaggagagatggcttgtcccctgccctgaagctggcagttcagtcccttattctgccctgttggaagccctgctgaaccctcaactattgactgctgcagacagcttatctccctaaccctgaaatgctgtgagcttgacttgactcccaaccctaccatgctccatcatactcaggtctccctactcctgccttagattcctcaataagatgctgtaactagcattttttgaatgcctctccctccgcatctcatctttctcttttcaatcaggcttttccaaagggttgtatacagactctgtgcactatttcacttgatattcattccccaattcactgcaaggagacctctactgtcaccgtttactctttcctaccctgacatccagaaacaatggcctccagtgcatacttctcaatctttgctttatggcctttccatcatagttgcccactccctctccttacttagcttccaggtcttaacttctctgactactcttgtcttcctctctcatcaatttctgcttcttcatggaatgctgaccttcattgctccatttgtagatttttgctcttctcagtttactcattgtcccctggaacaaatcactgacatctacaaccattaccatctcactaaataagactttctatccaataatgattgatacctcaaatgtaagatgcgtgatactcaacatttcatcgtccaccttcccaaccccaaacaattccatctcgtttcttcttggtaaatgatgctatgctttttccaaccaa

SEQ ID NO: 315099 - DNA, 521 bp, Homo Sapiens
  misc_feature (87)..(128): n is a, c, g, or t
gtcttttgtaggctgaaaacctttgactaatacaccagactgccaatcttgactattgccagattgataatcaatatcctatagtcnnnnnnnnnnnnnnnnnnnnnnnnnnnnnnnnnnnnnnnnnncaataatgctcttttatgcaggacttgtcagagccttggatatgctaaagtgcgtaattctccaggcagagtatggagtattcattcattcactcagcaagcgttacctggacacatactccatgcccagtgaggggtgatcctggagacacagatggccgagacagtcttgggctttgctttcgcgcaacccccattataggggatagggagacagatggccataaaatgtcacccagccaaacacctcattacaaattgtgacatgagcgcaggtctgggatatacgagaaggctagagggagctcccgggaccgtgtctcatgtctgggcctggttggggcgcaatgtgtggtgagcacatatgtcccctgaaaccccacagtgtgttcc

SEQ ID NO: 315100 - DNA, 567 bp, Homo Sapiens
  misc_feature (88)..(128): n is a, c, g, or t
tgtcttttgtaggctgaaaacctttgactaatacaccagactgccaatcttgactattgccagattgataatcaatatcctatagtcnnnnnnnnnnnnnnnnnnnnnnnnnnnnnnnnnnnnnnnnnacaataatgctcttttatgcaggacttgtcagagccttggatatgctaaagtgcgtaattctccaggcagaggatggagtattcattcattcactccagcaagcgttaactggacacatactccatgcccagtgaggggtgatccctggagacacagatggccgagacagtccctgggctttgctttcggcaaaccacattataggggatagggagacagatgggccataaaatgtcacccagccaaacacatcattacaaattgtgacatgaggcagggctgggatatacgagaaggctagagggagctcccgggagactgttcatgtctgggggctggttggggggcaatttgtggtgagaacagatgtcccctgaaacccctcagtctgttccccacacacctcagaggaacctgttaacacctaagtcaggtcac

SEQ ID NO: 315101 - DNA, 555 bp, Homo Sapiens
  misc_feature (80)..(121): n is a, c, g, or t
  misc_feature (201)..(248): n is a, c, g, or t
  misc_feature (262)..(262): n is a, c, g, or t
ggaggctgaaaacctttgactaatacaccagactgccaatcttgactattgccagattgataatcaatatcctatagtcnnnnnnnnnnnnnnnnnnnnnnnnnnnnnnnnnnnnnnnnnncaataatgctcttttatgcaggacttgtcagagccttggatatgctaaagtgcgtaattctccaggcagaggatggagtnnnnnnnnnnnnnnnnnnnnnnnnnnnnnnnnnnnnnnnnnnnnnnnncagtgaggggtgantcctggagacacagatggccgagacagtcctgggctttgctttcggcaaaccacattataggggatagggagacagatggccataaaatgtcacccagccaaacacatcattacaaattgtgacatgaggcagggctgggatatacgagaaggctagagggagctcccgggagactgttcatgtctggggctggttggggggcaatttgtggtgagaacagatgtcccctgaaacccctcagtctgttccccacacacctcagaggaacctgttaacacctaagtcaggtcac

SEQ ID NO: 315102 - DNA, 633 bp, Homo Sapiens
ttttttttaagctcccctgagccggtgctgcgctcctctaattgggactccgagccggggctatttctggcgctggcgcggctccaagaaggcatccgcatttgctaccagcggcggccgcggcggagccaggccggtcctcagcgcccagcaccgccgctcccggcaacccggagcgcgcaccgcaggccggcggccgagctcgcgcatcccagccatcactcttccacctgctccttagagaagggaagatgagtgagtcgagctcgaagtccagccagcccttggcctccaagcaggaaaaggacggcactgagaagcggggccggggcaggccgcgcaagcagcctccggtgagtcccgggacagcgctggtagggagtcagaaggagcccagcgaagtgccaacacctaagagacctcggggccgaccaaagggaagcaaaaacaagggtgctgccaagacccggaaaaccaccacaactccaggaaggaaaccaaggggcagacccaaaaaactggagaaggaggaagaggagggcatctcgcaggagtcctcggaggaggagcagtgacccatgcgtgccgcctgctcctcactggaggagcagcttccttctgggactggacagc

SEQ ID NO: 315103 - DNA, 999 bp, Homo Sapiens
  misc_feature (208)..(269): n is a, c, g, or t
ccaccaccaagggagtggggacgcagcaggtgcagggtgcggctaagtgggatgttagccttgtccaggagggcatgtgtgtatgcgtgggtgggcggggggagctgggaactgaggccaggggaaaactgctccccactcagcccatgggagccctgcagcggctggtgtgctgtgtagtgtggtggtgagggcacaggtggaagannnnnnnnnnnnnnnnnnnnnnnnnnnnnnnnnnnnnnnnnnnnnnnnnnnnnnnnnnnnnngcggagcaaagctgtccagtcccagaaggaagctgctcctccagtgaggagcaggcggcacgcatgggtcactgctcctcctccgaggactcctgcgagatgccctcctcttcctccttctccagttttttgggtctgccccttggtttccttcctggagttgtggtggttttccgggtcttggcagcacccttgtttttgcttccctttggtcggccccgaggtctcttaggtgttggcacttcgctgggctccttctgactccctaccagcgctgtcccgggactcaccggaggctgcttgcgcggcctgccccggccccgcttctcagtgccgtccttttcctgcttggaggccaagggctggctggacttcgagctcgactcactcatcttcccttctctaaggagcaggtggaagagtgatggctgggatgcgcgagctcggccgccggcctgcggtgcgcgctccgggttgccgggagcggcggtgctgggcgctgaggaccggcctggctccgccgcggccgccgctggtagcaaatgcggatctgaaaccgggagagagagcagaggcgctcagagaccgccgccgccgcgtgctcgccgcccaggcccccgcggggtatttatgtgtcacagccaggcggggggacaaaaatattccccctcccccgaaggatggcgaggggcaggaagctgggcacggcccgtgcgcggcctcaataaat

SEQ ID NO: 315104 - DNA, 1138 bp, Homo Sapiens
  misc_feature (66)..(79): n is a, c, g, or t
gaaagtgggagccccccggtggggcacaaagacccctttgttgggggatttgttggggggcaagannnnnnnnnnnnnnattgggcccccctgctctttccagggcagtgagtagggcgttccagaatgagatggggcttgggccccttttaaggccaggggaacccctccccaggccccccctatggaagcccagagggaccagtgaaggagcagagagggcgccccccaacccaaaaagcccagagagcaatgtccccaccaccaaggggagtggggacgcagcaggtgcagggtgcggctaagtgggatgttagccttgtccaggaggggcatgtgtgtatgcgtgggtgggcggggggagctgggatcctgagggcaggggaaaactgctccccactcagcccatgggagccctgcagcggctggtgtgctgtgtagtgtggtggtgagggcacaggtggaagatgggggtggcggccagaggcggtggtgatggtgggcctggggaaggggcgggggcggtgggagcggagcaaagctgtccagtcccagaaggaagctgctcctccagtgaggagcaggcggcacgcatgggtcactgctcctcctccgaggactcctgcgagatgccctcctcttcctccttctccagttttttgggtctgccccttggtttccttcctggagttgtggtggttttccgggtcttggcagcacccttgtttttgcttccctttggtcggccccgaggtctcttaggtgttggcacttcgctgggctccttcggaggctgcttgcgcggcctgccccggccccgcttctcagtgccgtccttttcctgcttggaggccaagggctggctggacttcgagctcgactcactcatcttcccttctctaaggagcaggtggaagagtgatggctgggatgcgcgagctcggccgccggcctgcggtgcgcgctccgggttgccgggagcggcggtgctgggcgctgaggaccggcctggctccgccgcggccgccgctggtagcaaatgcggatgccttcttggagccgcgccagcgccagaaatagccccggctcggagtcccaattagaggagcgcagcaccggctcaggggagcttaaaaag

SEQ ID NO: 315105 - DNA, 1075 bp, Homo Sapiens
  misc_feature (994)..(1002): n is a, c, g, or t
ctttttaagctcccctgagccggtgctgcgctcctctaattgggactccgagccggggctatttctggcgctggcgcggctccaagaaggccatcccagccatcactcttccacctgctccttagagaagggaagatgagtgagtcgagctcgaagtccagccagcccttggcctccaagcaggaaaaggacggcactgagaagcggggccggggcaggccgcgcaagcagcctccggtgagtcccgggacagcgctggtagggagtcagaaggagcccagcgaagtgccaacacctaagagacctcggggccgaccaaagggaagcaaaaacaagggtgctgccaagacccggaaaaccaccacaactccaggaaggaaaccaaggggcagacccaaaaaactggagaaggaggaagaggagggcatctcgcaggagtcctcggaggaggagcagtgacccatgcgtgccgcctgctcctcactggaggagcagcttccttctgggactggacagctttgctccgctcccaccgcccccgccccttccccaggcccaccatcaccaccgcctctggccgccacccccatcttccacctgtgccctcaccaccacactacacagcacaccagccgctgcagggctcccatgggctgagtggggagcagttttcccctggcctcagttcccagctccccccgcccacccacgcatacacacatgccctcctggacaaggctaacatcccacttagccgcaccctgcacctgctgcgtcccccctcccttgggtggtggggacattgctctctgggctttttgggttggggggcgcccctctctgctcctttcctgttccctctggttttccatagtgggggccctgggaagggtttcccctgggccttaaagggggcccaagcccccatttcattctgggacggccctacttccactgccctgggcaacaaacagggtgtggccccatagggaannnnnnnnncctttgcccccacagggaccacacccaggcctaagggatgtgcttgggcaggcgccctgggcgggtctcccca

SEQ ID NO: 315106 - DNA, 2706 bp, Homo Sapiens
gtgattggggggggagaaagttaagtgtgtgtgttggagggtgtgtcaagagcgcccgagattgtgcctgcgcgaagggggagagggtttgtcaaaatcagatgtactgtgggacttgtgaaagaggccgtggggtccccaaatgatgtgggcaacgagagtttgctcgttcggaccccgccagggtgtgtgtggggaacaggggggggcaagaatatttttattagggttccaaggggtggagggaaaaggtggttcatggattaccaccggcggcgggaggaggtgcaagggtgtgcgctccaataacgcggtgtgtggggggagggggagtttcccaatttgttggggcgagaaagctagcgttaaaggggcaagattttcgggaaccaagatatataggcgaatggggggtgtgccaggtggaccggggggcgttgaagtttggattattgggaaacttgggactttgggggttccctggtggagtgaaagggcgaagtaattgacgtcgcaggaagctgccaatttgggggatattgtgtcgaaaacccgctataaggtggccgcccggggcgtttttttatttggtgaggaatcgcaggcgcctagtgcatgcaccaggattcttcctaggaaagcaggtatggaccattgtcacttccgtggctgggcccgcgcggccaaacggaatgggttagaaagcttttggagggcggagggcgagccgacaggggagttgtgttgtgtcttgttgtgttgcttattgtttttccagaaaaggatattttttttattcaagtaactgcaaataggaaaccagagagggagccccaggctgggacaaatcatggctacccctccccaacagaacagggggaggaggtggcccctacaccctttatggtcgattcgggcccccttgctcactctgctgcagcatcctaggggcagggccccaccttccctgggactggggtagtcggtcacccagcctgccatgccccagcccctcttccccacaaagagtatcttgggggaggggatcgtgggcagaacaggaggcaatgaggatgaacatttggcgctggtagcagcagcaatgacggatgtcgaagaatggaacattgaacaaaaaacaacacaactgtccagaggtagtttgtgaacagaggaaaaatggaaccagaaccttggggggcagggaggagcaggaggggggttgggagcgggcagggtgagctccttgttattggtgccccatctgaggagggggaaatggctgagtggcggaagcaaagtagggttaggggagcagccccagcccacctcaggtggcggccacagggctcttgggcctcacctggacaataagtgactgcatctccatcaccacaatatgtactcagatcccaggcggagggcaagggggctgtggccacagtgaagagggagtaggggactcacccctcctgccttcctgtagccgaagggggctgtccaacctagtacggggactagggaagttggggaaggatgaaaagtgagccccacgtggtgacaaagacagtttggctgggggaatcctgggggccagcacccccctccattggccacacctgctgctgccagggcagtggagtagggcgtgccaggatgagatggggcttgggccccttttaaggccaggggaaccctcccaggccccactatgggaagccagagggaacagtgaaggagcagagagggcgcccccaaaccaaaagcccagagagcaatgtccccaccaccaagggagtggggacgcagcaggtgcagggtgcggctaagtgggatgttagccttgtccaggagggcatgtgtgtatgcgtgggtgggcggggggagctgggaactgaggccaggggaaaactgctccccactcagcccatgggagccctgcagcggctggtgtgctgtgtagtgtggtggtgagggcacaggtggaagatgggggtggcggccagaggcggtggtgatggtgggcctggggaaggggcgggggcggtgggagcggagcaaagctgtccagtcccagaaggaagctgctcctccagtgaggagcaggcggcacgcatgggtcactgctcctcctccgaggactcctgcgagatgccctcctcttcctccttctccagttttttgggtctgccccttggtttccttcctggagttgtggtggttttccgggtcttggcagcacccttgtttttgcttccctttggtcggccccgaggtctcttaggtgttggcacttcgctgggctccttctgactccctaccagcgctgtcccgggactcaccggaggctgcttgcgcggcctgccccggccccgcttctcagtgccgtccttttcctgcttggaggccaagggctggctggacttcgagctcgactcactcatcttcccttctctaaggagcaggtggaagagtgatggctgggatgcgcgagctcggccgccggcctgcggtgcgcgctccgggttgccgggagcggcggtgctgggcgctgaggaccggcctggctccgccgcggccgccgctggtagcaaatgcggatgccttcttggagccgcgccagcgccagaaatagccccggctcggcctcgtgccgaattcgccacccaggcctcgctaccttaacccgctgaggtagtactgcca

SEQ ID NO: 315107 - DNA, 942 bp, Homo Sapiens
  misc_feature (168)..(168): n is a, c, g, or t
ggaggtagggggcacttgcacccccttccttgcctttccctgtaggccgaaagggggggctgtcccaaccctagttaccgggggactaggggaaggttggggggaaggatggaaaaagtgagcccccacgtgggtgacaaaagaacagttttggctgggggggaatcnctgggggccaggcacccccccctcccctttgccccacctgctgctgccagggcagtggagtagggcgtgccaggatgagatggggcttgggccccttttaaggccaggggaaccctcccaggccccactatgggaagccagagggaacagtgaaggagcagagagggcgcccccaaaccaaaagcccagagagcaatgtccccaccaccaagggagtggggacgcagcaggtgcagggtgcggctaagtgggatgttagccttgtccaggagggcatgtgtgtatgcgtgggtgggcggggggagctgggaactgaggccaggggaaaactgctccccactcagcccatgggagccctgcagcggctggtgtgctgtgtagtgtggtggtgagggcacaggtggaagatgggggtggcggccagaggcggtggtgatggtgggcctggggaaggggcgggggcggtgggagcggagcaaagctgtccagtcccagaaggaagctgctcctccagtgaggagcaggcggcacgcatgggtcactgctcctcctccgaggactcctgcgagatgccctcctcttcctccttctccagttttttgggtctgccccttggtttccttcctggagttgtggtggttttccgggtcttggcagcacccttgtttttgcttccctttggtcggccccgaggtctcttaggtgttggcacttcgctgggctccttctgactccctacccctcgtgccgaattcgccacccaggcctcgctac

SEQ ID NO: 315108 - DNA, 500 bp, Homo Sapiens
gagccagaaaaggattttttttaattcaagtaactgcaaataggaaaccagagggggagccccaggctgggtataaatcatggctacccctccccaacagaacagggggaggaggtggcccctacacccattatggtcgattcgggcccccttgctcactctgctgcagcatcctagaggcagggccccaccttccctgggactggggtagtcggtcacccagcctgcattgccccagcccctcttccccacaaagagtatcttgggggaggggatcgtgggcagaacaggaggcaatgaggatgaacattgctcaaactcctttcaaagggcacctgaccgcacagggaggtggcagaaggcaaggatgggatgccgtgtaagaggcggaggcagcagttgtggggtggagagggaggtagtggcacgggccggggcatggcagtggggtgcagggtggctggatgcatcccagaagacttttggcctaaaaaatgggc

SEQ ID NO: 315109 - DNA, 664 bp, Homo Sapiens
gacaaatcggcaaggcatgctattgaagaagaaagaagagtgtatgaagaaaattcgagaacttggatcacttccccaggaagcatttgaaaagtaccagacactgagcctcaaacagttgtttcgaaaacttgagcagtgcaacacagaattaaagaagtacagccatgttaacaaaaaggctttggatcagtttgtaaatttctccgagcagaaagaaaagttaataaagcgtcaagaagagttagataggggttacaaatcgatcatggaactgatgaatgtacttgaacttcggaaatatgaagctattcagttaactttcaaacaggtatctaagaacttcagtgaagtattccagaagttagtacctggtggcaaagctactttggtgatgaagaaaggagatgtggagggcagtcagtctcaagatgaaggagaagggagtggtgagagtgagaggggttctggctcacaaagcagtgtcccatcagttgaccagtttactggagttggaattagggtgtcatttacaggggtagcccttgctctgatttttgccattcagaaatgtgacccggctccattttacttgcttgatgaaattgaccaggctctggatgctcagcacagggctgtgtcagatatgattatggcttgctgt

SEQ ID NO: 315110 - DNA, 1644 bp, Homo Sapiens
  misc_feature (547)..(639): n is a, c, g, or t
  misc_feature (984)..(995): n is a, c, g, or t
  misc_feature (1031)..(1040): n is a, c, g, or t
tattatttctgactgttacgtatactcacacatgtaataaatattagtattcttttcacacacacgaccacgcaaaaaggacacttgtggtgtgagttgttcaactactgaatatatactacactggctcatcgtatgtttataatatactcaactcactacgcccagcgaataatcctctgcctctgcgtagtggtttttgcacccacatacttatctagtatactgaccgccccccatgatggtagattggggagtgttcttctcgtcaacaaaatagtgtatacagcgaactaagtcgagtgtgtactctacgaagccagctatttgtgtatttaattagatgctacgcctggcctgctcctttctgttttgattgtcatgagcgctactcgtatttgaggggtccgccgcctcgtgtttatatagatactgatgtcggttgtgtgcagtaactggactcggccctgtgggtgatattgagtgacgctcgcggccgctcgttgttgtggtgttgtcgggtatgtgcggtgtgatggtcttcctnnnnnnnnnnnnnnnnnnnnnnnnnnnnnnnnnnnnnnnnnnnnnnnnnnnnnnnnnnnnnnnnnnnnnnnnnnnnnnnnnnnnnnnnnnnnncttgtttgttactccttttactaaaatagttccaatccaatgtgttttaccaccactatccaaaagttctatttcttcttgtctccccaccgtcagagtggttgaatagaaggtagaaacaggccgggagtccacgggctcccagctctaaacggcgccagggcaggaaggggtggctccgggtctcactgtggcaccttctacagaaaatagacgtagctgcggggcccggggacagaacccagacgttccagtccatctcccaaaagcagcaccaatactttgccccacagtatgaaaaatatacacctctaccgctctgcagtcatgcatttagttttaagnnnnnnnnnnnntcagtagtatgtatcttgtttcctcaagtttcaagnnnnnnnnnntgaaaggtcacttttttctctttaaacactgatgtgtagctagtaacttggataaaaaggtgccaccctacaaaatgtgctcagcatgttctgaggccaggatgggcttggccacctgggctggggcgaaaggagacctccatctgtcacagtggaaactgaagccgagtgccagtgccgcgtccggcttcaagatcaagagtcagagcctttgaaatggaaagggggcatctgaaagggcacccccactgggggctttcagagctaaggctccagaaggaagggggtcgccctgctagtgacggagctgggagtcaccctgagctacagcacgcccagatttcccctgtgggaagccccatctgaccttctacagcccacggctctgcaactgccacctgtactcaggtacatggcgtcgctgctgctggcttttaaaatcagctattagtttgagatgtgacagtcgccgacagggttctgtcctagaaagccatcccagtgccgtgttggctcaggggtcaccagctttgtgctgcctccgtaacagcaggagggttctcaaagcaatgttccactgatccctggatgccactgcagcacc

SEQ ID NO: 315111 - DNA, 917 bp, Homo Sapiens
gtacttccgctttccggcccagccagcgcccgcgatgactgccactctccgcccctacctgagtgccgtgcgggccacattgcaggctgccctctgcctggagaacttctcctcccaggttgtggaacgacacaacaagccggaagtggaagtcaggagtagcaaagagctcctgttacaacctgtgaccatcagcaggaatgagaaggaaaaggttctgattgagggctccatcaactctgtccgggtcagcattgctgtgaaacaggctgatgagatcgagaagattttgtgccacaagttcatgcgcttcatgatgatgcgagcagagaacttctttatccttcgaaggaagcctgtggaggggtatgatatcagctttctgatcaccaacttccacacagagcagatgtacaaacacaagttggtggactttgtgatccacttcatggaggagattgacaaggagatcagtgagatgaagctgtcagtcaatgcccgtgcccgcattgtggctgaagagttccttaagaatttttaaaccatctggctggatctcgtggccttccccctcagactacccatgtctccacgaaggcgtcctggagtcactccccgagcagcgcggcggcggcaggggagttgggttggggtgggcatttgatgcgggagggtggggtggtgtgccttgctagctgggcaagaaagcagcagtggacctgccccaaggccacacgtgcctggtcaggctggcttctgatgttcagtcccctgggccgggacagattttttttaacgtcttgaaacttaaactctgtgcttgtaggatactggtaaccctttttggcccctctttcatccttcttttaaaacctccccctccaggggctggtgaatggtccccagggattatgagc

SEQ ID NO: 315112 - DNA, 1123 bp, Homo Sapiens
  misc_feature (403)..(421): n is a, c, g, or t
gcactggcactgacggacaaggcgaaacagcggcccctctcaagtgggagagcacccaatggcccctgtagccagaggttgcccggcttttgggccccaggccctaggcatgactggtggtaaccaatttggcccttgtccccaaccagtgctggggggccatctttaggcagaactcaggaagctggcagagagctcccaacacttatactggggcccaggagggttgggaattaaagggccaagggagaaactggagtttgaaacctccctccctccccacctggggtggcataggagagaaaaaataagtcgccttctggctccaggcccgcccagacccacagcaaccaataacgtataatcactgggaccagtcacagccactggaggtggaggtttnnnnnnnnnnnnnnnnnnngacaaaaaggttacagtatcctacaagcacagagtttaagtttcaagacgttaaaaaaaatctgtcccggcccaggggactgaacatcagaagccagcctgaccaggcacgtgtggccttggggcaggtccactgctgctttcttgcccagctagcaagcacaccacccacctcccgcatcaaatgcccaccccaacccaactccctgccgccgccgcgctgctcggggagtgactccaggacgccttcgtggagacatgggtagtctgagggggaaggccacgagatccagccagatggtttaaaaattcttaaggaactcttcagccacaatgcgggcacgggcattgactgacagcttcatctcactgatctccttgtcaatctcctccatgaagtggatcacaaagtccaccaacttgtgtttgtacatctgctctgtgtggaagttggtgatcagaaagctgatatcatacccctccacaggcttccttcgaaggataaagaagttctctgctcgcatcatcatgaagcgcatgaacttgtggcacaaaatcttctcgatctcatcagcctgtttcacagcaatgctgacccggacagagttgatggagccctcaatccctcgtgccgaattcgccacccaggcctcggggcggtgggtggtacccccggcgtggggatttttttataattaataaa

SEQ ID NO: 315113 - DNA, 1479 bp, Homo Sapiens
atgttcctagaagcgactttgtgcgctataatgaaaacatgcgtcatttcttcttgacggcggggagaaccgcggtgcggccatagccaaccgaactatgctctgtgtgtgttggggagcaagggcgttgccccagtggcagagctgagggtggacgctgggtggggtcttccgggtctgggggcgcagcggcttcattgggtgaccgcagctgtgcgcggccgcccgccaatcagggttatgtgcgcaacccccccgaggacgggcctcctgtgctgcccatcagccctcccgaaaggacccagaacaaagagagtgggagagggtgacgccgcggtaaggcctgtgctttattgtgggtcaatctcgggggacgcggcggccagcaggggcgacgccccactcttgggtcccagcagcacagtgagcagcagccgcgccaccctgagccgccgcacagaaacagacacgcgccggcatgcggccaccgccagcctcagggccaggagcccccaaggcgaggagccacccaggactcgcctctgaaacgtccctccagccgtcgtcgaccgtggtgtctccacgtggcctggccagttcagtccagctcgatggggctgccgtcgctggggctctcctccccatcctcctgctctgaggagcccatgaggctggtcagaaggttcccgagcaggcccccgtaggaagacgtctgcttgggcgggacgccgaagaacagctgtcctatgcggtcgaggtactcgttgtacatggggtcccgccggagggatggctggtactgctcacacagcacagtgaacaccgtcagcttcccaccgtccacagccagcagcaggaaccagatgaagttaagcagcggctccacaaacggaggcccgtcctcgatggacgggtgcttctgggtgtacgtcgtgaagaccaccgatgcgctacttttgttttttaaacagagaaactgtagcacggcctgggccacgaacatgtccacctcgctgcggaagccgcgggacgtggaatactccaccagcatgttggcacagccctccccgtccgctgagtgcagaaaatgatacctcgactcacaatagttttgttctttccacagggtgagggccagcagctggtgcagccgggggtggcccagcttcccggagcccccactggaccacttcagggctctggacacaaaggtcacgcgctcaggagagttggggtccatcaggctgaacactttagccagattttccagcagctcgtcagccacctccacttccgccttctccagggactccaggaccagcatggacaagtctgctgcactgttttgctggccatggctgaagaagagcagggctcccgagtacatgagctcccgggcactccgtgtgcttgctctgggacatgtacgagcacagaggcgacttccctctctcagactttaggcgccactgcagggtc

SEQ ID NO: 315114 - DNA, 794 bp, Homo Sapiens
aagttctggtaggttccattccattcaggccagggacaaatcccccccactgctgggtgtcgtgctcaaagataccccatcctgacgccaggtcagtgtgatatttccggggatagaagctggaagccctgcatgtcaacggtgatgttgccctctgaggcctcgctgcgggtgacattcaccatggggggcactcttctcctcaggactacgctggattctagatatcgccgtagttcctgcaggcagtctgcatgcatagcgtgatagtgtgtcttggtcttcatggcatcttccttcaagaaattcctgacgttcatggccaaggtctgagctctggaggactggggcactgtccattcctcagtctccacgttttgggagaggaagagctccccatcgtagtagaaatgctgggagctcctggtgctgttgtcttcatggatctcacagaccctaatctcctggagggaatgcaagccttctttctggtccttgatatgagccagggtcatcctgaggtcctttccgttccctgtcaagtccctggtctctctgtcccatgtcttatttcccaggacatcttctgcccactgtccctggggctttgccctgcatttctgcctgtcatagcgcaggaagggctgaccatccagatgtacctcagcaagaaaccctgactgcacagatccatcccaggacagcaccgtgaggttataacgaagactgtggggctcagcacagaggcgacttccctctctcagactttaggcgccactgcagggtccggaaat

SEQ ID NO: 315115 - DNA, 1270 bp, Homo Sapiens
  misc_feature (259)..(293): n is a, c, g, or t
cgggccgggggaaattggattccccagcttgcctgggccgtaagagttctaggcgcgccctccaggggaggcccgggggaccccaggattctgcccttccgagggctgaaatcccgagccggtgtggcctccccgggggtcaatcgtccccaactgggtggtgatccagggacctgccggcctcacgagttctggcccctctgcagctgaagttttcttcttacaacaacagacgtagaaaataataataccaaaaatnnnnnnnnnnnnnnnnnnnnnnnnnnnnnnnnnnnaaacatggaatgtctgcccaatgactttgaagcaccagcactttcccagagggcacagggtgagtgctgtgattcccgctgtgttccatgtagcaggtgaacctctgctcctctccttggcaaatcctggtggccacccaggtctggtaggttccattcccatcaggcaggacatccccccactgctgggtgtcgtggctcaaagataccccatcctgacgccaggtcagtgtgatattccggggatagaagctggaagccctgcatgtcacggtgatgttgccctctgaggcctcgctgcgggtgacattcaccatggggggcactgttctcctcaggactacgccggattttagatatcgccgtagttcctgcaggcagtctgcatgcatagcgtgatagtgtgtcttggtcttcatggcatcttccttcaagaaattcctgacgttcatggccaaggtctgagctctggaggactggggcactgtccattcctcagtctccaggttttgggagaggaagagctccccatcgtagtagaaatgctgggagctcctggtgctgttgtcttcatggatctcacagaccctaatctcctggagggaatgcaagccttctttctggtccttgatatgagccagggtcatcctgaggtcctttccgttccctgtcaagtccctggtctctctgtcccatgtcttatttcccaggacatcttctgcccactgtccctggggctttgccctgcatttctgcctgtcatagcgcaggaagggctgaccatccagatgtacctcagcaagaaaccctgactgcacagatccatcccaggacagcaccgtgaggttataacgaagactgtggggctcagcagcagctcccggaggtgcaaaagggaagatgccagccagaagcaggaagaccgggcccagccccatggccccgacgtcgccaccctctcagcggctcaagcagtg

SEQ ID NO: 315116 - DNA, 423 bp, Homo Sapiens
  misc_feature (20)..(20): n is a, c, g, or t
  misc_feature (28)..(28): n is a, c, g, or t
  misc_feature (46)..(46): n is a, c, g, or t
  misc_feature (55)..(55): n is a, c, g, or t
  misc_feature (74)..(74): n is a, c, g, or t
  misc_feature (79)..(79): n is a, c, g, or t
  misc_feature (290)..(290): n is a, c, g, or t
  misc_feature (293)..(293): n is a, c, g, or t
  misc_feature (360)..(360): n is a, c, g, or t
  misc_feature (367)..(367): n is a, c, g, or t
  misc_feature (370)..(370): n is a, c, g, or t
  misc_feature (381)..(381): n is a, c, g, or t
  misc_feature (394)..(394): n is a, c, g, or t
ggaggaactggggcttctgnaccccttnccccagagggaaactttncccgagatntgatgcctagagaacttcnggaancctgctctcagtagggaatcaacccattcccacccaagatactttcccacttcttagggaaggaaaagttttggatgatggggacagcaagcccagagagaagggaattcaggaggcaagatccaaattgagttggagtctgttccagaagcaggcgcacatgaagagtggtcctgtcagcaaatctgggaacaaattgcaagtgccctanccnggtctcaaaactccataaggaacagctctcagttcttcaaagaaggtgatgtcccctgccagattgnggcaagnctntctataagtcncgtgcaacagaanccttaccgttgtaatgaatgtaaacagtc

SEQ ID NO: 315117 - DNA, 559 bp, Homo Sapiens
  misc_feature (505)..(505): n is a, c, g, or t
tacatctcaggggcgtttctgccttggggggaacgtttcccattgctttagagatcccttcgtggtcaccaaatgttacttggggtccttgctcccagagctcccaagatggtggcgggctgcttccaagatggtggcaagcctcatgttctctgacctggggttcttggcctcacggattccaaggaatggaatcttgggccatgcggtgagtgttatagctctattagaagccgtgggtcatggaagagaaccgtggaacccagtgactagtgttcagctcgattaggatgaacccgggcacttagccttgcaggaacaatggcaagcctttagcccaatcggggagtggcaatgggtgccttgctggatcaggagcacagcagacaccttgccgggatctggagggatggaagtcagcagcgggtctgcgatggcggcaaacgacagtggtgggcagtggtggacggcaagcgaaagctcagctcgagcttggcggctccangctccgagagacgctgttgctctatgaggcgtgtctgtgtttctctagttcgcg

SEQ ID NO: 315118 - DNA, 643 bp, Homo Sapiens
cgactgtgcaaatggtggcatgccacatgacgaatgtcgataccacggtattcccagacattggtgctgtaagtgctggcaagtaagttgtaagcgactgcttcataaggcaatttgggttcaggtcgccccctagaggcatcgggatagtctttcaggttaatagcgcgctaacagcattgcttagtgtgagatggctatacatagagtcataggtcaagatcctatatgcataatcgggataacatgcagtgccatagagagtaataactttccgattataggtatatactgaacaccatgttatgtcagagcaattaaataaagtgctgtcagctttgtacttcacacccttcagcttcctggtggttaaatgatagtatgagaatctcaatatgatcgaatattcatataaattttggcctgaagtactattttcttagacagcgattcgacctattagagaatttctttatagcagcagttgtgaagtgtttcatcagagagatttcccctaccccccaagagggggctttgtactcagttgaattttcattgcttaaaaaatacctctccccaagacacctgcatggcattttttagaaaatgcagatgctgtgtcatagtgggtcatagcacacat

SEQ ID NO: 315119 - DNA, 600 bp, Homo Sapiens
  misc_feature (14)..(14): n is a, c, g, or t
gaggtggccaacantgcctgcaagaattcagtcacccaggcctgatatagctttgataacacacgagtcagtgagattccagccataccaatacaaaagcgttaagagccaggaaaatggtgtttcctgaacactgcaaaacaagcagtcagcatctggtggtagaggcttggtcattaaactcttagaacttacttgcatcattaacatttttatgccttgtgggcatgttatacaacctttcatcttaagataaatctgtcgtccagaagatgggtcttggttcactaaaaaaggcagtgtgaatataatgcaatgctaatggatgcaggccttcaaaacactgcaattatatagtgagttcaggtttcaaaattcagtgtttatcagaaaatatctcataatcatatatattcaacaaattattttccaaagatactcatgaagctaaacaaaaataatttttgttcaaaatggctcgatgagtttaagaatatgatttgaatatatttgatataataatttagccaagaagtggtctcttagactaattgtaaaacatgaaaagttgtcagcttcacaatttgaaccccatccttt

SEQ ID NO: 315120 - DNA, 697 bp, Homo Sapiens
  misc_feature (606)..(606): n is a, c, g, or t
gcagtctggttaagggagaactagtggaaagggttaaatgacaggttaagttgcgtgcaaagctttcccagtgctgttgagattaagacaattgtggatgtgtatgtctaggtttgaatctctgggctgcagattgcttttgccctggcagagaaagaggagtctttgggtaggttagctgtttcttgttgatttcaggcatagaggcacatagaaactttgtattgcgtggtgattttgttttaagtgctggaaaattagggcaggaattacgtgtttgcaagttgttgccatcactggtttgaatttgactgcctcatcacggggcaagagttattcttgaagatctcattctcccagaaacagaactttagggaaaatggctgtggcttagcttttcagctgctgcagggtaataagctttctggtttgttttccttccaattctggaaaggttgtccacactaagacccttaactctagggcttgcataagtattgctagcatcgttagctaatgagttggtcattgtttctctttatcaataattgtgttaataccaatcttataatttaaaaattatcttgtatgtaagagcagttcggngttagggaggaagaggagcgtgggatattttctctttaatgcttagatctggttcttccctgtgttccttaaccacaattgtggattcccg

SEQ ID NO: 315121 - DNA, 1001 bp, Homo Sapiens
aaaaatcaggcttcccaggaacttgattgcttgctagtaattaaggggtttgccttttaggctgtcaaaacaaacattagtaaccagaacctgggagatagcttctcagcaaggaaaagtcacaggtttggggacggtttaggggaggggaaaaggttgatataataatgcagggttgctcctcggggtgtcgatctagaaacaattttacagaacttcagttgtaaactcaataacattacttgtataatggtgctggccatgttgttgttttaatcagttgcctctttttaaaagaaatttttatggaaaacacattcaactatcattaaaaaaatgaagttaagctgttgggaccatttctttaagatttaacaaaagttcagccttttaggtagttgaagggaagtacaccccgtattcagcacatgttgagttttctacaccaggaattttcaatatgtatattgatgaaaacaagctcaattcaaactggacagttttaagataatgtttcagcacttttagagacaacgaaggccaagaatcagtacagtagtattccaaaatgattttctctagaaatttgaaagtagatcgaacagaatgttgtcaaccgcctaccagtacaatcttttgtggaagatactttgaaatcactttctactttgttagtaaagttctgtctttccagagctgcaagttttaaagtgttacttatacagaccaaccaagaatagtgctgaattaagtggcatttagtatctagaagccattttgatccaagaagctacttaagtgtcaaagtcagcatgcagcacatgtagcttttctgtaaacaagggtgtgatatgaaagctgcttttttaagaagagtaaaagcacattccatatacgtaagtgaattttaaaaataaattgaggcaaacagttaagttttatttttagagcaacaagttaactgtaaatattttaatgggtagttgctcatctatgatctg

SEQ ID NO: 315122 - DNA, 772 bp, Homo Sapiens
ttatgttgtcacttgcaactccctacttgcaggtggtaagctctctttatagtagtcgagactcctttggttccaagagacaaaccaaacttgaagctgaggcagagagggatatcagaacgagcggactccaaggccatcaggattctcatctttcgcctctgcttctttgtgcggagtgcttttttcacatagctgcaagcacagccacctagcactcccccaaatttacatcttaaagcttcaggcttagcaagagaccaactctcattttcaggagaaaaacaccaaaaagaaggatctgattggccctaattcaaacaacttgccaaaaggtagtccattctatccattctcctaatgtgatggctgcaataaccatgtggattacaagagaggaacggttcctgaataaggggtgctgagtagaaaatcttattatgttagtgctttcaacaaaaaccaaaaagccaaactttgatagtttcctgtgcccttgagataaattccaaactgtttactttgtgtgcaagtcttcacaatctgcttctgacagtatgagaagacagctacgattcccctccctgtacacacaccctttggcaatgagactttgctgcttctccgatcaagtagaatccattttcccaccccttgaatctgggctagccacgtgacttattttaaccagaagtgacagtgcgtgaattccaagccttcaaggaatgtgtgaattcccaggcttcaaggggttctgcttttgctgcttttg

SEQ ID NO: 315123 - DNA, 1245 bp, Homo Sapiens
  misc_feature (44)..(44): n is a, c, g, or t
  misc_feature (152)..(181): n is a, c, g, or t
  misc_feature (596)..(596): n is a, c, g, or t
  misc_feature (622)..(622): n is a, c, g, or t
atctcgcgtctgtcggagattttctttgtgttttctttttcttnttgaaatgaaaggcctttttattgaaaaattttgtgcagccaaccccccatggcccacgtttacttatgtaccaaacctgcccatcctgcacatgtatccgggaactnnnnnnnnnnnnnnnnnnnnnnnnnnnnnnctcagattcctctcaattttcagtccttgcattaaataatttcttaatcatttcccttccaacttttagcctgcacgagcacgtgtgaagcccagaaatcataccacatgcaaaaatctctaaaatatcttatcatctgaaggtactgggggatttcctatcccatctgaaatccgagctaatacacaccaaaccctaagtggcaaaaaccctactttcagatggtattgtttcctcaatcccagaggtagactcaaaactaatttgaaacctccctggatagaagagaattggcagtcctttccagctgggagcacctgctagtaatggaggggcctctgctgacagtgcttttatgaagcaggatggtttgtgaatttaccaacagtgaggtctcagacttggaccagtttanggattaccgtagacccaggaagtagnttctagactggaatctagatagttttcaggatggggaagatagattcaaaaccacctaagggcattctgggtacaaagcattgtgcaaggctttggtgatacagagaataaggtcttttttcccatacttcctcatctgccaaggttatctccaattgtacctttctctccagttccaagcttgcatcatgaagatggtgtgtgggaaggccatgacagatgaatccgacacatgcagctcccagaaaacagaagtttctactgtctcgtctacccaagttggccccaactgaggacccaatattggcctgtttgcaacagctagaattaaattttacttttaagtaagtttctattgtctccgtcagaaaccaaactactaaaaacacaaaaaagatggtaaaaggagtgatggcagtttggggagtcaatttttcattttcttactattgccttcttgcctacaaagctactgtttccactggtctatttcagaccacccaaaggccatttcaacaatcatcagtttctactcctaagtggcaccattcacagcacttggagaactgatttctacatacaaggcaaccaaaaaggaatatgctttaagttttcagtgtatg

SEQ ID NO: 315124 - DNA, 780 bp, Homo Sapiens
gaggtaggtgtggtgttggctaggcagaacatggttatttatgaagatgcctgtagagttcaacaagcctgcttactgcggttagttgtgaccattgtctaagtaatttaatgttttcctatgagagctgaaggagccgtgaaagggaaaaggtggctcccaatgagttgcagccaatgggaacaatttgatataataaatagtctcatgttgactcctttccaaaacggcctttcaaagggggagtgtgggcttgccctggcaaacttctccccacccactcaccacaaaggatttattcacagaggcaagtgcagtatttttcttaaatgatagcccttggagaggaaactaaagagcttatgcttttctaggacgctgggcttacatcctgaggttgcccgatttggatatttttctgctgctctcttggccccccacttaattggtgaatttctaactcttgtgctacttggtatcgtccaaaatccaaatatagtcaacagtgtagtggctctgctgtccattgcgggggtgcttgttggatctggattcctcaggtaagatatcataattcaaaaaatttagattgggataatctgttattaatgatcacctaataatgactgaagtaaaggaataccagagaactgatagtggttatggatattaccttatagtctagagcatttatactgctcgttaatcattgccttagaccttgaactgttcatttgttcaataaaatgtcttttttatcgggaatcaggaactaacaag

SEQ ID NO: 315125 - DNA, 1166 bp, Homo Sapiens
ttttaggtttatgaatattatttacattcttgggtccgctcagtcacaatttccaaataaccacatgtccctgcaagttgtaagagcaagggactataaaccacttccattgcattcaaggcctgcttggatccaagaggcacaaatggagtcttaatggttaaaagacttgagatgtcctgtcaagaaagaaatacatggcactctcatttcagacgttcagagcagtcatgcacagtcggcagcttcacttccattttcccagccatggctttcactacctgctaatgagatgatcccttattttgaaaacaactattcctaggatgacaagagctggaataaatgaatacaaaatcagaaagttcattgtgaatctagatgttgcacctgggcaggttttctcaatgaattgaattccttgagtgaaggcacacattggattagttgtcacagaaacatttgagctgccacaagtgaaattcagtccgtagaactcattgactacaagaatctcactgcaatatttttggaatgtaaaataactgatgattttaaaaggaatgggcatttcttgtatgtttctgaggaatccagatccaacaagcacccccgcaatggacagcagagccactacactgttgactatatttggattttggacgataccaagtagcacaagagttagaaattcaccaattaagtggggggccaagagagcagcagaaaaatatccaaatcgggcaacctcaggatgtaagcccagcgtccagtagcacacactgctgaaaatcatggtggcaacaacgctgaaggggaggacgtgcagtgcataggccagcatcatctgccacttctggtagaggccgtcctgactctcctggtcgctgacagctcgcagcacgggaaacagattcacagcgttcagcatgcctgtgtacggggtggcgcccacaaactggtaaaggagacctacgcggtcctggatagcaccctttagcacattgcttcggacccgcagaacgaagaaaaggaggaacaaacccatgatcagattctgaaggagacgcgtaatcactgccagcttatttctcaccaagtttcttgtcaactctcctcaggagaacacccagtttagagaaaactccaggagaatctttggtttt

SEQ ID NO: 315126 - DNA, 324 bp, Homo Sapiens
  misc_feature (287)..(287): n is a, c, g, or t
ggttatgggatattccccttatagtcctagagcatttaatactggctcggttaatcattgcccttagcccttgaactgttcatttgttcaataaaatgtcttttttatcgggaatcaggaactaacaagtttatgttatgatatgattcacatgtaataaaccattataccaagagaagaaaaccagcccggatgttccaggaaaaactcacagcccacatgataggctaaataaattgcatgcattagttcatttctgccctggtactgttgagtgtgaactgcangttctcaattcccagttattcttaggaattaagacta

SEQ ID NO: 315127 - DNA, 507 bp, Homo Sapiens
ccgaccggccgtgtttttcagggagaaacggcaagcctttgaaactctgaagactgcaacaatgcaatgtatggggagatggaggtttgccccttccaccagatgatgaaacatgcttggaataattataaaggttatgcctggggattaaatgaactcaaacctatatcaaaaggaggccattcaagcagtttgtttggtaacatcaaaggagcaactatagtagatgccctggatacactttttattatggaaatgaaacatgaatttgaagaagcaaaatcatgggttgaagaaaatttagattttaatgtgaatgctgaaatttctgtctttgaagtaaatatacgctttgttggtggactactctcagcctactatctgtctggagaagagatttttcgaaagaaagcagtggaacttggggtttgctacctgcatttcatactccctctggaataccttgggcattgctgaatatggcagaatttggccctgcatttgggg

SEQ ID NO: 315128 - DNA, 375 bp, Homo Sapiens
taccccaagttccactgctttctttcgaaaaatctcttctccagacagatagtaggctgagagtagtccaccaacaaagccttcaacccatgattttgcttcttcaaattcatgtttcatttccataataaaaagtgtatccagggcatctactatagttgctcctttgatgttaccaaacaaactgcttgaatggcctccttttgatataggtttgagttcatttaatccccaggcataacctttataattattccaagcatgtttcatcatctggtggaaggggcaaacctccatctccccatacattgcattgttgcagtcttcagagtttcaaaggcttgccgtttctccctgaaaaacacggccggtcgg

SEQ ID NO: 315129 - DNA, 1491 bp, Homo Sapiens
  misc_feature (166)..(166): n is a, c, g, or t
  misc_feature (1243)..(1243): n is a, c, g, or t
  misc_feature (1252)..(1252): n is a, c, g, or t
  misc_feature (1292)..(1292): n is a, c, g, or t
  misc_feature (1295)..(1295): n is a, c, g, or t
  misc_feature (1299)..(1299): n is a, c, g, or t
  misc_feature (1302)..(1302): n is a, c, g, or t
  misc_feature (1305)..(1305): n is a, c, g, or t
  misc_feature (1316)..(1316): n is a, c, g, or t
  misc_feature (1325)..(1325): n is a, c, g, or t
  misc_feature (1351)..(1351): n is a, c, g, or t
  misc_feature (1369)..(1369): n is a, c, g, or t
  misc_feature (1380)..(1383): n is a, c, g, or t
  misc_feature (1392)..(1392): n is a, c, g, or t
  misc_feature (1399)..(1399): n is a, c, g, or t
  misc_feature (1402)..(1402): n is a, c, g, or t
  misc_feature (1406)..(1406): n is a, c, g, or t
  misc_feature (1409)..(1409): n is a, c, g, or t
  misc_feature (1417)..(1419): n is a, c, g, or t
  misc_feature (1441)..(1441): n is a, c, g, or t
  misc_feature (1482)..(1482): n is a, c, g, or t
  misc_feature (1488)..(1488): n is a, c, g, or t
ccgggatctttcccgggggcagtctcttttctctcctcacctgacggctcccctccgcgcctccgggggctccctcaggcctccccacggtcatttcagctggacagaggcagcagcgacagtgacagcgatagtggcagcagcggtggcagcgagagctatgcgnggccagggtccacccctttctagctttggcgtctggttggcttccagggcagcctccgatccatcccgcccgaggaggcaaggatatgatattcactttcatgacaagaaaatcctgttgctcgaagcaggtccaaagaaagtactggagaaattgtcagaaacttacagcaacagggtcagctccatttcccctggctctgcaacgcttctcagtagtgtgggacgcctgctcagaggccctgataatgtttgataaggataatttagatgacatgggctatatcgtggagaatgatgtcatcatgcatgctctcactaagcagttggaggctgtgtctgaccgagtgacggttctctacaggagcaaagccattcgctatacctggccttgtccatttcctatggccgactccagcccttgggttcatattaccctaggtgatggcagcaccttccagaccaaattgttgataggtgcagatggtcacaactccggagtacggcaggctgttggaatccagaatgtgagctggaactatgaccagtctgctgttgtggctactctgcatttatcagaggccacagaaaacaacgtagcctggcagagatttcttccctctgggcctattgctctgctcccgctctcagacaccttgagttccttggtttggtccacgtcccatgaacatgcagcagagctagttagcatggatgaggaaaaatttgtggatgccgttaactctgccttttggagtgatgctgaccacacggacttcatcgacacagctggtgcccatgctgcagtatgctgtcagccttctgaagcccactaaggtctcggctcgccagctgcccccaagcgtagccagggtggatgccaaaagccgagttctgtttcctcttgggttgggacatgctgctgagtacgtcaggcctcgggtggcgctcattggggatgcagcccacagagtccatccgcttgcaggacagggtgtcaacatgggctttggggatatctccagcttggcccatcacctcagtacggcagccttcaatgggaaggacttaggttccntgagccacntcacaggttatgaaacagaaagacagcgtcacaacactgntcntctngcngcnacagacttacnaaaaaggcnctattctaccagtccccccccgcctntgttgctcaggacgtggngcttgcaggcnnnnaatgcagtntctccantcnaagnacngattatgnnntttgcaagcaaatgagtactcntctcctaaagaaagattacgttgatgaaaaagaacatcctncccagnacc

SEQ ID NO: 315130 - DNA, 727 bp, Homo Sapiens
aatgtaaagtaagtttattaaattaaataagatcttgaaaatatgtatgatgggtcctgggcaggatgttctttttcatcaacgtaatctttctttaggagaggagtactcatttgcttgcaaaggccataatctgttctttgagtggagacactgcatttgtggcctgcaagccccacgtcctgagcaacacaagcggggaggcactggtagaatagagcctttttagtaagtctgtagcagccagaagagcagtgttgtgacgctgtctttctgtttcataacctgtgaggtggctcacggaacctaagtccttcccattgaaggctgccgtactgaggtgatgggccaagctggagatatccccaaagcccatgttgacaccctgtcctgcaagcggatggactctgtgggctgcatccccaatgagcgccacccgaggcctgacgtactcagcagcatgtcccaacccaagaggaaacagaactcggcttttggcatccaccctggctacgcttgggggcagctggcgagccgagaccttagtgggcttcagaaggctgacagcatactgcagcatggcaccagctgtgtcgatgaagtccgtgtggtcagcatcactccactgagcagcatcagccacaagacaaacaaggtgaaatgtgagtagcagggaattaaaaattcaataaagaaaccttgtttgtaaccaaagcttaggctaatg

SEQ ID NO: 315131 - DNA, 630 bp, Homo Sapiens
tggttacaaacaaggtttctttattgaatttttaattccctgctactcacatttcaccttgtttgtcttgtggctgatgctgctcagtggagtgatgctgaccacacggacttcatcgacacagctggtgccatgctgcagtatgctgtcagccttctgaagcccactaaggtctcggctcgccagctgcccccaagcgtaccaggggtggatgccaaaagccgagttctgtttcctcttgggttgggacatgctgctgagtacgtcaggcctcgggtggcgctcattgggtaagacgataacagagcagggccactcccttctcactttgctgccagaggtcacacctgaactctgctttattcttagggatgcagcccacagagtccatccgcttgcaggacagggtgtcaacatgggctttggggatatctccagcttggcccatcacctcagtacggcagcctgtaagactgtgctgtctgcaaagccaaagccatcctttaacagggctgtgatgtagctgagatccatgcacaggaaaggactgcctgaggtgaagttttccaagttatcacacacttccctggcttttctttcaaaatcttcaacttttaaaatacccccctt

SEQ ID NO: 315132 - DNA, 455 bp, Homo Sapiens
ttttgaggctgacagtcttgctgtaattgggagaaaacgagctgcagcacatttggcagattgagtcaccagcagccaatgtcaggggttgtgcaggcagctgaagggctcagggctccctgcctcacatggtgaaagaggaagaaagaggtcaattgggaaaattggtccctggggctgcttcctctcttcactcacaggaaggtgggtaagggcatcatctccctttgctgccaacgcttcctttgggagaggctggagagggtttataaaaatctcctagtggaaacaacctcccccactggcccccagctggcctctgctcccttccagtcacttcacagcagagttcaaatctagaaccctgtgtgtttcataggcctgagggtggtggggggaggacagggtggccagaggcaaggggtgggggatcaggggcagtggtcattcttagc

SEQ ID NO: 315133 - DNA, 1045 bp, Homo Sapiens
  misc_feature (854)..(854): n is a, c, g, or t
  misc_feature (974)..(974): n is a, c, g, or t
ggccaagttcaacaaatgtttccaggaaaccccgtgggttgaggcaaagtagccaagatgtattgagttaagtttttctagaggacaaaagtatttcttgtcccttttccctcatgctcatatgttttagctgaggcgtaaatggccaagttgagtaatatctgtggaactgagacagagagccagggacccatgtacccagggaccagtcccctggggaatcacacagtggctcagactagactgctctatcccaccagaactctgctgctgttcatttccatcaggaccacccaggaaagcaaataagttagccttctcatcattaggtcacctaatctcttgggttgcaggatgagagcatatatagatctcctgtttagagagtgtgttcataattgtagaaagggatagaaaatggaataaccaagaggctgtgtcattttttaagaggatggcaaggatgacctcaaatgagctcaacaaaactgggaatccaaggaatggtgcttgtagggaaagagaggtcagttgtggtccttaaacctcttggcaccttgtgcgggttataaaacaaggagctggagtttgcccttacccccaatccaaatgctgtccaggatttaggagctacccaacctgtggttatatggtgttggtttccattttttgtttgtttgcttgtttcctcagggctggcctcttccccgtgtcttcacagcgtccctaaggaagatttttgcagcactctctggagctgaggggagtgaaatttggtccagagaaggcggaaggaaatagttttcctgtttccttttctcgaggtggatgtcctcaggcttccttcacacctncttctcatgggtgccgcttgcagtacagtcaggctgtggaggagggctgagaagaaggggcactggttcagccccaagtttggtctgagacaggtacccagcagattccattccaccttnctctcttaaggacaggcccgccacacatatacccttttcctactttacttggatcccttaggtggtacccc

SEQ ID NO: 315134 - DNA, 943 bp, Homo Sapiens
  misc_feature (677)..(689): n is a, c, g, or t
ttttttgtgtgtgaaatactggtttttattggttggcacaagattacaacctacaatttcaatgcccttccctcccacacagctcaaatggaaggaaactgattaacacatagaaaggaacggcaggctcacaggtttaagcatttgtttttacaaaaaggagtgggatatgggggtggtcaagttttacgggtaataacaacattctctctagatggcagggggtaagtctgcctgtcctccattgctggtaccacataagggatacattagtaaagtagggaaagggttatatgtgtggctggcctgttctttagagaggaaggtgggatggtatctgctgtgtacctgtctcagaccaaacctgggggctggaccagtgcccctttcttctcagccctcctccacagcctgactgtactgccagccgcacccatgagaaggaggttttgaaggaagcctgagggacatccacctcgaggaaaagggaacaggaaaactatttccttccgccttctctggaccaaatttcactcccctcagctcccagagagtgctgcaaaaatcttccttagggacgctgtgaagacacggggaagaggcccaccctgagcgggcaagaagaaaagcttgaactttccatgcagtaccaagcaaggctattttggaaacaagcnnnnnnnnnnnnntggaaaccaacaccatataaccacaggttgggtagctcctaaatcctggacagcatttggattgggggtaagggcaattttactccagctccttgttttataaccccgacaaggtgccaagaggtttaaggaccacaactgacctctctttccctacaagcaccattccttggattcccagttttgttgagctcatttgaggtcatccttgccatcctcttaaaaaatgacacagcctcttggttattccattt

SEQ ID NO: 315135 - DNA, 565 bp, Homo Sapiens
  misc_feature (355)..(519): n is a, c, g, or t
ggcttttctgtcaactcttttgctctctcccgctttgtctaatttagaactgcctcactaaattcttagggatggaagtatttggaaaaaaacctaacagtagagtcaccacctaaggaagaataaaatctcccagggtgctgtgtgttagtctgtttgcgttgctataaaagaatacctgagactgggtcatgtataaagaaaagaggtttctttggctcacagttctgcagtctgtacaagagggtgtggtgccggcatctgctcttggtgagggcctcaggaagcttagaatcatggcagaaggggaaacggagccagcgtgtcacatggtgagagagggagcaagagacannnnnnnnnnnnnnnnnnnnnnnnnnnnnnnnnnnnnnnnnnnnnnnnnnnnnnnnnnnnnnnnnnnnnnnnnnnnnnnnnnnnnnnnnnnnnnnnnnnnnnnnnnnnnnnnnnnnnnnnnnnnnnnnnnnnnnnnnnnnnnnnnnnnnnnnnnnnnnnnnnnnnctttggtatgagatttcacattatcattggtcattagcccgttagt

SEQ ID NO: 315136 - DNA, 544 bp, Homo Sapiens
cccaggtcaaattgttaggttctccataatatgatttctccaaaatccaaaatggtctggttccttgcttatggtacaatgaactgtcatttcttaaaaatattgcctcatttcccgcattcatggggccttcatccccagtgggaatatttttaatagcttaagagacttgacttttggaaggcttttggacattcacaggatttttctttgctgtgaatgttctactctataaggcttgtctatggttttaaaagtttttgagatccactgcagtcataggttcactctactctatgaattatgatcggctttccatacaccacctcatttagagttctcatcctcatggagtacagacacctaacatgacgtgactgtctacaaacgttatcataattgcatttcctgaagtccaagatgatctgtcaaagactactattaactgtattcctaggatttttttactgtatgagttctctgatgattgatgagctgtgacttctgtgagaaagctttcccacattcaatgcatcgataaggc

SEQ ID NO: 315137 - DNA, 615 bp, Homo Sapiens
  misc_feature (44)..(44): n is a, c, g, or t
  misc_feature (69)..(69): n is a, c, g, or t
tccgagatgctcttcatactcccctcgaggatcacgtttggtanaagtgctgtcgaggtactttcgaanaactactttcttatatgtggtatcttctggaatatcatcagagtcttcaatatctgtttccctttgtacaaattctgaataatcccaggatatttcttcagcagcaatgtaataatttcttctgtttccattgttgctgcggaggtaccatgcgtaggggtcatcatagggcacataatcaatttcagcatagtcatcttcactgctctggacctcttcctttggaatgatctcaatgtaatctgtaccatctttactgaggcccactataaccagtggattaaattcctttgatagaaaagtatcattgagagtaggagatgaaggagatggcatctgaccaaggtctggataaggaaaagactcattaaattcttgaagaagcaatgactgactagattcagaagggtagaatatctgatcaaggtctggaggaggtgatatctggctgagatccgggagaagggtggtgtcactgatgtctggagagagagtcacctggctgaggtctggggaaagggacatctgaccaaagtttggggaaag

SEQ ID NO: 315138 - DNA, 1464 bp, Homo Sapiens
tggtgggacaaaccccaggcattcctgtgcccgggacttccccaattaggcttgttccctggaactgtgccccaggtccctccttcaggaggggcacatgctgtcagtccagaccaaactcacattaaataaatttcaatatacactgtacaagaatgccaggcccatccctcatctcactggctgcctgacccccaaaacaaagctcctccccagcttctctgtgcatcaagggacatctgagggccgaagaggaagggaaaggaatagcttggttcccaaatcggcctgccatgtccatatataaagctaggggcaccatgtgacacctccccacccccaggagccccctgcatggaccaggctggcttagggagcagtggccaggcagcagcagtccccctctgagccatctttgtcaccgtcaccctgtgtccatagcccagagtcccctctgtccagctgcagcctgagcagtacagccaggggtaggggtggggagagggcgtcgtgcaaagtggcaagggaaggtgactccctttggccttttccctggaagacccacatgcccaacagcaaggcaggggaggtacatggcaggcaggggcggaagacgcaggcaggtggcccccaccctccgtcactctgcaggtgggtgggccagattggccagaaccttggcctggtccacagcgtcgagcaggttcttggcgtccacagccagggtgtgtgaagccgtcagcatctgcctcttgcactcctcactcagggaggtcacggcgttctgctgcgccagccgcatcttgttgatgagctctgccaggtctttgttgagcagtttctgggtgccctcgatctctgtccgtgaagatgacggcaaggaaggcaggagatcatccacgctcccgatgagcttccgcagggtcagccccacattcttcaccaccaccacgtagccctcggggggcagctgacagagctcattcttgagctccagcacggcccgcaccagttccatgacattgaggtacaccaggtcatcggtccggtccaggttagctgtgggctggatggactgtgcgcccagcctcgggggcttctgtgggggccctgtgaactccaggtagccgacctccttctctggcgtcaatggggacttatcattcatataaaccatggggtccagggacttctcctcctgcctgagccagacccagcctcccacagctgctgggcctcttctcggctgctgggttggatgaagtcctcctcctggaactgcagctttggagccaggaggttggtttgcggagggggtctgtacttaggtcggctcggcttgggtgggggttcctggaaggctgtgggctccaagattttgggggttcggtagcgagcattcctctcttgctccatggcaatgtccttctccatctgataaacgtcactgaggctgcacaccag

SEQ ID NO: 315139 - DNA, 328 bp, Homo Sapiens
ccaataaggagcaacatggataagtttaagctactcttttcaaggtcacacttgtaagcattagattttcattctaaaacacatatgtcatctcataaaaatatatctgcgtaatgtattctgtctcatgtttaacataggactaatgggttcttccttatctctatctaatgttatgatcctattggggggactggacaggctttctaatacccagatttactgtgtttaaggtgttcgtataaggccaatagacactaggaccaagtaatgcatctcctgcaatttcctcttttcacagcaggatgcccatctacttgttttggtg

SEQ ID NO: 315140 - DNA, 1260 bp, Homo Sapiens
  misc_feature (97)..(157): n is a, c, g, or t
  misc_feature (667)..(714): n is a, c, g, or t
aacccctcgcctttcaaaagttcccgggtatgggggggtaaaaaaatattcccaaaaggggaagggacccgggtttgtggggtttgtgaccctgccnnnnnnnnnnnnnnnnnnnnnnnnnnnnnnnnnnnnnnnnnnnnnnnnnnnnnnnnnnnnnctggagccgccaccaggccagggtttcctgccggggaaggatgtcaaacccggggaaggcccaaatgccggatgagcccaaaaatcacgtctcttaaagtttcggggtgggaaaaggaaaaggtgttctgcccagctgagccactcggggagagccaagctggcagtttatggcagagaaggctcctgttggggatgttcccagcacgaaaaacccaaggggacccagcccaggaggggccacagcagagcccaagccacagatgggaggggagggggtaagagtccagagcaccctgccccattccaccctagctcaagaaggccatgctaaactgtagcccgccaggctgttctgccctgcccacaggtgtgagggagggggtggtcatctaagatcagtaagtccagtgattcaacagtgcagaggatgtgccaggaccaggccagcagggtctcatcctgaacttctgtttgccaacgggaggaagtgctcaggtgtgtgacaagnnnnnnnnnnnnnnnnnnnnnnnnnnnnnnnnnnnnnnnnnnnnnnnntaccaaagtaggatctatattccttaagttcactaaaaactgtgagaatttccggcatatgatgtttgaatatcaaacgcagagatttctgaagctttaatgccaatagttagtgagtctgtttagatggctgtctcccgctcatctgtgagtcgggcgctgagctgtggctgctgccaccagatgccgactcttgagggggtcaatggcaggcgaggtgggcgctgcctctgtctcccggccagtcttgctgcctgaggtgcgtcgagtgcagcgggctgctcgctcctgtgcatccagctggtcctcacactccgcctggggactgtgcgccagggggaaggtccgccgctcccagggctggacagactgttcatccagccccagctctggtgtggaacagcgggtatcctcactggctaagtgtcgcggagtgtcccgagccacaggggtgaggggtgctgagtgcagttccgggctaatggggctcctaggggactgaccatgggagtattctgacaaagagtggctactgctgctcgtgcc

SEQ ID NO: 315141 - DNA, 1098 bp, Homo Sapiens
aatcacatgaccactgcaaaagcatcaaccccagctggtccaggctccagccagtttcctctgggcagcatgttagaatgggctccctgcctttttgttttgatcatccaaatctagcttcaaagggctccaaaatgtgctcaccacatccgggacccgaaagcaagagctgatttttaagagtgagattctcattgcatttggacaaaatgaataatgtgcctttcatattttctttgtatttctcttcaatagttgcttgacccaacatctttctgtctgctctatacaatgaaaatacaaactaaatgagaatagaaaaaataattaaagcattgaattgtacaaattacaaatctgttccaaaatatacttacattaaataaaatacgcatttcaataagagatctacagtgaatgactctatgcattctgggaggcttcacaacatctaggcagggccaacattcgtgaaagaagctaagagattttgcatccaatcacagtttgtagcgggtatcttattgccaatctgcgagttacactgaacacatcattagcatcgcttgtgcagaaaaccaattttgtttgggaaaagggaaagcaagctctggcctcaattttgagttcattacaacttcttaagaatttcaccaacagcctatacagtacaagttcaaaaaagtaaacatgttaaggtaagcagacaactcttcagaagcccaaacacattttcttgctgtatttatgttgaattctccatctacaatgagcagtcatgaagatggtcttcttcagggcaacatggtcacaggactggggcaatccaggggactgagagggagcatgaggacgggagagggggctacctcttgctgtttcatgttagagacaaactgtaacacagtccatgggcctgcaatcgtccccttttatcatctggcataacgtttgatgtagtcatccactttattccggaagtcctccttgtcccgcaaatgatgttctgcagcttcaatattcagtggatcatcaaaattcaaaagatcagtaaacaaagagtttaatccccaaacgacatcctttaatgttcttgtg

SEQ ID NO: 315142 - DNA, 372 bp, Homo Sapiens
tacattgtaaaaatttaatttaattcggtccaaaatatacttaaataaaatatgcatttcaataaaaatgtctacagtgaaagactttatgcattctgggaaacttcataacatgtagatagggccaacattcacagaggataagggcatttgtatccaatcacaatttgtagcaggtttcttattccaatctgcaagttacactgaacacatcatgagcatcacttcgggagaaaaccaattttgttggggaaaagaataagaaagctccagcctcaattttgagttcattacaacttctcaagagtatcaccaacagcctaaacagtacgagttcaaaaaagtaaacatgttaaggtgatatagtttaga

SEQ ID NO: 315143 - DNA, 274 bp, Homo Sapiens
tgagccaccacgcttggccaatatgtgcaatttaaaaaatatttataccccaaagcatttagaaaattccattgtctaaatgcatcatcacagttaactcactcggtaaaggtcgtcttggctgcgtccattctgtggcaattacgaataaagctgccataaactcaattttgagactcctttactgatagtgacgttattttaggtgatagcagtggtgtgatctcagctcaccgcgctccgcctcctgggttcatgccattctcctgcctcg

SEQ ID NO: 315144 - DNA, 753 bp, Homo Sapiens
  misc_feature (705)..(705): n is a, c, g, or t
  misc_feature (722)..(722): n is a, c, g, or t
  misc_feature (726)..(726): n is a, c, g, or t
agagaagaggatgcttctagctgtattgatattcaagaagttctttcttcatcagaatcagattcatgcaatagttccagttcagacatcataagagatcttttagaagaagaggaagcctgggaagcatcacataaaaacgatcttcaagacacagaaataagtccaagacagaatcgccgcacaagagccgctgaaagtgctgagattgaaccaagaaacaagcgtaataggaattaatgtgggcttttgctgacttttcaaatgcattgattagaataccgtacttttggttgccacagatagattttctatttataaatgcccaaggaaagatgctaaattctaaatattacggttagctgatattcattcttttctgcttttccagaggggaaaaatgttacaaaatatccttacttggtcagttgcctcctgcctctaaaacatctctctctatactgacatttcacacaggtaccagctttgcagaggaggtagactctttggcactttggcacagggatttggtttggtttggtttggtttgataattaaatttcagaatgtccttaggccattctccttctcttccatggagaatccagcctcactttttggggcgggatgtcaggtcaatccttggtgtggtgaagtaccgatgcacgccaccccatgcctgtgttacagcagctcatgatgggntgtgcccgaggtaatgntggntgtagacctgtgtcttcacattctcag

SEQ ID NO: 315145 - DNA, 703 bp, Homo Sapiens
atgtggaaattaagaggattttattgactttgctatgttctttgagaaaatcattcacatgtaaaagtttgacatttgatatgagatttattcacactttacacatacattcttgattgtggggcagacaattgttcatttcaacaggactttcacatggtaacagtcacaaaattggcatactatattaaaaaatgaaatcaaacagctagacaaaaagtatgcagctttatgccaatttaaatctcaacatgcaccacccctcacccatgatctcagaattatctgctgtgagcttattaaaatattagccagagagtgtctgaggtcacaaatgatcgtttacaaaataaaacctcttttcctagagctacttgttttgttatagaaaaataccacacataaaaattagtgctattcaaggtgttcatttcaaaatcacatatgatacacaagtttcaagccattgtttttgtgtctcacattgaaacatcacaatacatgatgtgaaactgatttactgattaaatgtaccttgcccagcttggaaaacccattgtctactatgtggactgcttacaaatgagagtgagttaaaacattttcagttattgggtacacttgtaatttgttccttctcagaaactactcagaaaaactgcttgagaaacatgactgtgcatttcttcctgatacaagtgtg

SEQ ID NO: 315146 - DNA, 1119 bp, Homo Sapiens
  misc_feature (46)..(46): n is a, c, g, or t
  misc_feature (54)..(54): n is a, c, g, or t
  misc_feature (137)..(137): n is a, c, g, or t
  misc_feature (240)..(240): n is a, c, g, or t
  misc_feature (389)..(389): n is a, c, g, or t
  misc_feature (466)..(466): n is a, c, g, or t
  misc_feature (744)..(870): n is a, c, g, or t
tttaaatttagaaaagagagctttatttcttataaaggtttgcagnccgcaagnggccattatgacaggctgggaagtgtggcctacagccaaggccagaggaggacatttccagggagggaaggagaggacaggantttgagccaaatgagttggctacatatacatactcaataggatatcagaggagctacatcattttatgagaatactcataaaagaggtcctaacacatgcatnttcaataaacatgcatgttcattctggggtggagacttgacatttaaatgtattataattaggccctacacatcaaaaagtgaagcaggggacataaagggtactcagcctctgtaaaggctcagcctctgtaaaggcacagcctctanaactggccagaaccagtccatggaggatggtctcttatcaggagaaagttactgaaatcagtcccttatccagaganagctgtcgttaaggttagtgaatcttgcttctcctcacagccagtgcttgcttggctgctagagaaaaataaaacccatgtggtagttagaatctagttaattctttaagagtagggtacaagacttaaccctcgcctggcatggccctaggccctgtttataatttgaggtcttattgccacaaagagtctgttctgtcagtctcatgatctctattttaacattaatgctgctcagttgttgggtctaaaccataagagggagggaggtacagggnnnnnnnnnnnnnnnnnnnnnnnnnnnnnnnnnnnnnnnnnnnnnnnnnnnnnnnnnnnnnnnnnnnnnnnnnnnnnnnnnnnnnnnnnnnnnnnnnnnnnnnnnnnnnnnnnnnnnnnnnnnnnnnagggagataaaataatttaatccattggcctctgtgactgtgggactaacatggctatgatctgtcggacagacttcaggctggcacccaggcaaaattctatgctgtagtaaatgcatcatgcacatttgtaacaacacgtacataacaatgtcacaaaatactttcacggtgacaactagattagtgttttattgaatagctgatgacataaactgtctcatttggtgccaagactgaccatcacca

SEQ ID NO: 315147 - DNA, 963 bp, Homo Sapiens
  misc_feature (205)..(331): n is a, c, g, or t
acccatgtggtagttagaatctagttaattctttaagagtagggtacaagacttaaccctcgcctggcatggccctaggccctgtttataatttgaggtcttattgccacaaagagtctgttctgtcagtctcatgatctctattttaacattaatgctgctcagttgttgggtctaaaccataagagggagggaggtacagggnnnnnnnnnnnnnnnnnnnnnnnnnnnnnnnnnnnnnnnnnnnnnnnnnnnnnnnnnnnnnnnnnnnnnnnnnnnnnnnnnnnnnnnnnnnnnnnnnnnnnnnnnnnnnnnnnnnnnnnnnnnnnnnagggagataaaataatttaatccattggcctctgtgactgtgggactaacatggctatgatctgtcggacagacttcaggctggcacccaggcaaaattctatgctgtagtaaatgcatcatgcacatttgtaacaacacgtacataacaatgtcacaaaatactttcacggtgacacctagattagtgttttattgaatagctgatgacataaactgtctcatttggtgccaagactgaccatcaccagcataccaaggtcatcactgatcagaggtctaacccaaggagggggtcatgtgcaggcccagcggtggggaggaaagatgctgcagaggagatggatgcccacagaggcccctgagcggataccatgctcactaagtggtaagtatagactcaacgtaggctgtaagctctccccctgtgtaaatgggaccccgtacacttgagagtcaagggtctgtttgggtggcagggatagccacttctgaaggtagaaaggaaaataagccaccaaattggtacctttctgtgaaatggacatcgtgctcagaatctccattttccccacaacctggaggagtaagtactgtcatctgcattttgtagctgaggaatctgactcaaca

SEQ ID NO: 315148 - DNA, 1641 bp, Homo Sapiens
  misc_feature (1088)..(1088): n is a, c, g, or t
  misc_feature (1120)..(1120): n is a, c, g, or t
  misc_feature (1129)..(1129): n is a, c, g, or t
  misc_feature (1143)..(1143): n is a, c, g, or t
  misc_feature (1226)..(1226): n is a, c, g, or t
  misc_feature (1235)..(1235): n is a, c, g, or t
  misc_feature (1242)..(1242): n is a, c, g, or t
  misc_feature (1406)..(1406): n is a, c, g, or t
  misc_feature (1524)..(1524): n is a, c, g, or t
  misc_feature (1538)..(1538): n is a, c, g, or t
  misc_feature (1541)..(1541): n is a, c, g, or t
  misc_feature (1568)..(1568): n is a, c, g, or t
  misc_feature (1574)..(1574): n is a, c, g, or t
  misc_feature (1587)..(1587): n is a, c, g, or t
  misc_feature (1618)..(1618): n is a, c, g, or t
  misc_feature (1623)..(1623): n is a, c, g, or t
gggcgggccctcgaataattttccaatatcgccggaacaagtagtaaagagcaaggacaatttttaggccgcaaagaaattctccaagggaaggcagccccctgccgagcggtagggagtttaaagcagcagcccaagcaccctttaatcagtgggtacccccaaggtccctcaatttcattaacaacagccccttaagggcagggccgccacctcagggcagcaggagaagtgtctcagcaaggcaacactcagatccccacaggggtggaggcctgtgagcagcaagcgggccctgccctgacacgggttctccagtggaagcagaagctcctcacacagggctgtggggtctacccacctaaccacgtggtgtggggagtgacgagggctggtttggaccacctgcgggttcctcttctcctctttctccagagcctgcagaagctcctggtccaggcgctgggctctctccaccagtctctgatccccttcgatgctcttcaccatcaaccccaggccaagagccatgaagcgggagagatggccctggcctgagcccacgtctacaacctgggtgcagcctgtgaaatcactcagcttcttcaccaactctcccagcctccggatctcatgctgcttcttgggcctgacatgtttccggaatggagctgttagtcgggagctctggctggggttctccaggaattctgagggggtctgaaagccaggcatccgggtaaaggccagggcacacgccgtggacttcagggccagcagggtgagtggccacactgacctgtacctgacgacctccccttccccaggcatccccagcagcattgtggccagctgtggtggtttcagtccatccaatgcttcctgccatgagcaagggagtgtgtcccataggttgtctgtgaaaaattcgatgatgtaggcatccaagatggaacggtagagtgccaggacacgggtgaggttaacagctagctgcttcctcccctcatgagagaggcctcgggcggagatgcccggcatcccggggtccagcagggagcgcggggagcgagaatgcagtgaacagngatccagggtcagtactacgcgggttcagganccggacggngctcaactctgcangcagaacaggaagagttttgggtccagtctccgacgctgcctttccgggatccgatgctggagtggaagatttgaggcgcccnccagacgtnacaggtngcgactgttttacagtgagaagttgtcagcgtctagagacacgtaggtcggggtaacagtgcagtgacgctactaaaaggtgccgctgagtttagcttacaacgaggcgggccaagttccagtttccgccccttgccgtacactcctctctttttacggaagtntagccggaggtgtccggcgggctgcagttccggtttatcgcggccttcccacaccttcgcgttgtaccaccacggggctagaggggccggggagcgcatcccgcccctgcccccaccnacgccgccccctcntcngccgccactgccgctcctcacacactnggaatnactggcctcactncctggggtcggggcggtgcgggtgtgcgcgngccgncttttggcgcgttttaac

SEQ ID NO: 315149 - DNA, 616 bp, Homo Sapiens
gggaaggaaacagatatccaatttttaattaattaaaactttacaatgtattacataatccatggaaggagagaaaggggatgaaactgaaggaaccaggactctggaggatgcaggatgctgtttctctggatgagatgtactctgccactgtgctctctgggcactttcagatgatggggtctgagatgtctcctcaggctgcatcagctgtcttcagtctccagaacagaaagagcctgacccaggggcatcttggtggccaccagaaccaggtttctgggagagagttcaggactgaagatgggcaggagctcagcatggaaaccctgttcctgaaggtacagcagccggtccagtagaataagcgtctccaccagtggggcaagcagtagagccaggctgaagaaggccaccacacggttctcctgggccacgtgggcctgaagggcagccagattcagtggcagctggggatctagccccactcgctgtagcccccgctgcacatatctgtgggatcagtcacattcagcactcagtttggttttaagaactgtcacctctcacttaaactttgcttgttcctaattcagttccaactttgctttatttt

SEQ ID NO: 315150 - DNA, 648 bp, Homo Sapiens
  misc_feature (26)..(26): n is a, c, g, or t
  misc_feature (43)..(43): n is a, c, g, or t
gaacatcattacttatgatgatgaanggggtggggaagaaganacagaagcctttgatattgccaccctccagaatcctgatggtatcaatggatttatcccccgcaaagacatcaaacctgagtatcagtacatgcctagacctgggctccggccagcgcccaacagcgtggatgtcgatgacttcatcaacacgagaatacaggaggcagacaatgaccccacggctcctccttatgactccattcaaatctacggttatgaaggcaggggctcagtggccgggtccctgagctccctagagtcggccaccacagattcagacttggactatgattatctacagaactggggacctcgttttaagaaactagcagatttgtatggttccaaagacacttttgatgacgattcttaacaataacgatacaaatttggccttaagaactgtgtctggcgttctcaagaatctagaagatgtgtaaacaggtatttttttaaatcaaggaaaggctcatttaaaacaggcaaagttttacagagaggatacatttaataaaactgcgaggacatcaaagtggtaaatactgtgaaataccttttctcacaaaaaggcaaatattgaaagttgtttatcaacttcgctag

SEQ ID NO: 315151 - DNA, 759 bp, Homo Sapiens
  misc_feature (100)..(100): n is a, c, g, or t
tgggcgcgatcgaactaagacagtagtaccagccgcatatatcatgcacgcaaatgccatcggcatagagtacagctagacggcctgagtcgcactaagngcagcaccaggacttccatggtccaccaacctctccatctccagagcagctagtggctggaacccgcgggtcctgcttgggcctcaggctctcctcccatctgtggagaaggtgggagagagagctgtctccccgcaataaataagtgcagcaccaaccctcaagagtcagattcaggctcagctggaatatggagaggccacttcagcagcttgtcagcaactttgtccaggggagggaaggattcctctccaaaggtgggaggtgacactcctctgggctgggctgcggagttctgctctctgctccctaagaggccagaggcagcccctggatcctaggctggtgatgggggtccggccccctatggtgggagaagctggggcagtttcccactggttggtctagccacatctgagttctgagaattgggacataggagaagagagcctctcatggactcctggagatggtcccagaatggagtctagctggtgcagtttcctgctgtaggtaaggctggactggatgagctcctgccttcttcctcctcctccatagccaagtcctgagagcttgaagccttggccccgccttgggcctcctcgcagccctctccctcaccactgccgccaccgctgctgccctgctcgcctcca

SEQ ID NO: 315152 - DNA, 701 bp, Homo Sapiens
  misc_feature (16)..(16): n is a, c, g, or t
  misc_feature (25)..(25): n is a, c, g, or t
  misc_feature (33)..(33): n is a, c, g, or t
  misc_feature (41)..(41): n is a, c, g, or t
  misc_feature (65)..(65): n is a, c, g, or t
  misc_feature (75)..(75): n is a, c, g, or t
  misc_feature (93)..(93): n is a, c, g, or t
  misc_feature (101)..(101): n is a, c, g, or t
  misc_feature (467)..(467): n is a, c, g, or t
  misc_feature (504)..(504): n is a, c, g, or t
ggccccacctgggccnccccagggnatggggantaacgggncgtgaggccacggaccccggcccnggtacccatnccctaatgggcttataangcaagtgngcacaacattcctttcctccctaacatgattatactgtggcagcccctttaatgcctaaatttgattcaaagcagcaaatacttttacccaaaacagcccacagttagacttcaatatgaatttccccaaatatggaatttcattttcttatttattttttagatgcctttaggtcataataaattaacttaaaaacaaagagagcatattttgactaaccaaagaaaaatttcctgcaagagcatctttcaaattatgtttccctctacagatgtgactacatgcaacctgaactttagaacactgtttactacttaagaccacatcctatctcaactaaccgactatacttcctgatttagttntgagtgttttgtgctctataaataatagcgtgtgtanaattagaaaggaaaatgtatatacagtactctagtaactttatctgatataaatggcaaatttgtttctgaaaatattgaaacaactgccgtgcaaaacaggacctgttttgaggcagggttatttttcttccttttaataatgaagaaaatttttctttttatttacatatgtaattttatttgaactactattaa

SEQ ID NO: 315153 - DNA, 1212 bp, Homo Sapiens
tttttttaaaaaacaagctttaatccatttcataaaaattgttcttgcaattgaacacagccaggcccacatgcccagcaggttgcaggagacagtttcacattttccaggctcaggacagggcagtctcctccacatgccacaggtgtctgagtgacagtgtagacgcctgatgggcaggaggtaggcacagatgatctgaaggggtcatctatttaaaagtctgcaactccagttcaacggacaccttaaacactgtcaggcacgtaccccaagagaaaattaagcccagagaagaaaacctcaggcttgagagccctgtacccctcctcaaccgctgccacctgggaccagggccagcctgaggcaatgggggcacctgaatttgccccaaagggctccctcattcaaatcacagatataggcacagctttaggattcagcagggcagggagggaggaagcaggcgtgagctggccacagctttgaatgacctaccagcccctggcgtcaccaagaactggtgtttaatgaggggaatgaccaccgccacacagaactacctagccaagcccctccccagcagctgcctccctccctggatgaggggagttgtgccgggagtcccagaaaggaggcatcgatgcccagccaaacatgatgtcgactgcagggacccacaggacaccatgtccctttttcaaaaaatactaaggcaaaatgataggaaactaacagacgtggcccctcagagtgatgaaacccacgtgtctgcgggccagctcgagccacagtcgcgccaacaagcgcatgaaacagttaaatgcacactcccaacagcggggcccccgggctgctcggagctggctccagctgctgtcactgtccactgagaaaggccaagtgccctttggtgcatctgttggcgtagtgtcctttctcgccacactgggaacagcaggaagtgggggaagaggagagacagacaacaacactgttcaaatgcagttttcaactaagggagtgcccaccaaatcccaaatcatccaccaagtccccagtcgggacatgactctgaaattctcagtggtacagagtttctttcaaattagagggtgagggagctcaggatggaaagtgcagtggtgcagaaactagccagcaactccgcagatgcaagggagaacaaggccgccagaaggcgacctgcta

SEQ ID NO: 315154 - DNA, 1169 bp, Homo Sapiens
tgtgtgtctgcatggtgtttttcgggcagtggcttctgccatcatcaccacatgtttctctgctgcccactgtcctgaggtgggccgtcgtggaagccctgcttcctgccgtttgcgggacgagtcccgcgctcttttttcctgtccccatcggtagtctgcgtgcacgtgttttccacagtaaaaccgtgttgtgtaactctttccagcaaagtaacaatccgccattacaaaggtcgtcctccttgatccagttaacgagtcagaactcttctcccaatcagcagagaaccccgcaggtcatcggggtcatgcagagtcaaaacagcagcgcgtgcaaccggggaccccggccactggagcaggtcacctgttacaagtgttgcgagaaaggacactacgccaacagatgcacgagagggcacttggcctttctcagttgacagtgaccgcagttggagccagctcggagcagctccgggggcccgctgttgggagtgttcatttaactgtttgatgcgcttgttggcaggactgtggctcgagctggcccgcagacacgtgggtttcatcactctgaggggccacgtctgttagtttcctatcattttgccttagtattttttgaaaaagggacatgtgtcctgtgggtccctgcagtcgacatcatgtttggctgggcatcgatgcctcctttctgggactccgggcacaactccctgccctgctgaaaccctaaaactgtgcctatatctgtgaatttgaaatgagggaaccctttggggcaaaattcaggtgcccccattgcctcaggctggcccctggtcccaggtggccaacggttgaggaggggtacagggctctcaagcctgaggttttcttctctgggcttaattttctcttggggtacgtgcctgacagtgtttaaggtgtccgttgaactggagttgcagacttttaaatagatgaccccttcagatcatctgtgcctacctcctgcccatcaggcgtctacactgtcactcagacacctgtggcatgtggaggagactgccctgtcctgagcctggaaaatgtgaaactgtctcctgcaacctgctgggcatgtgggcctggctgtgttcaattgcaagaacaatttttatgaaatggattaaagcttgtttttt

SEQ ID NO: 315155 - DNA, 1217 bp, Homo Sapiens
  misc_feature (17)..(17): n is a, c, g, or t
  misc_feature (747)..(755): n is a, c, g, or t
ggtggtgtgggtttctntttcacaacgccgaaacaaaaatcaaaggtaccgagcctgggtggcgaattcggcacgaggcgcctctcaggagggaccaatgagcaatggcagatgagtctggggaccagcgaagaccaccagcacttcacctgcaccatctggaggccccaggggaagtcctatctgtacttcacacagttcaaggcagaggtgcggggcgctgagattgagtacgccatggcctactctaaagccgcatttgaaagggaaagtgatgtccctctgaaaactgaggaatttgaagtgaccaaaacagcagtggctcacaggcccggggcattcaaagctgagctgtccaagctggtgattgtggccaaggcatccgcgcactgagctgtgaccagcagccctgttgcgggtggcaccttctcatctccggtgaagctgaagggggcctgtgttcctgaaagggcccagcacatcactggttttctaggagggactccttaagttttctacctgggctgacgttgccttgtccggaggggcttgcagggtggctgaagccctggggcagaaaacagagggtccaggggccctcctggctcccaacagccttctcagatcccaccttccctgctgagctcttctgggactcagggatcgccagatcccgggggcaccaaagaggggtgggggaaaccatggggcggctaatgctggggggaaaaagcagtccaatgcctnnnnnnnnngtaccctcccaagcccggagccactccctttccaatggagaccctgtggccacaaaccttgccttgtctcccctaattgggttctacaccccaagggggggaaaccctccccctttttccagaaatggaaaccctgggcgcgaaaaaagaatggaaaaaagggtgttttctttccataaactttgtacacgcagaactcaaggaacacaattttgcatgaagggccgccaacttgcggggctgcagcagcattaaacctccgacaggggcactctcttattctcccgccgtaccggcggggccaaaagaaaaccgcacatatgggaaaagggagccccccggggagcccatctaccctggagtttctcctcggaccgccaccccatctctctctgggtagaccaacagatggggtaaagaaaacctggcgcggtgccacccccccatatcaacgggacaggc

SEQ ID NO: 315156 - DNA, 960 bp, Homo Sapiens
agtaaaaagcagtttttgccagggctcaaggaaaggaattcttcggctggaaagtccgggggggaaaccatgggtttcttttcccccaggcatagcccccccagtgttcccccacccttcttttgtggccccggaatctggcgatccctgagtccccgaaagaacctccaccaggaaatttgggaactgagaaagctgttgggagcccaggaagggcccctgggcccctcttttctttgcccccggggtttcagccaaccctgcaaggcccttccggacaaggcaacgtcagcccaggtagaaaacttaagagtccctcctagaaaaccagtgatgtgctggccctttcagggacacaggccccttcagcttcaccggagatgagaaggtgccacccgcaacagggctgctggtcacagctcagtgcgcgatgccttggccacaatcaccagcttggacagctcagctttgaatgccccgggcctgtgagccactgctgttttggtcacttcaaattcctcagttttcagagggacatcactttccctttcaaatgcggctttagagtaggccatggcgtactcaatctcagcgccccgcacctctgccttgaactgtgtgaagtacagataggacttcccctggggcctccagatggtgcaggtgaagtgctggtggtcttcgctggtccccagactcatctgccattgctcattggtccctccttgagaggcgtaagtgaacatacacgtatatttgtcccccgggcccacgttatgggagaaggaatgcacgacgccgccgggccgcacgtcaaacgccaccgtcgtgggctcggacaccgcctccgccggcctcagcgccacggcccctaggagcagcgcggcccacaagctcgcgccgacgccgttccaccctccgctgggcgccgccatgttggactagggtcctcagggcccc

SEQ ID NO: 315157 - DNA, 854 bp, Homo Sapiens
  misc_feature (812)..(812): n is a, c, g, or t
  misc_feature (821)..(821): n is a, c, g, or t
tgctttttaatgttcttatttatttaaatatgaaaaaacatttcatctcttcccagttcatctgaaaggaggtcccctgggtaaacataggaaagcagttctgcaggctcatgaaggatgctcggctggaggtcggggggagcatggctgctttccccagcatagcccccatgttccccaccctctttgtgccccggatctgcgatcctgagtccagaagagctcagcaggaagtgggaactgagaagctgttgggagccaggagggccctggaccctctgttctctgccccagggcttcagccaccctgcaagcccctccggacaaggcaacgtcagcccaggtagaaaacttaagagtccctcctagaaaaccagtgatgtgctggccctttcagggacacaggccccttcagcttcaccggagatgagaaggtgccacccgcaacagggctgctggtcacagctcagtgcgcgatgccttggccacaatcaccagcttggacagctcagctttgaatgccccgggcctgtgagccactgctgttttggtcacttcaaattcctcagttttcagagggacatcactttccctttcaaatgcggctttagagtaggccatggcgtactcaatctcagcgccccgcacctctgccttgaactgtgtgaagtacagataggacttcccctggggcctccagatggtgcaggtgaagtgctggtggtcttcgctggtccccagactcatctgccattgctcattggtccctccttgagaggcgcctcgtgcggaattcgccacccaggcctcgntgctttagngtggcgagaccggggggcgccggcgccgtacgg

SEQ ID NO: 315158 - DNA, 152 bp, Homo Sapiens
gcaggcaaaggggctgacttttattaccagtttgtagttctttacatatcttgtgacaacagtcttgtatcaaacacatatttttcacatatttttctctcagtttgttagctgagaaattttaagtttctgatgaagcctaatttatccag

SEQ ID NO: 315159 - DNA, 480 bp, Homo Sapiens
  misc_feature (345)..(353): n is a, c, g, or t
cctgaaccgagtctgttcagattctcagaccagatccctggccatgccaccatggtagaaataggccttggcgtccttatttccagggttttgccagtgatttggacttccttcctttccttttgcctcgcctcctctcccatcggtcatttactcacctgcgcatttccgctggttccgcgtttctgtctagtggctcaggttgtcgcccttcagggcatgcctttaattgagataatttctctttacttactgtataggagggaggggacccagaaggcgtgttggttcctcactgcctcatctgtgcgatgctacacctctgacagatgtgaacttgagggnnnnnnnnnggttgtgattgtttgtttgagatggagtctggcgcctaggctagagtgcaatggcgcagtctcagctgagtgatcctccacctcctgggttcaagcgggtgtggtgcgtgagtgcgtgggaggctga

SEQ ID NO: 315160 - DNA, 2012 bp, Homo Sapiens
  misc_feature (446)..(496): n is a, c, g, or t
gcggcattgtttgtttctatcctcggtcgcttgttctccgcgcgtattgtcgctgtgctgcgctgctaccgcctcgcgtttcttttcttatgctgccgggtctctcattctgcgtggtgggggttgctcccgcctcgtatgtgtgccccccgcctagttgggtggttccccctgccgtcgatgggacgtgccagctgcagtcgctcgttttgtccgctgcggccggtcgtggtttataagtcgccgcgccgcgggcctgcgtcgtgtttattatagttacctcgcttcctacggtggggggccctctgtttgtgaatggtaacatggtgcgcgggtcacttatatcgctggccctcccagcgggttctattttatgttcggcgccccccccttttttgtttttctggtttgttgtctttcttctttcttgtatgttttcctgtggnnnnnnnnnnnnnnnnnnnnnnnnnnnnnnnnnnnnnnnnnnnnnnnnnnngcagcttcccaaccattttatacagagtcacagtgtcagaactctggtggaaaacagggtggggtcgggggatgacatccaactcaggaggtgtccatggtctcgcctttgagttcgttgaagaggaaggcgtcctggtactccttcatgtactgcgtggagcgggactcgtccaggaagagtgagtagacccgcttgatgtcatccacctgcacttctgtacccttgcgtttccggcacaccaagctggcagctgtgatgagctggatggcgtagcgcagtgacgtctccagcccgatgcgggtcagcaccgtgtaggcgtcctcactcatctccacatcttcttcctcgcaccggatgcggaggatctgcttcgtgtctttctcgctgtagggggtggtggagacgataagcagccggtccagcaggtctatggggatgccgtgagggctctggtagctggtgccccggattcgcgtgatgccacggttggtggccatgatcaggacaggcgccatgtcactctccagggcccggttgaggaaggagaagctctcgatgtccagcatgtggacctcgtcgatgaacagcactccagggatgatctccgccttgccctcctcgcgccactcagccaccttggcattgatctgctcacggacttctgacttgatctcccctgtgtcacctgagaagagcgccaggaagccctgggtgcgagagttgatgacgtcgatctcgtgcagggacacggtgtgcaccacctccttgcgtttctggagctccccatctgggcactgcacgaacttggtctgggagcccatagcgtcgtagtcgcgggcgcgtgtgaaggagcggcccagcttggagatcttgcccgtcgccttgtcgatggtgatcacgtccccggcctggaccttgtccttggtcagggactcaatcatcttggtgcccaggtcgtagatggtctccatctctgtggtcttgagggtcagtttgcccaccttggagcccgtccctgttgctggtcgatcaatctggatctccaccacctccccttcgatgatctccgtctcctccttgatgcgaacgccgatggaccgccggaaggcctgcgtcagcgcctcggtcttgctcatctccagggagaagatttcactgccggcgatggctgtgaatggcgtgtcagggcccagggcctgcgccatgcccatggcgatggccgtcttccccgtgcccggctggccagcaataaggactgcccgaccggcaatcttcccttcccggatcatctccagcaccacgccagccgcccgccgtgccgccagctgacccaccatgccttgcgaagcctgccgaggctccaaggcatcgtccagccccagtccccggatgtgggagtgggcaccgattcgctcaatccttgttacatcacggatctccgggactttggttgtggctgtaacggttgccatgatgctcaccaactgccagagtcctagcggaaacggaaaac

SEQ ID NO: 315161 - DNA, 1634 bp, Homo Sapiens
tatcttttgaatggatctttttatttctaattttataagatgcaacatctcaccccgttgacacggttagtttgcatgcacacacagagcggccagccgccccgagcctgtgggcaggccagcagggtcagtagcaggtgccagctgtgtcggacatgaccagggacacgttgtacagggtgggtttaccggtggacttgtccagggtcctctcggtgaccctgttgggcagggcctcatgggcaccacgcaggtgtaggtctcccccgtgttccattcctcttcggacacggtcaggatgctgtgggcgaagtaccggcctggggcttggggctcaggcattggggcgctggtcacatacttctccggggacaagggctgccccctctgcatccactgcacgaagacgtccgcgggagagaagcccgtcaccaggcacgtgatggtggccgactcccgcaggttcagctgctcccgggctggtggcagcaagtagacatcgggcctgtgcagggccacccccttgggccgggagatggtctgcttcagtggcgagggcaggtctgtgtgggtcacggtgcacgtgaacctctccccggaattccagtcatcctcgcagatgctggcctcacccacggcgctgaaagtggcattggggtggctctcggagatgttggtgtgggttttcacagcttcgccattctggcgggtccaggagatggtcacgctgtcataggtggtcaggtctgtgaccaggcaggtcaacttggtggacttggtgaggaagatgctggcaaaggatggggggatggcgaagacccggatggctgtgtcttgatcggggacacacatggaggacgcattctgctggaaggtcaggcccctgtgatccacgcggcaggtgaacatgctctggccgagccagtcgctctctttgatggtcagtgtgctggtcaccttgtaggtcgtgggcccagactctttggcctcagcctgcacctggtccgtggtgacgccagaccccacctgcttcccctcgcgcagccaggacacctgaatctgccggggactgaaacccgtggcctggcagatgagcttggacttgcgggggttgccgaagaagccgtcgcggggtgggacgaagacgctcactttgggaggcagctcagcaatcactggaagaggcacgttcttttctttgttgccgttggggtgctggactttgcacaccacgtgttcgtctgtgccctgcatgacgtccttggaaggcagcagcacctgtgaggtggctgcgtacttgccccctctcaggactgatgggaagccccgggtgctgctgatgtcagagttgttcttgtatttccaggagaaagtgatggagtcgggaaggaagtcctgtgcgaggcagccaacggccacgctgctcgtatccgacggggaattctcacaggagacgagggggaaaagggttggggcggatgcactccctgaagagacggtgaccagggttcccgggccccaatagtcaaagacgaggtggttctttccctcaccctcaggatgatctttcgcacagtaatatatggccgtgtcctcgtctctcaggctgttcaattggagatacaagaggttcc

SEQ ID NO: 315162 - DNA, 464 bp, Homo Sapiens
  misc_feature (102)..(102): n is a, c, g, or t
  misc_feature (259)..(259): n is a, c, g, or t
ttttatcttttgaatggatctttttatttctaattttataagatgcaacatctcaccccgttgacacggttagtttgcatgcacacacagagcggccagccnccccgagcctgtgggcaggccagcagggtcagtagcaggtgccagctgtgtcggacatgaccagggacacgttgtacagggtgggtttaccggtggacttgtcccgggtcctctcggtgaccctgttgggcagggcctcatgggcaccacgcaggtntaggtctcccccgtgttccattcctcttcggacacggtcaggatgctgtggggcgaagtaccggcctgggggctgggggcttcaggcattgggggcgcttgggtcacatacttttttccgggggacaaggggcttgccccctcttgcatccactttcacgaagacgttccccggggagagaagcccttcaccaggggacgttatt

SEQ ID NO: 315163 - DNA, 1076 bp, Homo Sapiens
attggcccattctttagtttccaaataaaatccagtagaaataaaagtaatataattttcaaagaattcatacatactagaagtcttaggaaaagcagcttctaaatgcaaggactaggaggtttgcccatcttactattaatagttacacacatttctcctcatggagtaactgaagctttctggcttctttgtggaactttagtttgtaggaaagcatatacatagggccaaatcttgttggtttctgttccggagaatgtttccagcaccccttttttctggtaatattccaggactggctttgtttggtcttcataagcctttagtctcttgataaccgtctctggtttatcatcctcacgctgaatgagaggctccccagtcaggtcatcaatgcccacagttttgggagggttgaattcaatgttatagactcggccactggcgggatgaatccagcgagcagtaaggcgttgtttaatgacctcaaagggcacattcaggttaatcactgtgtcgatctgataagctctatctagggcttctgcctgtggaagtgtccttggaaaaccatccaacagccagctatactgggtgagatttttcagctcatgaagggccagccgagtcatgacatcatctgggatgagtttcccttggtcaatgaaagccttggctaacacgccaatttctgtgccccgcagcatgttgtcccggagcaggtccccgctggagaggtgcttcagctcgaagtgtgtagtgatgcgcgacgacacggtgcccttgcccgagcccggggcccccatgatcaccgctcgcagcagccgcgcggacgcccccatggccgcagactgaggcccgcaccgcgcgggtaccagggctttggcctggcctgcgcgctcacccgctcggcagcctgcgccggccggctagcagcgccactagcaggcggctactgcggttccccggcgttcccggaagtgagccgacagcccctggggccgcccagacagcgcgggaccccgctgttgcgtccgcctctcggctaccccggcgcacccaccgcccccgac

SEQ ID NO: 315164 - DNA, 367 bp, Homo Sapiens
ggccatgtcctcaagcctcaatgcactgctgcacggcctgggtcagctggctcagctcctggatctcccgcaggtactcgtgcgcgcctggctctcctcgaagatttcctcgctggccgctggaacctcatgcaggaactcgtgggtgctgcgggagaagatgcggaccccatcgagctcaggcaccaggtaggagtcctcatccagcacaaactggatgctctcgggtgcatcgcccaccaccatcagccgcctttcccaggccaccaccacggccctctccttgctacgaggacggctgcaccagaccatctgctttggaggtgcccggatgttgcagttgaactcacatagcttctccttgagt

SEQ ID NO: 315165 - DNA, 368 bp, Homo Sapiens
gtgttagaatgcctctgggttggtttagatgtcggagtactatgtgttccaatcactagacatatggaaacatggtgacaggtatctctctgtcgtggggaatattttgggagctcacacagcactctgccactagcaatggagagacttacactggtttgatgaggacaagactaagaagcacctgtgtggagcagaataagaaattttttaaatacctagacaattagctaaccagaccctatgaagaattgatgcctataatttctcatatagaaacccattactgctatgtggttaaagcaaaacgaaaattccattactgctcattgtgttgtagagaggagcttaagcatacaactgtctcg

SEQ ID NO: 315166 - DNA, 831 bp, Homo Sapiens
atgagctaccgtgcctggcctaaaccttacgcttttgaggttgagtgcaggccttgtgataactaagcgctacttttgacgagccttcaacaagctgcccagtcctctcctcagcagacgcatcaggttgtagttgcatctttacagtggtctttccttttattaaatctatagcagtgaatatagatttgattcaacttttagttacgttctctcaagaatcctaatcaactttcagttagcctcttaagaaagggaaaaaaaggtgctggccagtcatccccaaattatgtttttgggctgtgcattctattttcttacataggcactggaattctgagtaacagttcatcctgggtttattagttgggaacagaacagtaacagacctaactgggactcatccagcactagcctcatcttagctgccccttttctctgctttgcagtttactgcttccctgggctagccataacggggttctgggcaggtcagactcttcagcaagacagtgtattaatagtgtgaattagatacactgatgacctgctctgcctagttaagaaactgaattaatcagcagttacaaagcacatactttgatacgtgctaggctttgcctcctggcctctagataattaagacggcccagggaataccagcagagaagtgctaattgtattagggtgttacgcagacctagacgagctgttcacttctggtacctgttggtcagaaaaagaatttatttagagattatgatcatgtaaaattacagtactcaacccttctagcaaagtatttttttgaaaaataaactaaatgccttt

SEQ ID NO: 315167 - DNA, 624 bp, Homo Sapiens
  misc_feature (146)..(155): n is a, c, g, or t
  misc_feature (458)..(458): n is a, c, g, or t
gagctatttacatttcttattggttatttacatttccatgcatggttttctggcttatgatgtgaaattttgtactttggatagttacaaaggatgcaataaaccaacaaccagtctctttagtttttcattatggaatacatacnnnnnnnnnnaaaggaaaagatatcacatgttatctgtaattgaaatcagatagatggctaccagacacagtaatatggagagtatatttttggttttttggctaaaacaaacaaaaaacccaggtaattaagcttagaagtctagttttttattctgtatctatgacaagtggtactcagttatttgaactaaaggagataaaagcagagtaattacttaatgtttaatttaggaaacccagacaaggcttatgtaataataaactgaggatttttagcaccttcatttaggaagagattcccttctctttntcacttatattcaaattgtgtttggtgttctatccggttctagattcttcaggctaggccatttcttttctggataatttagatggattggactgttctaccacatgtcatttggggtttctttactctttcttttctgagatcatctgtggctgatacatctctg

SEQ ID NO: 315168 - DNA, 1420 bp, Homo Sapiens
  misc_feature (41)..(41): n is a, c, g, or t
  misc_feature (146)..(224): n is a, c, g, or t
  misc_feature (226)..(275): n is a, c, g, or t
  misc_feature (408)..(408): n is a, c, g, or t
  misc_feature (414)..(414): n is a, c, g, or t
  misc_feature (456)..(456): n is a, c, g, or t
  misc_feature (458)..(458): n is a, c, g, or t
  misc_feature (463)..(463): n is a, c, g, or t
  misc_feature (500)..(500): n is a, c, g, or t
  misc_feature (517)..(517): n is a, c, g, or t
  misc_feature (550)..(550): n is a, c, g, or t
gcctttgttggaagcgcatataaactactattagtttggtntgaaaggcctagaaggaaaaagcacatgaattttggagtgggacagagttgagtgcaaattcagtctctagcttgatactaaatgtaggacttacggtaaattannnnnnnnnnnnnnnnnnnnnnnnnnnnnnnnnnnnnnnnnnnnnnnnnnnnnnnnnnnnnnnnnnnnnnnnnnnnnnnannnnnnnnnnnnnnnnnnnnnnnnnnnnnnnnnnnnnnnnnnnnnnnnnnccaacctcacagcactgttgggagggttggggtgaagcaccaagtacgtgggtagcttatatcctacagaataattttcaccaacatgacccatgaccatgaagtttatggtttgactatctgtggggggggnacaaanatacatcatgcaacaaggtcattcatttgggaatgtgatgcntnctganagacttgagcgttcacttttcttcacttgcctgtgcngataagaggggtttggngtggtggtttttcaatagggagggtgtgaccgntatataagtgacataagagggtcacatgagagttaaagtgaagtaacttaacatacaattttcattctaatcttatacaataatttttcttgactattgatagatcacaataaaggtatgctgatgatataagttattttaagactttggggaaaaaggcttccgtctctggcattgaccttattgtggaggaccctccaaaatcttcagctctgcaccagcaggtatgctgagtcatgtatgatgacataaaccacaaggagtcaaggagctaaaacaaccacagcgactggctcagatctcagatgtgcaagatgaatcctcaggatttttcacacactgaagaaacttgtcaggtctgtagatattcttgcaggaaaattgaatattccttttgcttataatcgattccagctcttttatggtgggatcctggcataagtctctggaatcttctcttccaccatgtatcacccaggcctctagtgtctgaaccttctctggttgcaaattatggacttccacactcccaaaagtgctgtttttgtcaaagattttactgcgggatccattgagcatcacatggaccacatcacaggcagcttctgcaaactgcgggaaaccgttttccagaatactgaaacagggttgttgctgcagtcctttctccagtctgggcaagattgatagtttatttcacaccatgtgaggtcatcagcaaggtagcctagcagcgtgtcctccagggtgaacatgtcccgctggacctgtgtgaactgatgggccagatcttttattctgctccaaagaagaatcttgttgcaaggtacggtctgagttcccaacttcattagtggctgctgtgccgaa

SEQ ID NO: 315169 - DNA, 1292 bp, Homo Sapiens
gctatggaaagttttctttatgatttacttaatgtgtaacaataattggcatctttttcacacattacaaaaaattatacttggctcagtatgcaaccttttaagcatagccatattatttaacaaaagaggggaaaacctattctacccaacacagcatttacaaatgcacaaaacatgccactttggcttgtatattgtctagattaaaaaaaatcttttaacataaataagttagtataatttttcagtgtttttacagagttatgtacacaggtacacttcaaatggtttttccatacacaggcaatgaaatactgtttaaagatgtagtatccatttcacttatcctacaagtgtgcttttctctacatgaaccttcctttaaaaataacactttcctgtggataaatggacagagtaagctttaaattaaaaaatatttcattttttaatgtgaagttacttacagatctttaaaaatatcgagggatttagaattattttgactgtgtttacacagcccgaagtgaaaagaaaatgagaaaattttgtcaacaaatttaataaaagcagatggtcaattcttaacattcaaaactcccaagcacctcggatttttgccccaaactacctggagtgatcaccattctgctgagtaattaactggtaaattccaactttaagagagactggggagggcagtgaggataggtttctgttgcttttttaaaaaagccacatgcagctatctaacaaactttagatagcttgggagatcaccagatctcccaaatgagaataaacttcttgtaaaaataaatagcaattatctttagccagtgttcaaatttttgtgatttttttaaatgaagtatcagctgtctctgaaagggacattacatctttaaagaaaacaattcaaacccttccccaaaattgcttctcttcatgcaagtcaaatatttatctacttgctgtaaatcaaagcaagctcttcataccccgctccacgtcagttcctcagccccaccctgccctcccttccccaaagtttatgtgctacataaaaggtaaaaactatatacacaggtagtacaatgaagcaaataaggaaaaacctaattgcataatgctacatccaacgcttttagaggcagatcatttaagagtgcctaaaattttagtgttattgtgttgttgtttttcagtgcttatacaggatgtccattccatgaagtcagcggatatgtatttttaaaattttcatgtatatcttccttgcttcaccc

SEQ ID NO: 315170 - DNA, 1161 bp, Homo Sapiens
  misc_feature (110)..(121): n is a, c, g, or t
  misc_feature (134)..(287): n is a, c, g, or t
gggggggatcaacccctttttttggcccgggtttttttgggaaaagaatagaccccttttcttttcctttgggggccccgcccccaaaaaaagggtttaaaaaatttttnnnnnnnnnnnngggggcccaaggnnnnnnnnnnnnnnnnnnnnnnnnnnnnnnnnnnnnnnnnnnnnnnnnnnnnnnnnnnnnnnnnnnnnnnnnnnnnnnnnnnnnnnnnnnnnnnnnnnnnnnnnnnnnnnnnnnnnnnnnnnnnnnnnnnnnnnnnnnnnnnnnnnnnnnnnnnggtataaaaagttttttatttcaaaatgcaaaatggtggtcattgtaataattaataataataacataaaaagcatttatccttcctccctagtgcaaaatggtagacgcatttagataattcacacagtgttggaaatgtcatgacaatgcagtgctgcacagcagcaaaactcaatcccaaactcctttggtggatgcttgtggtaggtcagttctagatgtcagcggtttctctgaagttaagtccaaataaaaaacagcacgtgctcctgcactctcccagcggagtcaggctcctgtgcgcgcgccccctctgtctctccattcctctctcggtctgtctctgtctactgggtctccctcccactccgctggtctcccacagttcctaggaggcgtgctgccggttggacagggcccggccgccgaggaccgtgtcctgctgcttgcctttctcctgcagggcttgcttctggagagcctgtcgctccagggcggcctgcagctccgccacggctgcctcctggtcccgcagacgtctggcggccgtgaaggggctgcacacagtctccatcaggccgagcaccacgccgaagagggccagcacgctgcccagcacgtacagcttcaccatcttccccttgcgcttctgggccatcatctccttggccagggggatcagctcctggaccgtttccatctcggctctgggctctcggaggcgggagtgaccttagtggcacggcgcgagcaggaggcagcgcgagctgcagttggcagcggtcagcgcgtccgttggtccgaccgacctcagcgttctcctcctctcggcagctgcagctctcccagttggagactccgccgctggcccc

SEQ ID NO: 315171 - DNA, 346 bp, Homo Sapiens
gggaggcagaacccaggaagtactgtttttatatgtcatttgtgtgatccccaagaagccttcttttttgtacctggtggttcaattgttttattttatgagaggtgtgtggagaaattctggttgtggccctactcatgccttctttagccatgttcccttactctagtaaaccattcatttcttctttcctggcctatgaacacagcacatactttggtggttagcttcgtgttatcaaattattgtacccagttgctagactttcactggatcaacaaacatttacttttgcactttttaggatggttagtattataaggaggtataattatgattatttgtt

SEQ ID NO: 315172 - DNA, 779 bp, Homo Sapiens
  misc_feature (163)..(174): n is a, c, g, or t
  misc_feature (253)..(331): n is a, c, g, or t
  misc_feature (552)..(670): n is a, c, g, or t
  misc_feature (745)..(745): n is a, c, g, or t
gggctttttggagacagattcgcagtggtcgcttcttctccttggatttgttaaggattccaagtaactcttatttggagagaagacgatctgcacttcgcattttggcattgacatttaattttagggtcctttatatagaagggagagtaggtaaactgannnnnnnnnnnnaacagggagggtttgacaatctttggcagacttggagcaaaagattgaggtgcatttcatgcctccttttgagagtctnnnnnnnnnnnnnnnnnnnnnnnnnnnnnnnnnnnnnnnnnnnnnnnnnnnnnnnnnnnnnnnnnnnnnnnnnnnnnnnataagccaccacgcccagccctcatacctcttttaaaagtcgacctgttttgcagaaagtctgctgtttttgtactaaaggctttggaatttggcatttagctaggaatgcacattctttcacctcattcatactttaagaaccacagaagtgactctgcttggccagaaggcacactgtgttggtggttatattaaaagtccttgagtattttgcttttnnnnnnnnnnnnnnnnnnnnnnnnnnnnnnnnnnnnnnnnnnnnnnnnnnnnnnnnnnnnnnnnnnnnnnnnnnnnnnnnnnnnnnnnnnnnnnnnnnnnnnnnnnnnnnnnnnnnnnntagtagagatgaggtttcaccatattggccaggctgttctcaactcctgacctcgtgattcgcccaactcagccntcctaaagtgctggggattacaggctgtggagcc

SEQ ID NO: 315173 - DNA, 688 bp, Homo Sapiens
gtaaaacctaaaaatttattgttattttatgattaataaattgtcaaattagttatgacactatcccacactgaataccaccatttgccagtacagaagtttttaaaccaaactgaggcataaagcagaaagagcaaagacacatgaatacccttcttaacaatctcttctacttatgcctccaccgtaacctttgtacttgttttcctcctggggaaagtgtcagaacagtgcaaggactggtgggtaacctggcctcttaacctttttaatagcaagcaacatacagaagtaatgcaatcaacttgtatttcccttgattttattggtctgaattcattttaggttactttaacattttaatttcctgtaactgtacatgagagaatataatcacctaagagaatactgaaccagagtcagccaaatgtatcactgaccctcaattatgttttaattggtcctaaaggaatgtaccaccccaacagtttgggagttaggcaaacagaattctttgggggagggaagaaaaaggctataaaacagccaaatgtactcaacatcattaaaacggctctttgtttttcacccctgaatgatacttctttactacactatatgcacagaaatcctaacagaatcttggttgccagtattatttaagctggccccatccaggacagattcc

SEQ ID NO: 315174 - DNA, 800 bp, Homo Sapiens
  misc_feature (193)..(320): n is a, c, g, or t
  misc_feature (379)..(665): n is a, c, g, or t
accctaatcggctaaggcagaattaggatttgaacccagatccccatgatgccagaatctaagccttgaccaaatatgtgttactattacttttgttgttgttgttgttctgggtaactccaaccctctgctcgttggccttgtcacctcagtgctgattttgcagatgaagagactaaggttccgaggtgcnnnnnnnnnnnnnnnnnnnnnnnnnnnnnnnnnnnnnnnnnnnnnnnnnnnnnnnnnnnnnnnnnnnnnnnnnnnnnnnnnnnnnnnnnnnnnnnnnnnnnnnnnnnnnnnnnnnnnnnnnnnnnnnncttgggttgttaggagaatgaatgaggtgatatccacagtgtccaacaccctgcaagcnnnnnnnnnnnnnnnnnnnnnnnnnnnnnnnnnnnnnnnnnnnnnnnnnnnnnnnnnnnnnnnnnnnnnnnnnnnnnnnnnnnnnnnnnnnnnnnnnnnnnnnnnnnnnnnnnnnnnnnnnnnnnnnnnnnnnnnnnnnnnnnnnnnnnnnnnnnnnnnnnnnnnnnnnnnnnnnnnnnnnnnnnnnnnnnnnnnnnnnnnnnnnnnnnnnnnnnnnnnnnnnnnnnnnnnnnnnnnnnnnnnnnnnnnnnnnnnnnnnnnnnnnnnnnnnnnnnnnnnnnnnnnnnctaaaaataatgaacagtgtccaacaccttgaaagcattccgcatgactgaacgatcactggtacgtgattacccatgacgacccccacttttcttgggcctgaggtctctttttcttgtacggcatttcagggc

SEQ ID NO: 315175 - DNA, 833 bp, Homo Sapiens
gaagggctgtagggtacttgtcaattcgccgccatgaacgtggtttttgctgtgaagcagtacatttcctgatagaggacagcgggcctggtatgaaagtacttctcatggataaagagacgactggcatagtgagtatggtatacacacaatcggagattctacagaaggaagtgtacctctttgaacgcattgattctcaggagaatgtggattatattattcaggagctccgaagacccaaatacactatatatttcatttatttcagtaatgtgatcagcaagagtgacgtgaagtcattggctgaagctgatgaacaggaagttgtggctgaggttcaggaattttatggtgattacattgctgtgaacccacatttgttttccctcaatattttgggttgctgccagggtcgaaattgggatccagcccagctatctagaacaactcaagggcttacagctctccttttatctctgaagaagtgtcccatgattcgttatcagctctcatcagaggcagcaaagagacttgcagagtgcgttaagcaagtgataactaaagaatatgaactgtttgaattccgtcggacagaggttcctccattgctccttattttagatcgctgtgatgatgccatcaccccattgctaaaccagtggacatatcaggccatggtccacgaactactaggcataaacaacaatcggattgatctttccagagtgccgggaatcagtaaagacttaagagaagtggtcctatctgctgaaaatgatgaattctatgctaataatatgtacctgaactttgctgagattggtagcaat

SEQ ID NO: 315176 - DNA, 548 bp, Homo Sapiens
gcgagcggtcggcggcggcggaggcagtgtctggcggtcgcgcgtggaggtcggtcgctcagagctgctgggcgcagtttctccgcctgctgcttcggcgcggctgtatcggcgagcgagcgagttcccgcgagttctcggtggcgctcccccttcctttcagtctccacggactggcccctcgtccttctacttgaccgctcccgtcttccgccgccttctggcgctttccgttgggccgattcccgcccgcttcctcctgcttcccatcgaagctctagaaatgaatgtttccatctcttcagagatgaaccagattatgatgcatcattatcacagaagaaattcgtgtctatagcttttaaggacttgattacatcattttcaagcctgatagttttggaatcaccattagagcttaagacacacctgccttcatttcaaccacctggcttcataccctgacgaagtgcaccctttaacactcctttgccttggattacttaagagttcccagtacatttcgcacccaccagagagccttatgg

SEQ ID NO: 315177 - DNA, 606 bp, Homo Sapiens
gggagtcctcggcgtgggctcccggcctcgcagcggcagctgcagctgcagcggcacgcgagagctgtcaaatgcacgttctcggaccccacccggacccacggaatccgaatctctgggtgggtccgcgcaactgtggagtggccctccaggtgatgaaaaccgtgaggacatactgaatgccggtgacaaattaacagaggtccttgaagaggctaacactctgtttaatgaagtgtcccgagcaagagaagcagtcctggatgcccactttcttgttttggcttcagatttgggcaaagagaaagcaaagcagctgcgctcagacctgagctcctttgacatgttaagatatgttgaaactctactcacacatatgggtgtaaatccgctagaagctgaagaactcatccgtgatgaagatagtcctgattttgaattcatagtctatgactcctggaaagataacaggcagaacagcagaaaacacctttaatcccatacattccactttctgttgggttcaatatacggagagtgccctgtgccaaagccacgagttgatcgtccaagggaagaatctcatcaagaagcaacagagggtag

SEQ ID NO: 315178 - DNA, 857 bp, Homo Sapiens
cgttgtctgtgctgcttgaggagagtctgtccagtcttcttaactgggccaggcattgccctctcctcgtggtatcacagaacttttcttggaccgatcaactcggtggctttggcacaggcactctccgtatattgaacccgacaggaaagtggaatgtatggttttattaaaggtgttttctgctgttctgcctgttatcgtccaggagtcatagactatgaattcgaaaatcaggactatcgtcatcacggatgagttcttcagcttctagcggatttacacccatatgtgtgagtagagtttcaacatatcgtgtaacatgtcaaaggagctcaggtctgagcgcagctgctttgctttctctgttgcccaaatctgaagcccaaacaagaaagtgggcatccaggactgcttctcttgctcgggacacttcattaaacagagtgttagcctcttcaaggacctctgttaatttgtcaccggcattcagtatgtcctcacggttttgttggacggagttgatgagcgcccggtactgatggcggatctggcggcacaggccttggtcggcctccgcctccaagctggccgggtccatcatctcgtccccggaatccgacggctctgtgtcctccaggctcgggcgctctggggcctctctgcgctcccgcgcagagccgcggcgggacctgggcgacaaaggggaccgcgagcgggagcgggagcgggtgcgatcccgatgcgggtcgcggccccggccccggccctctggcccgcggccgctgctgtccccagacatagcgccaattcaccgtgcaacttcggaacggcggaagttcgcgccagaaactccc

SEQ ID NO: 315179 - DNA, 1051 bp, Homo Sapiens
ccccaacaacctgaccattttatcttctcagtctagggcttctggggtcaaaagaaaggactgaaatacagtatcacctatatgaatgtctgctcctgagggaagttaacaaaagccagattagatactgactggattttggtgtctctctcaagtggagaagatgtgaatagaaacagaagtttacaaaacactatagcctaacaaataggtaaaagctgtgatttaaagctggctcaagactggcccaggcataatactgtcaatctaaaggtaaccggcaacatcaaaaagtacatctcaaaagaatcaggcttaaagataaacaggagaactggaaatatctaagagtaagaagtgtaaacaatagaaaagaggtagggtttagggttctcatcttgggatttccccaggtcttcaagcttctatccttcctgggttctgggtcatgggcctccagattccggccgttagtcttgagatacctttttcgcttgggtcctctatcccatctaggtaggctttgtgacaggggccttccatccttgggttgtaggtcttccagctacaaccctgggctaatcttaggtcgttggccttgtgtcacaagtctcagttcttaggccttccatgtgtcgtgtctccaggtcttaagacttctaatctcaagccttggccttctgtcacaagtctcagttcttaggccttccatgtgtcctgtctcaggtcttacgacttctgttttcttggctcttgaggcttttgttgcgtttgcaggcctgaggcttctatctatcttggaacatgggctttccatcttagtcctcgggtctcaagtctcaaaccatctgtcttatactttgggccttctatccatatgagccttccaccttctgccctacttgagttctgggttttactgcagtctagggccttgttttggtcttggatcatctcacatggcagcctggcataaggaaccgctccacaatgcttgctctgatagccgacgttctgcacctatcaggcaggggttaggaagcccctctgc

SEQ ID NO: 315180 - DNA, 708 bp, Homo Sapiens
  misc_feature (226)..(271): n is a, c, g, or t
gagcgaggcctgggtggcgaattcggcacgaggggaaaccatgccaaagaagccggatgcacaatcagggcctgccgggctggtctgtggggaccagcggatccaagtagccaaaaccaaggcccagcagaaccacgcgttgctggagcgggagctgcagcggcggaaggagcagctgcgggtgcctgcggtcccgcccggtgtgcggatcaaggaggagcccgtnnnnnnnnnnnnnnnnnnnnnnnnnnnnnnnnnnnnnnnnnnnnnncccatggacacttcccccagcggcctccacagcaagctggccaacgggctgtctctcgggcgggctgcgggcacagacagcttcaacgggcacccgccccagggctgtgccagcacccctgtggctcgggaactgaaggccttcgtggaggccacctttcagagacagtttgtgctcacgctgagcgaactcaagcgcctcttcaatctgcacttggccaggctggcccccggccacacactcttcagcggcatctcggaccgcatgctacaggacacggtgctggccgccggttgcaagcagatactggtgccttttcccccccagactgctgcttccccggatgagcagggtgtttgccctctgggagtctggagacatgagtgatcagcatcgacaggttttgcttgtttttttccacttaccgggtacgccgg

SEQ ID NO: 315181 - DNA, 578 bp, Homo Sapiens
  misc_feature (566)..(566): n is a, c, g, or t
gggaccaggctgtgtgcttgctaactgtgcttcaggaatccgctctgtgatgccttcctgtctggcggggttacccccagttctacccagtccctgtcctcggtcacatgctgccgccgcctcttcccccgcggtgccgggagcccgcgttttgtttgtcagcagttaggcggtgagtatttatagacgccacggcagtcctgcggtgcgcaaggtttcaattactgcgatgcgccccacaagacgaaaggttcacgcgctgcgtctgagctgcacgtctgccccggagacccgcgtggatgttgcccagacgacacgtgcacattcagatgacccatgctaaggaccaaagggatgccaccggcccaatgtactgccttcatcccccaccatcctcaagggacccttgctgatcaagcccgggagactaccctttttgacctctctatggtgatcctgaccaccgtagaaatttgcagtcatgacatttcattgccctacatactgcataatgtcaaagtgctgagctgtggtttgctctgggtggaagcgctgtactgccacgnagcactgcggtc

SEQ ID NO: 315182 - DNA, 522 bp, Homo Sapiens
  misc_feature (452)..(452): n is a, c, g, or t
tgaagaatgagagaactaaaaagcaaaatctattcaaatgattagttgactatttctgaatctaaatctactgcagatgacaattcaggccattactcagggccagtctttgttccactgataagcagttggggcagtgaggcaggaaagccacctgctgagaacagggtctaaaagagaccagaggtgggatacatgcaattaacccttaacctcttcccggctcaccatgatggagcagctgatttgcctggctctcctcctctctatattttcatctctatatgccctttgtagctgccccaaattcacctccttttttggggaaagtaggtatgtatggatcttcatattctgatcgtcttgaaatgagttaggagaagcagtatttttcttttctggttaacagtcaaggagatctctggtttatgagagtaaacttggttacattntcagctataaatgactggctctcttaggaaatactggacagtacttggaggctggaagagtatggttgtc

SEQ ID NO: 315183 - DNA, 855 bp, Homo Sapiens
agtgtattttgcccaaatccccaaattttttgggggtgcccaacctgaaggaggagggcagaaaactttcttggcccaaaatttatttaaaatgcccaaaggcaaggttacgggcgacccaaaaaatatcccttacccaaacccataaaataatgacctaggtgcctggataatatataaaggaccagggacccttgttcttctgagaagagtgacaaaatctcagatccattctccaggaggaaagataattaaacaaaattggagtgtcattctcttcagcttcaacctttattccactaaaaaatgtctccattccatagaaacacattgcctctttcatcttccacaggctgggtagtcaaaacacccctcaagtgtaggacgtgagcagaaaataaacactggtagttaacatcagactttaacaattgtttactactattgggtccccgctgtttaagattatatagtaagtcctcttttaaatcttgactgaaatgctcagcagaaaagtttacagaacaacaaatgccacacattgttatgtgaaatcaggttgactatttcttgattttggtcttgtctaagttttctatttcttggtattcttttttcagttcatccaatatattcttgctctcagacagcatttctgttcggtcctattcttcttaaggttagaaagttcatccaccacaattttttgttctttaatcttgctgcttagatcctccttgtgtggggtcgaattgtcggtggggatcagcacagagctgtcctctggtcgcgtccctcggctgggcatttccaccgagcgcaagacacgcaggatggctcagccctgaaagagcc

SEQ ID NO: 315184 - DNA, 707 bp, Homo Sapiens
ctcagaatccatcctaacaggaggaaagattatttaacaaaatttgaagtgtccattctcttcagcttccaacctttaattcccactaaaattttctcccattcccatagaaacacattgcttctttcatcttcccacaggctgggtagtcaaaacacccctcaagtgtaggacgtgagcagaaaataaacactggtagttaacatcagactttaacaattgtttactactattgggtccccgctgtttaagattatatagtaagtcctcttttaaatcttgactgaaatgctcagcagaaaagtttacagaacaacaaatgccacacattgttatgtgaaatcaggttgactatttcttgattttggtcttgtctaagttttctatttcttggtattcttttttcagttcatccaatatattcttgctctcagacagcatttctgttcggtctgcaagaaagaatatattgctgttctgttgttgcctatatactttcctattcttcttaaggttagaaagttcatccaccacaattttttgttctttaatcttgctgcttagatcctccttgtgtggggtcgaattgtcggtggggatcagcacagagctgtcctctggtcgcgtccctcggctgggcatttccaccgagcgcaagacacgcgggatggctcagccctgaaggagcctacggcattagccacccc

SEQ ID NO: 315185 - DNA, 535 bp, Homo Sapiens
ccgcagagggggccagcgtctagtccagcagcccggggcccaaaaagtcggacatgtgcgagggctgccggtcacttgctgcagggcacccgggatatatcagccatgataaagagacctccattaaatacgtcagccaccagcaccccaggcacccccagctcttcagcattgtccgccaggcctgtgtccggagcctgagctgtgaggtgagccttgtggccacagagcctgtctctgtgggagcccacatgctcccaggtgctctgggtgggctcggagccagcattgcacagggaggcaggcactggtcctctctcagggcggacccgcagatcagcacagcacagggtacaggacgccttccttgtccagaattgcgggaggagtcatgttggacttgctgagcattttctgattgagtgctagcttttgcactttaagcaccgaacttttattatttgtcctttctttattattattggtttctttttttcttcttttgtgtcaggggtctcggtctgtcgtccggact

SEQ ID NO: 315186 - DNA, 730 bp, Homo Sapiens
  misc_feature (22)..(22): n is a, c, g, or t
ggcaaagggcaggcagttcgtnagcggacacaagcacatggcggaccgtggccatggcgggcgctgagtggaagtcgctggaggaatgcttggagaagcacctgccgctccccgacttgcaggaagtgaagcgcgttctctatggcaaggaactcaggaagcttgatctgcccagggaagctttcgaagctgcctccagagaagactttgaactgcagggatatgcctttgaagcagcggaggagcagctgagacgaccccgcattgtgcacgtggggctggttcagaacagaatccccctccccgcaaatgcccctgtggcagaacaggtctctgcccttcatagacgcataaaggctatcgtagaggtggctgcaatgtgtggagtcaacatcatctgtttccaggaagcatggactatgccctttgccttctgtacgagagagaagcttccttggacagaatttgctgagtcagcagaggatgggcccaccaccagattctgtcagaagctggcgaagaaccatgacatggtggtggtgtctcccatcctggaacgagacagcgagcatggggatgttttgtggaatacagccgtggtgatctccaattccggagcagtcctgggaaagaccaggagaaacctgtgccaccccgtgtttcagacgcagttcggaaggatcgcggtgaacatttggtatcgggcggcaccaccccctcaactggctta

SEQ ID NO: 315187 - DNA, 1312 bp, Homo Sapiens
ccgtcctaagatgccaaagcattctagttgtgttggaagcagcagagacaagagagttaggtaggaaacagctgtacaggccaggtataatttatacatcttaaaagttataattctacaatcccaagggagtagaggttatagtcattgaatgactgcttgataccatgtcctcttcgtacttcgattactttttaacacctgtgggtatgtataaacgattacacttgtttgcctcctccacctcgcactgccactggctggctgttctgaacaaatgcacctcctccacgaattgcacttgggtgagttggagaagctgctggatgttgcccgggacgaataggtttagcaatctgtgcagaatgccctcttctggccatattctttgacctgactgcttcctttatgcgatctacttcttgctgatagcgtttgcgatcacgagatgcattttctttagcttctttcagtgctgattccaaagctttcactctctcagctgtagctcgaagtcgcttttccaacttaggaagttcacagcggagatctgcattatcacgtaccaactgtttgtgcactttagtgagctgttcaagattattttcaagaaaggagattttttgcttctgagcagcgctgcctccggtgtcatcagaatcaatctcagcactctttttaactcttgtagccaggtcctgaacaaagagtttgcgcaggttgtgtaaagtctgaagttcttttgccactgtctcttccaaacccttcaagtcttgtcttgcttgttctcgtctatcttgcataaccgtaagttcatgtagttttctgctcttttcctgatctgtggctttcaacttctcatgttctactcttagacgttcctgctctaacatcattttctggttttggtcttgaagatcagtaataagttttgcttttgcttctacttcatctctcaaactactgatctgtttcttgatgagtttctctatggctctggatctgctgttcaacagcttgcttaacttcatttgcagtctgaaccttatttaagtgctccttttccatttcatggactttctcttgtgctcgaagctggactagttcttcactgagggcatcgacagattcctccaactgtcttttcttttgttccacattttgaaggtattcagtcaatgacttgattttggcttcatgttgagagatacgaagctgacatgctgctaactccttttcattttcttccatttttttgttgctctcagtttgtgtgctttctaactgcttgcaacgtttcaccaggttttta

SEQ ID NO: 315188 - DNA, 873 bp, Homo Sapiens
tggtaccggtccggaatttacgggatatcgtcgacccacgcgtcgccacgcgtccgcactgtttacagtcctgggcaccagccacccggcactggctctttatcacagctctgctcttgcttagctagtggggtgggggaaagggcagggatttgtttttttaattgggtggagagccaaacagctactgtccctgggtgccaagcaagccagttttttggttccctgagggaaactgaccctcctctcttgtggcaccatccagcctcagggtcttggagacttgagtaagaatgtgagtggagggggagaggtgaggagaggagcacagggtggatctgtggagggaagaggttacagggggaggagctgatgatagatcccacccagacttaagctgctggtgggtgggtgagctgggaagtaggactgtccagggaagggtggagagatgtagctaggggctggggagggggaggtggaagcgctattgagcatcctccacaccaaggttgatgaaggaagggatcccagcagggtttctgctctggggctggcaggttgcctggtattatgcccaaggccgctctgcctgggggaaagggcagccaggcagaggcccagtgtctggtaggctgctgaatttcctggaaggggtgattggatggaaagaggccagaaaccccagcctgagagactgctgtgcaccccacagtctgactgcacagagccgcctctgttggcaggaggcactgaggctccccttcctgtgtattgagaagcagtgtttgccaatatattttgctttcaattccaagaagaagctctgggaaaacctgtgggataaaaccaaaatgcccaaatgttgggacg

SEQ ID NO: 315189 - DNA, 562 bp, Homo Sapiens
ggctcctgagcacattttgctgatacagtctgtggggcttgaggagaccgcatgtattgttctttcttttgtttttcttctgagttctcaactgcggagagcacctgaaccccctttcctttttgaccgcaggttgcctggtattatgcccaaggccgctctgcctgggggaaagggcagccaggcagaggcccagtgtctggtaggctgctgaatttcctgggaaggggtgattggatggaaagaggccagaaaccccagcctgagagactgctgtgcaccccacagtctgactgcacagagccgcctctgttggcaggaggcactgaggctccccttcctgtgtattgagaagcagtgtttgccaatatattttgctttcaattccaagaggagctctgtgaaaacctgtggataaaaccaaatgccaaatgttggacgttgtttccttttccttttctctctctgattgttttaattgttctgtggtggttttaatggatttgagaccctggagggcagctgcctttctgatttcgcagctgctttttgtgaataattt

SEQ ID NO: 315190 - DNA, 359 bp, Homo Sapiens
atgatgtgaagcctggcgcggaagagcagacccaggtggccaaagctgccttcaagcgcttcctctacggcaccccaacatcctggcttacatcgatggactggagacagaggcgagagtggaggctggtggcctgaaggagctggagatctcctgggggctacaccagatcgtggccctcagcttcctggtcaacgactgcagcctcatccacaacaatgtctgcatggccgccgtgttcgtggaccgagctggcgagtggaagcttgggggcctggactacatgtattcggcccagggcaacggtgggggacctccccgcggggatccccgagcttgagcagtatgaccccccgggt

SEQ ID NO: 315191 - DNA, 1034 bp, Homo Sapiens
tgctttgcctgccccttggctcgaggggtggcaccaatggcggcagcagtggcggcgctggctgtggtggtggcaatgcgcggagaacggcgggttcccactgcgagtgttgggggaagccttggacagggcccttctttgaggctccccgccgcagaaggctgttcccctagcttcttgggtgttgttgaaggatgctgaaaggccatcgactggcgccggtccagcctgtttagtagaagctggagctgctttcttctgggcctcagtagtgctctgtttgcgcccttcatgtcggtctcggggagtcatggggcgtgggaaacagctggtggccttcttagactcaggagttccaggggccctggtggggctctagggagacccgtttgcgctgctgccgggtggtgatgccagtgccctcggctatctggattggctgcatgctggctcggcgcagggtctcttgggggtctccagttttcatctcctcatctgtgatggtgcccaggctcagggaaggcctggactccaggggatagcaggtcttcagatgtggggggcacactcgattgcgctgctgcagctctgcaatgcggttccagtcatccagctgctcaggctcatcctggcaagtgcccatgtagaagctgttccttcctggaggggccccactggacaccccggcctgggaacgacgagcagaactgcgagtggtggggcggtagccaggcaagctgagcagggctgagttgccataatcgggagaacccaggcgagctagagactgagtagaggaggtggctcgcaggctagcctgggaagcaggagcagaccgcgtgctgtagaacgatgagttggcgctgtctggctcttccacatctagcttcttggtcatggtgatgttgatgatctgcgtggtgcgccgacgagcggagcgggtcttacgacccgagtccaggaagaagtctcccctgagtccaggctgctctccagcctcgtgccgaattcgcccacccaggcctcgctacctt

SEQ ID NO: 315192 - DNA, 653 bp, Homo Sapiens
ctatttttattacattacaataattaggagtagtacagttcatgacaaaaatattacaaattttagatcacttcacagcacatactcctataaacatttaaaagttaatttcaattaaaagagtggtcatttttaatgtttgatatgaccaacattcttaggtcagcgcaaccaaatgatggaaaccatcgtggatcacacggcatatgtcccacaaaagaaagcacaatgtacaaaatgtgcatgtttcagtttacactatacaaaaatagttaaaatacattccaggtaaccatgttacattaagaaatagtcctagtaagaaattggcactcaaaggaaaaatgcaaaagtattttcacacatgaacccacaagacagtggaattggaacctttcggataaaccactgtaacccagttacgctctgtgggggtgtgggggaagatatgggccctcaacatttctgcagataccttttttcccctaaattcatctaaattacctatcattatcccacacaggcacttcaatctattaatctaaaacacagatcttaatctagttatgactattcttcaagaactcatgtgagtatctttctttagaaagaaagtctcattttatgacagctattcaggttctcaatgcaca

SEQ ID NO: 315193 - DNA, 1583 bp, Homo Sapiens
  misc_feature (181)..(181): n is a, c, g, or t
ttttccatggaagggaggccccggaaggttccgtttccccgttgttcccttagaagacaggggaaggcagattatgccccaaacgccccttgggcccagtctgggggctggcgggggaaggctgtttcttccaacctttgcccccagttgggtcagtagaccccccagttccctccccttntacctcccagctccactttgagggctgaggaagcgagaggttttctaggcagatttggagccctggagattgagttcacagtgtatgttctgggggcgctggtgcagtcagcggtccagtctccagcctgcaggcgtgcacactggggtggacgatgggtggccccgcaggtgtacacatttgggtggccccggcccctataccccagtgttctctttgatccagtcccgaaacagagggagccttgtgtacacgcctggcttgttcctctgagcgcagccgtctccccagctcaccacaccggcctggaagatccgcccatccgcctccacgctggacaggggtcccccggaatcaccctggcaggagtccacgccgccgctgaggaagcccacgcacatcatgcgcggcgtgatctgctgcggcaggaggttctcgcaggtggtctggttgatgacgcggatctcacccttttgcaggatcagcgcgccagtgcctccatactgggtgtgtccccagcccgtgacccagatggccttgccggcagggaagacatgggaggcgtccggcaggcagatgggccgcaccatggagctgtactctgccggtttctccagctccagcagcgcgatgtcatagtcgaaggtgaagtcattgaagaaggggtgggagatgatgcgcttgagcctgcgctcctgcaccccaggggcgctgcgctggctctggtcgtgcaagcccaggaaggccgtccactgcgtggggtctgagtacctgaatcctctgtcatcgatgtagcagtgtgcggcagagaccagccagttgggagagatgagggaagcaccgcagatgtggccctggcccagagcatgcaggcttacctgccagggccactcgccctcatccgcatccgtgcccccaacaacacgagcctgtctcgtgaatgaccgcagcccacagtcgcagtccttctcatctgagccgtcgctacagtcctccttcccgtcacactcagggttgcccttgctcaagcagagcccattgaggcagcggtaggtgtgggtacaagtgacgacgttcaccttggggcaggacgagaggcacttcccattggaacacctgaaggtctgggccggacaactgcacccctgctcgtcgctgttgtctccgcagtcgttcacactgtcgcagacccagaagaggggcttgcagaacttgttcttgcacgtgaactggtggccggcgtcgcaactgcagttgagctcatcgctgtggtcggtgcagtcggcccagccatcacagcgcagctccttccggatacaccgccccgtgcggcacgtgaactgccccgggcatgggtcactggagtcgtaggagaggtattcagctaagaagccggtgtcgg

SEQ ID NO: 315194 - DNA, 1355 bp, Homo Sapiens
  misc_feature (95)..(104): n is a, c, g, or t
tttgcagaaaaataaaaatttaatataattaaaagcaatttatatatcatcatgaaataaagagagatttgaaactatgtagtcaacagaggacnnnnnnnnnntctctcaagcaagagaatttctgatcaaatctgtcatatcactgctgcggaaaaggaccattaaaggcaatacacatcagtgcctttcttaaatgtatagactcaaaataggtgttttttgaggcactaagaaaaaagattcctctaagcaatcaaaaatcagcatttgagatttaatcactaaatccaaaatgagatcagcaaaaccagatactagtaaggtcactaggctcacaaaattgaactttggagaagagagatgccaaagagtaataatagcatcagaatgtgtgaaatctgtaaacctttaatcctcattatggatcaaagttctctgcgttccccactaaacattttatgtaggaaacagcagttaaaacgttgaatcagaaatggttaagtcacttgggtgagagatcatccatcaagatgaacgaagagcatgaattggagcatgctactggagactctgcggtagcgctgcctttagccagcgggtctgaggataagccactgctgctactactgccatccaaaatatctgaacatgaactgagatcagacagttgcgcggcatctggagataacatattggtagtgccttggaagagtctcttgggctgactttctgtctccatttcaccttttcttttaagaggaccaagaacactgggtctaatgcacttgactggactctgacttctcctgcttgaaaatcgtcttggactgggaactggacttggtggcaatccactgctgctcacgaacatctttccgaatcccctggtgggtgaaggtgctggagaaactggagtgaagtcaattctcttaggagaatataatttctccggcttgtcaaaatcactgtcactcaggctcaagctctcatcccatgattggcttatctgcattgccgtttgcatttccctttcatgtgcagtttctctgttcaccatatccaggccttcttccaggctgtgacggctcataattgttgtactattcctccgagttctaagtgtgtaaggttggaaaacctgtgaaaggtcactgagcccatggattaggggagcgctgctggatctcctcagggttcccccataagatgtgtcaggctcaaggtccagctccactcctgagccatgtcagacttgcaggcaggcacagcgggcagtgctcagctcctggtgcttagctatggactcccaagactctcactgcaggactgagctgctggggactggcagctgg

SEQ ID NO: 315195 - DNA, 362 bp, Homo Sapiens
gtcgcaggggcataaattgcgttaagtggaaaaccaggctctccaggggaattgcacgcagcttcagacattcagaaatgtagagagttatatatatcaaggtcctatcagcttcattcttaatttcatagtttttgaagaagacattggccttgaagtaatagatggcttcatccacaatatctgtatcttttgtctctctgggggcaggtcctttgaattgacttctgataggcaacagtgccatgtttccgatgagtttggtatcaggatccatgagagaagagtggtaagccggcatcttggcggcgcccgggtttcaacccagaggagcaggatccaggtacagcggagcgcttccg

SEQ ID NO: 315196 - DNA, 792 bp, Homo Sapiens
aaatttctttgaattcaaggaggttttttccaagtaaaaggacatggctcttcctcttctttccggtaaaaaaccttttaggaaaataaaggccaaaaggattggggtaccatcttgcttgggaaaatgcttgccccggggctctgggagacgggtggctggccggggcttcctttcactgtccaggttcctggaaagactcttgttcatgaactgtctcttcacaaagcaagtccaccacttgctggggtttatcattctgagggtcgaaaactttctcacaaagtctcagtccagtctcttgccttagctgttgtaaataggctctcatcacttcatcttcctgtttgtttgcaggtttggcataaattgcgttaagtggaaaaccaggctctccaggaatgggaaaattagtgattcccagcgtatacatttctttctcaccttggcttttggaattgcacttttgcagtttcttcagacattcagaaatgtagagagttatatatatcaaggtcctatcagcttcattcttaatttcatagtttttgaagaagacattggccttgaagtaatagatggcttcatccacaatatctgtatcttttgtctctctgggggcaggtcctttgaattgacttctgataggcaacagtgccatgtttccgatgagtttggtatcaggatccatgagagaagagtggtaagccggcatcttggcggcgcccgggtttcaacccagaggagcaggatccaggtacagcggagcgcttccggtctggcagcctgccc

SEQ ID NO: 315197 - DNA, 785 bp, Homo Sapiens
  misc_feature (81)..(81): n is a, c, g, or t
ttttcttcccaacccaaaaattctggatccaagagtttttttcaagtaaagaccaagctctttctcttcttctgtataaanccttacgaaaataaaaggcaaaagattgtgtacatcttgctggaaaatgctgcccagggctctggagacggtggctgcccgggctcccttcactgtccaggtcctgaaagactcttgttcatgaactggtctcttcacaaggcaagtgccaccacttgctgggtttatcattctgagggtcgaaaactttctcacaaagtctcagtccagtctcttgccttagctgttgtaaataggctctcatcacttcatcttcctgtttgtttgcaggtttggcataaattgcgttaagtggaaaaccaggctctccaggaatgggaaaattagtgattcccagcgtatacatttctttctcaccttggcttttggaattgcacttttgcagtttcttcagacattcagaaatgtagagagttatatatatcaaggtcctatcagcttcattcttaatttcatagtttttgaagaagacattggccttgaagtaatagatggcttcatccacaatatctgtatcttttgtctctctgggggcaggtcctttgaattgacttctgataggcaacagtgccatgtttccgatgagtttggtatcaggatccatgagagaagagtggtaagccggcatcttggcggcgcccgggtttcaacccagaggagcaggatccaggtacagcggagcgcttccggtctggcagcctccc

SEQ ID NO: 315198 - DNA, 1674 bp, Homo Sapiens
  misc_feature (231)..(251): n is a, c, g, or t
  misc_feature (321)..(329): n is a, c, g, or t
  misc_feature (368)..(388): n is a, c, g, or t
  misc_feature (450)..(459): n is a, c, g, or t
  misc_feature (510)..(534): n is a, c, g, or t
  misc_feature (612)..(626): n is a, c, g, or t
  misc_feature (665)..(668): n is a, c, g, or t
  misc_feature (676)..(676): n is a, c, g, or t
  misc_feature (678)..(782): n is a, c, g, or t
  misc_feature (784)..(785): n is a, c, g, or t
ggcgtagatattctcgctcaccattattttccgatagaagggggtcttcgttggagaaggtattattttttgtcgtttcccggacgcaaaaatccgcggcgggggtatttctcccccacacatgtggaggacaatagatggggggcggactatttatggtgtccagcattctttttccgcccccgccgggtttgtcctcctgtggggctccaattcctttttcacccaatnnnnnnnnnnnnnnnnnnnnngaccgcccggcgacagattacaagttttatctacaatggcgggtttttatgtttgcgcttcacaagattnnnnnnnnnagtgctctcttaaatatttccccacaaattttccgggcnnnnnnnnnnnnnnnnnnnnnctaaaatctgaaatgtggggcctcccctgggagcccctcccttgttaaggacccccaataannnnnnnnnngagagttccctttgggaatttctttcaagaccccctcggggttccctcccnnnnnnnnnnnnnnnnnnnnnnnnnaagccccaccccctatgttttttaccccgaattttctttttggaacaccgatttggtcccaatgtccttctccccttnnnnnnnnnnnnnnnaaaaaaaagttttttgaaaagattgtggggggccaaaannnntttaaaantnnnnnnnnnnnnnnnnnnnnnnnnnnnnnnnnnnnnnnnnnnnnnnnnnnnnnnnnnnnnnnnnnnnnnnnnnnnnnnnnnnnnnnnnnnnnnnnnnnnnnnnnntnntttgacatggaatgttagaaatttctttattattacttattcttattaagcgccagctttaatgctgcagaaaatttcaaatcacccttgataacccactttcttttctcccacccaaattcttgatcaagagtttttcaagtaaagacatgctcttctctcttctgtataaaactttacgaaataaaggcaaaagattgtgtacatcttgctggaaaatgctgcccagggctctggagacggtggctgcccgggctcccttcactgtccaggtcctgaaagactcttgttcatgaactgtctcttcacaaagcaagtccaccacttgctgggtttatcattctgagggtcgaaaactttctcacaaagtctcagtccagtctcttgccttagctgttgtaaataggctctcatcacttcatcttcctgtttgtttgcaggtttggcataaattgcgttaagtggaaaaccaggctctccaggaatgggaaaattagtgattcccagcgtatacatttctttctcaccttggcttttggaattgcacttttgcagtttcttcagacattcagaaatgtagagagttatatatatcaaggtcctatcagcttcattcttaatttcatagtttttgaagaagacattggccttgaagtaatagatggcttcatccacaatatctgtatcttttgtctctctgggggcaggtcctttgaattgacttctgataggcaacagtgccatgtttccgatgagtttggtatcaggatccatgagagaagagtggtaagccggcatcttggcggcgcccgggtttcaacccagaggagcaggatccaggtacagcggagcgcttccggtctggcagcctgggcgaggtaggcggccc

SEQ ID NO: 315199 - DNA, 515 bp, Homo Sapiens
  misc_feature (103)..(103): n is a, c, g, or t
aaaaaacaaacccaccactgccgggtttaaccatccgaaggtccgaaaaactttcctccacaaatcctcaatccaatcctcttgccctaagctgttgtaaaanaggctcctcatcaacttccaccttccctgtttgtttgcaggtttggcataaattgccgttaaagtggaaaacccggctctcccaggaatgggaaaattagtgattcccagcgtatacatttctttctcaccttggcttttggaattgcacttttgcagtttcttcagacattcagaaatgtagagagttatatatatcaaggtcctatcagcttcattcttaatttcatagtttttgaagaagacattggccttgaagtaatagatggcttcatccacaatatctgtatcttttgtctctctgggggcaggtcctttgaattgacttctgataggcaacagtgccatgtttccgatgagtttggtatcaggatccatgagagaagagtggtaagccggcattctttgcgggg

SEQ ID NO: 315200 - DNA, 982 bp, Homo Sapiens
  misc_feature (236)..(236): n is a, c, g, or t
  misc_feature (836)..(836): n is a, c, g, or t
ccccagttctatttttcctaatggaaatggcaattttttaaggggaagcttacttggagggagttttgggttttccccttttccaactcttttttatcccctaattcctttttccaataaggtagaaaccaagaattctccaataaagtgggtattggagtaacctaggtaatcctcattggaaacttaaaaccatcatcttttatccaaaaatttcaaaaggggcaatatagganaagtattacaaatttacataaaaagaggatgaaccatgagaaaaaacaagttatttccctgcaaagcagatcaaatagtgagacaaggaactttgacttctagtccctttaagcaggacgtaactgctagacacagtctgaatgtctagatatatttatactaaacttacaaggatcaaaaaaaggaatgaagggtaaatacaaaataatctttttgtaaacaattcttagattatacccaatgcagaatgtttaatgaagcagttgagtcacagctcataagtcacaaaaccatattataactcaaagtcaaatatgtattcgtttgccagatatattcgtcggaatataagagctgccaatgccaaagtcaggatgacaatcagtacagctgacccaccatgatcagtgtggttgtctcttggctggtggccctggattacatctggtgaagtagacaaccttctctgactctgctgctgggcccggcgctgtcgagggctcatggaggtattcttagctacaggttgggtaggttgatgaaaggatgctgctgaggaattctgggagtccgtacgatgtactggccgtagcaccctngggaatgttgtaggtatatcatcttgtaaatcagttagtgaaaaagagtggaagtctgactcagagatagtctttccagatgaattgacttctgccttagagcttatttgcctagccagttctgtggcttcgtggtcagcttggct

SEQ ID NO: 315201 - DNA, 424 bp, Homo Sapiens
gtcggtgcacagctggggtccggaaggccaggcccccaaagctggcagagatggtggacgatctgtttcaggtctggggagccatctgcgttgcgctggacacatgtagtctgagcgattcaggcccaggaacacagtctgtggggaaaactgaaggctgcgagtacctgcccagggactgactctgaggacctagccacagagcacacaggtcctatgacctctacacagagattagaggtaccagcaacacactcccaagcccagtggaatcattcttcgtggtcatcctagaattggtcactggtataaaccacatgtgaggcccagtgagaggcagattcccatgagctgagggcctggaccatattcttcaagcaacacagaacacacacagatatgggagggacaggttacagactgg

SEQ ID NO: 315202 - DNA, 1903 bp, Homo Sapiens
tgaatcagcaatgcagttttatttaaggcagaattagggaaaggctatgcccctccactccccctcctcctaccactcagtcctatcccaagtcaggcactggaacctgctgaaaaggctgatgaggggctgacaggagtggggcagggttcatggacctttacctcagagcagcttaccctgagctatacccacatctcaaggatttgggggcgtctagatctcatctaagggagacacaacttttctggtcctcagatggaaagctgggggaaggtaccagtatttacccttccataaaaactttggaggtctttaggaggatacccctcaggagggctaggagaggaatgacaaatacagaggatagaaggtcccgtggcctggttgtgccctcacacagggtatgggttgtccaggactgccactcccgctgccacaccaccatctgcatgctcgatggctttggttcgaagtagatgccccacgtgcttgttcatcacgagtgtcttttcctgcctgacatagaccccaaagatgcccagctctgaaatgcactggaccactcgggcagggctgccaggccgtagcaggcaattctcaaaaggctcaggttcgatcttctccatgaggatgtaggaggccctctcctcactgtccttcagctgtttcagggcctgtaccatttcctccccatataggttgttacctccaccctctctctggggctttagcacaaaccggctaggggcagcaagggcctcggcgatggcctggtccccttcttcacccacatccagtgagtagaggccagcaaaggtggcgcggaggcgggccacagcctcaggctggccagggagcaacatctccagcatgcccggcctgcttagctcctgctgcaccttcttagtcccagccagctgggtggcaatgtctgggcacttggcagcatgtgacctctccagcagtagacgtgcttcccaattctgtagactgtactgacgaggcatgtagccatcccggaagtaaaccacagcaatttcctggccatccacaaacagccttcggtcttggtccagagaccccttttcagagatatcttcaaatgttcgtcggatcacatggatgttcctggccagtagctcattctctatggcacgctggtcaaatatgtttctttccttctcttgagcaatcagtagcaccagagcattgggtgagccgtagagctcccaggctttggcaattcccagggccagtcccttgctgggattattagagaggatcttgccagcttctttggtcttactcaggacactgagaacatgtcggtgcacagctggggtccgggaggccaggcccccaaagctggcagagatggtgttgatttcgatctgtttcagggctggggagccatctgcgctgcgctggaacatgtagtctgagcgattcaggcccaggaacacagtctgggcaatgccctcttttaggacttgcttgtggatgtcaaagagacgagcggtaaagtcatcctgtttgatggtgctggaaagagtttgctccaggaaggcagcgttctggctgacagcatccactagcaggttgaagtccatctgcacagcataggcttgctccagcagggcactggggaccagtgaggggaagagcgtgaatggggcatagctcaccacctccgaggaagtgggctcctgtgaggtcctcagcaatactccctcagccagggcccggtccacggcctgccgtgccagctcctctagctgctgtttatcctgcaagaggctcccccagttggtggccatcccaacactagttcgcctttcctccgcgaacggttctcccggccctcgcgccgctacccaggctcagggggcggggcctcgat

SEQ ID NO: 315203 - DNA, 972 bp, Homo Sapiens
tccgggccatttttcaaaaaaggcttcagggttggttctttctccccaggggggatgtaggagggccttttcctccattgtcctttcagctgttttcagggccttgttcccatttcctcccccatataggttgttaccttccacccctctctctggggctttagcacaaaccggctaggggcagcaagggcctcggcgatggcctggtccccttcttcacccacatccagtgagtagaggccagcaaaggtggcgcggaggcgggccacagcctcaggctggccagggagcaacatctccagcatgcccggcctgcttagctcctgctgcaccttcttagtcccagccagctgggtggcaatgtctgggcacttggcagcatgtgacctctccagcagtagacgtgcttcccaattctgtagactgtactgacgaggcatgtagccatcccggaagtaaaccacagcaatttcctggccatccacaaacagccttcggtcttggtccagagaccccttttcagagatatcttcaaatgttcgtcggatcacatggatgttcctggccagtagctcattctctatggcacgctggtcaaatatgtttctttccttctcttgagcaatcagtagcaccagagcattgggtgagccgtagagctcccaggctttggcaattcccagggccagtcccttgctgggattattagagaggatcttgccagcttctttggtcttactcaggacactgagaacatgtcggtgcacagctggggtccgggaggccaggcccccaaagctggcagagatggtgttgatttcgatctgtttcagggctggggagccatctgcgctgcgctggaacatgtagtctgagcgattcaggcccaggaacacagtctgggcaatgccctcttttaggacttgcttgtggatgtccctcgtgccgaattcgccacccaggcctcgctac

SEQ ID NO: 315204 - DNA, 431 bp, Homo Sapiens
tgtgtaccacgggctgcacgaatacagcacgagcatcctcggacctcttttcacctacctccatatgaggctttctcagaaatggcaagttatcaaccaaaggagcctgctgtgtggagaagatgaggctgcagatggagaagtcatggacctaatcacggtttgctgtgtttcaaagaagggtgctgaccacagtagtgctcccccagcagatggagacgatgaagaaatgatggcctggccaccatctttgaaccctgaatcaagcttttgggcatccttcctcggcctttcttgtcatctcttctttccctttgtagccgatctctatgcccttcttgcactgccacctcactttccaccactgtgagcctgggagatccaggtctggagctggagagaacaggccctgtgcaggaccagaagttttt

SEQ ID NO: 315205 - DNA, 884 bp, Homo Sapiens
ttaaggatgcccaaaagcttgattcagggttcaaagatggtggccaggcaccccatcattgtccagcacctccgtctccagcattggctttgtttttttgaaaagtgagggaagattcttaaatgtgaacttctttttcggacctgctctcccaagggttttcccaaatgcaaccagcaattgaggcgtttgaaattggttcctttccggccgtcttagtccagccactttctgcagggaggggtttaaaagcttgcagtcaaactggtccagtgagtccttctgtatttcagggatttgctccattacagctcttatctccaggtacctggggcgcagtgcctcgtatatctggaaggccagatggaccagggaagccatgcacccgtcgtgctgcccgtgcatctgtaagcctttcagcacactggtgaaaagccacgtaactgcatctgcgagcagtgtccctgacagcacttgtttgaggagaggccagcagagctgtgaggttgtcctctggcaggacagagtatctttccaggccagggaattgaaggctgtaattaatagcgctgtacaaacatcctcatgcttcactcagacatttgcccaggtctgtaagctctgccatagctgagggggcctgacctccatgtggccatcatttcttcatcgtctccatctgctgggggagcactactgtggtcagcacccttctttgatacacagcaaaccgtgattaggtccatgacttctccgggttaacatcctcaccacgttgctcctccagcatctcttgagactctgggttttcatctgcagcctcatcttctccacacagcaggctcctttggttgataacttgccatttctgagaaagcctcccc

SEQ ID NO: 315206 - DNA, 979 bp, Homo Sapiens
  misc_feature (32)..(32): n is a, c, g, or t
  misc_feature (66)..(66): n is a, c, g, or t
  misc_feature (68)..(68): n is a, c, g, or t
  misc_feature (70)..(71): n is a, c, g, or t
  misc_feature (99)..(99): n is a, c, g, or t
  misc_feature (103)..(103): n is a, c, g, or t
  misc_feature (653)..(653): n is a, c, g, or t
  misc_feature (709)..(709): n is a, c, g, or t
  misc_feature (751)..(751): n is a, c, g, or t
  misc_feature (768)..(768): n is a, c, g, or t
  misc_feature (779)..(779): n is a, c, g, or t
  misc_feature (839)..(839): n is a, c, g, or t
  misc_feature (855)..(855): n is a, c, g, or t
  misc_feature (857)..(857): n is a, c, g, or t
  misc_feature (859)..(859): n is a, c, g, or t
  misc_feature (909)..(909): n is a, c, g, or t
  misc_feature (913)..(913): n is a, c, g, or t
  misc_feature (919)..(919): n is a, c, g, or t
  misc_feature (932)..(932): n is a, c, g, or t
  misc_feature (939)..(939): n is a, c, g, or t
  misc_feature (942)..(942): n is a, c, g, or t
  misc_feature (947)..(947): n is a, c, g, or t
acgtggtgtacaacggctccctgttctataanaagtaccagagcaacgtggtggtcaaataccacntntnntcgcgctctgtgctggtgcagaggagcntccngggcgccggttacaacaacaccttcccctactcctggggcggcttctccgacatggacttcatggtggacgagagtgggctctgggctgtgtacaccaccaaccagaacgcgtgcaacatcgtgttcagccggctggacccgtacaccctcgaggtcatgcggtcctgggacaccggctaccctcaagcgcagcgctggcgaggccttcatgatctgcggtgtgctctacgtgaccaactcccacctggctggggccaaggtctacttcgcctattttaccaacacgtccagttacgagtacacggacgtgcccttccacaaccagtattcccacatctcgatgctggattacaacccccgggagcgcgccctctatacctggaacaacggccaccaggtgctctacaatgtcaccctgtttcacggtcatcagcacctctggggacccctgagccaatgctgtggctcgggctgctgcctggggggcctccgggggctgggggcccttttcattctgcctgtgtccctcaagggtgatctctctgtctntgtaacgccctttctccccgcctttttgctgggcttttgttctctgcctatgtatntctgtctattttttcaatttcccctcttctcctttattgatntctgcttttaatacacnacttctttctntctgcctttttatggatgtctttttctttttatggctctggttctccagttctttccgtntctgcctctctctgtntntntctttctgtccttccacccctccctccttgcttcccacccattcttcatncctnactccnacccccacccccnctccccnggngttgngtgcatggatctgttacttttttaattaacac

SEQ ID NO: 315207 - DNA, 1048 bp, Homo Sapiens
  misc_feature (638)..(657): n is a, c, g, or t
actgaggaacaccaactggcccttggattagaacacactgcgaggtaaatgagagggggttagggcgggtggaggggaaggtcaagaggcatttcaatgccagatccaaaaaccgttctgcattcagtcagctgtccaaaggacctccgtcccatttccacacatgaacttgcactcagaccctggaaacaggaaagctttgaaacgtgcattcacacctcctgttctgtgccaacaatatgcaagttaacactgattgaccatcattccttagctgtgttcatgatgagtctcattgtagtccatgatatgtagctgtccaaccactgtccggggtcgggggagacgggtgagggccatctaggttcaggggaatcttggcttccacacccaagtctttgcccagttctgtctttaggctctcagaaaggctactggtcatgccgtcctcatcacactggctctcgctcttattacgaaataactctcgagccttcatacccaggaagctttttgaactgggaagtgagcccacagtggtggggatgctggcagacgcttctcccatagtcgtctcccaccgactgctgaatgggcctgccctctggtgtgggggtttctctggggtagaaagctcnnnnnnnnnnnnnnnnnnnnctccaccacctctgcttccactactgccccgggcgctgctgggcctgggggtcttggtctcaccgttgtggccagatgcctcttcattgtgccctaccatggaatctgagcacccgtcattacaacagtcaagcctttcttctgctgcttcagctgcttctgctttttcttcttcaagttttttcaggaggccatctttctccaacctgccatataaatctaagatctccaattcaaacacctgggttatccttttctgagcctcatacctgctctctgcggcctgcagctgtcctcttgcctggagtttgacatcctctagatatttcttctgttccaaaagaaggtggtctttcttggccaggtgagattccagttccaaatccgttcc

SEQ ID NO: 315208 - DNA, 196 bp, Homo Sapiens
accccaaaggaaatttgagaattcaagtatgttaagtagggagcagtaatacaccggcagacatactcccacattcttgcaccctcttttgctttggtaaggccaaacacattacacaaatgaccctgcctcaaactcacacacccaagggttgaagaattgatttacccccagaggatactgtgggtttcctgtc

SEQ ID NO: 315209 - DNA, 1114 bp, Homo Sapiens
  misc_feature (28)..(28): n is a, c, g, or t
  misc_feature (42)..(42): n is a, c, g, or t
  misc_feature (49)..(49): n is a, c, g, or t
  misc_feature (68)..(87): n is a, c, g, or t
  misc_feature (90)..(91): n is a, c, g, or t
  misc_feature (147)..(148): n is a, c, g, or t
  misc_feature (150)..(150): n is a, c, g, or t
  misc_feature (422)..(431): n is a, c, g, or t
  misc_feature (607)..(617): n is a, c, g, or t
  misc_feature (929)..(937): n is a, c, g, or t
ttatacgtgtgtcaccatttattgtagnttgcgttaggaatngaacagnggacattgtctgtggaggnnnnnnnnnnnnnnnnnnnnganngtatgctttttatagacttaatttcttcagaacactttatggtttcaaatcctttnntntttttaccccaaaggaaatttgagaattcaagtatgttaagtagggagcagtaatacaaaaagtcttatacttgtgtgcgcgtgtggctgtgtttgtctgtgtgtgttgaaaccggcagacatactcccacattcttgcaccctcttttgctttggtaaggccaaacacatcacacaaatgaccctgcctcaaactcacacacccaagggttgaagaattgatttacccccagaggataactgtgaaggtttcaaactgtcacgtagcattnnnnnnnnnncccaaccctcatctccccaaaatataagtcacataagtcctgatacacttacacccctagattttgctgcagctgctcctcagatgccgaagagaggcttatcacaaggaccagagcagcaggattttctttattttgtttagaataaaaaaatcttaaagggacatttcaaaagnnnnnnnnnnnctgaaattcaaattctgaaaatatcttgccttttttattaatcatgtcatctaacaccaattaaaaaaacaaatatgtgaatatgatataaaaatacgatcccaggattaacacttggtagcaggcacagttatctcacagaatatatgtttggagggccagggaaaggagtttacttttgtttttgcttctcttaaaaaaatccacagcagtgcaagtagggtcaggaagggggagaggggaaaaaagattctttagcagcaaaatgtccaaggttctctaatcacaatcaaatcaacggatattggattnnnnnnnnnttcatgaagggatgctgcccagacccattagccatcactaaaagacttccgttgccccaaactgtgacatacgaaggacatgctttattacacaagcaaccataaaacctgtcccttaagcttttgaccgtgtttgtcacttaaatatatgtacaggaagcgggctcctcttctccc

SEQ ID NO: 315210 - DNA, 734 bp, Homo Sapiens
caagactaaaattttgcaaataaattgttcctgacataatttatccttggtagaaatgaagaaattggagagagaaaaaattggattctaggtcctgaccattgtttttgaatttttattattttcctacaatttaggctaaattctgaactatttgctggctacaagaggtctctaagagctgggttttagttttcttcatgctctttaaggcatgatattctgaagactagaggtgattcaatagcctatgaatcttcttcatttggaaccccactgggcctgatctgtttcccatcaccaatgcacttctgctaaacctatatcctatcaagtactctccctaaatgctcagagaccataacagaagatgagggtgtgtgagattataaaagccaaattagtggagtggaatctggaggctaaagcaactccattttggatgctaatctgccatgttggcttctgattaaccccagttctggagggcctctgaggtttccaatttatctactgtcccttgtgtaagaacaagtacttatcataaatcctgctattagggcacatttctacccattccctctgaagcatgtgcacctctcctctacatgtaatctcccctacaatagataaacccctctgggtctgggggctaagagtgtgggaacccatcatcttgcctcactgctgcacaagccacaggtgtggcttctgtttctaagtccctattaaat

SEQ ID NO: 315211 - DNA, 451 bp, Homo Sapiens
  misc_feature (441)..(441): n is a, c, g, or t
aatgaaggaaaagcgatttctagttttttaatttggaatcctaactctattaatagtgttgatacatttcttctaaatttgctgccttgcctcagtagatctttactctgggatccaggtgactgtctgggtaatttaggtgatgactcttccaacaaacaatctgtaatccccacattattagaattgggtaatacatgttttttggctttttggaactctcctgaattgtagataatacccctacattccaaacactcccaattttgctcccatgaccgtaatgaggagcaggctaaatgtgtgccactggaaccacaacactgacagcgctttatttcccatttgctatcaggtgcattatagtctcggcccttctttggcaacggacatcttcgaacatcacaacggttcataggtgctggcggaaggttcttgganaaggggtttt

SEQ ID NO: 315212 - DNA, 1683 bp, Homo Sapiens
  misc_feature (43)..(59): n is a, c, g, or t
  misc_feature (69)..(70): n is a, c, g, or t
  misc_feature (91)..(93): n is a, c, g, or t
  misc_feature (103)..(254): n is a, c, g, or t
gggggccccggccccccaaaaaagggttttttaaaattttttnnnnnnnnnnnnnnnnncgcccacaanntttttttttttttctttttcnnncccaaacttnnnnnnnnnnnnnnnnnnnnnnnnnnnnnnnnnnnnnnnnnnnnnnnnnnnnnnnnnnnnnnnnnnnnnnnnnnnnnnnnnnnnnnnnnnnnnnnnnnnnnnnnnnnnnnnnnnnnnnnnnnnnnnnnnnnnnnnnnnnnnnnnnnnnnnnnacctgtggaagtgcttttattagcagtaaggctgatcgtacaaaaaattctcagagcttcataggacaaggtagtacaagtatggatgatacaggactgaggaacgggggacggctcaaaagaaatcaacatcgtctggggcatccaggtcccgatattccacaatggcccttgggtctccacgaaccatcctgttgcgaggtttcccaggataacctccctggcctcggaaggcatcatagttccctcgaccagcaccatacggggcatgggggtatggagggcctcctgtggggactgcagggcggacagcaccagctccatagcccaagatcgggggccggggctgaccatagggcatcaggccctggggagtctggtgtgggtaggggagtcctggggtcaaacctggggggagtatctgggcggggccaggtggctgggctggcttgatctcaggcagagctgggcgcttagcatcagtgaggaagttgttaaaaaacgcgacttcctttttcacttcctcaattttctctgcatgcttgttgaagatatgtttgcgcacaaactcaggacccttgaatttcttgccactgagaggacacagccacttatccttgcccagttcctgcgtgttggaggtgacgaacttctccacttcctgctctgggtctttgcgccccatcttctgggcctcttcctctgagagtgactcccgcacactcagcaacggcgtgagcttctcctcaaaagtcttctgccactccagcacttccccgtgactgatgcggttgggtggcatgggcccccgaacgtggatgatcccacagcgattgggcatctcgtcctcgttggggtactcacaggtgttgtaataatccaaggaatgcacgatgcgcaggtaaaggaggagcttgtccaagaccttaatcaacttctcatcccgctccacgttgatctctgccgggttcccttccttaggaggctcctcaggaggagcgcccccgctgctccccagcagctcctcctcctcggcgcttacttcctcgatcaggtagtcggtgatattcttcaagatcgggttttgcgagggcaggctcgtgggcaggggaggcgtccctggttctgaggcccaaagctgtgtcctgtcatccagcgtgtggatcagcttggccgccagcttgatgtcgttgcgcacaatctgcttgtgctgggtgatgccgttgatgttgcgaacgcgccgggtcaggtccctgttcacaccagggctcagctcacactcccggagacggatgttctgcaggttccaacagatctctttaatgttaacactgcggtcgaaggtcacccagccacgacggaaaaacctcctctctggctggggctctgagagcgccacccgcataaagcctgggtaccttttacaaag

SEQ ID NO: 315213 - DNA, 1022 bp, Homo Sapiens
  misc_feature (61)..(61): n is a, c, g, or t
  misc_feature (86)..(86): n is a, c, g, or t
  misc_feature (103)..(103): n is a, c, g, or t
  misc_feature (113)..(113): n is a, c, g, or t
  misc_feature (121)..(121): n is a, c, g, or t
  misc_feature (127)..(127): n is a, c, g, or t
  misc_feature (565)..(565): n is a, c, g, or t
  misc_feature (572)..(572): n is a, c, g, or t
  misc_feature (586)..(586): n is a, c, g, or t
  misc_feature (604)..(604): n is a, c, g, or t
  misc_feature (670)..(670): n is a, c, g, or t
  misc_feature (693)..(693): n is a, c, g, or t
  misc_feature (726)..(726): n is a, c, g, or t
  misc_feature (759)..(759): n is a, c, g, or t
  misc_feature (777)..(777): n is a, c, g, or t
acatatcttcaacaagcatgcagagaaaattgaggaagtgaaaaaggaagtcgcgtttttnaacaacttcctcactgatgctaagnacccagctctgcctganatcaagccancccagccncctggncccgcccagagtaagatacgatccatgaaggtcgcatgtgccctcttccttgactacccaggggactcctgtttctctttaacgtgtcaccccgagaagtttctgccccatcctcagggccatagccctagaagtcaattgtacccgtatccccctccccgcccccgcagtaattcatgtccctgtccgtgttgtactccccccaggtttgaccccaggactcccctacccacaccagactccccagggcctgatgccctatggtcagccccggcccccgatcttgggctatggaggtaaagtacaggagggagatgaaggggcttggtgagtgtgtggctttgggaagaagaaaacagaggatggaattgaggacataagttttgcaaactcaaaaactgaaactctgtcaaaagctggtgctgtccgccctgcaantccccanaggaggccctccanaccccccatgccccgtanggtgctggtcgagggaactatgatgccttccgaggccagggaggttatcctgggaaacctcgcaanaggtgaggaggcagacgcccaanctttgttgccgcctgcagactcccttttggganccctcagctctcatcctgtacctctcacctcanaggatggttcgtggaganccaagggccattgtggaatatcgggacctggatgccccagacgatgttgatttcttttgagccgtcccccgttcctcagtcctgtatcatccatacttgtactaccttgtcctatgaagctctgagaattttttgtacgatcagccttactgctaataaaagcacttccacagggaaaccaaaacccaccacctctataacaccaatcggaatacctcccttattttcacatacataatccttcg

SEQ ID NO: 315214 - DNA, 587 bp, Homo Sapiens
ttttgcgtgattccacagacctggcttcagtgtagacagattaaacaaagcccaagcctgtcagccacagaaacaggctctcctcttactttgctgtctaaactggagatcacagaagtcaagactgcaagctcccctgaagagaatccaactcaacctgcacacttgacaagtggagaaacagaagctcagagagagcactgggtttgttcaggaccacccagaaggtgtcacacggggtttccccactctttctgatatattgccttacagacctacctcaaacacactgtttccaccctcttcttgaatgtattcagtagcctttactgaatgtgtgtcttgagagtagaaaaatggaggatacaagggagcaggaagaaatttgcagatcccctacctctctatctttctattctcaccaataatctctttggtgcatgaatttacccaggagagtcctatatttccattggtggcttcacagtggtggctgtcagacccgaaggggtggggagccaagggtggactttaagcatggtgacagatggtattttgggcagaaagctcttagactggactttcgc

SEQ ID NO: 315215 - DNA, 336 bp, Homo Sapiens
aaaggagaagagagggccaagtgggaaaacatctgaaactaaggagaattcattaggggctcgagtgctcaccaccttccttcagtcaaattcaaaacctgacgcaaaaaaggaagcttccgggaagggtcctttgtgactcaagactccatactctgaaatcactttcatgtgttggtattcttaatgagtaaatatttttccattccttctctaatacatatctatttattgaggtgtgtatttgacctagtaattgaatctttacaatatagtatttagcaagcagaagaaatattcaagagttttggaatatgtttgttcattgaagttgcc

SEQ ID NO: 315216 - DNA, 386 bp, Homo Sapiens
ggggcatgctcacccaccttaagagcagcagctcttaacatagtagacacaaatactagagtgatcctgatcccttaggcttcctggggatccattacaaaatcctgggatgtaccccagaccagtcattaagcttccttctgtcctcaaatgctgaagagagaatgttaacagcctaagattggccaattgggtcagagaaaacagttaagcacaaggaaactgttgggcttttgcttttcttgggtattgattaattgggaccagatacctgctgagtccttagacatcttgttgctcccatggcattcatcaggtgccctgccagtcagccttcttgtctgcaactcccatttacgtcacagagtatctatccctcgtgctga

SEQ ID NO: 315217 - DNA, 426 bp, Homo Sapiens
agtgtacacatatttaatgcccaaatgatagtctggtaaaaaatgtgcctatcaccaagggctgatacctttcgtgtggcccaggccctgtgctctttaaaaatggggcacaaatacaggcaggtaagagacagacagctctcatcgtgcactcttggctttctgagaggtatgaccccaaggtcgtggagtctagctgctgcttcctcctctgggaaatagaggagtgatattggtagtacctagggcatagcactgctgggacaattcagtgatttggggactgatctccatatcaagatgacctgatcctgtctgtgtgcgggacagtggctagcacggagcccttgttaggcccgcctaccatctgacccttctcaaaccttgccgtatgaggacatctgcaggcacacttgcccctccaat

SEQ ID NO: 315218 - DNA, 1221 bp, Homo Sapiens
  misc_feature (1173)..(1173): n is a, c, g, or t
  misc_feature (1184)..(1184): n is a, c, g, or t
  misc_feature (1208)..(1208): n is a, c, g, or t
tcgaagagtaaaacacattaaaaactttattgtaagtatcaacatctaaatttgcatcaatttgatacatcgttgctcattttgcagaacataacagttgcacattgcaagagtcaacttgcttcgggtcttttcatgctcatggcggtccacccctgccttccctctccctgacctgcatcctgtcctccacagtctgccctgcctcctgtcgccacaggttgaagacccaagccctgaggagaacctgctgccagggggctggctggctgcgagccaggagggccaggcagttagccctgccacagggaggggcaggcaagggatcgtttctcctcttcctgggctgagcccgtgccaggccagccacagagtgccctagtcagcccatgtggctccaggaagcctgctgttgttcttctccatcccatttcacccgcagcgtagtggctaactctggatactctgagcaaaattaacccaagtttcatggagaactccagaaccttgaaccagtgcatggttatcaccattctttgttactagatgtaggagaaggtactgcagagtcctctggcctggaacagcttgggggaggattcagctccctgtttctccctcactcccaggagattcgaaaacaagtttgagagaaaaaccagtaactaaaaaagtccatgaagaaggatctgacatgtcctttgtgaagtaacattaccctctccccatcacgacgcaggagatgacatgttacagtaagagggttacagcaattccccatctggagtgccattcaactgcctgcagaaatcttccattttaatgcattttaaacacattcaaaacgagtgctgactctccaacctagggaaaatgcccaataaaaaatatagatagaaaatacatgctaatgtaatggcaaacttatctccacactaaaacggcaacagtcttgcggttgagggcaggggtgcggtggaacctccctcttcccacaagaacatcagcaccagagatgctcggtccccgggctgatctgatgggtgggggaccacggcactgttcactcgggctgccggtccggtcccagtgtttggccggggactatcagtgctgcagcagggaagttgggtgggcgacattgagggtcattgtttgaaggctctcaggggntttccaaaggnatcacctttggggaaaatcccttntccttgagccggg

SEQ ID NO: 315219 - DNA, 768 bp, Homo Sapiens
  misc_feature (389)..(606): n is a, c, g, or t
  misc_feature (727)..(727): n is a, c, g, or t
ctctttcttcccctttatttaaaagagatgataggctttacgagttatttttaatagaaattttttacaatgaaaagaattcgggcgtactgtttgcaaactgcagcagacaggtctgagcgccccagaaggcagccggccccagcctgggagcctgcggggaccactccctgctgccctggcgcatgtcctccagggacacgggccaccgttgcccctggaaaccctgggggacaggctccctcctgggcgacctttccacgtttctttcgcccccccggagcggcacctccatacctcccgggccgctagtcccccgaagcaggccccagccccggcgcaagctgcctccttcgcagtccccgcccgccgccagcccggctcgtgcnnnnnnnnnnnnnnnnnnnnnnnnnnnnnnnnnnnnnnnnnnnnnnnnnnnnnnnnnnnnnnnnnnnnnnnnnnnnnnnnnnnnnnnnnnnnnnnnnnnnnnnnnnnnnnnnnnnnnnnnnnnnnnnnnnnnnnnnnnnnnnnnnnnnnnnnnnnnnnnnnnnnnnnnnnnnnnnnnnnnnnnnnnnnnnnnnnnnnnnnnnnnnnnnnnnnnnnnnntacaattaatgccgtgcgctcacttgccgctttcaggccggaaaacttgtctgccacgttgcattaatgatctgccaacgcgcggggagaggccgtttgcggtatgggcgcttttcgcttnctccgttactgaaatgcttcgctcggtgtttgggtgggggt

SEQ ID NO: 315220 - DNA, 627 bp, Homo Sapiens
  misc_feature (427)..(427): n is a, c, g, or t
  misc_feature (504)..(504): n is a, c, g, or t
  misc_feature (523)..(523): n is a, c, g, or t
ggaaaggatggatcctcgggacctccaggaccaccagggccaataggcattcctggcacccctggagtcccagggatcacaggaagcatgggaccgcaaggcgccctgggaccacctggtgtccctggagcaaagggggaacgaggagagcggcgtgacctgcagtctcaagccatggtgagatcagtggcgcgtcaagtatgcgaacagctcatccagagtcacatggccaggtacactgccatcctcaaccagattcccagccactcctcatccatccggactgtccaagggcctcctggggagcctgggaggccaggctcacctggagcccctggtgaacaaggacccccaggcacaccaggcttccccggaatgcaggcgtgccagggaccccaggagaacgaggtctaactggtatcgaganagaccttcaggggagagtcggtctggcagcccttggccccctggcttctctggaccgaggccaccaggtcatatggngggttctggaccccaaggntcttcttgccaagccttgatatgtgacccctcatcatgttctgcctatggtgtgagagcttcccatccgatcaggcagggtcacccctgtccaagatggctggg

SEQ ID NO: 315221 - DNA, 801 bp, Homo Sapiens
  misc_feature (736)..(736): n is a, c, g, or t
  misc_feature (745)..(745): n is a, c, g, or t
ggtccaaaatggtaatggagtctgtattagaagaaaataagggtgaaatcaggctgaactgcatgtatatggctccactgtggcttgtgacacttttaaaatcatccgtatgtcagtgtatctggatacacgaggaaaaggaaagagtctcagagtggaacacagagtgggaagaggtgatctgtaatgttacaaattgtgctattactccaaggtgcaacttttccagtgcattacatggtattgtatatcagtggagaaatgtattatttccatgatcaaatgtagtctctgttaaggtcaagttttcttttataagcctttaattcatcctcagtgactctggcaaggctgcttctctatcactggctttgcacagaagtatgctctacttgcgttgctttagggcaggattctattttgagggaaaagacagtatccttattaccttttgtttgtttaatagcacaaatgcttatttgttatccaaaaacaacctccttcttatctgtgataaatctatagaaagaatttagctgcaagtggacaaaggaacaagcccccagaaaagaaagggaagaactgccttcttatactacagaacatgcattagtgtgggctatatagctgtggctcatgctacccaattccagatttctttgtcctctaagagttgattgctgtatatttaaaattgaacatcagaggatggggaagagggctctgtaaggccagnaacctttantaaagtaggaggggcacaatcagtgtggattaaatttcatttccggaatctcaagt

SEQ ID NO: 315222 - DNA, 2367 bp, Homo Sapiens
  misc_feature (17)..(17): n is a, c, g, or t
  misc_feature (69)..(69): n is a, c, g, or t
  misc_feature (74)..(74): n is a, c, g, or t
  misc_feature (103)..(103): n is a, c, g, or t
  misc_feature (133)..(133): n is a, c, g, or t
  misc_feature (156)..(156): n is a, c, g, or t
  misc_feature (189)..(189): n is a, c, g, or t
  misc_feature (205)..(205): n is a, c, g, or t
  misc_feature (239)..(239): n is a, c, g, or t
  misc_feature (263)..(263): n is a, c, g, or t
  misc_feature (308)..(308): n is a, c, g, or t
  misc_feature (361)..(361): n is a, c, g, or t
  misc_feature (397)..(397): n is a, c, g, or t
  misc_feature (421)..(421): n is a, c, g, or t
  misc_feature (1608)..(1608): n is a, c, g, or t
  misc_feature (1839)..(1839): n is a, c, g, or t
ttttgacttaatcatgntaatggacaaccatgtgacaaagtactgtagtgtatggtttggtgtagctcnttgcntctaggatgggattttttccaggtgattnttcaggatctgacatcgatgcccaacacangctttccaatggcaatgcatganttctagaggtcactgccccatctttcttcaggngctgtgtgccattttntcccacccattttatcctccattacttataaaanccccactctaaaattcaaccttgntagaatgtccagtagcatatatattaattgttccttttgcatttncacgaagatgatccttcatcctgtaactttttaaattttgggccaagaaaganccaccaaccaaatccaatgaaaacacaaataatggnctccacataataaccatccagggntgtaacacatgagccacccagttttttgcaaagctcaacagcatcaggtgttcgacaattctggtttgatgctcctacacactcttttactgtgaggggatctacaagccaaagagctactgtagaaggccagtttcctcccagattggacacggtatttaaaagggtcatgtatgttcctccaataagtggatcactaacctttgcattgaaagccattatagaaacatacatgctgtacactgtaacctgatgtaaagcataactcagcaggactacgatatagtaatatatagggaatcccccttgatgttcttctttaggagtcccccaaaccagtagggcatattctaacccaagcaataatttgtagggcatggctttgtaaattgtgtttaatggctggggacctgcagtgtatttgctgataatcagaggcagtattatctgcaaaggaaccattggaactgccaataaggctaaatgttctttgggtactccctcttctaccaatttcagtcctgttacagcatctgctgctgaaaaaccaatctttgcagttagaatcagaaggcaaaatgtcagaactgctggcatttttataattgcaaaaagcagcttgtaagtatctgtgatcccttgtgtttcttcttttactactgatacttcgttttcttttttcagaagggcaaccaatgttgttgttattaaaaatacagttccccagaaaaaaaggaaatctgaaagagtaacgattcctctgggttgaggctgaaaccgcaaatatttgttacaaaagtcggcagattcaagggccaaaaacaaaacattgcccaaaaagtaacccgctgtttggcccaccgaattgcaagtagaagcataacccacattttccctggataacatagttaacgcccaaccatcgacggcaatgtcctgagtggcggccaagaattcaaacaaaaagaacgccacagtgagagcaatcacgtcgggtgttctgtcatcggtattcccaagcaaacggtccacctgagtggataaatagatcatgaagagtcctagtatatactgtgtcgggacaagccaagatttgcgacgaccgaagttcttaacgtagaccgcatcaaccaacggggccccagagtaatttgagactgaagggccaaaagacaaaactgaagaanagcttggtctgtatagctaacatttttgctttgcaaaatgagttgggatgcttcccgccaagcccaggggaataccctgaagcacgtaaagaaagagtagtagcaaaatgctgcttagttcggcccggaagctctgtggggcttttaagaagtcgccagtgccggtatcccccagaagagcttctctgtccccttcccggcccgctgagtccaaatgactgtcatcccaanccgcctggcggcaggggaccgctcttcatatccagagagtgactgaaattccctggccgccgttgccggctgctgtccttgtgggagatggtgggtgacatatcagagacgatgcagagccccgtctgtggggggccgaggctgagcgttttggatccgtccagtcccaggtccaaggctgtcgcgctggaccagggtttcggtggttcacgggatggtggcagggctcagagcgataagggcacttcttactgcagcccggagtgctgaagccgggagccagtcctctggctagaggcccagaggatgcctggataggtgccccctggaacggcgtcaaagagcctgaaggagacccccgggcagcagcgccgggctcgaggctggaggtgtgtgccgtggtgccaggatggaaaccagctcctacctgcggcgggatcgaacggctggtctcccgacccaacacctccagctctcgctgctatcaatgcggcagagagcactttctctacaggactccagaaaaag

SEQ ID NO: 315223 - DNA, 419 bp, Homo Sapiens
aaatcaggtactgtatttccatgtattaacacataaccttttgtttgaatactatagttttcagtggacagttgctattccaagaaaattaagcttttgagtactttagcaattcccagcgtattacatacacccagtgataaggttctttgcatgttttgtgttatgtattactctgactctttagagattatataaatcctccaaaagttagacgaaacaagatagtacattatgagtcttaattttatcattgtgggaaaaatgtgtactaactcctgattttgttaattttataacatagggttgaattttagagtgggggtttttataaggtaatgggggggataaatggggtggggaggaaaatgggcacacaggcacctggaggacagtcggggggcagtgacctctaggac

SEQ ID NO: 315224 - DNA, 428 bp, Homo Sapiens
tttcatatgtaagagttaagtggttttttttctttattcaagtaatcatttagactctaatacatgataatggacaaccatgtgacaaagtactgtagtgtatggtttggtgtagcctccttgcctctaggatgggattttttccaggtgattcttcaggatctgacatcgatgcccaacacaggctttccaatggcaatgcatgagttctagaggtcactgccccatctttcttcaggtgctgtgtgccattttctcccacccattttatcctccattacttataaaaaccccactctaaaattcaacctatgttataaaattaacaaaatcagggagttagtacacatttttccacaatgataaaaattaaggacttcataatggtactatcttgttttcgtcttaacttttgggaggggtttata

SEQ ID NO: 315225 - DNA, 2149 bp, Homo Sapiens
  misc_feature (2116)..(2116): n is a, c, g, or t
  misc_feature (2123)..(2123): n is a, c, g, or t
  misc_feature (2133)..(2133): n is a, c, g, or t
  misc_feature (2135)..(2135): n is a, c, g, or t
  misc_feature (2143)..(2143): n is a, c, g, or t
  misc_feature (2145)..(2145): n is a, c, g, or t
ggtctgtctttccggcggggggaccaggcctgggacggagctgggtgttgtcagcacactgcccaccagaaggagctaaaaactaccccgagactgagtctgtattttatgatattagctccatccagccgtacagtagagtagaccatattttaagtttcttgtcttggtaaaaatctgtagagtaaaataaaatggcagtttcgtgtgtggggctcccccatctcaagctgccctttgagatctgggcaggaacccttaatcccatctctcacctcacccactagaccttgtgccggagccgactactggagatgacagtgatgctgccacctttaagccaactctccccgatctgtcccctgatgaaccttcagaagcactcggcttcccaatgttagagaaggaggaggaagcccatagacccccaagccccactgaggcccctactgaggccagccccgagccagccccagacccagccccggtggctgaagaggctgccccctcagctgtcgaggagggggccgccgcggaccctggcagcgatgggtctccaggcaagtccccgtccaaaaagaagaggaagttccgtaccccgtcctttctgaagaagagcaagaagaagagtgactcctgaaagccctgcgctaacactgtcctgtccggagcgaccctggctctgccagcgtccccggccacgtctgtgctctgtccttgtgtaatggaatgcaaaaaagccaagccctccgcctagaggtcccctcacgtgaccagccccgtgtagccccgggctgacccagtgtgtgctcagcagccccaccccaccctgccccttgtcctctcagagcctcagcttctgggggagacatgctctccccacaggggggaggcactaagtcatggtcctggctggaaggtactgaaggcttctgcagctttggctgcacgtcaccctcctgagcctcacctttcctgccgtccctcctgttgtgaaatcaccacattctgtctctgcttggcttcccctccaccctaaagtctcaggtgacggactcagactcctggcttcatgtggcattctctctgctcagtgatctcacttaaatctatatacaaagccttggtcccgtgaaaacactcgtgtgcccaccagcggccttgaagaggcaggtctgggccagatgctgggcaggaaaccccagcggcagatgggcctgtgtgcacccaacgtgatgctatgcatgtctgaccgacgatccctcgaccagaatcagattcaggagctcagtttctttttcacttgggtctctggattcctgtcatagggaaggtatatcaggaggggaagaggcctttctagaattttctttgagcaggtttacaatttagcttacatttttcgactgtgaacgtgaataggctgctttttgctttcttctttccagaccccacagtagagcacttttcacttatttgggggaggcttcaggggactgttctcaccttaactcagccagaaagatgccctagttgtgatcaaaggtaactcgaggtggagggtagccctggggcccctcgacatcgccgtcattgatggagcctgaaccgtgtgctcctcggcagatgctgttgttgttacttccctccaagaggctggaaaagggctcagagctgctgagcaggaaccggagggtgacccatttcaggaggtgccggtaccagcctgactaggtacaggcaagcttgtgtgggcccaacaggcccttggtagagctggtgccagatgtgggctcagatcctgggcatgatgggccgagccacctcggatcccactgattggccagccgagcgagaaccaggctgctgcatggcactgaccgccgcttccagcttcctctgagccgcagggcctgctacgcgggcaagcgtgctgcctctcttctgtgtcgttttgttgccaaggcagaatgaaaagtccttaaccgtggactcttcctttatcccctcctttaccccacatatgcaatgacttttaattttcacttttgtagtttaatcctttgtattacaacatgaaatatagttgcatatatggacaccgacttgggaggancagggcnctgaatgtcntntctccagngnaaca

SEQ ID NO: 315226 - DNA, 421 bp, Homo Sapiens
gggctgaaagaattttatttgtgagtaaaacatgttacactggagaaaggacattcaggacctgtcctcccaagtcggtgtccatatatgcaactatatttcatgttgtaatacaaaggattaaactacaaaagtgaaaattaaaagtcattgcatatgtggggtaaaggaggggataaaggaagagtccacggttaaggacttttcattctgccttggcaacaaaacgacacagaagagaggcagcacgcttgcccgcgtagcaggccctgcggctcagaggaagctggaagcggcggtcagtgccatgcagcagcctgggttctcgctcggctgggccaatcagtggggatccgagggtggcttcggcccatcatgcccagggtcttaggcccacattttgggcaccagttttttacca

SEQ ID NO: 315227 - DNA, 451 bp, Homo Sapiens
tagacaaggaacttgctgaaagaattttatttgtgagtaaaacatgttacactggagaaaggacattcaggacctgtcctcccaagtcggtgtccatatatgcaactatatttcatgttgtaatacaaaggattaaactacaaaagtgaaaattaaaagtcattgcatatgtggggtaaaggaggggataaaggaagagtccacggttaaggacttttcattctgccttggcaacaaaacgacacagaagagaggcagcacgcttgcccgcgtagaggccctgcggctcagaggaagctggaaggggcgggtcagtgccatgcagcagcctgggttctcgctcggctgggccaatcagtggggatcccaggtgggctcggcccattcatgcccggggttcttaggccccacatttgggcaccagcttttaccaaggggcttttggggccac

SEQ ID NO: 315228 - DNA, 1215 bp, Homo Sapiens
  misc_feature (734)..(734): n is a, c, g, or t
  misc_feature (1118)..(1164): n is a, c, g, or t
ttgcggcagggtctgtttggactgcagaagaaggtggtgatgtagcccatccttccctttggagatgctgagggtgtttcttcctgcacccacagccagggggatgccactcctccctccggcttgacctgtttctctgccgctacctccctccccgtctcattccgttgtctgtggatggtcattgcagtttaagagcagaacagatcttttactttggccgcttgaaaagctagtgtacctcctctcagtgttttggactccatctctcatcctccagtaccttgcttcttactgataattttgctggaattcctaacttttcaatgacattttttttaactactatattgattgtcctttaaaaaagaaaagtgcatatttatccaaaatgtgtatttcttatacgcttttctttgttataccatttcctcagcttatctcttttatatttgtaggagaaactcccatgtatggaatcccactgtatgatttataaacagacaatatgtgagtgccttttgcagaagagggtgtgtttgaaatcatcggagtcagccaggagctgtcaccaaggaaacgctacctctctgtcccttgctgtatgctgatcatcgccagaggtgcttcaccctgagttttgttttgtattgttttctgacagtttttctgttttgtttggcaaggaaaggggagaagggaatcctcctccagggtgattttatgatcagtgnttgttgctctaggaagacatttttccgtttggttttgttccaatgtcaatgtgaacgtccacatgaaacctacacactgtcatgcttcatcattccctctcatctcaggtagaaggttgacacagttgtagggttacagagacctatgtaagaattcagaagacccctgactcatcatttgtggcagtcccttataattggtgcatagcagatggtttccacatttagatcctggtttcataacttcctgtacttgaagtctaaaagcagaaaataaaggaagcaagttttcttccatgattttaaattgtgatcgagttttaaattgataggagggaacatgtcctaattcttctgtcctgagaagcatgtaatgttaatgtnnnnnnnnnnnnnnnnnnnnnnnnnnnnnnnnnnnnnnnnnnnnnnntaatactggtatttttacttaatctataaaatgtcgttaaaaagttgtttg

SEQ ID NO: 315229 - DNA, 461 bp, Homo Sapiens
gctgggacgggcgcccagttggccttgtggtcagggaggaacgcctggttgtcaaagccttggggctggggctccggagcgccagagcagcacttgagccgggggccatagtgcttgtggacaaggacggcgaggccaaggagagccagcagcagcagcgcacccagcacgccgcccagggccgccatatccaccaccgagaagcgcttgtcctccgaggggccgccacctgaagatggggtgctcttgctgaggggcatcggctgagaggttcctggctctggggtctgtgctgtgcccccaccgggtgtggttggttggtgggaggtgctggttcccataccggggggcatcggctgagaggttcctgcctctggggtctgtgctgtgcccccaccgggtgtggctggttggtggcaggtgctggttcccatactggggggcatcggctgagaggttcc

SEQ ID NO: 315230 - DNA, 1162 bp, Homo Sapiens
  misc_feature (52)..(66): n is a, c, g, or t
  misc_feature (995)..(1020): n is a, c, g, or t
gtattgatttcatgatttatttatatatctccccaccccttccaatacttgnnnnnnnnnnnnnnngaatggcagtaccagaaggcattggttaagtgtcccaggaaccacacaagcagtgactcctaaagaagttcagaggaaggagagaacccatggggagggggtgcagtgggggtgggtcagggtgggctccctggaggagaagtccatctggtggggagaatggtctaggcaaggatgcagactggccagtaaggtgggtccatgcaggaagctgagggaggtggaaggcccgtggggctcgagcgcatctgcccgccctagtcggggaagagcaggaagccggagaagacgctgtcagagccctggatgcccaccatgtcgtagtagtcattgacagccagccacacctcctcgcccacctgcaacctcagcagcacaccgcccgagttgacctgattggttttggacgtgtggccacagaaggtgaccactttgacgccgctgcggtacagcagcacgcacaggttggctgtatgcgacgcgtggtagacaaagtagtagaggccggggactttgcaggtgaacttgccagtgctcgtgtcataatctctctgcgggttggtgaggaccgcgttgaatctgatcaggctgttgggtgcagggggctggtgggtctgccgagtgaccgtgaacactgactggaatttctgcttgtatctgccctcctcacctggctctccagggatgcccatggggccgggcacccctggcatcccagggggtcccatggggccatttttcccaggatggccgggtaagccgggttctcccttctgccctttgggtcctcggatcccgggaatggctgggattcctggctcccccttgggccccggcagtccgtcgtacccatccttccctggtgccccgggcaggccgggcatccctgggatcccgtagcagcctgtgttggcttgtgccctgagggnnnnnnnnnnnnnnnnnnnnnnnnnnttcagcccaaggtggggcagggagctgggccccacgtccatcccggagaaggaactgcaggtgggcggtttctggcctggcacagagatgtcctcagatctgcttcccctctcccaggcaagaggcacaggctgtgccgaat

SEQ ID NO: 315231 - DNA, 560 bp, Homo Sapiens
agggtgggtccctgcagtgcactcgtgtatgtcgtggcacgcggtgtacacttggctagtagccttgatgcactctgaatacggtggaaagggttgcagggaatgcgctgagggtcagctgggttccgccgaatgacaaagttatctgggccagtatgcacagggcctgcgactgcagcagcactgccgacaaacacacctccgggaaacactacactggttgccatgctgctgacagctacaaccgcggtggttgcccctgaggttcgttctgccggaaggcagaggtatcctccatagtggttgacacacttcattccaccttcacaagcgtctgggacaatgtcacattcatcaatatctttgcattgctgtctcacaggatcccactcatatccgtcagtgcattgctgtgaagaaaacatcaaaggtggggccaggagacagttaattggtgtgtccattccctaagaaatcactctaagagcttcattcttatggcaactatccttgtgctaaagtcctagatatatgatgatatgggtggtttaacattctat

SEQ ID NO: 315232 - DNA, 377 bp, Homo Sapiens
gggagacccacggggctgccctcccctgcgcactcccctcgctgcccgggcccggagcgcagcgcggccgcacagattcacaatgttgaaagcccttttcctaactatgctgactctggcgctggtcaagtcacaggacaccgaagaaaccatcacgtacacgcaatgcactgacggatatgagtgggatcctgtgagacagcaatgcaaagatattgatgaatgtgacattgtcccagacgcttgtaaaggtggaatgaagtgtgtcaaccactatggaggatacctctgccttccggcagaaggaacctcaggggcaaccacacgggttgtagctgccagcagcatggcccagtgggtgttgcccggtggtggtt

SEQ ID NO: 315233 - DNA, 585 bp, Homo Sapiens
cagaacagcaactgctaaggctgccttgggaagaggatgatcctaaacaaagctctgatgctggggacccttgccctgaccaccgtgatgagcccctgtggaggtgaagacattgtggctgaccacgtcgcctcttatggtgtaaacttgtaccagtcttacggtccctctggccagtacacccatgaatttgatggagatgagcagttctacgtggacctggggaggaaggagactgtctggtgtttgcctgttctcagacaatttagatttgacccgcaatttgcactgacaaacatcgctgtccttgaggttcctgaggtcacagtgttttccaagtctcccgtgacactgggtcagcccaacatcctcatctgtcttgtggacaacatctttcctcctgtggtcaacatcacatggctgagcaatgggcactcagtcacagaaggtgtttctgagaccagcttcctctccaagagtgatcattccttcttcaagatcagttacctgaccctcctcccttttgctgaggagagttatgactgcaaggtggagcactggcgcctggacgcctcttctgcctgg

SEQ ID NO: 315234 - DNA, 1342 bp, Homo Sapiens
  misc_feature (127)..(127): n is a, c, g, or t
gtgattcaaagttcctttatcctaatttatttctccatcatacttttaaaagccatattgaaattagtacaaacttattttttggttttaaaatttttgctataacatttctgagccaagggcagangggtatccatttaacttcattgttgccttaattgaggggtgggtggcagtgccaagggtgggaacacaaggaagaaagaaatattaatgtcagctaagaaatcaacatgttatcaggctatattgtagttggttgcttctgtgttactggatatgacatatgatctggtaaatgatgttaaattggcttgaaacatgagagtgtcccaattcttagccatggtttcagtcagccccggatgaaagatggaaaaatttgacatagatctcttaaagggaatttattgcttccatggagattttagatcgatgttactgaggaattaggtagctgggcggcttaccccaggcatctcttagtaggtaacaccttctttttcaggatgggattcacaagggcccttggtcgtctggaagcaccaactgaacgcaggcctcggatgatcaagacggtccccaccacaatgcccacgaggcccacagacaatcccagggcgcagaccacagtctctgtgagctctgacataggggctggaatctcaggctcccagtgtttcagaagaggctcgtccaggccccagtgctccaccttgcagtcataactctcctcagcagaagggaggaaggtgaggtaactgatcttgaagaaggaatgatcactcttggagaggaagctggttctcagaaacaccttctgtgactgagtgcccattgctcagccatgtgatgttgaccacaggaggaaagatgttgtccacaagacagatgagggtgttgggctgacccagtgtcacgggagacttggaaaacactgtgacctcaggaacctcattggtagcagcggtagagttggagcgtttaatcagactgttcaagttatgttttaggacagcgatgtttgtcagtgcaaattgcgggtcaaatctaaattgtctgagaacaggcaaacaccagacagtctccttcctccccaggtccacgtagaactgctcatctccatcaaattcatgggtgtactggccagagggaccgtaagactggtacaagtttacaccataagaggcgacgtggtcagccacaatgtcttcacctccacaggggctcatcacggtggtcagggcaagggcccccagcatcagagctttgtttaggatcatcctcttcccaaggcagccttagcagttgctgttctgagttgtagagcaattgtgagccc

SEQ ID NO: 315235 - DNA, 479 bp, Homo Sapiens
gattttgcttaactgttgagatcaagccagcgggcatgaagttagtggttttttgtacactatgcacttagaactttgtcatcttctgtctggaacagccacagaggcttccccagagtaggcactcggtatttgtcagttggcacagaaattcagcttaacagctcagggacacagctgagggcactggatgcaggactgcattacaactttaagtggtatggatgtaggaaagggtcattaacatgggagccatgcaatattgggtgagcagtaatgcagaccaagtttccaagaacaagacctgccgtataacaggaggcatgctgttctttagatttttgtgggtcaagaagccattcagatgaggtgatactctctcttcaggaggaaaaaggagtccctttgccctgtggtttatccccaggtcatccccacttcagggaatatggcttaaggtctgggtttcggaaattgtt

SEQ ID NO: 315236 - DNA, 351 bp, Homo Sapiens
ggttagcatttttattcccaactttttttgtggtataatgcgcagaaggtaatgaacacattctacctgcaagcttcttcctgtgcctttggaatctgctcctgccagtctgcagggaaccacggatctgctttccgtcacgtaggaggcattctcgacaccctctgtacacagcatgcgctttatttggcttctcttacgcagcgtagtgactttcagatttattcaagctgctgcgtgcgccaacagtccactccttcctagtgctgaggcccccatcacatgagcacaactgtttcttgtgtgtgatgtgttgtcctctggctgtgcactgccaaaaaagacatcatt

SEQ ID NO: 315237 - DNA, 677 bp, Homo Sapiens
  misc_feature (650)..(650): n is a, c, g, or t
  misc_feature (653)..(653): n is a, c, g, or t
aacagaaacatgttgcccttttatttgcgtttctcagaatactgtacaaagggagtaaaaatcctattcacactttgcttagaaagattttaaggtgaaagttccctatgatacacggggtgggagatgcagggtcaggagggagaaaacaggcccagtgacctctcctgttcccttggacccctggaagaggacacagggacccacaccttttcaaaattaacactgcccctagtccaactggggaggggagaaggctccagcccaggctcaggctcccggcctcactttcttctctgcaggctgagacagtgcctacaggccacgtcttgccccttcctctgtgctgcttgagcagggatcctacaggactctcaccacagaccccacatggggtggcctcacaacgccacatgtggctgccacatgagaggccctgcccagtgccagtctgtatgaggaagttaaggggtgagggcctgcagaggaccacagcacccatcgtttctgtcacagcttccccatacccccgcaggagtcagggccaagttggacctgtgcttacaatgactcacgggccttttccccacctgtctacccaacagccaacccaggagttaaacccacagcagcctccctcccctattacntantcacattctgtgggtaaattaacc

SEQ ID NO: 315238 - DNA, 416 bp, Homo Sapiens
cttgctctccccttcagaaagcatgtaccaggcaacccttataaaatcacaaatgagtcaggaggggactcagtgagcatcttgtctagctggacccagagagacagagcagcttgaccaagatcatatagccgaccaggggcagacttgcagtgagcacaggcacctgatgccctgtccagagctgtcaccccttgtaggaaacttccactgggcacaccaatgtcctgagaaaaagataaaatgactagattaaaatgtccacattcaagcaaaaccagaattcttactcaccttcaagctcatccccaattccttctgaaatacccttgacagctgcaacagcttgtcatttgacataccagcgtcgctcttactccaggaatcacgtttctttctttgctagccggcttgct

SEQ ID NO: 315239 - DNA, 968 bp, Homo Sapiens; identical to SEQ ID NO: 141351
  misc_feature (231)..(244): n is a, c, g, or t
  misc_feature (344)..(396): n is a, c, g, or t
  misc_feature (436)..(448): n is a, c, g, or t

SEQ ID NO: 315240 - DNA, 822 bp, Homo Sapiens
  misc_feature (28)..(28): n is a, c, g, or t
  misc_feature (43)..(43): n is a, c, g, or t
  misc_feature (532)..(542): n is a, c, g, or t
  misc_feature (563)..(563): n is a, c, g, or t
  misc_feature (688)..(688): n is a, c, g, or t
  misc_feature (702)..(702): n is a, c, g, or t
  misc_feature (705)..(705): n is a, c, g, or t
  misc_feature (765)..(765): n is a, c, g, or t
  misc_feature (768)..(768): n is a, c, g, or t
  misc_feature (808)..(808): n is a, c, g, or t
  misc_feature (810)..(810): n is a, c, g, or t
  misc_feature (817)..(818): n is a, c, g, or t
gggcacagaggagggccaggcacttccnacaccgagggcaggnctggccactccccagctccagtcgcccccagcgcagccccaagaggatgggggttcaccacctgcaccgcaaggacagcctgaccccaggcccaggagcagggcaacctgctcaactagggcccctgctggccttcctgccattgctgcaccaggactgcaaggagtccccacaccttggcagctcagggtccccagtccaagcccttgacctctcctctatccagacccgcacagctgtttcctgtgtggatggggtcaggttgtgggccatgccaggcctgtcagctgcgttgactgactgcagcagcttgcctcatggttttccctttttcttagaatatttattcttcagaggtaacatgcagttgggtctcaagacctttcctccaatcagcccaacccagcccagactgggcttttctggggagctgaggagtttatcagtattcatcttccatcctttcatagtcacaagctttgttatttnnnnnnnnnnngggggtgatggtgtaattgtnaacctcatttccgtttcctacctgtttgcttccccccccagtcctccgcatgagctgttgccctccaggggcctggcacagctggccttggggacgagggagaggactgattcagggccccctcngctgtctcctcccnccntctggaaaggagggtggggctcaggggcctcaagctgggctctgtgtgaggcctgccccnacncccaaccttggtctagactgttactcttaagctttgaganantccacanngatg

SEQ ID NO: 315241 - DNA, 614 bp, Homo Sapiens
  misc_feature (513)..(513): n is a, c, g, or t
  misc_feature (579)..(579): n is a, c, g, or t
cattttcagtcaaattttatttaaaaaaagcagcagataaacattacaattcaataatctaatctaaatatgcatttgacaatgaagcatatctgagtatggagtgaaaaaggttttccaaaaaaccatcaaatgtattatctccaaatacccaaataataaatcacttctgcaggccttttgttaagtggaatcataaacaaagaactgaagatttattgctgtgaaaacaaatctgtggtacagtagcatgaatcttgggtatttcgcataatcagttaggtcaagtgaagaagtcgaaaatgtgataagaaatttgtgtgtgtgtgcacatgtaaatctgtaagccagttgacccaagagcaactgaaacatctaatttgttcagctgagatcagacattgttaaatttccattttttagaaggcaattaaaaattacaattccaacagcccacaaaccaaacaaaaaaaactgtagagagaaattaaaactatattcaaagagcctttntttttcagctcaatttcagcaccccagggaaaataaaagcatccatgactatcacagatgactgantgtcattggtcaggtatttttctcccactgaggtt

SEQ ID NO: 315242 - DNA, 327 bp, Homo Sapiens
cattttcagtcaaattttatttaaaaaaagcagcagataaacattacaattcaataatctaatctaaatatgcatttgacaatgaagcatatctgagtatggagtgaaaaaggttttccaaaaaaccatcaaatgtattatctccaaatacccaaataataaatcacttctgcaggccttttgttaagtggaatcataaacaaagaactgaagatttattgctgtgcaaatctgtggtacagtagcatgaatcttgggtatttcgcataatcagttaggtcaagtgaagaagtcggacccaagagcaactgcatcttttgttcgctg

SEQ ID NO: 315243 - DNA, 617 bp, Homo Sapiens
cttccccctcggggtggaaacaaagggggttcggcgcgcggtgcggagcctggggggggaggagcgctccggtggtctggcgcgctgggctcgctagagtgaagatagtccaagtcctaagagacagcgcctctctcattcagtctttgattatacatcagcatcaccagctccctcaccaccaatgcgaccatgggagatgacatctaggcagcccccttcagttcgaccaagccaacatcacttctcaggggaacgatgcaacacacctgcacgcaacagaagaagtcctcctgtcaggcgccagagaggaagaagggatcgtctgtctcgacataattccattagtcaagatgccttccaccctccgaatgtatctccccgtctgctacatcctgctgctcatccaccccagcagaatgcagtcatggttgacatacatgatcagctccatcaaggaacagtccctgtttcttacacagtaacaacagtggcaccacatgggatttcactctggacaggccagcacattcctgcttgtggttcaacacaagttccaggatgctcgtgggttttaagtgacaagaacccccttgcttgttgggcctcctctgctt

SEQ ID NO: 315244 - DNA, 984 bp, Homo Sapiens
  misc_feature (335)..(335): n is a, c, g, or t
ggattattcaacatatgactaatttctggatttctctgtatcaactgctgcatttgtggattggccataattaactgtctcatcaggtcaggatttgagagcatgctctgaacaaagggattttccatgatctggaccatcatttcagggttagacaaaagttgtcgctgcatctgactctgtagttcagagaagttggtagtattcaaacccaagctactcagacctgcaagtcccccaaggccacctaaaccaaaagggttgctagtagcagaaccagatgtagagttactattaggagttgatgatgtagtaacattgcttccagctgtatntgtttgctgagctgaatgatcctgaggcctgttttgtgttttaatgacaaggtgaacagtaagtccatcatgaattccatgctgactcaaggtatcttgatctttcaaaatttttccagcaaatatcaacacaagttggtcagtatgtgatttaaaacgtttagagatttcttccttaaactgctggacggagctattctcgggcacggcgaattcctccttttccttcggggtcttcacggtgactttcatgattttgggctccgcggaggcagcggccgcgggggcgccagcaccttcggctccggcggcgctatcctgggagcccggaggaccgccgctttcaccactctcggccatggctgtggcggcggcggcggcggtgactcaggcaagcaggagggagcaggcgagcaaggaggagccagcagacaccagagccggcaggcctggacagcgaagaatgcagagcacgccgcctcagtagcaacgggcgcagggccacggtagcgggtgtggggccccggagctcggtgcaggctctggcgcaggcccgggtcaggcgctcggcagccgccgtgtgttcaggcgccgctcgctcacaccgacatccgcagcagccaccgcttcctcctccctgccccttccc

SEQ ID NO: 315245 - DNA, 670 bp, Homo Sapiens
  misc_feature (582)..(592): n is a, c, g, or t
ctccacatgcggtccacacatcagtaagggcctggagatgtgtaaagacacagcaaggggcaagcagactcttggccacgtgtttccagtggctggaccacgccgacacctgggatcttgagatacccaggaagggaggctgtctggccagcctctccctgcctccacttgctccacgtccagctcatcctcaccttccctcttttttaaagtcacatttccatgtttcaacattagtttgcattcacctttacaaaggcctttctttagatctgtgcagcctttgcgtgccaaacttgtgaaattccttttaccttttttggagtacttgctataaagccacctgtcaacaaacccccattatgtacagaataggacctatccagtagccaggccagtaggcagttggggaaggtgggaaggatccagcgaggcccctgagcctgcacctggacaggtgtacgtctgcacccatcaccctcagcaccaggccaccctgcagtccacttactgtactgtgttgtggaaggatatgctaagtgatgaaagttgcgagcagtctcactggtcgtgtaaactttnnnnnnnnnnnggaaattgaagctgtaaagtgctgcccgtctctaggaagttggtgggcagggacagcacttacacttttcctggtctg

SEQ ID NO: 315246 - DNA, 516 bp, Homo Sapiens
  misc_feature (407)..(415): n is a, c, g, or t
tccccaccccagggccacttagctgacaccagcccctcagaggaccagtgcgccccatcccagggagggttccttggggacaagggtggttggcagctccaagcctttaaacctggcttctgaaacgatggcatcagagccctggagagccagctggagacacaggcgtctggccttcaggggcttgctagggaacctgcatgcctagtaagcgccacaggtgactctgatgcaggcgccacagccacacttgaagaaacacagctcttgggtttttagtcctgctgtgtgttgggaagacatcaggcctgaaagctgagggcataactgaccattttttggaaaccctctcctccctcctccacaccttgagtgatggaccacaccaatcactgtattttatagcnnnnnnnnncatgtaggtttttagttacatctcctgccttgcattgaatattttaagataacagatatactggctggaggtttgtttaacactatctatatttgcttatc

SEQ ID NO: 315247 - DNA, 1116 bp, Homo Sapiens
  misc_feature (33)..(33): n is a, c, g, or t
gaaccgataagcaaatcaagagcctctcatganggcagcagggtcagtagcatccactggcttgggcttcacatcttgctctgacctcttcactgaccgaagttttacactgttcatctctttaaggatctctagcatatttggcatttcaggtttctttggattgttcttaaccaaagtcttccaagcattggctcttttctctcttcgttctttaatcagatcaacagcagatgtactttggtggagccccagtgcagggggaggcaggggcggtggggaaggtgaagggtgtggtggtatggtaccaaatgtggtagaatctaagtcacctgcagtgagattttgctgctcctgctgggtcacaattttggcaatctgagctctgagagcagcaagttcattttcgagagcgcaaatcttctgcagtgcttcctcatttgccagcgctggggtcttcagctgaggctcttcttgagacaagtctggtaaggaaatctgtctgcttggggccttctcaaagaaaagaaggtcatcctgaaggggtggccttgatctgacctctgtccttagtcttgctgaacactctccttcttctttggctacccatccaacatcagcaaaagacgccactgcatcctctcctgggtggctgggactccattctgttgcatggctgttaatctgaaattgaactcttggacactgaatcagagataagttggtaccaattttccttacgatacttcgagatgaaccatatggttttccagaccatagtaccgactgcatgctgaccccaactcgctgaaaccacatcctcatcaggcacttaatccagcccagcatggagatggctgagtcttcccaacctgcaggtcaacaacttcaggcatccatagcagcacatggtccatagagcacactgggcgtggcggctcctgctatgtaaaacgagtagtttgaagttggaggctggaggatccagagttgaagaccagcctatgtccaaaacaacctggaagagggtggaagagttgaggtgggaagtgggcagcagctgttgctacttcgccttctctcttaccctctcattggagcgctggtgttcttccc

SEQ ID NO: 315248 - DNA, 1116 bp, Homo Sapiens
  misc_feature (1005)..(1005): n is a, c, g, or t
  misc_feature (1022)..(1022): n is a, c, g, or t
  misc_feature (1032)..(1032): n is a, c, g, or t
  misc_feature (1040)..(1040): n is a, c, g, or t
  misc_feature (1053)..(1053): n is a, c, g, or t
  misc_feature (1059)..(1059): n is a, c, g, or t
  misc_feature (1065)..(1065): n is a, c, g, or t
  misc_feature (1085)..(1085): n is a, c, g, or t
tagggaattcactgttggcctactgggcggtgcctctgcagcaagcgtggggcgcgggaacccgagcaggactctccagtcctcagtcaccttggacaaagaagtgtggatcctcagattccatcttttccaactccaaggtgccatggcagagaaggtgctggtaacaggtggggctggctacattggcagccacacggtgctggagctgctggaggctggctacttgcctgtggtcatcgataacttccataatgccttccgtggagggggctccctgcctgagagcctgcggcgggtccaggagctgacaggccgctctgtggagtttgaggagatggacattttggaccagggagccctacagcgtctcttcaaaaagtacagctttatggcggtcatccactttgcggggctcaaggccgtgggcgagtcggtgcagaagcctctggattattacagagttaacctgaccgggaccatccagcttctggagatcatgaaggcccacggggtgaagaacctggtgttcagcagctcagccactgtgtacgggaacccccagtacctgccccttgatgaggcccaccccacgggtggttgtaccaacccttacggcaagtccaagttcttcatcgaggaaatgatccgggacctgtgccaggcagacaagacttggaacgcagtgcttgctgcgcttattttcaaccccacaggtgcccatgcctctggttgcattgggtgaggatccccagggcattacccaacaacctcatgccttatgtctcccaggtggcgatcgggcgacgggaggccctgaatgtctttggcaatgactatgacacagaggatggcacaggtgtccgggattacatccatgtcgtggatctggccaagggccacattgcagccttaaggaagctgaaagaacagtgtggctgccggatctacaacctgggcacgggcacaggctattcagtgctgcagatggtccaggctatgganaagcctctgggaaaaanatcccgtacnaagtggtngcaccgcgggaangtgatntggcancctgttacgccaacccccancctggcccaagaagaactggggttgacagca

SEQ ID NO: 315249 - DNA, 957 bp, Homo Sapiens
  misc_feature (725)..(764): n is a, c, g, or t
tttgtaagaaaacttgtttttatttttaaatactttggaaagctctttcagagcaatataaatgagtgcctgggaggaggaggttttgtgccagagccttgccccctcactcactcttgggggtcctgatgaactcttggaccctgtggaagataagagttagagacctcggcctcctggtcagtggagcccttggcctcatgcctggtgggctaagcgggcccagctggggtttgaggtaggggaggccttggcttggccccagcagctccagggccctgagttcctgccagaggctggagagcaggcagctgctgcttttcctggtccttggtaggggagggtcctcaggcttgcgttgccaaaagcctgaaggattctgcttctgccagcgccagagatccttcacacatcctgtccagccctaaggctgctgtccaccccaagctcctcttgggccaggctggggttggcgtaacaggctgccacatcaccttcccgccgtgccaccaccttgtacgggatctgcaagacaggaggtagttggagcttagctgagccggccctggcccagctgctggccaggtctttaagaagcagaagtgcagagcagcggctggcccgcaggcaccgggtgctaggcaggctgaggagactgggcagtgccaggtaccctccagagaggtgagtgggaagggccaaagctgctctgttgctgagagctnnnnnnnnnnnnnnnnnnnnnnnnnnnnnnnnnnnnnnnnctaccttcttcccagaggccttctccatagcctggaccatctgcagcactgaatagcctgtgcccgtgcccaggttgtagatctggcccacggagaacagggtttatggagcgggctggactgaccacgcctctgggccgctctgcctggatctggtccctcccctccctcacttctcccttctcttccagtt

SEQ ID NO: 315250 - DNA, 1620 bp, Homo Sapiens
  misc_feature (1562)..(1562): n is a, c, g, or t
caagaaactttggggcttgtgtgggaggtaaaacgggtaaatttcccggcaatttcccaccagaaatatttttccctagaattggtagagagccggcccttggaacccctggaggtaaacttttttcagggggttccattatggcccgtgccagcagaatccaggcccagaattccaggccacggttgccatcacccttcgcctggctgccttgaacaggcaagcttaaaacaatgatgcaacctccctggtgccttctcagccaggacagaccaggcatggtctttcacggaagccatcctctctcataatcattgttgctcaggtgcctgtttaggaagacggaagctgtagtcacaccaccagtggagactgctttggaggagccagaagctgttccctgttggagatgggatgcagggccagtctggatgcgcccctgtgtggcctgaccttgctgctgaagctgctgcaactgttgagcagtgaggaacttaacaggcttattgccagcaatgagcttagtgcctgctggcatagttgtgaggatgatgttgcggcccaacccactgaggttggctccaaggttgcctttgatgatgggggctgtgaccacgctcttgcccttcattggctggctgatcacagagaggggaactgtgatccgtgtaggcaacttcccagcctgggacgtggacacaaccgtggtgctgacagggacctgccgcacggtgggggctcctgtgctgatgctgatgggggtgcttgcagccccagaaagccacagctacagttctggacacagcagcattcatactgggtaaggacaccgctgaagtatggacagttccagacccactggccaccgaggccccttgcttggcgtgggttgcaacggtgatggtctggcctgctttgggaggcatcactcccagtccctgcacgatgcggatcgtggcagctggttttgcttctgaagaggccactgtgctttttcccttctggtcagccacactcacgccaagagctggcatcaagcgaaaagccgaacttgaggcttctgttggcttgaggtcaggagtcacgaccacagtggtacctgttggagtggatgaaggggcactggctgaactggccttggcagggctatcagctgcatgtactggattggaagtgacgtgtaaggtggcagagatgcctttgcctgtagtgttgcctcctgtcccgaagaggtcctgggtcaatttgactgtggtaacctgggacttggccaatgtggccatcatgtccggagtgattcgcagaaccgtctggcccttggcatctgtggtgatggaagagggcggcagacgcaatacatccttaccctggatgcggaagttagtggctgtgagtggaatgctgttgcctgtttggggcttcacaccaagctgcccagtgattgccacctgaatggggagaagcagcactgatgagggattcacaatagtaaaccggttacaaaatacaactagacaaacttccgtttcatgggtagatgttatgtatttgtatgttaactntttattttgcaaacattcacagaagtagagaacctcgtgccgaattcctgcagccggg

SEQ ID NO: 315251 - DNA, 961 bp, Homo Sapiens
  misc_feature (139)..(139): n is a, c, g, or t
tttttcagcccagggacagacccagggcatggtcttttcccggaaaggccttcctctcttcacttaaccaatgttgctcaggtgcctgttttaggagaccggaggctgtagtcacaaccaccaggtgggaagactgctntgggggagccagaagctgttccctgttgaagatgggatgcagggacagtctggatgcgcacctgtgtggcctgaccttgctgctgaagctgctgcaactgctgagcagtgaggaaactaacaggcttattgccagcaatgagcttagtgcctgctggcatagttgtgaggatgatgttgcggcccaacccactgaggttggctccaaggttgcctttgatgatgggggctgtgaccacgctcttgcccttcattggctggctgatcacagagaggggaactgtgatccgtgtaggcaacttcccagcctgggacgtggacacaaccgtggtgctgacagggacctgccgcacggtgggggctcctgtgctgatgctgatgggggtgcttgcagccccagaagccacagctacagtcttggacacagcagcattcatactgggtaaggacaccgctgaagtatggacagttccagacccactggccaccgaggccccttgcttggcgtgggttgcaacggtgatggtctggcctgctttgggaggcatcactcccagtccctgcacgatgcggatcgtggcagctggttttgcttctgaagaggccactgtgctttttcccttctggtcagccacactcacgccaagagctggcatcaagcgaaaagccgaacttgaggcttctgttggcttgaggtcaggagtcactttgaccacagtggtacctgttggagtggatgaaggggcactggctgaactggccttggcagggctatcagctgcatgtactcctcgtgccgaattcgccacccaggcctcgctac

SEQ ID NO: 315252 - DNA, 669 bp, Homo Sapiens
cgggctgcaggattcggcacgagtcttggcgggtgaaggtgtgtgtcagcttttgcgtcactcgagccctgggcgctgcttgctaaagagccgagcacgcgggtctgtcatcatgtcgcgttacgggcggtacggaggagaaaccaaggtgtatgttggtaacctgggaactggcgctggcaaaggagagttagaaagggctttcagttattatggtcctttaagaactgtatggattgcgagaaatcctccaggatttgcctttgtggaattcgaagatcctagagatgcagaagatgcagtacgaggactggatggaaaggtgatttgtggctcccgagtgagggttgaactatcgacaggcatgcctcggagatcacgttttgatagaccacctgcccgacgtccctttgatccaaatgatagatgctatgagtgtggcgaaaagggacattatgcttatgattgtcatcgttacagccggcgaagaagaagcaggtatttattttaataaaggaatggttggtattctagttaatcaagtaattcttttattagcaaggcagaaactagtgtttttctataaacttgaatgttaattgtacaggtgtattttacaaattttgtttaattaaaaaaatgttactatattaataatcaaccctgggc

SEQ ID NO: 315253 - DNA, 950 bp, Homo Sapiens
agaattttgtttccctgagctttgcccgtttaacgggccttcgcccaaattcccttagtaattcaggttaagccaaaattagcttattccataaaaggggtgaacctgaggagtttccagtccattcttttcagggacttgcacttcttgcgagggactttctggatggggaacggctttctttttggagatggagatctggactttggatcggctgcttcttgggtcgtgaaatagaccctggatcttgattttgactttgaccggggattggaaatacctcgatccttttatagaaccagacctagatcttctgagtgaagctgatcttgatctacgaagagagatagatcttgatcgtcgaggagatgctgaccttgaccttcgtcccctgctcctgctgcgtgagcgagagtatcgccttcctctggatcgagaatgtgatctagaccgtgacctgcttcttcttcgccggctgtaacgatgacaatcataagcataatgtcccttttcgccacactcatagcatctatcatttggatcaaagggacgtcgggcaggtggtctatcaaaacgtgatctccgaggcatgcctgtcgatagttcaaccctcactcgggagccacaaatcacctttccatccagtcctcgtactgcatcttctgcatctctaggatcttcgaattccacaaaggcaaatcctggaggatttctcgcaatccatacagttcttaaaggaccataataactgaaagccctttctaactctcctttgccagcgccagttcccaggttaccaacatacaccttggtttctcctccgtaccgcccgtaacgcgacatgatgacagacccgcgtgctcggctctttagcaagcagcgcccagggctcgagtgacgcaaaagctgacacacaccttcacccgccaagagtcccggcggcactaccc

SEQ ID NO: 315254 - DNA, 757 bp, Homo Sapiens
gggagtgccgccgggactcttggcgggtgaaggtgtgtgtcagcttttgcgtcactcgagccctgggcgctgcttgctaaagagccgagcacgcgggtctgtcatcatgtcgcgttacgggcggtacggaggagaaaccaaggtgtatgttggtaacctgggaactggcgctggcaaaggagagttagaaagggctttcagttattatggtcctttaagaactgtatggattgcgagaaatcctccaggatttgcctttgtggaattcgaagatcctagagatgcagaagatgcagtacgaggactggatggaaaggtgatttgtggctcccgagtgagggttgaactatcgacaggcatgcctcggagatcacgttttgatagaccacctgcccgacgtccctttgatccaaatgatagatgctatgagtgtggcgaaaagggacattatgcttatgattgtcatcgttacagccggcgaagaagaagcaggtcacggtctagatcacattctcgatccagaggaaggcgatactctcgctcacgcagcaggagcaggggacgaaggtcaaggtccagcatctccttcgaacgatcaagaatcttatctcctctttcttagatccaagatccagctttcccttcaggaagatcttaaggtcttgggttctaataaaaagggattcgaagggtatttttcccaattcccccccgttcgaggggtcacaggaatcccaaggaattcccaagggttcca

SEQ ID NO: 315255 - DNA, 1836 bp, Homo Sapiens
  misc_feature (205)..(260): n is a, c, g, or t
  misc_feature (303)..(444): n is a, c, g, or t
  misc_feature (448)..(574): n is a, c, g, or t
  misc_feature (1096)..(1096): n is a, c, g, or t
  misc_feature (1295)..(1295): n is a, c, g, or t
  misc_feature (1305)..(1305): n is a, c, g, or t
  misc_feature (1318)..(1318): n is a, c, g, or t
ggggggaatattattttattctcccagcgggccccaacgggggtttgattcccccgcggcggggtttccgggtttttccaccaccccctttggggggaggggtcccccatgtgggggggaagaagtgttttaatttatttccccccaccatttttttaataaaaatggcccacggcgcggggggttaaatttagaattagaaagnnnnnnnnnnnnnnnnnnnnnnnnnnnnnnnnnnnnnnnnnnnnnnnnnnnnnnnntccttggggtttttttaaaaccctttggtttgcccccgggggnnnnnnnnnnnnnnnnnnnnnnnnnnnnnnnnnnnnnnnnnnnnnnnnnnnnnnnnnnnnnnnnnnnnnnnnnnnnnnnnnnnnnnnnnnnnnnnnnnnnnnnnnnnnnnnnnnnnnnnnnnnnnnnnnnnnnnnnnnnnnncctnnnnnnnnnnnnnnnnnnnnnnnnnnnnnnnnnnnnnnnnnnnnnnnnnnnnnnnnnnnnnnnnnnnnnnnnnnnnnnnnnnnnnnnnnnnnnnnnnnnnnnnnnnnnnnnnnnnnnnnnnnnnnnnctagttagaaacattttatttaaatgtgccaaataaaaacccacattttcagaccatatgatgttaatacattcaacaaaatttatattatcttactgctgtgaatttacatagtaatccagatccattttgattagatggttgaattatctttcctaggttacactttacagacatcacaaatcccttataataatgtaaacaaaataacttttccctaaagggtgaacttgagagcttcagtccattctttcaggacttgcacttctgcgaggacttcctgatggggaacgacttctttttggagatggagatctggactttgatcggctgcttcttggtcgtgaaatagacctggatcttgatcttgacctcgacggggattggaaatacctcgatccttttatagaaccagacctagatcttctgagtgaagctgatcttgatctgcgaagagagatagatcttgatcgtcgaggagatgctgaccttgaccttcgtcccctgctcctgctgcgtgangagagtatcgccttcctctggatcgagaatgtgatctagaccgtgacctatttttcaagttagagaaaaaacaaaatgtcagacaataactcgtttttaagagtttgtgtgcctctgctgaaatcaaatctcaaaactatttaagtttagtgtctcatttggaaataaactctgggcctattagttgttgagtattttntttttttacnacctaagaggagntttgttaaaagctgaattacaacttagcattacataatattaaacactgtaatgtgtatttaaaatcaaccttgctagtttgcaggtcgaccctctttggtccatggtctagtagatctagacgatctagaagtatctatagccgatcgctgcatctagatgttttcttcaatctaacgacgaatcaaactgacagcccaaatgaagccaggtgaggccttgattgacgcaagaagatttttcctagttgggaatgtggtcaatctggtgttcctctttctaaaccggaggggggccccaattgtaagcccaaatttactgttacggcgatcaccgtctcaaattttctgccctttaaagaataaggtgaagctaggtgtagatgactcgaggggatctgggcctcttatgctgatcacctcaaggtctaggaggatcttaattgtcggatttgcaaggcgcctcagcatgatatcataaggctcgtgacattctgaatcaaggcgactgactcaaac

SEQ ID NO: 315256 - DNA, 463 bp, Homo Sapiens
cccatggaagttgtttcttacttcttttctctcttatttattaaccatggtctgagagttgtttttgttctatgtaacagtattgccacaaaactataggcaaatcgtgtttgcagggagatttctgatgcctctgtgggtgtgtgtaagttaaagtggccacatttaagaaggccaagctttgtagtggttgcacagtcacactgatatgctgatttgctctttctcattgtatgtctatgctttgtcatcagtgctatagtaaattacaaagaaataggtagattgtatgaacatacccacaaatgcctatgatttaggttaccaatgtattcttctcatttggggttttgcttctgtctgtctgtttattggaaacttgtacttcaagtagggggaatcgtaattctaataactccttagctaagttttattattcaggcaataaacatgttttcatgta

SEQ ID NO: 315257 - DNA, 341 bp, Homo Sapiens
agagttcaaaatctttaatattatctgaaaaactattttttaaaaaaggattgaagaacatgtcaagagtgatgaaatgcacaaatttaaaatgttacataaaacaataaagtacatacatataacaacaatgaaaattctttatttaaaataccaagttattaaaatgggtaaaatgacatagtaaaataaaattttttcaaaacaactttaaagaaaacatacaatgacatcgattataatatatactaggaaattaatcatcacctgtcattaatggggatttgcatgtattctatttagtctcttcagaggcgttttttccgcttactctgtgcctt

SEQ ID NO: 315258 - DNA, 664 bp, Homo Sapiens
ttatagatttagctttcattttattttagttataaaacgattgccaaaacacaaagttttagaaaaacacacaaacacaagtttttattccttttttagttgcagaaaataaatacaatcacatattccatatgcttgtctacaaaagcatctctaaaaatgtcatttactggacttgacagtataatcttttcggcttttcaattgcaggtatcatacagatcattttattttattaactttttaagcacttggctcaagcaactttggaagaaggctttgtgagcttacaaatcttattccaagtgttattttttaaacagttacaactaaaacgaggtcttaccttttcaaaagaggagaataaagtttttcttttataaaaattgctccccaaactcacaaacacccaaaccgacataaaaagttggtctatcttcttaggaatcaataagaagtgaggttacaggggagagggagtgaacaagcatgacggttcctgtgaaatccattccaccgagcagtcactcttatgtttccagtttggccctcgggagttttgctggctcagtcatctaagcctatgtttctgatcatgctgatattcacagttttgatcttggagcactggagcttctggacttcatgtggaataagttgcgac

SEQ ID NO: 315259 - DNA, 1639 bp, Homo Sapiens
  misc_feature (102)..(102): n is a, c, g, or t
  misc_feature (104)..(104): n is a, c, g, or t
  misc_feature (106)..(134): n is a, c, g, or t
ggccttagggggccggccaagaggggtaatttattaataattttctcctttttagtgccatgcccagaaagccctggcaggcaaggtgttccgggacattananannnnnnnnnnnnnnnnnnnnnnnnnnnnngaggccaatttccagtgaggaacaggctccacagaagaagctgataggcaggggggatcaaacgctgctcccctgctcaccgatctacttctccaaatacaatatcttgggtacctatgatggcaacgacatctgccaacatgtgtcccttagacatcttgtccaaaccagccagatgggcaaaaccaggagccttgatcttgcatcgataagggcggctgctgccatcagacaccaggtacaccccaaactctcccttgggagcctcaatggcagtatatgtggctcctggaggaacttggtagccctcagtatacaacttaaagtgatgaatcagtgactccatggaagtcttcatctctgctcgcttaggtggagacactttggcatcatcaaccttgatctccccaggaggcatcttgtttagacactgtgcgataattctcagggactggcgcatctcctccacccggcacaggtacctatcatagcagtcccctcgagaaccaacaggaacatcaaactcaacctggtcgtaaacatcatagggctgggtcttccgcaggtcccactggatgcctgagccccgaagcatcactccactaaaaccatagttaagtgcttcttctgctgttacaaccccaatgtcaattgtccgatttcgccagatcctattgttggtcagcaactcctccaactcatcaagccgaagagagaagttcttagaaaactgataaatgtcatccataagcccaaggggtaggtcctggtgcactcctcctggccggatataagcagcatgcattcgggctccagacactcgctcgtagaactcaaacatcttctccctttcttcaaacagccagaagaaaggggtcatggccccaaggtccagggcatgtgtggtcacagccatgatgtggttcaacaaacgtgtgatttctccaaacagcactcggatccactgtgcccgaggaggaggccggatgtttagcaacttctccacagctagagaataggcctgttcgttacacatcatggacacatagtctagccggtcaaagtatggaagggcctgaagataggtcttgtattcaatgagcttctcagtgcctcggtgcaggagcccgatgtgaggatcacacttccgcaccatctccccactcaattccatcactagtcgcaggacaccatgcgctgctgggtgttggggcccaaagttcagggtaatgttcttcacaattgtgtcctttggagggtccacatcattccaaggtggaggcttccagtgggctgtttctttgcttgggtacataacagctcccccaaactgctgtgcccattccacatctggctgccactgccgaacacctctgctgggctgaatcggcaatcggactccagccccaggccgcagcacctgggccgcgacgccccggaagccgcacaaagccctcagcgccgccatcttactccggctgcagactgcgggaaggagaaccggg

SEQ ID NO: 315260 - DNA, 910 bp, Homo Sapiens
gggtggcgaattcggcacgaggccggccaggaggagtgcaccaggacctaccccttgggcttatggatgacatttatcagttttctaagaacttctctcttcggcttgatgagttggaggagttgctgaccaacaataggatctggcgaaatcggacaattgacattggggttgtaacagcagaagaagcacttaactatggttttagtggagtgatgcttcggggctcaggcatccagtgggacctgcggaagacccagccctatgatgtttacgaccaggttgagtttgatgttcctgttggttctcgaggggactgctatgataggtacctgtgccgggtggaggagatgcgccagtccctgagaattatcgcacagtgtctaaacaagatgcctcctggggagatcaaggttgatgatgccaaagtgtctccacctaagcgagcagagatgaagacttccatggagtcactgattcatcactttaagttgtatactgagggctaccaagttcctccaggagccacatatactgccattgaggctcccaagggagagtttggggtgtacctggtgtctgatggcagcagccgcccttatcgatgcaagatcaaggctcctggttttgcccatctgggctggtttggacaagatgtctaagggacacagtgttggcagatgtcgttgccatcataggtacccaagatattgtattttggagaaagtaaatccgggggagcagggggagccaaccgttttgaatcccccccctggccttattcaacctttccttcctggggggaagcccccgggttccctcccacctggggaaaaattggggcccctcctcgggtggttgggtgtataccacgatctatactccgcccagcctaccccgcgcctcaccg

SEQ ID NO: 315261 - DNA, 798 bp, Homo Sapiens
  misc_feature (70)..(103): n is a, c, g, or t
taatttattataatttctccttttttagtacatgcacagaaagcctgacagccaagtgtacatgaacatnnnnnnnnnnnnnnnnnnnnnnnnnnnnnnnnnnagaggccaatttccagtgaggaacaggctccacagaagaagctgataggcaggggggatcaaacgctgctcccctgctcaccgatctacttctccaaatacaatatcttgggtacctaggtgagaggatggaggaaaaaagtgatgttacttatcttcctgttgtgaggcaaaacaaacaaaaaaagtggtgttacccaagatccagaacccattactgtgctcaaaagattgaggacccgagtccatgccatggcctatggtgaacaggaagtgttctccttctgtccccagtgggcgtcccgaactcctttgtctaggatacctctactacacaataggcctcgtacctatgatggcaacgacatctgccaacatgtgtcccttagacatcttgtccaaaccagcctagggagattgagatggcaacaatgttagttaagacttggaaggtgggagtagaaagaagagttcataaaaacctcaaccaaggtcaggtttaattcattggagttatagttactgggattgattcttaccagatgggcaaaaccaggagccttgatcttgcatcgataagggcggctgctgccatcagacaccaggtacaccccaaactctcccttgggagcctcaatggcagtatatgtggctcctggaggaacttggtagccctcagtatacaacttaaagtga

SEQ ID NO: 315262 - DNA, 808 bp, Homo Sapiens
agttgcaaatgaatgactttattaatgagactctttagacaatgtacttcgtttaaatgaagatgtacttctaacataatctgtccgttataacttgagtcatacagtcaatacatttaaacaaatgacaaggtaaatccttatgttaaatataggataatcaccactttcatttattattttctaatataaaataggcttacctaaaacaaacctgaaaagtttgaactctgcaagtagatacagttctctttcacaatctactagaataatcattccctatattattcaatctgactttttagtttcctcatcttcttttttatccattcaaagttttatgctaaacaaaaactatatgaataggttcaaacctgttaaaagtgcacaccgatgaagatcttcacttacaaatttcatgaacatatcctcatcctaaaataagaatttaaaaatatttctcttttaaaaaccaacggttttcaaatccagaatttttttacatctattttagtacttgggattgagtatatgtctttaacctttaataaacgagaaaattaaagggttattatcagctactggtctcaatgcacccaacacttcaaatatcctgaaaccttaaagtttgcatctttcattcctcctctttcactgggtgtggtcataataatgactttatggaaggaattaagtttaaagattcttgataaacccgggaaaactatttaattaagaataaattggccgccgtggcgctcattgctgtatcccaacacttttgaaggcaagttcgggccaaatcctg

SEQ ID NO: 315263 - DNA, 583 bp, Homo Sapiens
  misc_feature (43)..(43): n is a, c, g, or t
gtttcccacctccgggagttcagtggattccttcctaagaagnccctcagagtcaaaaaatgtggggagcacaggtgtggcaaaaattatcatcagtaagcatgatgggaggctcccctagcattaaagcccaaagtgactttgcagaaaccctggggaaagtagtggagaagggcttaggcctcaaatggcttcttctaaaaactatggctctccactcatcagtggttccactccaaagcatgagcgtggctctcccagccatagtaagtcaccagcatataccccccagaatctggacagtgaaagtgagtcaggctcctccatagcagagaaatcttatcagaatagtcccagctcagacgatggtatccgaccacttccagaatacagcacagagaaacataagaagcacaaaaaggaaaagaagaaagtgacaaagatagggaccgagaccgggacgaccgagacaagaaccagtccttgtctatgacaagtaacacaatcttatctgcagacagaccctcaaggctcagcccagactttatgattggggagggatgatgatcttatggtgtggccc

SEQ ID NO: 315264 - DNA, 585 bp, Homo Sapiens
  misc_feature (196)..(204): n is a, c, g, or t
aacggagaagtcaactgcccaaagaagagtagcgctggctatcacagtcatcaactgtatcaaaccaactcctttaccttggctgatgcggtacatccctggttgagatgatcaagcctctctgtaaaactactttccaagcaaaatgcttctgagaagtataaatgtatttttaaaaataggctcaaatcctatnnnnnnnnngtttatacaaatacacattctaatgatatttaaaaagtattacctgaggtaattcagtaacagttgttctttcaggaaacttctcttcccatagcaaatcattttcttgattagaatctaaaaactgaggttaaatatattctcctttaaaatttaaaggatgctgaagtttgcgttaaatatgtacagagcctcacctggcatacatgtttctcaataaacgcaagtacacctaaattcagaggcaccccatccaatctatgagtttcaacacttcagttttgtgtctgaactttagtatcaaaattgaggggaacagggaccggcgtttcaaaccgaaagatccaaaaggctttgggtaagacagatgctagtgaattc

SEQ ID NO: 315265 - DNA, 2196 bp, Homo Sapiens
  misc_feature (154)..(162): n is a, c, g, or t
  misc_feature (1525)..(1525): n is a, c, g, or t
  misc_feature (2155)..(2155): n is a, c, g, or t
  misc_feature (2157)..(2157): n is a, c, g, or t
gagagaactagtctcgagtgcttccggtctgtttttcaatattaggccacatgatttattcagtcgttcttatggtcccaaattacaatttatgtgtattcataggactacaaaagttcccattcgaattgtctgagcttataaaataccaacnnnnnnnnnaaactgttacatatactcattaacaccagtctgcaacaagttacatagaatcagaggcacttcaaaggcttaaaaagacgtttacaacttaaatgcatttttaagaacaaaaactgatttttctttaaacctctactcgtaccttcaaattgcaagaaattaacaaatacagtggccaaaggaatctgcagcaacttcttaaaatactgttaacatctttgggtttgctgaggcttgtcagtaacttacatcaaatcctcccaaaagaagatctgattagatagatatgactaaacggttttgtagtaataatccaattttacacattaatttgctgttgcaaatctgcccaaagctacaggtaatgaaaaataaagcaagtgtaaaatggatagtctgacacttaaaaatttatacaaagtggaagttaaagtttacatatttgaaaatcacatatacactaaattaccattatctgaattttccaaagacaaattgcaccatgacagctacaaaaggcatagggtttggttttaagggcacaagaagggagggcagaggagaggaaggggacaacagataaattaacaaagtaagaccaacttggtaaggtcaatctgagacatgctgacacaaatgaaacagctttcatctttgagtcataggaaaaagacaatcattttgtatttgcgcataaaagtttaaaccaattccatgaacatcgagggttttcataacataatattttgccactgctattcacagaacactgcagatgttaaattttaattttatgttgttctaaagaaatacatgaaatgttttaaatacaatgggattttatcattaaagtgccagaatggctctttaatgaaaacaaaaaacaaagatcttcattattctatgcaaaagctttattttgaaaagttcagtgatctcataaatagagacactaagttggagttttacgcataaaactccttagtaggtgccttctgataagcagcactggatggtttgcgttctccaaggtcatagcttccttcatccttctttctcatgcgatacaccaacagcaggataagaaaaattgcaaagagaaagccaataactccaccagcaatgacagctgctaggacttctgtccgtttaaacagactgtctgagtgtttctcagtatacacatttgtatcctcttcggctgggtccattttcctttctgagtcagagaggtgaactttctctttatcagtttcttcaggtgactttgtctgagcaggtatcttgttctgtatattcagcgtcgtggtttccacttttggagcagcactagtcaacagtatctttggaagtggtcgagatnttgtcagctctggactctctacatcctcatcagctcccgagccagacgcagaagcatagtcatcgtcatcaataggatacactcctgaagcttcttcaatggagctgttgtcaaggtacatgtctttatcagatgtcagctctgctctcgactccgccgacacgcaggccaccaagcccaaggtgagcaggatccacgcgcgccgcatattccccagggaccggctgctcccagccgctgcttgcaaccagggcaaaacgaagcctcctgcccagcgctcggcgcagcccgcgcacacgaatccggagcagagtaccgcagcgattgcggctcaggctcggggactcgggctcggggctcgggggcgctcgcttcctcctcctgcgcctgctcccgccgcccgcagtgcgccccgggaacgcggcgccctctcacttgttggtttctgcactcccgacacggagttggtgctccgggaaggctgctctctgattcttcttcttgctctgctgtggttttgctcctccgcggactcctttcccgtgccgaggttcagtttctggttttaaggaataaattcgctggcttgaaagggagctacggcagaagtttaggggcagagcggcgggnanggcgcgatccgcgcggctggagatcccgggaattccgga

SEQ ID NO: 315266 - DNA, 500 bp, Homo Sapiens
  misc_feature (364)..(364): n is a, c, g, or t
  misc_feature (392)..(392): n is a, c, g, or t
  misc_feature (410)..(410): n is a, c, g, or t
  misc_feature (428)..(428): n is a, c, g, or t
  misc_feature (446)..(446): n is a, c, g, or t
  misc_feature (456)..(456): n is a, c, g, or t
  misc_feature (476)..(476): n is a, c, g, or t
attttataagcacagacaattctaatggtaacttttgtagtcttatgaatagacataaattgtaatttgggaacataaaaactactgaataaatcatgtggcctaatattgaaaatgtcactgttataaattttgtacatttttgatcaaatgtacatctcccctttgctaacggccgtctgctctcaaggatgacgtgggtttgatttctaagtgtttcacagtgtctgtaaatcaagaccaaagagcctgtcgatgagactgtttattaccagattcacttctgaattggccagaggaaatctgaatgtattatcctgtgtgtgtctaggtagagatattgggatggctgccaggtgatttncgaagttttgcaacctttataggataanctgatgggcaatattgangacagacgcctgcttttngcaaataacttaccaagnctgttagttnccaaggatgctgaatggggngcttttcccgaatgtttgggtatc

SEQ ID NO: 315267 - DNA, 3266 bp, Homo Sapiens
ttttttcattctgaaaataattttattattttacagttgttcaggaaacttcccaggatgttgtaaccaagatttaatcaccacagtagatttagagcagatcagtcagcccacttgtcttctctcttctttagggagaggctaggcagtgaacacatcatgtatgcaatgagaaaataaccaactggtaggatgggggaggggaggggaggcagggaataggcacaaatggaattctatcctggctgtccttctcaggtctatctatatttaattttgtcttctctatattctccttccattgccacagagggcagagacaatggggctgagaaactgtaataactgtcactaacagcaaagtagcttagtacttcaagaggtcaggagttgcagtgtggtgttagaccagtcagactcctggctgagagtcaatgcctaatattggctcccagtggcccctgagcactgtctcagggtccacattccaggaatattcagatattcctggaatgacaagaattggaaccctgctgtccatagacacttctccctgccctttggtgaaaggaaagacttgggccacttaataccttagtatacatgtgatcaagggcaaaagcaaagggattctatccttatagtctaagacctgaaattctccctccaattatatctgaaattggcagggaagaagatgctgtcctcccatgtgatctaacagctaaaaccccttagggagttccttcagctttcaccaccctattctgcaagagacctaaatcagatgtcctatgaggtgacatgttcatttccctgaactctgtttaatgcagagccaccttccccctgaaacaggagaaaatacaggcaaacaaggcaaagaaagttatcaatcaaaatgatactgaacttcagattattaggtttattgaaaccatcctcttggcttggctgaaagacattcctcagtatcttttacaggaccacaaaagatcagggtcctgcaaaatctcaacaaatattaggctcaacaaaccaaatgtgattctcagattaagcagaagcgttcaggctcagggcagtagaagaaagcagactcgccagtccctgcagctccaacctgtcctcgtatccacctctgtttttgcaggcactttccgtgaagagttggagagaagacctgtaaatgggaagactgttccactggaattgatgttctgatgttagaggtgagagaattccaagttttgaagggagtggtccaaagagtaacaactaagtctatagatggcccgtaaaacacagaatgagcaggacatgaatcattagaaagtagatggctgctagaagtggcactcgggtccgtgaatgacagagtgaacgcaggactcgcttccatccaacgccactccgggtctttcgacaactgttgcttgtaagatctattaccagtgcctgctcctgagtgccacgggagccaatgataggagtccgggaagagtcccccattcactgtgctctaaccgtctgatctgctcctcggccacagagagagcattctcagcagccactctttggtctcgttcttcttccagcagcttccttaattcattcacttcctgtctggtgttgcatagctgctgctgagcttcagaaaagctttgctgcggttcccttagttcctcagggtcactctttctgtgaactccattcttttcctggggagctcctggagcaacatctatatttagtggccccgcctgcagctcttgaacctgcttctccaagactgcacagtgatttaaaaggtcaccatagtgctgctggttctcacgaagactctgactggtatcgcagagctgaatggaaagggtgtttttctcttccagtagctgagagaagttgctgttcagttgctgaattcttaactccttttggtgaatttcctttaagctgtcattgagctgggtcctgagaagttctgtctcataaaccagattttgtgacccatctggggaagctgatgtctctggggatgcctgtctttggtattgcactttgagaggctgagtctgggaggaagaagacctcaattcccttataagattctgcagatgactgagctgctgatctttatctgagatagccataaggtactgttccttcattctcctctcatgtatttcccaggaactcttctccatccctgagctgatgcagctcatgctgccaggagaggttttcctgcctgagctcttcttgcataatctgaaatgcttttgtcttatcttgatactcctgaagttgagccttcagtggatgtaactcagtgatctcttgattaatctgtaagtattgctgctgcagattcttcaattccttcagtagtctgtctctgtcattttggagtgaagacatagctttttttaaactctgtacttcagctgggctggtggaaggctgagctgcagacctctgcttcccttcctctgactttcgaaatttctccagctcattccacaggtgatctctctcattctgcagactggccatagccttggaaaaggactgcacttggttataagaatcttctagttgtgaggacaagtgaagcaattgctcatctttggataggagctgttggttaagtttctcaaggtgagacaagctattctcctcagtggagttcattgaaaaggcggtttcagaaagaagagcatctctctctctgtttaagagtccctgttctttcaactgtgccaattccttcagactggcatcatatttccttttcagttcatcaagttcctcattggcatgatctctactattttgcaaggaactcatagaccttccaaaagactgaatttgtgctgtgagacctttattttctttggtgaccatgagtaatttctgttccatctccaccaaatctcttgctagctctgccactctctcttctgctgtttcagtttcatttctcattatccctgcatcatgatgaagatgctttaattctttcttcagtttatcttcaatttcacctaccttcttggcagcttccttttgaacacaaaccaattcttcttccagttctgcaattctcttttgagaggaagaaaacaaagcacttaacctgtgtacctcttcttcttttacttttaactgggcatgatagagtcctaaagtaccttcttcttgcaaggctgttacttgtcttgttagctgggatatagatactttcaaactctcaatctctttag

SEQ ID NO: 315268 - DNA, 591 bp, Homo Sapiens
  misc_feature (342)..(352): n is a, c, g, or t
  misc_feature (504)..(504): n is a, c, g, or t
cacacatgaaaatcaaactaattcttgcctgtctaaattaatttccagggattctgtgtgtggggcaccatataataattccacaatatttagcacagtgctttgtccttaagcaactatgaacaactcctcagcactgttgttcttctttggaataagtctacataataggcctcaggaaataaatacaatattagagtgtaagaaaatcagttaatgaaaaataatcatgagtgaaactgatccttgttgatgtataaaataaattttatgctacatagttataaggttgccgatgagaaatatcttgaaataggttgtgaattttaagtttgcgcaagnnnnnnnnnnncagaatctgtatttcattctgtgatcttcctgtgatgctaattcttctggggtcacaattttttcttgtattattcagtgggcagattaatttctcaatacgtgctaatctacaattgagatgcttaaatcttcacctgcactgatctcttncatttctggggcaccgtgaagtataatattcatttttctacatcagacaggtctttctgatatacctttctttacagtcaccagtac

SEQ ID NO: 315269 - DNA, 377 bp, Homo Sapiens
gcacgatgggtgcctaccacccgctgctctatgagaagaatttggtgaagcatctcaaccagggcacagatgaggacatctacctgcttggctcttctccatcaggcattaaatgaatggtctcttggccaccccagcctgggaagaacattttcctgaacaattccagcctgctccttttactctaggggcctctgtcagcaagaccatggggacttcaagagcctgtggtcaggtcaggtccagccttccctgtagccagacagtttatgagcccagagccttctgccacacacatgcacacatatctagcattctttccagacagcatcctccccgccttccaccttggtagatgcggtctatctctcccatcg

SEQ ID NO: 315270 - DNA, 563 bp, Homo Sapiens
aggatatgggcagacaggaagggcacagaagcgggggtcaggaacacagcacggcaggtgaaggccctcaaagctggtctggatttcaacacaagtcgtgcaatgggtatggggatcctggtgggatcaggcagcagctcaaagcggagcagggtcagggccgtggccaccttcagctcgttcatggcaaattgtttcccattgcatttccttgatcctcctgagaagggcaggaaagcgtggctgtgttgagcagaacccggtgcaaaacggaaagggtcaaacacctctgggttgggccacacttttgggttgtggtgaaggccataaatggagaggaggcccatgatacctttgggcaaggagcgcccatcagggaaggtgacgggagtgctgagctctctgccaatgcctggcaccggtgggtagagcctcagtgcctccttaatgcacatggtggtgtagggcatctggtccaggtggttccaggtgatggaggctccattacccatgaggctgtggatctcctcccggcacctctcctgatgcttggggtgtgtggc

SEQ ID NO: 315271 - DNA, 1853 bp, Homo Sapiens
  misc_feature (650)..(650): n is a, c, g, or t
  misc_feature (1668)..(1668): n is a, c, g, or t
cttgacggtttagcatctgctctgttacttgagataatggagagcaggttcttttaactcaagatacaattgatcctgggagagcaaggagcaaggagccagcaagtccagacacattccagagccacgagccctggattctatccaagccacgaggggttttatgccccgggcttagattatggtgcgtcagggtagccttccacccttcagcacagagcttggtgttccaaaggccacaaggggttttagaccctggatcctggacatgattcaagactcttttacattatgtcagacatgcaagctcggcctcagcttctcccaacactcagcttttctcccaacaagagatacaggtgggtaggagacaggtagacaagcaggtagggagcctggagaaaggtgagagagagaagggcaggcagactgggggacagcaggcaggtgggaagaagggaaggtgggcagacagaaaacaggatatgggcagacaggaaggggacagaagcgggggtcaggaagacaggacggcaggtggagaccctcaaagctggtccttgtcttcacaagggttagggagcctcctgagacgcaggtggattccatttttggatttcaacacaagtcgtgcaatggggatggggatncctggtgggatcaggcagcagctcaaagcggagcagggtcagggccgtggccaccttcagctcgttcatggcaaattgtttcccaatgcagttccttgatcctcctgagaagggcaggaaagcgtggctgtgttgagcagaacccggtgcaaaacggaaagggtcaaacacctctgggttgggccacacttttgggttgtggtgaaggccataaatggagaggaggaccatgatacctttgggcaaggagcgcccatcagggaaggtgacgggagtgctgagctctctgccaatgcctggcaccggtgggtagagcctcagtgcctccttaatgcacatggtggtgtagggcatctggtccaggtggttcctgaaacaattccatcctgaacaccagcaaggcctgggcagaccaggggccctttggccaagaggaggatatccagaaaatccaaatgcctcttcctcttgatcttctccagctccccctccttctgtagttgagccttcctcagttggatcacttggtctgtccacctggatgctgccctgatggctgaaggcacacttcatgatggtgtccagggtcatcaaggagacgtgctgaaagacctccagaggggaatcctggccaaggagctcttcccatttgtccagcatcactcgtacagagtctgccatgagccccacatagggcttcaggatgtcatagtggaaggctggggtcagcatccgtcgatgctggaaccatgtctgcccattcaacaggagcaagccgtacccaatccatggagccaggaatctgtaggaaccatgggatttcgggtctgatctccccagaatcaccttcatatagtcagggtcatagagctggacacgaactttgcctccccatagccaatgaggacaggcacttgggaatgtctccacccatttctgaatccgttgtagctcctggtcctgttggagctcctggatgtgcccgaagagccagtgggagggagggcacgggaactgntggagggctttgagcagccactgcctgtgcaggtagagctgaactgccttgatcagcagcagaagcagaatgagcagggaggccgcttggaggattctcagagacatcacctcagtgagtctgctggggctcagcacagagacactcatggtgcagcacctgctggatctctgagtgcccatccc

SEQ ID NO: 315272 - DNA, 748 bp, Homo Sapiens
agagctcagcactcccgtcaccttccctgatgggcgctccttgcccaaaggtatcatggtcctcctctccatttatggccttcaccacaacccaaaagtgtggcccaacccagaggtgtttgacccttcccgttttgcaccgggttctgctcaacacagccacgctttcctgcccttctcaggaggatcaaggtgagacgtcctgtgtggtaattggaatagagaaatgagggaagtctctggtcaaccctctgatctttgtgagcccgatgttcatatgtgggcatcttcaggtgtgctcttaaatattggtatttgtggggaaagtcaggcacctggtgtgggcgtctctgtgtacaaaaggaaggtggcattcagagcaccccatggagactttgctccctctgcttcttcaaatgggcagcctgaattcactgtcagtgcatgttccaaacttcagtatattcatgtattttcctcactttaaggatatgaattctcaaaattagatattctccagtaaattcaacttcagctgtttgcttttctcagttatcaggaatagtaaactgtagatttctctctccccacacatcctcaatgcagcacactaccttccctatttaattcactagtctgtcatagagatgaatcattgaaatctttgcatctgtttataatacagatggacctgcaagtcctacctttcaagccatataagggagaggttaaggtagccctttgaaga

SEQ ID NO: 315273 - DNA, 511 bp, Homo Sapiens
  misc_feature (376)..(376): n is a, c, g, or t
  misc_feature (435)..(435): n is a, c, g, or t
  misc_feature (465)..(465): n is a, c, g, or t
attcatgtctctcttagggtacggcttgctcctgttgaatgggcagacatggttccagcatcgacggatgctgaccccagccttccactatgacatcctgaagccctatgtggggctcatggcagactctgtacgagtgatgctggtgagtccatgtctctctcctctccccacacccactcacagcacacactctcaccaactccactctcaaccctgtgtcccacaggcagacatagacataggactcatgggaacaacactcttcaggtcattgctgtgaggagtaggagggttccccaggagttgtattaaggtagggaggaacacccggggcattcaggttcattattccacgcttttgtttcccccaccntaggggattaggaggtttcatggggtggattggcaagggcccttttttccttccccatnttttgggaacctttcaggcacaaggggatntgggagggagttttggcattttttgtttgggacagttggggttttc

SEQ ID NO: 315274 - DNA, 631 bp, Homo Sapiens
gtgatctctcacttttacgacttttatttaccaaaactgggtgagcgaagatttaattttatcaacgccaatagttcctctttcctgttttcaaatcagttcaacctacagctttactattctcccattctattcgtagactatatgctagtttactgtatttgatttctattattgatttatatatgttaacagtagccaagccttatcttctcaaagacttaggaggtttacccttctaaagtgctcccaacaagagatacaggtgggtaggagacaggtagacaagcaggtagggtcatagagctggacacgaactttgcctccccataagccaattgaggacaggcacttgggaatgtctccacccatttctgaatccgttgtagctcctggtcctgttggagctcctggatgtgcccgaagagccagtgggagggagggcacgggaactgctggagggctttgagcagccactgcctgtgcaggtagagctgaactgccttgatcagcagcagaagcagaatgagcagggaggccgcttggaggattccagagacatcacccaggagtctgctggggctcagcacagagacactcatggtgcagcacctgctggatctctgagtgc

SEQ ID NO: 315275 - DNA, 1325 bp, Homo Sapiens
ctccaaaatggtcgccatcatttaaattttgacagaggaattaagtaactttcaatacttcgatttagtaaaattggctactgttcttgactttaaaagaaggcctaagttggtttggttaatctccaggctcttttggctgaataattcaaagatgaggaatttaaatcatagtgaccttgaccaggctctcccttttaagagtatttgcaagagatgaactgccagagcactgcgagaatgaggttggttctctaacctcctcacacccggcagctgggcagggctcctctggagaaccagacacccccagccatttccagactccagctaaccgcatgcagtggagctagggacagagagcgttggaggcagtggctgtgtggctgggagcccctgccttcccctctaccatcctaggaagtggggtcatgctgcagctgtgtgtatactgtacctacacagactggtttagcggtttggactgccagtcccaaaaccaaagaaaatgcttggtagagggcgctgtctcaggcaacctggttccattggtctgttctgttgctcactgctgtgggcctggcatgtgtcctttcagctccctaaacctgcatgctccaatcatctaaagcagcaagaccaggtgggaagctccctgtggttctcaggcctaacagtccagctgagccagccaggcaacagatttaatgctatttctgatgcattgtcaaaataccccaacaggccccagaaaagtgagtggagtctgaggccttgatacctgagtaagccaagctcttcagattgaattatctagaccagtggttctcaaacttcatttgtgcagaaacagcatacccaaggagcatacttaaaatgcagattccagggccgtgcccttagaatttctgactccataattctgggtttgagtccagaaatgtgcatttgttaacaagcaccctagtgtatttagatatagatggagcaggaaccctgactttgaccaacactaatgtaaacattcaggcttgcattgttattcagtctgacaagggcccctttactagcagagtgacagacttcatctgacagaaggacacaaggagagtctttgtccaggtctttctacaagagcacaaaacaatcacaaattaccttaattagtccttccaatgattctatgaaatagaaactattctttatccccatttcatagtgaaggaagtcaaatctcagggaggctagcctgtattcaaccaagacctgctgatggtagtatcctcaacccctgagacatcctgcttgctgctggtggagccaga

SEQ ID NO: 315276 - DNA, 559 bp, Homo Sapiens
  misc_feature (323)..(370): n is a, c, g, or t
taactcagggccaagcgatcatgaaatttgttgtcgaattattttaaaattaaatgtgatcaatctctacagttgaatgtccgtgttaacagactgatgtggcttgctgctccagccttgggcatgctccatactggtcttcccttctggctccaccagcagcaagcaggatgtctcaggggttgaggatactaccatcagcaggtcttggttgaatacaggctagcctccctgagatttgacttccttcactatgaaatggggataaagaatagtttctatttcatagaatcattggaaggactaattaaggtaatttgtgnnnnnnnnnnnnnnnnnnnnnnnnnnnnnnnnnnnnnnnnnnnnnnnnatcatcattgttttgtgctcttgtagaaagacctggacaaagactctccttgtgtccttctgtcagatgaagtctgtcactctgctagtaaaggggcccttgtcagactgaataacaatgcaagcctgaatgtttacattagtgttggtcaaagtcagggttcctgctccatctatatctaaatacact

SEQ ID NO: 315277 - DNA, 895 bp, Homo Sapiens
gatgatataactaatatttattgagcacttactatgcactaggctaagcattttcacaaattaccttaattagtccttccaatgattctatgaaatagaaactattctttatccccatttcatagtgaaggaagtcaaatctcagggaggctagcctgtattcaaccaagacctgctgatggtagtatcctcaacccctgagacatcctgcttgctgctggtggagccagaagggaagaccagtatggagcatgcccaaggctggagcagcaagccacatcagtctgttaacactgacattcaactgtagagattgatcacatttaattttaaaataattcgacaacaaatttcatgatcgcttggccctgagttactttctctccataagcgcacctcattttaaacacatccgtttggtgagatgcagtgtgtggagcaggggagaggctgaggatgcagcccactcttggagtggccttcaaatccctctgtccaagtcagtgtttaaagcaagaccatggtcagggaagaaaactggcacggaggaatgaaagtagagtttgttaaagatgaccccaaaacaagcatgtaaaacagaacaaggtaggtgcatcaagccatgccatttgcgagatactcagaaatcaaaggcattgtttgtgcctttttacaagccatgggttaagaggtgtcactaagtgccaaaaattcaccctgtgcccctaggccagtcacttctctatgggccccagtttcttcacttctaaaacaagagacttgaacccagtggtctccgtgggtcctcccattctagacccagaatctaaagctatgatttcacgaccagggagataactaagcagccatcatatcaaacacttacaaagaactc

SEQ ID NO: 315278 - DNA, 374 bp, Homo Sapiens
ccagtagcaggggccctagcaggcatggatcctgtctgggcccagggtggtctctactgtctccacgaccggtccaaagggctggtactgggctgatggtctacttcaggtgcacaggaataggcctgttgcccaggtgaatgggtatgactcctccaggtccccaggaaggctcttgctggaccactgggtgagactttggacaggcagtactgctccagtctgcagctgagaggggcagaaaccaagttgcagggctgcttcaaggtctacaactgagatcgaaatattcaggcctacctctggtgtcactgatgggcatgtctcacagtgggtccctgggcaggcagcaggatctgctatggggactgagg

SEQ ID NO: 315279 - DNA, 375 bp, Homo Sapiens
gggcagcgaagcttgtgatcagttgctgcctcttcttgccgttgtttcctttacccctctgcttaccgaaaatcattgctgttcttttaatgccaagaagttcccatttataaactgaagttagttagataattaggtagcttagaacagtggcttttaaactttttgattggctctactataattcaatttgtattgaaacccatagacatgtgaatgtttatgctgaaacagaagtatttactttctgataataagtgtatgtagtcagatacagtcttttaagtccactttgtatggtacagaacaaatccctaacaagctaattccaacccactttgattttgatcactgagggttgtcttacctggtttc

SEQ ID NO: 315280 - DNA, 745 bp, Homo Sapiens
aacttttgattggctctactataaaaattccatttgtattgaaacccatagacatgtgaatgtttatgctaaaccaaaagtatttactttctgataataagtgtatgtagtcagatacagtcttttaagtccactttgtatggacagaacaaatccctaccaagctaattccaacccactaaattgatttaatgatcactaagggttgtcttaccatggtttcaaaccatttagaaggcactactcatgagttgccccatttcagcatatgatccccacttttgctggtctaagaatcatttatcagtcccactcagttatcatatcaaccagatttgttagtgactttaaaaaaacgttaatttgttacttcagcaagtagaagatggatatttttgatgcccagagtgttgtcttccccgtccagggtatctcattctgatcaaaccgaattggccatccatactgagaagtggctattgatatatttatattgagaaatgaatatgtgtttatactttctcccccagatattagagaaactgaagtgggaaacacctttgtagctaccagattatgtattctcttttggaaaagcctcatggaaaacactgctgtgctgtcttccagcttccaggtttcacgaaggcacatctctcaactagtaatatgttctgttttcagaacacacttcagtacatttgattagttcagcatttcccgctgtttgttggggtactaatag

SEQ ID NO: 315281 - DNA, 361 bp, Homo Sapiens
cttaattctgtgtttttattgtttgactcacctgaggtctttggactttgcctctgagctggcttaagggcaatccaccttgttcactggtctggagtggggaggcagagtatgggtcggctggaggagtggggctctgtgctctcttttgagagtttactaaacgtcactctgcatggtgaggggtgtgtcctctccgctggggaggcctggcttgaatttcagattgcctccctgggacaccagaccctgtgctgtgctccctcagaaggacagccttgactgtctccactccagcagtcagttctctccactcccactgggagaaggagcaaaggctggtgctcgtgccgaatcctgc

SEQ ID NO: 315282 - DNA, 504 bp, Homo Sapiens
ttcactttcagatgattaggcttttgcactttagaatgagaaacttgtgacgttagtgtgttcttactagctttaatttgtatgtagcaatgaattgtgaatcttagtgcagtgggtttttttaaaaaactcaaaaagctgggaattaagtggtttcagtaataatgctataccgaggtgcttgcattgtatttcataattttgttacaaaccattttcgtactgttaggcccttggaacagataccggtgctttctgaaagatgaaagaaatgcaatgggtgctcttcatgcaaggttgcaaacctaccaagaatgcataatagtctcacttttccccaataaagagatgcgtgtgactagttttggacttttaaccttaatgggggttgcatgtctcctattgttaatcattgtcagctgcagtgacatgatccacagtcctgcatttactgcctttcactttgattttggacaggttttagagagccaggtgttggtctgg

SEQ ID NO: 315283 - DNA, 910 bp, Homo Sapiens
gtggaaaacaacaccttatttattcagggtgtaatactgtctacttcctttcagaagacttgaaaaagatcaaaataggataaatggacagttactactaaacgattcaaatacttgggcagtatctttccctcttaaccctttcacacgtttttaaagtgtcaaaattgatgaatggtataaattcaaaaggaaaattcttttctactgaaaaggacatccagctcgcacaaacggtggttcagctgaaggcaaggcgtttctggttttcctctgcactcgggcggatcgttaacttccccaagttacaactgagttgctctttccaggcttttcgaagcatctttaagtttccccaccaagtcctgtaattgttccatgctgcaactaaaactaatctctggataggatggggaatcagtgttctgtacacttaaggtcaccaaatatgcaggtctgtacatcctatgaagttgattggtctttatctgatattccaagcgccaagaaacatccgttatatgagggagagatctgcctatacttcccagtaggatttctagggaattcttattattctgatattccgtgcaaaacagttctattcgctctctgtcaaatttacagtcttctagataagtgcttagagttgacttgtcagctcggtgctttcctgcctctagtatgtaagttgcagctgctgcatgacaatgttttaaaaccactgggtcgatatgtttcaagtctggatgatctaacacggcctcgtccgcctgggcgtccagcagactctggaatgccgcccggaggagaagcgtgaaggcgttggagtcgaaggagcggggatccgccagcatctggaagcctttctgcacagactccgagagctccattgtgagcgcgccgtgac

SEQ ID NO: 315284 - DNA, 644 bp, Homo Sapiens
tttccacccccaactccattttaatccattttgaatttaaaccattgttaaactttatttttaaattatgaatggtaaaggagcatttcaaaatcatctcaataaacgatctttaaaaacatgagcttaacttcaattgcttgacatgccctttggctccttttctttgggtcaagatcccgaagatcttgtttcacaccaacactctccattcatacctgcaagtgaaaagtgcctcagcttgacaccttatacagtacctaccttcccagtaggatttctagggaattcttattattctgatattccgtgcaaaacagttctattcgctctctgtcaaatttacagtcttctagataagtgcttagagttgacttgtcagctcggtgctttcctgcctctagtatgtaagttgcagctgctgcatgacaatgttttaaaaccactgggtcgatatgtttcaagtctggatgatctaacacggcctcgtccgcctgggcgtccagcagactctggaatgccgcccggaggagaagcgtgaaggcgttggagtcgaaggagcggggatccgccagcatctggaagcctttctgcacagactccgagagctccattgtgagcgcgccgtgaccttcgacacgcac

SEQ ID NO: 315285 - DNA, 589 bp, Homo Sapiens
ttttgtggaaaacaacaccttatttattcagggtgtaatactgtctacttcctttcagaagacttgaaaaagatcaaaataggataaatggacagttactactaaacgattcaaatacttgggcagtatctttcccctcttaaccctttcacacgtttttaaagtgtcaaaattgatgaatggtataaattcaaaaggaaaattcttttctactgaaaaggacatccagctcgcacaaacggtggttcagctgaaggcaaggcgtttctggttttcctctgcactcgggcggatcgttaacttccccaagttacaactgagttgctctttccaggcttttcgaagcatctttaagtttccccaccaagtcctaaaagacgtgtatacaataccacgtttttaggataaaacatggaaagaagtatccaagctcaagaaagatgcaagaaaaaaaatcaggacacaccttccaaacaagtttaaaattcaacaagattttaacttttgacaaactactatcgggcaaaaaaagcgtttcctcggaaatacctcatgttcaaatcggttatttgccctcacactgaaacat

SEQ ID NO: 315286 - DNA, 933 bp, Homo Sapiens
  misc_feature (514)..(545): n is a, c, g, or t
tcagctctcaccatcattgtgaaccccatggagtcctaccagaatcggcagtcctgtgtgacgggggctgttgggggccagcaggaggatgaggacagcagtgactcggaggtggccgattcccccagcagcgacgagagacgcatcatcgagacccccccacaccgctactaaggcctacacctctccccacgcagagggggaattctgccctggtgaaacagacactccagacatgggagaaggactttctgggaacacagagaccaagagggagagaggcttcagaaccagtcctcctttcatttcaaaaccccagcgggccctctggagtccgccctgcccctcccccggccccccatccctcacttctgggctgtcatgctcctggtgtgccccttgcactggggctggctgggttagaaagtgggctggacttcagctgcctttctacccccaatggcagctgcccccttagcactcactgtgttggggagagggtgacgattgcaannnnnnnnnnnnnnnnnnnnnnnnnnnnnnnnattgaaggaaaccctctcctctccccttcccttctctctcctgtccatgggaagcttttccccctctgcagggctccctcagctggaccatcgtccctgcttctcttatgatcgccccacctcatttccatttcagtctggggaccccatttctccctcctttccaacttccttcctttcttgtcctgtttcccttcctgcccttgcagtcctgaggtcctgcagccccggcccctcctccgtgacctggtgtggccaggctgcggtgacgggaggggacgtgggggccccgggtgtacatatataatgtatattttttcaatgttgtcgtgagtgcagcccatgttcctgcgtgcagctcacggccttgtgtgttggtggggccccc

SEQ ID NO: 315287 - DNA, 489 bp, Homo Sapiens
gctacttccatctgggtatgcctcacgaggatcaaagtaagacctggccaaaaggttctccagatgaatatatcgctctggctgtgtttgttttaacatgatcatgggatcagtctgtctcaaaagtgacctggcagcacccaattcacggagctctatcaattccagaacaacctgttcatagaggtcaatgagggttttgtctggcaatttcagagactgtatagcctgcaacacagtatcccaatggccactgttaatgtcagccacaaaactctcaatgctgtccacagtattcagagacacagtagtctcctcctgcaaggtggctaacgcccgatgtaaactgttctccttcaagtactgcataataaggcggatcacatccgaagattcgatttcgatcgacatagccgtatctctccgggagcaggccccagctctccctcaaggccagtcgcgcaacacaccaacgacacctccggcccc

SEQ ID NO: 315288 - DNA, 1554 bp, Homo Sapiens
  misc_feature (21)..(21): n is a, c, g, or t
  misc_feature (133)..(133): n is a, c, g, or t
  misc_feature (256)..(256): n is a, c, g, or t
gggagctttattatacaaaanggcggggtggggggcggcaagcagcgggggacgcagcatcaagcatcctgcatggccgttatcagcccttgacctgcagtttccccttggatctgggggggtgacccacccntctctgcacaggctgtgcctcaaacctcctaacttcctagaaggcacttggcctctccaggggtaagtccctttggccaatgatcaggagtttctttcctcccccaagtaacaagaagcggantgggtggggagggcgggggcggtggtcagagagtggaagggcagagaggctaaagggtccagggagcaaaaggaggtggcagcggatggcatcaaagaggcgagggtaggtcatgctggcaacaggaagcaacttctttagccagggccggggggcgggtgtctggctggaatctcccctgggtacatggagggtgccagccggctggacctgcagacccaggaagcgagatgggacgcctagggagccgggcccccttccacaagcaccttctcatacttcccatgcccggtggccacaaacttatacctcttcccagatggggtgctcttaattgttgatgagtcttggagctccctttgctcccagagcttttcttgctcatgtctccagccacaatatccttgcaggacggagtcttggccgcagactgagcctgtacctcacccgtctcccaccgactcttggtactggccacagccatgctgggcagctctatggaggcctggcgggctagcttgggggtccggccagcggtctcgatggcctgggtgtattgttccagccactgatcaatcttggagatgggcaagtctggctgggatttcttcacactgttactcttctctatggagcggtttagggactcggtcctgtcgatgagtttggtggtagggctcaggggaggcgagctctgttcgatggtcccctccaagaccaaggggctgggtgtcctgggctgctgacatttctggtgctcctcctgttcctcctcagccctgcggcccccaggttgtcctggacagtgtcctctgggcctggcccctccttgctcagactcaactcctccaggtggacttcatcactgtcctccttttcgtaggcatgcaggccgggcctgtcctcttgctccccctcaggactcctgcactgggggggctctccgctgtccaaggcgccctgcgccccctcgtgctgctgccgctgctctggcctctgggaccagtcgccaaagccctcgtcctcatccagttcaggggcctccgagggcttcaggctgaggagcatctcctgcttcggccgctcggggacatggccgcctccctcctcgtcctgggcctgaagctgcctgtctctctcatgctggcattgctcgtggacggcctcctcctcgtcctccacgctccactgagcagtgggccccagcaactcttcccgctcctcggcacccgggtcactcgaagcctccgccatcagcctgtagtctgggccccacagggtgctggcagatcccggga

SEQ ID NO: 315289 - DNA, 564 bp, Homo Sapiens
ggaaatgaagcgacatttattgaaacttgtattagtcaagcaacttaatgctaggctaagttgcagtgagtaataatccctaacctcagtgacagtgcagaaaaagaagggtttcatatgtggagtgtgatgcatgtcaatgggagtttccttcacctggtgactcaggtatccaggcacattcatttctgcaggtctgccttcttgacatgaggtcattgcagaaggagagagggtgtagagtcatgccagttcttagggtgctccctgacaaggagatcctgcagcactctgcttcacattcctgtttttccagaactcagccagtacccagtgcaactgccaaagagtcttgcaggatggagtcttggccgcagactgagcctgtacttcacccgtctcccaccaactcttggtactggacgcagccatgctgggcagctctatggaggcctggcgggctagcttgggggtctggccagcagtcctttcacagctggggagtggagtctgggcctgaggtctcccgtgcgcctctcggcgcctgcgcccgcgctgtgcccc

SEQ ID NO: 315290 - DNA, 582 bp, Homo Sapiens
aagcacctcaaataaatctatatatctgtaatttatagagtacattcttcaaatgtaccaatttagttctacttcaagataaggtatagacaactgcaaaattccactgtccttacgatcacaatcatgaagaggatggagctgcagaatctgagcatataaagacttttatgaattctaacgcccaaccccaacttgagcattcattgcgctggtcctaattcacattcaaacgccctgagaatggagctaacaggatacactgcacccaatctcataggcacacacaggatagatccgaataccactgcaaagacttttaaaatgagctgatattaagacctcagttcacagaaagccaaataaataataaacatcttgtgttggatacaaataacacagagtctcataagatagcattcacatgttgagggtacatatcggaattactgagaattcaaggatgagctgcaaaaatctccacttgtctggcaaatggccattcagtggacaccaagcagtgaataacatgcacagtggaattatctgacagagacattaggaaacacactatagtgagat

SEQ ID NO: 315291 - DNA, 732 bp, Homo Sapiens
gccctatgtgtatcttgtgcgtggtattgcaaaataaatgtatttgaagataaactgtcttataaaaggtcagaggcaatttgagatcccagattcagcttgtctcataaaaagattcaacttcaagtagcacaatttcttgtctgcttttaatcctgaacattcttgaagcacgaaacagccatctgtttacacaacacatctgtgacatctgactctggcaccggtggcgccgcagctttcagctctgaggccccacggcgtgcagccctcagctttgggagggcccagatcaggccactgtgacctctggctttgccagcaacaacaggtcccagcatcccagcccttccctcccctggcacctcccaaaagcacaagaatgcaaaccgagactggcccaccactgaggcaggggtggactcccgcttgagtgtgccaacagggcgggtggactgtcctggtgacttcctggtgggcctggccaaccaagaggccaagtggcctcaccaggccttacctggctgcctggcagcccggagaggaaggaggaaggacgctcacggtgcgacagctctggccacgctggcgggagctacgtgatgatcctggcgatggcttgcagggaggggaagtcgtcgtcccgggcagcatgcagcgcctggtggctgctggcatcgccatgcgcgagcacctgctggcaggtggggcacacacggcagtccaggcccg

SEQ ID NO: 315292 - DNA, 1398 bp, Homo Sapiens
  misc_feature (10)..(10): n is a, c, g, or t
  misc_feature (35)..(35): n is a, c, g, or t
tctgggttangcaaagcaaaattgtttttacatgngataatagtgtgaaggaacctatattgtaatgtaatttacagaagtgttggtcaaagtgagttcttttccatatagaaattaaaaggtagtaattcaagaccccattgccactatttggacttaactactgcattacttaaagattttattggtatagcttggacaaaggcacaagctttatggaagagcaaattctgggtaataattacatattgacattggggctacaatacaggtaatgaaactctgcttcttcagagacagcaccccaggaacactttcattttcctcttaagcataggccattttctcagtttagacaacagccctctactcagtgagcctccacccttcacagagggacagctccctggctggcaccatggtctgggctctgtccctgccaaccctgcagggacatgtggggcccccaatgggcagccccagcctgaggctcacatgttctccttgtcaaactcacacatgaagtacatggtggtgtggcaggccacgtcgttccagccgcccgaggccaccatctccacgcagtcctcctcgtcgtaggcattgttgggctcaccgctgcgccacttgttgaaggtccgcatgggggagtggtcagagtacacgaaggcgccctccttctccaggtcgttgatgccgatgaagacacgggccaggccggcttgcgccaggtatgcggccatcaggccattggcagcctcgtccttgggcatgctcagcgtgcccccgcggccctggcaggacagctgggcgtccgcgtagcgcttctcctccttcaccagcaggtagatcttgctctccgtctcgcgcacagcggcgacagcattcttgatgaacttgagctcgctggtcagctgagagacctggttgtccatctccccgatggccttgcgcagctggctgcactcacatgggaggcctggttctccattaggaccagggggtcctatgtcaccggaatctcctttctcacctttagagccaatgggaccaatttttccatgacgacccacactgcctttctgtcctttgtcccccatgtctcctttttctcccgtggggccgactcttccaggccgtccgggggcgcctttgtctcccttctctcccgcatcccctttgaggccagggacgaggatctgcacagagcaggcgtcatcgccagccggctgaggatgtccagatggcagcagtgacaggaaggccaggctgattagaacgcccaccagggccagattccccctcatcctgagcgcaggcaggacaccaactcctgagcacgcgctaggcgaacggggcgtcctgcccgtcgctggcccgcgaggacactgcccccag

SEQ ID NO: 315293 - DNA, 990 bp, Homo Sapiens
  misc_feature (188)..(189): n is a, c, g, or t
  misc_feature (255)..(255): n is a, c, g, or t
  misc_feature (506)..(506): n is a, c, g, or t
  misc_feature (879)..(879): n is a, c, g, or t
  misc_feature (886)..(886): n is a, c, g, or t
  misc_feature (979)..(979): n is a, c, g, or t
cgcagcggggatcatacctcttatcccgtggtaattacctgggagtctaccaatagctatatatagaaatccccttatggcttatatatatgggacaagataggcaagataacccctgtgacagaaggcctactgttgctgtaacaaaggggcatacatacattttcaagaactgcaatttaatttgnnagtcaaggaaaagcagaagatcctgagatgtcatatatggcgaattgcactattctaaatgtgttntgttttaatctttcacagtaaacaagctttcagaaatgatggtcacaagggctaggatatcaaggagcagccagtcattcacccaattccaacacacctacatggtcacactgtcacagagtgagagccacagttccagtagttcccctaattgaccatatctcccttgccaaatcaaaagaaatcattcctagaattctctaatccttctattgatgatgggaactccagacaccaatggctgggggaanaaataagttaactcacaccaagttcctctacttattacagacaaagggccaaatcttggtcttgatctgtgccaatcgacttcaaaagttgtgacgttcttggatcagttctgctagggtgagacccgaatttggatccccaacagttctggagtatttcatcctggcagcctcattaacatcaggctcctgggactgcaaccaactcagggttattcagtccatttgaggctcacacctggaaggtaagtttctttaaaagtcatcgctaaaaagaggttagttgaacaaccactgcttgcagtcttcattttctctgaaacataagagactagctcgtgccgaattcggcacgagggaggtcccccacggnccttcangatggctgcggtgctgacctttggcgtgctcttactgacagggagccaggctccgcatttcttgcagccaagatgcccccccagagcccctgngatcgagtgcg

SEQ ID NO: 315294 - DNA, 1722 bp, Homo Sapiens
  misc_feature (140)..(236): n is a, c, g, or t
ggggggggattcccaaccctattttctggccacgggttttccttgggaacaggtatggcccaattttcctttcctaatggggccgggcgcccaacgaaaggttttgaaaggtttttcgaggggcgagggggccgacaaannnnnnnnnnnnnnnnnnnnnnnnnnnnnnnnnnnnnnnnnnnnnnnnnnnnnnnnnnnnnnnnnnnnnnnnnnnnnnnnnnnnnnnnnnnnnnnnnggagtcaaaactctttattgtcctgcccagggagcccttcccaaaggaatccacagagcaggggggcgaggcgggcggcacagggccttggtgacaacgtgaagggggagctggagttaggtgggggacagccccttcagctccctgatggcactggctgtgctggcaggccacccaggggagccatcaccagcatgaggtccacacctggggctggggctgagcgctgtctacactgcttctgtctacacggttactctggcacttgtcaggtccactcaacctctctggcctcaaactgcaggggggagatgggtccacatgctgggaggcactgggaggccgtggaacagtgaagagcggactgcacgggctggaggatgccagatgggcacacatgtcccccagggcagctgccggcaggagtctgacaaagggacccagccagcccctctggaccattctagaggccagtggtgaaggtcctgaagcaacttggcttatagagacacgttaagtgtacccggtgcaccccatgctgggaccagctctggtcccagggccaccttgacaggtgagcccaaatgtcctcctctccccatactgggcactgggctgaggcaggaccccagcaggtggtggcgggagcagctctacagagggaagccaaagcctttcaacagaagaacaaaggggcttccagggccggagtcacaggcctggggaggaggggacagggtgcttctgagaggcagggagacaacaaacccccacttcatgctggtcctcagtccttccatcctgccagccccgacccccggtccacaacagcaggcccaaccctgccttttggggtgaggagaaaaaaatctggaaccaaaagggatggcggctgtttcctcgggaccctggtgggtgtggggccaccgagcagccatcaccggaggttaaagaccaggctgacggtgaggatgatgcccaggagaaggatgaagggcagccaggtcttcacgaaggccccaacgctgacgtacttcccgtagagcaggcagaagaagcagagcgtcaccatattccagttggtgctgttgttgtagcgcatcagattcagggccaatgccacgtgcgagtggcagttgtcacagcagagattgtgcatgcggtgcttgtactcctcagaggcgtcgtgcacagccgtgtcccatgcgttgggcccgctagcatagacctgagcagggtccaacttccagtacttggcaggctttccaaaggccatgttgtcctctgagacaaagtaggggcccgcgaagtcccgaatgactcctgtggatgtgcagatgcccatgtggccgatgatggggaaaaaccacgtgagcaccgggatgggcgtccacaccacgcagtaggggaagcgactccgttccacatccatggcgacgccgccggagccttgatattgcttcatgtccgtctcggccgccgtcgg

SEQ ID NO: 315295 - DNA, 1720 bp, Homo Sapiens
  misc_feature (374)..(565): n is a, c, g, or t
  misc_feature (624)..(624): n is a, c, g, or t
  misc_feature (672)..(672): n is a, c, g, or t
  misc_feature (682)..(682): n is a, c, g, or t
  misc_feature (1580)..(1624): n is a, c, g, or t
tgtgaagttgtgtggctactccgggttcatgattccattcacactcctaatgataacacatgactgtaagagaactgctgacacgcgcagagccagccttgaaagagagccctgggaaagtctgggtgaagaggctatctgtcagatattactaaaaagtgaggacatacacatttctgtttcatttttagtaaatatataattttgttactttgtcatcaatttttacccacaagataaaaaaaactgcaggactcctaaaatatccagaaactttccacatattaagaatcaccaacaggtcaatgaatagttacacctaattaactacactttgccacatgaataccatctgctgatatctgtagctttgnnnnnnnnnnnnnnnnnnnnnnnnnnnnnnnnnnnnnnnnnnnnnnnnnnnnnnnnnnnnnnnnnnnnnnnnnnnnnnnnnnnnnnnnnnnnnnnnnnnnnnnnnnnnnnnnnnnnnnnnnnnnnnnnnnnnnnnnnnnnnnnnnnnnnnnnnnnnnnnnnnnnnnnnnnnnnnnnnnnnnnnnnnnnnnnnatttaactatagtaccttaaaatattcaaatacaacaatactcccacctagtggataanaggaaaatgcctggcttattttggttgtgaataataccaccataaatnagggattaanactacaattagttttttacaattttattccgtttcatcattctcaaaatatatcccccaaaagtaatctacaaaagagtgcaggctgctccccttaaaggaatggacaagtaatatacactacaaaacaatgtttaagatcatgtataaatgttactctgaatctcatttgttgtcatcaatttctttagtatctcagtgctttggggaatattcttaaccaaacccttcaagcttctggtagaaagtataggcttaaaagcttccactgtgattaggtctaatttcatcacatcagtataacacaagtacagaattgctgggattttccatacttgacagtagcttagaactgctgcaggaaggtcgtgtactatattcggttgttctagcaatggacaacacgccgagtctttgaaattctgtgtttttagggctctcaggaaaggagaaggaaggctgccggtggattctgaggttttataatcggtaacatgtcgacatgtgagaatagttatctgcatgttcttccttggacaagagccaaaaaccttttccagccactgatactgttgatcttctgcaacatagcaactgcactgacagagaaaaaccgagggattggattttagatgataaaacacacaaaaagcctctgtggaggacagatgtgtagtgtctgttgttctacaccattcattccagagtttggcacaaccaacttcctcccagactcctgaattcataacaaatgatgacagaaatgctactgcattatttcctatagcaattataaacttggagcacggatatttttctagcaaagaaacttccaaagatgtttttgtttgtcttcgaaggagccgcacttccctcttccgcgccagctgcagacgcannnnnnnnnnnnnnnnnnnnnnnnnnnnnnnnnnnnnnnnnnnnncttcgtcctcagtcccagctcggcacggcgccttcaccacctctccgaagaacgtggccgccatagccgccccgtgaccggctggacacaactccc

SEQ ID NO: 315296 - DNA, 424 bp, Homo Sapiens
gaggagatatgagatacacttgtgataggtacaaagcgagtgaatgtgtaatgtacagttcgagtgatgagatgtgtgacaagcaataataagttcgattaggcccgtgcgaataagcccaggaggctcacggtgcaataatgcagatccatgagcgtcggtgggcaagcacatgcgaggtacatgagggccgggtgacattgtgcattctgggcgtcgccgagcacgccgtaaggctgggattcctgaagtgtgtacgtccgccagtcctgtcgatcccggtcccatgcggacgtccgcatcatggaagtccgcgctcggtggggttgcggggcggaggggttgagccggccgagccaccgccggcgccgctccatagcctccccccgcggcccgaactcgagctgcagcgcgcggccgcgcc

SEQ ID NO: 315297 - DNA, 895 bp, Homo Sapiens
gaggctaactctttcacgcccggttggattttttgggggaagccgccactttgctttaatgaggggtgtgtaggcatgaaagggtacatgtccttcctccacccctccccaatggggctacatcctctgcctttgtccccgcctgcgtctgtctctgctctgtgctcagaagtggggcccggcgccctggctgatcccagtgaacaggcagctcctccctgcacaggggcctcacggggcgtggaagtgttccttgcagcatgattggtcctcagttccatccaggcagattcaggctgggagcgccgctgtgtggagtctctcctggatctgtcgcagccgatgctgctgtgccaccatctcccgcctctgccgctgcacgtggcctgtgagggcccataggatgtggctctgcttgtcagcgtgagcctttaagacctcaaattctcggtaggcagggcccagccaggcgctcctcagctggacttctagccgctgcacgctgtcccgtagcaccttctgtgcctgggccacctcccccagcacctcagctgtggcctctgcctgcagctgcagaatatcctcctccatctgagtctccaacaggcttgcccgaagttcctgggctgcatcccggccccggctgacctcctgccccaggagttctattgtgcggccatagagacccaggctgttcctggcctttgtcagccgtccctccgtggtcctgtacacaccgttgagggcctggcccagctgcagggtcccatggaagagcagggtcagctcctcatgctgtgccagttctgggccgcccatgggggccgctgaggcaggccgggtcaccattgccagggcccacagcaggcacagagcaggcactggcatgactgag

SEQ ID NO: 315298 - DNA, 803 bp, Homo Sapiens
tgggctgtggttaaaacctttgtaccatgtttcacatttggagagcttctctccagcaagaatcatctgttgattagaaaggcttgagcaagagataaagacactgctgcactcttcatatttgcagggtttttcctcagtaccatgctcatgatcagtaaggtgggagcactggttaaatactttgccaaattcttcacatctgtaatgttcccctccggcataaattctatttttagtaaggactgagcaagttttaatgacgttgttacattcttgacacttgtaaggtttctctccagtgtcaatgttctcaggttcagtaaagtgtgagcactggataaaggttttgccacattctccacatttttggaatttttttccagtgtgaattttctgatgttcagttaggaatgagagcatttgaaaggatttgccacattcttgacatttgaaaggtttctctccagtattacttatattacgtctatgtaaatttgaaaagttatcaaagattttaacatatttattatattgaaagattttgctatgggtagttgatgaacattggttaagtccattataatctttttgcaacttacactcatctaaactttcccagtctttccttaaatataaattatcaaggccacaatttccatatcctctcagtattctttttgggaatgcatcttgtatgccctgctctggcagaaggtcttgggtaaaatgagaagacatagcagtgaatttgtccacagaaacattgaggcctggctgggcacgctcgtgccgaattcctc

SEQ ID NO: 315299 - DNA, 644 bp, Homo Sapiens
  misc_feature (434)..(434): n is a, c, g, or t
cgtgcccagccaggcctcaatgtttctgtggacaaattcactgctatgtcttctcattttacccaagaccttctgccagagcagggcatacaagatgcattcccaaaaagaatactgagaggatatggaaattgtggccttgataatttatatttaaggaaagactgggaaagtttagatgagtgtaagttgcaaaaagattataatggacttaaccaatgttcatcaactacccatagcaaaatctttcaatataataaatatgttaaaatctttgataacttttcaaatttacatagacgtaatataagtaatactggagagaaacctttcaaatgtcaagaatgtggcaaatcctttcaaatgctctcattcctaactgaacatcagaaaattcacactggaaaaaaattccaaaaatgtggagaatgtgngcaaaacctttatccagtgctcacactttactgaacctgagaaacattgacactggagagaaaccttacaagtgtcaagaatgttacaacgtcattaaaacttgctcagtccttactttagaatttattgccgaggggaacattacagatgtgaagaatttggcgtatttaccagtgctcccacctttactgacatgagcatgtactggg

SEQ ID NO: 315300 - DNA, 640 bp, Homo Sapiens
  misc_feature (41)..(41): n is a, c, g, or t
cgagcttcctggagtgcctgaacaatgtgtgtgacattccnggatcccaaaggcaatggtgtaaatatcaaacttgtcatcatcaaagggcagttcttcagcatctcctaatacccatgcaagtccagctctgtatccttgagccaaggctttctgctttccaacctttagcatctccttgttgatgtcacacaccacgacacgagacccgcccagttgggcccttaactgcctcttctgttttctctgatgctgggactgaacataattaaggaaccggaatgcaatgtcacctgtgcctccagcaacatcaagcagctgggtcccaggaagcgggtgcatcttccagagcagcaaatccttccaaacacgatggataccaagactcatcatatcattcatcacatcatacttcttagccacactttcaaacacctgatagactttgccccccttctcctcttccgacacagtctcaaacccaaagtgcgtttccgctgcccgcttctcttgggacaagagccgagcacttagtaggtccccgggccaagagctacgaagcccgaggagctggcagccccgcatcgcccgcgaccacccacggccgcaatagctccatagggcacagctcccgggggcc

SEQ ID NO: 315301 - DNA, 1235 bp, Homo Sapiens
  misc_feature (51)..(51): n is a, c, g, or t
  misc_feature (61)..(61): n is a, c, g, or t
  misc_feature (74)..(74): n is a, c, g, or t
  misc_feature (83)..(83): n is a, c, g, or t
  misc_feature (99)..(99): n is a, c, g, or t
  misc_feature (132)..(132): n is a, c, g, or t
  misc_feature (144)..(144): n is a, c, g, or t
  misc_feature (156)..(156): n is a, c, g, or t
  misc_feature (184)..(184): n is a, c, g, or t
  misc_feature (242)..(242): n is a, c, g, or t
  misc_feature (252)..(252): n is a, c, g, or t
taccagaccaaaatgcctctgggagatggactgaagcagctcccaaagacngctgtaaaanagtgacaagaatntgttcttcnactttgagactgttcngattcaaacatgagtccaaggcacgtatccttnaagaggagatgntctgctgctgtntcatttgccagattatccttcaagttcncaggctttcaacaggatatgactggttcatgctccatgataggaaaggaattaaagtntgaagccagnatgaatggccacaatgcctgatgttagactttcgtaagtcaccttgtgaaagcctgcatcttctatcatgtccttgaactcttcctgagacggaaaccttcggatactctctacaaggtactgataggacttccagtctccagcgatgacctctcacaggacagggatgacctggaagctatatagatcataaagcctggatatgaggggattgttccacttggctaaattccagacagagaaaccgtccttcctggtttcagcacccgatgagctttcctggagtgcctgatcaatgtgtgtgacattccggatcccaaaggcaatggtgtaaatatcaaacttgtcatcatcaaagggcagttcttcagcatctcctaatacccatgcaagtccagctctgtatccttgagccaaggctttctgctttccaacctttagcatctccttgttgatgtcacacaccacgacacgagacccgcccaaggaatcttcttcattctggtactctttggcaatttcttcccaggataaattttgttgggcccttaactgcctcttctgttttctctgatgctgggactgaacataattaaggaaccggaatgcaatgtcacctgtgcctccagcaacatcaagcagctgggtcccaggaagcgggtgcatcttccagagcagcaaatccttccaaacacgatggataccaagactcatcatatcattcatcacatcatacttcttagccacactttcaaacacctgatagactttgccccccttctcctcttccgacacagtctcaaacccaaagtgcgtttccgctgcccgcttctcttgggacaagagccgagcacttagtaggtccccgggccaagagctacgaagcccgaggagctggcagccccgcatcgcccgcgaccacccacggccgcaatagctccatagggcacagctcccgggggccgccatcttggtagtcgagt

SEQ ID NO: 315302 - DNA, 972 bp, Homo Sapiens
  misc_feature (403)..(481): n is a, c, g, or t
  misc_feature (950)..(950): n is a, c, g, or t
gggggcgccccacagggttttgttatttcccgcccttggcagatttcacgggttctatcacagccccttttggggaagggctttccacgttcggggcggaaagtgtttaatggaattcccaccaccttcttccaataaatggcaggggcgggggggtgaatttgaatttgaagctcccctgggccccccgttgttgaacccagtaaaggcccccggaatcccctttggattttttcaaaaccttgggttccccccggggtttttttatgggggggattccaagcccttattcatgccccgggtttcctttggaaccagtttgggccctggttcctttccttttggggccccgcggccaaaggatggttttggaaactttttgggggccggggcgggccgccannnnnnnnnnnnnnnnnnnnnnnnnnnnnnnnnnnnnnnnnnnnnnnnnnnnnnnnnnnnnnnnnnnnnnnnnnnnnnncaaaaggtaaactcgtttactggttcagcacacaattctcatgatcattaatactctgacttgggcctagacttcgtcctaggctgaaaggttgattcaggtacaattaaattttctggttaaaaattgtcattgggttcaaatgatctatcatccctctagaaggcagcaccagcagagaagctataaatacactcacttcaaaactgagctttaggggtggttgtaccttaaccacacaccctacagccaagagaaattagcagttgagcaaagatacagaccaaatgcctctgggagatggactgaagcagctccaaagaaagctgtaaaaaagtgacaagaatttgttcttccactttgagactgttcgattcaaacatgagtccaaggcacgtatccttaagaggagatgctctgctgctgtctccatttgccagattatccttcagttccggggttttcaacngggttttgacttggttcatgct

SEQ ID NO: 315303 - DNA, 873 bp, Homo Sapiens
  misc_feature (780)..(780): n is a, c, g, or t
caactcccagataattttgcctcatttgggaataggctgtatgagtttagttatactgttccccttgggttgggtggagaagggagtaagagtatcactagtctactctgctcctttctttcctgactaacttaagttctgccttgaattcaacaagctgtttgctggggttaacgctttccagcacaagtcagggatgttttccgcttcagtccctcatccttcaattttgcagatcctaatgcattggttgtcttggccctctcatttgcaacagctcattcctaaggcccaatcccagttcctgatggtggatgttgttccagcctggaaagcttaatcacttcctctccggtaacgaataaatagactagatttcactgagtcatctgtctgcccagcaaaggaccctgcaaaaaagagatcaaagtggttttcacagtcttgttgcaaaggaaatctgagttggggcccaagtattcaaagggtgtagagtggctcaatattagtatctaattcaggagaatcatttcagtgcaggcaaaggatctcaggtcctttatctgtacattttgcaggtaaaaaacctcagtgcaggtaaagaaaccacatgccatgctgtggagtcaggctattcccaactgtagagaaagtccattgatccatgagtgtggtggggctggccccagggctagtgagaagctgttgccatggctgcattgctggtaaggtgggattccgtgtgtttgccctgagcaatctgcgctgcctctgtgactntcctcctcttctcagtcttacaccgcctggtcttaggtcatctgctaagctgtcacagaaagtgacgtaccctccacacctgtggatggtctg

SEQ ID NO: 315304 - DNA, 490 bp, Homo Sapiens
ataaaacacttgcactcaagaacatacaaacagtggccaccaatccccacccctggggctccggggagccactggcttgtttgtggctgttttcctctgtcccttccctggcatctggtgccagagggcaggtgcgggggtcctggggcgggtggaatttgtacagcactttcatggggagatggtcacaagaaaggaaaccaggacaagataaggactaagtctagggcacccacaaagatggcagacgaagcccatgaaagggcctgcgacagagtgaagagacggatgggcctgcgttggcctcagctagctctggaggctctgtgggggaggggcaggtgggccttgcagtcaggattcggtaattacactttgctcacgggtagcaccttcggagtcctcctgccttgacccccaggtcaggtgatggtggcctcacaacctcccctatgaggtaggtgaagtattattaccatcaacagatggg

SEQ ID NO: 315305 - DNA, 738 bp, Homo Sapiens
  misc_feature (708)..(708): n is a, c, g, or t
  misc_feature (713)..(713): n is a, c, g, or t
gaactttctcatttgggatcagcgatatttcctgatgttgcattgatgaatcatagctgttgccccaatgtcattgtgacctacaaagggaccctggcagaagtcagagctgtacaggaaatcaagccgggagaggaggtttttaccagctatattgatctcctgtacccaacggaagatagaaatgaccggttaagagattcttatttctttacctgtgagtgccaggagtgtaccaccaaggacaaggctcaggccaaggtggaaatccggaagctcagcgatcccccaaaggcagaagccatccgagacatggtcagatatgcacgcaacgtcattgaagagttccggagggccaagcactataaatcccctagtgagctgctggagatctgcgagctcagccaggagaagatgagctctgtgtttgaggacagtaacgtgtacatgttgcacatgatgtaccaggccatgggtgtctgcttgtacatgcaggactgggaaggagccctgcaatatggacagaaaatcattaagccctacagttagcactatcctttgtacttcctcaacgtggccttcatgtggttgaagctagggagactctacatgggcctggaacacaaaagccgcaagggagaaagccctgaagaaggccattgcaatcatggaagtagctcacggcaaagatcatccatatattttctnagatncagacaggaaattgtaaagccactg

SEQ ID NO: 315306 - DNA, 618 bp, Homo Sapiens
ttactgatatctctttaatactttcatcattcaagtttgttcagaacattacaagaggcatgaaagaaaaaataattccatttttaaaactctgtctgtccaaagtataacatatgaaaccatgccattatctcttaggaaacaaaagcattcaaaattaatttggtattaaagttcaagattcagactaacctcaaagtacggcatgtgcagtgtttaagtgcaagaagtattttcattccaattattttacagagatgctggagtgacgtgtgcaatttgaaatattcaaatcctttaaggtttctgaactaagtgtttaaatgaaaactgaaatgctgcatagtttcagtggctttcaatttcctgtttgatctcagaaatatatggatgatctttgccgtgagctacttccatgattgcaatggccttcttcagggctttctcccctggcggctttgtggttccaggcccatggtagagtccctccctagcttcaaccacatgggaggccacgttgagggagtacaaaggatagtgcttactgtagggcttaatgattttctgtccatattgcagggctccttcccagtcctgcatgtacaagcagacaccccc

SEQ ID NO: 315307 - DNA, 391 bp, Homo Sapiens
aaccaacagggaaggcccacgttgaagggagtaacaaaaggaatagtgcttaactgtagggccttaaatgattttcctgtcccataattgcagggctccttcccaagtcctgcatgtaacaagcagacacccatggccctggtacatcatgtgcaacatgtacacgttactgtcctcaaacacagagctcatcttctccctggctgagctcgcagatctccagcagctcactaggggatttatagtgcttggcctccggaactcttcaatgacgttgcgtgcatatctgaccatgtctcggatggcttctgcctttgggggattgctgagcttccggatttccaccttggccttatccttgtccttggtggtacactcctggcactcacag

SEQ ID NO: 315308 - DNA, 530 bp, Homo Sapiens
  misc_feature (384)..(384): n is a, c, g, or t
  misc_feature (411)..(411): n is a, c, g, or t
  misc_feature (442)..(442): n is a, c, g, or t
  misc_feature (454)..(454): n is a, c, g, or t
  misc_feature (504)..(504): n is a, c, g, or t
  misc_feature (515)..(515): n is a, c, g, or t
actgatatctctttaatactttcatcattcaagtttgttcagaacattacaagaggcatgaaagaaaaaataattccatttttaaaactctgtctgtccaaagtataacatatgaaaccatgccattatctcttaggaaacaaaagcattcaaaattaatttggtattaaagttcaagattcagactaacctcaaagtacggcatgtgcagtgtttaagtgcaagaggtattttcattccaattattttacagaggatgctgggagtgacgtgtgcaattgtgaaatattccaaatccctttaagggtttctggaacctaaggtgttttaaatggaaaactggaaatgctggccataggtttcaggtgggcttttcaatttccnggtttgatctcagggaatatatggggntggatccttttgccgtggaggctacttcccntggattggcatngggccttctttcaggggggttttctccccctgcggggcttttgtgttccngggggcctgtngggggtctccctagg

SEQ ID NO: 315309 - DNA, 356 bp, Homo Sapiens
cgatggaataaatctagcacccctgatggtgtgcccacactttgctgccgaaacgaagccagacaacagatttccatcagcaggatgtgggggctcaaggttctgctgctacctgtggtgagctttgctctgtaccctgaggagatactggacacccactgggagctatggaagaagacccacaggaagcaatataacaacaaggtggatgaaatctctcggcgtttaatttgggaaacatatgaactggctatgaaccacctgggggacatgaccagtgaagaggtggttcagaagatgactggactcgtacccctgtctcattcccgcagtaatgacaccctttatatcccgtg

SEQ ID NO: 315310 - DNA, 549 bp, Homo Sapiens
  misc_feature (30)..(30): n is a, c, g, or t
gcaacccaaagtttgtgaaaagccagatanatggcttatagtttaacgccattaatcctaggacgccagaggatgatttgaagcataggattgaaaccgtattgttacatgagttaggaaagagggactattttgcttggaataaggcatttggattgaagaagggagtctggaagctaagatgagagagctcaggtctcagctttcctgccttgccccctccaggaccccaggcaccttgttgttatattgcttcctgtgggtcttcttccatagctcccagtgggtgtccagtatctcctcagggtacagagcaaagctcaccacaggtagcagcagaaccttgagcccccacatcctgcagaagaatgtagttagggaaaactcttccatttggcagggaaacagaggaaaactaggctttatgaggaagagaaaggtagacggaaaaagggtgataaaacaatgatagtcaggaggggcctgtgtttagataggatgctggtacatctggttccaaggactttgatctagggggatttagccatt

SEQ ID NO: 315311 - DNA, 550 bp, Homo Sapiens
tttccccagttttctccccagctgtttttaattatccagtgcttgtttcccttctggattccatatcccactgccaaaaccgcatggttcagattatcgctattgcagctttcatcataatacacacctttgctgtaaaactggaaggaggtcaggcttgcatcaatggccacagagacaggtcccactcgggccactgccctcttcagggctttctcattcccctcggggatctctctgtaccctctgcatttagctgccttgcctgttgggttgtacatacaactctcttcctgtcccacatatgggtaggcatcttcagagtcaataccccggttcttctgcacatattggaaggcattggtcatgtagccccctccacagccatcattctcagacacacaatccactaggttctggggactcagatttaagagtttgccagttttcttcttgagttggccctccagggcacccacagagctaaaagcccaacaggaaccaaacttccccttactcaggtctcaagaatcctcccgcctactccaat

SEQ ID NO: 315312 - DNA, 525 bp, Homo Sapiens
  misc_feature (15)..(15): n is a, c, g, or t
  misc_feature (22)..(22): n is a, c, g, or t
  misc_feature (50)..(50): n is a, c, g, or t
  misc_feature (78)..(78): n is a, c, g, or t
  misc_feature (202)..(202): n is a, c, g, or t
ctatggaaagaaagnccccacnggaagcaatataacaacaaggtggatgnaaatctcctcggccgtttaaatttgggnaaaaaaaacctgaaagtatatttcccatcccataaccttgaaggccttctccttggtgtcccatacatatgaactggcctatgaaccccccctgggggacatgacccagtgaagaggtggttcnagaagatgactggactcaaagtacccctgtctcattccccgcagtaatgacaccctttatatccccagaatgggaaggtagagcccccagactctgtcgactatcgaaagaaaggatatgttactcctgtcaaaaatcagggtcagtgtggttcctgttgggcttttagctctgtgggttcctggagggccaactcaagaagaaaactggcaaactcttaaatctgagtccccagaacctagtggattgtgtgtctgagaatgatggctgtggagggggctacatgaccaatgccttccaatatgtgcagaagaaccagggtc

SEQ ID NO: 315313 - DNA, 606 bp, Homo Sapiens
aaaaaccaaggactatttgaaacaagttatcttcaccttgaaaagcacccttaaaccaactgaaattcaaaaaataatgatacaaacaagtaatttagagtgacggcgtaggtagtagatctagctggtagttccaaactaagtggaacattcttacccaacctactacagcttacacaactctgattcactgttactcacatatccttgtggaagacctagtcacaagaaattatgtccaaagcaaatcctataggaagtaataaattcagacactcgagactaagatctaaatgtacacaatagggagttaactgaaaattaaataaacagtatctaagtttccacgttaccagtcattgcttttctagggattgtgctgggcactggcggatacaaaaactcgagtgagacacaattttggacgtaaaatggcaatgaaagcgcatttctggaagccctgaaagtctgaaaacagaggctcttctggactcacaagctctgggtcaagaagatatattttcatcttgttaagacggattttgcaactaagactggtaaagtataagatagaagagtgcgtaccctgttgtatttgcatggttc

SEQ ID NO: 315314 - DNA, 650 bp, Homo Sapiens
  misc_feature (568)..(568): n is a, c, g, or t
agagagagtgagagtgagaaaaataatgtttctgtattactgtgtagttttaactttataggaatttctggaccatcctttgggaactgcttctgtacattatcagtttctcacttacagtggttggacttatgatttttcatctttacagtgatgccgaagcaatatgcatttagtagaaattatactttaagtacccttacaaccattctgttttcacttacagtatagtattcaataaattatatgagatattcaacactttattatctgagcatgtttaaggtaggcccggctaagctgtgatgttcagtattaaatttaaatgcatttttaacttacagtattttcaacttacgatgtgtttatcaggaagtaaccccatcataagcagaggagcatctgtattgcgtaatttgactggcacagtttattaggttctgttcagtgttttccgtcacaagatgttattgtgtgagaaacaagtaagccctgtgacagctgaataagatagtctctctcacagcttatataaacaagggagtattcttacatatggcggacttcnacgaatatttacatgtagacactaagacgattactgtggtgatagtgaatgcttacctagagagattaggaatggagtgatt

SEQ ID NO: 315315 - DNA, 629 bp, Homo Sapiens
tcactaaagaaaatacacattcaatatagccaagtctagttttaaaaagaagcacctgatgagttttcttctgaattcatttctccagaagaccagtccttaaagacttctggagtctagctatgttggcatctaatgccgcaaggccatttctgaagtcttgttcatcacgagaagtgaacgttgaaaacgaagagatgctccagtcagacatcaagtcagaagtgaaaacactaccatcacagacagtattgccctttcaacttgaaaggctgttgcctaagacaacctgatgggcccatgacatgcagtttgttcctctggctccttggtggcagcagggatcttaccaattgcttcctttattttcttgaggagctgtgtgtccttcatatcagatgctctggaaagtttttcaggtgcatcttctgcttcctttgttgaagaggaacagattacaggtgtacacagtttattttcttttccagagacagcaagtccactgttgctgactagctgtgttgtagctgctcttatttgtggctgaggggatagtctcttagaaagtggtgatttcttttcaggagtgcttctagcaaaaggaatgtaaattgtattatccaaattat

SEQ ID NO: 315316 - DNA, 811 bp, Homo Sapiens
  misc_feature (19)..(19): n is a, c, g, or t
  misc_feature (37)..(37): n is a, c, g, or t
  misc_feature (45)..(45): n is a, c, g, or t
  misc_feature (54)..(54): n is a, c, g, or t
  misc_feature (60)..(60): n is a, c, g, or t
  misc_feature (73)..(73): n is a, c, g, or t
  misc_feature (80)..(80): n is a, c, g, or t
  misc_feature (137)..(137): n is a, c, g, or t
aaaaccccatgaaaaattnaaccttgttcctgcccantggtgaangccaacaantgccantgccccaaagaangccatantcggaaaatataggcggcccacgccagcaatgccatcttccatgtcgcccctcgccnaataataaccccgggctcgcaccccagaacatctgtttgggctcccattcttctgcagctggcctcaggggggattgggtttactggcttgatctcaatggggacctcctgagcagcaattcgtgttgagcgccaatgggtacctcttttggaggttagggtcccttaaatactggtcaatgagggtctcacagtcaagcagctcttctggtggtggcacagtgggcatggagaactggtgctgcatggggctgggctgggcctgctggaaggaggcctggcagatgaagatgggcttcccatgttgcacggccttcacagagcgcaccgagaagctcgaccctgttcgtgtccgctccacttggtacagtactggcagcttcgggtccctgtaaaggtccacaaactcttctcagctggggatctacgcagaacacatgagggcatctgctctgcccgaacaaagtagcagtgcagggagtgcacgtggacgtcttcactcacagacttggctgcagccaccagggcctggcccacgatctgaccaccaaacagcctcttggccggtacccagtaatgccttcctctgaagagatcctcgtccagcggctcgaggttgagcacggtcgtgaccaagacgctacggaggtccccagggggatcgccgcggtcgc

SEQ ID NO: 315317 - DNA, 805 bp, Homo Sapiens
agtggcagtgcccaagaaggcaaaattgggagatatagggggcccagccagcaggcaatctccatttggccctccgccaatatagccccgggctcgccacccagaccatctgtttgggctccattctctgcagctggctccaggggggatgggtttactggcttgatctcaatgggggcctcctgagcagcaattcggttgagcgccaatgggtacctcttttggaggttagggtcccttaaatactggtcaatgagggtctcacagtcaagcagctcttctggtggtggcacagtgggcatggagaactggtgctgcatggggctgggctgggcctgctggaaggaggcctggcagatgaagatgggcttcccatgttgcacggccttcacagagcgcaccgagaagctcgaccctgttcgtgtccgctccacttggtacagtactggcagcttcgggtcccctgcccgaacaaagtagcagtgcagggagtgcacgtggacgtcttcactcacagacttggctgcagccaccagggcctggcccacgatctgaccaccaaacagcctcttggccggtacccagtaatgccttcctctgaagagatcctcgtccagcggctcgaggttgagcacggtcgtgaccaagacgctacggaggtccccagggggatcgccgcggtcgccacagccctgcccatcttctggggcctgcggggacgacatctagttcaatgctgcaggccctgcacacccgctccgcggaagacgcggagacatacacagaacctgactcttccggcccc

SEQ ID NO: 315318 - DNA, 1266 bp, Homo Sapiens
agatggacccaatggttgggccgaaagccaccccgtggggccaaggaagggtccactggaacccagggtggctcccaccttcacagggattacacgatggctctgagcctctgtcagtggcccgagccccctgtagccaccttctggatatcatggtcaggtgggaggttatagccacgacattcattctggagccgtcgcaactcagaaaggactgcaaactccttccctccgcttgtcaaaattgatgtatccattctccaactcatccttggaggctgcatccagcatcacaaggtccttcaggaaggtgccaaggtatgggaccacacccccccaccccgggagccagacctcggggccttcttggagtgtggctccagaggagactgcagcttcacctcctgcacgagcagctcccgactctgggaataattatcctcctcggagaaaatctggcagaggctggaaaagactctgaggctgtccctggttgcttccccccaggctgcccgaagcctgtggatggggctggactgcagggctgacaccacggcataaactgaagagaagtttcggagcagccggcactcctctgccacgcggatccacttctccaggagccgggccctctgtgggggacggagtggccgtatggtcacctccccaggtccctctccagtggaagtagcccccaggacagaactaaccactgcccctgccaccttgttaaactgtgtgacagtagctcggacagatgggcagaggtgagaatgtcctggccggtctctgtgaccccacaggcctcccaggcactgagaggggatcaaattgagaaaaagttccgcatctagcagggtcagctgttcggccaagtggtcagcgaggaacaccaggacatccgtggggtcagcagggggatcgccggggagggccaggggcttaggaaggtcgggggcctgggggtccacccgggaccggagattgcggatgaggtcagcgctgccccccccaacaccgttccatgctgcataccctgtctgaagtaagaagctctcaagccggtcaagctgacctttggcctcagagccaaaatcctcagggtgagaggccagccaggttgacagtacagagatggctacctctgttgtcctctctagttcgtcggtaggatgagattcaagggcttccagcctgtcagccataagccatagcaaggcaggcgtggaggtgaaggcccggtgggtagccaggaaggctgacatg

SEQ ID NO: 315319 - DNA, 1741 bp, Homo Sapiens
ccttcttccctcccccgggtagtgttttggtttattatcttagtgttgtcacagtgatagaaacccccagagtgggaagaagagctcctgcgaggacctacattttgccattcccctctgccctggggctcagagccttgaagcctttgcttggcccttgcatgttaggatatggccaagaatcagaaactgatgcgtttttccagcactacctgtgtgctgcactcatggaaggtgggaagctatacacaggtatccaacttggttataagacaccagttcccacagggctggatttctcagctgtctggtaaaccagtggcacttcactgccccagggtggctggctccctttctgaatttctgtctcaatgtgatataattgccaccattcaggatggctacccacatctggtatgaacaccatgacttctgtaagccaacggggcttcctcctcagaacagtgcccgtgcaatcttcctccctgtggccttgatcctgggaaaggagccccctcctccctcactcggaggagttcctgaggcagacgggccactggtgacgccaggtgtagcagtagaggaccttcgccgctgccgcaggaggaaatcgtgtgaagctccatccatggcgtagaatacattagccgaggctgggatagtcagctctcgctcccctggtagcagctgtaccagctcatactctgaagccactgcagagtcacgattgtttttcttaaggacacgactgatgacacttggagccttgtcctggcttgtcaccaaaatgctcttatagacactgccatcttcccccaactccatctggactcggatgatacggcaatcagaggcccctggcccagatccctctcccccatatccagtccccccggaggcctcttctgcacccccactcagcggggagccacaggaggctgagcggcggtgacctcgagaaggcctaggggaggaggctggtggggagaggtggctggggtcagctggactgtgcagggatggactgctttccaaggcagagtctagtgacgagacagatggccacttcatgtgctgggccagccgagtcagcagaggagcaggagttgtaggcgcctcatctcccccagtactgggccggtcacaggacacaagcggggtagggaccccaacagagcccaaaacctctgtccactgcgagatgaccaatgttggccgaagcacccgtggggcaggagggtcactggaaccaggtggctccacctcacaggatacacgatggctctgagcctctgtcagtggccggagcccctgtagccacctctggatatcatggtcaggttggaggttatagccacgacattcattctggagccgtcgcaactcagaaaggactgcaaactccttcctccgcttgtcaaaattgatgtatccattctccaactcatccttggaggctgcatccagcatcacaaggtccttcaggaaggtgccaaggtatgggaccacacccccaccccgggagccagacctcggggccttcttggagtgtggctccagaggagactgcagcttcacctcctgcacgagcagctcccgactctgggaataattatcctcctcggagaaaatctggcagaggctggaaaagactctgaggctgtccctggttgcttcccccccaggctgcccgaagccctgtggatgcctcgtgccgaattcgccacccaggcctcgctcc

SEQ ID NO: 315320 - DNA, 975 bp, Homo Sapiens
caatttctttttgttcccatttcctcttttcggctttcctcctctccattatttttttccccccactaaaactctcccttgcccctgcgcactctttcactccaatcctggtacctctaattcatcaaataccttctgtaaattcagagtctaactaattcttcatatggcctgtaactgggaagtcctttaatcgccaaacatctgactgttagagcatatctctttcggtactgaaattgacttcctgatcctagatgatcactctcaaaatatttaaatctatttttcagagcctcaatagtccttaagctttcttcatgttgctttttctttagctgccaaaagggacttcagcttttctctctcgctttccagatcatcagcaaccataacttcctcattcagctgtaactgtaaaccattgactttatccaaaagtattctttgttcttgctgaatttttctcaacctctctttcaaatcttcattttcaatctccaaatcctgaatattttgatgctccctctgatgtgacttcacatttacttcatcttgcatgtgtgtcaaatttcgctgttgcaaagatggccctttcttccaaagttctctccctttgttggtattttccgatgcagtcttcaacaaggttagaatgtccagattgtcaccaattcttgcatagtaagaactatcatggccaagcgcatccagcaagcttatatcagcaccatttttaattaagacttctactgcatctctgcaaccatattcgcaacctagcatgagggcagttctgttttgtttgtctctggaattaacatccgctcctctatctatcagcagttgacatattgttggcctactcatctgagtagccagaacaagtggtgtccgccccggacgcgtggcgacgcgtggcgacgcgtgggcgacgcgtgggtcgacgatatcccggaattccgggccggtacc

SEQ ID NO: 315321 - DNA, 422 bp, Homo Sapiens
  misc_feature (378)..(378): n is a, c, g, or t
gacgtaaaccaaagtgcactttatctcatttatcttatggtggaaacacaggaacaaattctctaagagactgtgtttctttagttgagaagaaacttcattgagtagctgtgatatgttcgatactaaggaaaaactaaacagatcacctttgacatgcgttgtagagtgggaataagagagggctttttattttttcgttcatacgagtattgatgaagatgatactaaatgctaaatgaaatatatctgctccaaaaggcatttattctgacttggagatgcaacaaaaacacaaaaatggaatgaagtgatactcttcatcaaacagaagtgactgttatctcaaccattttgttaaatcctaaacagaaaacnaaaaaaatcatgacgaaaagacacttgcttattaattggcttgg

SEQ ID NO: 315322 - DNA, 1447 bp, Homo Sapiens
  misc_feature (593)..(613): n is a, c, g, or t
gggtttatgttatgttcgtttattgttgtaacattttgttttgaacatcaaacactgcaccaaaatattagccattcatcttgcaacaattgctttactgtaactaagagtactgtactgatgatgtttacaattaactttggacaacttaaaacttattagtgacattgctgtctaataatcaaatacttcatcataggctgaacataattattaaaagagcaaagtttcccctccctttcttactttcaaacaaaaccaaaagagtagttttcatctggaaagagcacttacttcagggaaagactcaatttttaaccagttttattaaaccctggaagctctacaacacgggaaaacatcaaaattccccggaagtctgtttttgccaacttgtaaaaagtgaaagagctgacttccttgtttattctttaaagggttggcctgcacctgcagtgccaactgtggaagggctgtgtgcaggccccacagttgcaggggctgttccgggccagcgcttcccagtcatccaatctcctttgtccctcggttgttctgtgactttgagcagctttcattttaggacatcccannnnnnnnnnnnnnnnnnnnncagttgaaaactatgcagatgtttttagacagagcaaaacacaacacagtacccaaaaacggaggcagcctgcatgctccaggtctacacgagcacctcacagcctgacaaggggcagacagcaactcacacgggacgagcttcagcacacagacagcaaagcaaatacgagacttagactgaactgcaaagagggaaagggccatttcaccaatggagtaactgagagaataatgacttagagcccaatctgcctgccatctccctgagccgtcacccgtcactgaagatagcgcgagggtgatgcttcaactcaccatcctaagggtttgtgtacaaacacactcgagggcatctctttcacagaaagaacaaatgtcatttgtaccaaatggcaatggattttcagcacaaacttaatactttcctaacactacagcaatagtaatcatctactttcagcaagagggactcctttaaacaaggaaaaagactcacattaattagcctatgtacccactggatcaatctgcagcaacaaagtcctagtgctagcagacacagggacagagggaccagctaccctcaacacagggccaggagagccgggtcctagactgaaccctctaagaaggcccatgtgtccaaagagaagagctgtcaagaaaaagaaactagtcaaaaactctttaaaggacaacctaaaaaggattaaagatgtatattaagatttttcagtaccatacatatgcaaagaagtcctactataagctcagttaaacacacaaagctctcattcttcctctaaatagaaggtagtctaagtatgcacga

SEQ ID NO: 315323 - DNA, 633 bp, Homo Sapiens
gctgatctagagatagagaaataggggtggttatttttccagattggagagttgaaagtccctgactgatttcagccattttcctagtgcttgtcggatgcagagacaatgttgaaatcccctaaacacagttctcagtggcaaaacctaggaaggctcatgttcccagagaagggaccacatgagccttctcccatgcaaagcttcccccagcttaaatagttgataaggactaattgtttaatgagtttatttatctacagtaggttagggatcctgggttctgtttatatgaagttcttcccagtttgtgaattctagtacagcagccatgcagccaccttatttcatagatgccatctgtgtgtcctcttgactaccttctatttagaggaagaatgagagctttgtgtgtttaactgaggcttatagtaggacttctttgcatatgtatggtactgaaaaatcttaatatacatccttaatcctttttaggttgtcctttaaagagtttttgactagtttctttttcttgacagctcttctctttgggacacatggggccttcttaggaggggtttcagtctagggaccccggctctcctgggccctgtgttgaggggtaggctgggt

SEQ ID NO: 315324 - DNA, 622 bp, Homo Sapiens
  misc_feature (73)..(103): n is a, c, g, or t
aagacaaacaccagaagaggggggctggggtaaggggtgagacccttaggttcccatctctgccaatgtggcnnnnnnnnnnnnnnnnnnnnnnnnnnnnnnntgactgacacagccaggttcattcttgtcttggatctgaggcagcagccctagctcttgctacagacggaatactggaggacgggctccctaggcgtaggtatggtgggtcgggggcccccaacctagcagagtgatgcacagagtaaggccagccttgaccctcctccttcatccacaggcttgcctcagagagaggaaggtggcatctctacattcacaccatggggtcagcccagggggtcagggggtgagggaaaggctctgtctgggaggagcagaacagcagaagagaggaggaaggcagggagttacaggaacctggggtaccaggctgctgggaagatgcagattatgacagagcttgcacgatgctggcaccccatgccaaccactctacgtggctttcctcttcggagaggtggtgggctcccttcttcactgtgcccctccctcctctggccactaggggtgggaaatacgagtgagaatccttccagatttacttccgccaatccag

SEQ ID NO: 315325 - DNA, 1206 bp, Homo Sapiens
  misc_feature (12)..(12): n is a, c, g, or t
  misc_feature (26)..(26): n is a, c, g, or t
cagcggaagccngcacaaaggagaangtccactctgtccccacctccccgcattccagctgagctcagaccaagtgagcacctaagaatcatttacccccaaaggatgtttcaagtgagatgcaatgttctctaaccattattctctcagaaattaggggtggcggggcgggaatcaagcagatgtttgaattgcctttcattcctccatagttgtctaattgtctggctcttggtttttatatagcagaaataaaacaaaatggcaataaaccaacctacaacctgtgtacaagatacagcatacaaaactgtcccacggactgggatcaaaagacttctattcctagccctaaattagaggttctgttttggttagggaagtttgttgtaaacagcagctgagaagccatttatttgattttggcaatagagacagacagcaatgcacatacacttatttcattgaactgtaaacggataaggtcaggagaggaaaaaccctactgtttatgtaatagaaccctactaaatggttttggaagggactaaaagttaggtagcagcctactttcctactttccaaggctggaattatatatatattgagtaataaatcaaatattagtaatccatccacttgtttttcagagtccaacaatttgataccaccttcctccctatcccaccctagtcccgttagatttgactgcattaaagtatttgttcaaccaaaacactctgtactgtcgctttcctttagcatttatatgaaaagccatagccagagagaaagaatccttacacctcctctccactaaagtatcactgtagagaaaactaagctcagaatatactcaataacataccaaggaaaaaagtgagtgtgactgaggggacccccgtcaccaaccgcagtacgccctgctaaacggtagttatcttcttgtccttggtggcttgcttgatggcagcctgctcgcagatgatctctttgagcctctgcagcctcgtgttctgggtggtcagttcccccaccccagtttggctgcggtgcagcagggtcagagcgtggatgtactccagctccgtgtacttcacaccctggtccaccaccaggttcaggagctcgtcagctgtgttgtaaagcatctcgtagtactgccttgcaaagtccaggtctgcctcccgcgacatggagatgttg

SEQ ID NO: 315326 - DNA, 370 bp, Homo Sapiens
gccacaagaacatatgcacctgtatgcatcttaacgccattcacaagagcaaaaatgtggaatgaacccaggtgcccatcaagggcccagtgcccaatccactgtgggtgcccaggctaaaaagaaaatgtagtacatgcagcaacatggatacagctggaggccattatcctaagagaacaggagaaacagaatgcagaaacagaaaactaaatgcagttatgttcccacaagtgagagctcaacattgggtacacatggacataaagatgggagcaatagatactggggactactagagggaggaggggggcaagggctgaaaaactatctattgggtactacgcttagtacctgggtgacaggttca

SEQ ID NO: 315327 - DNA, 730 bp, Homo Sapiens
  misc_feature (88)..(102): n is a, c, g, or t
  misc_feature (711)..(711): n is a, c, g, or t
gatttctgagtttggattaataactatgttttttaacttcaacattctcacaaacaatttctgcataaaacttcttctttaaagcttnnnnnnnnnnnnnnntctacctaatggagcactgaactagaacacaaaatacttgggttctaggcctggttctgccatcaactagcagtgtgtgagtttgggcaagttttttcatcatctatccaggcctgctttgctcgtttgtcaaagagggatggctttgcagatggctaagtttccttcaggctctgacatctgcctcatgactttggcactcttgtcatgaagatgaagtgacagttcttttaaagtgggaagccagacacagggtttctagtttgcctgagatttccatatagggatggctggtacccaggttaccttttggaatgatagattctctgccagggaattctttttggaagagaaaagaaaataatatgagtgcgtggaattttttcttaaggacataactaactaactaactgtgaaatacattagtatatttaccatgacagattcgcatataaaaaactggctgttcccacagctaagccataatatttatattttggttttgatttgcaagtaagtttttgtgaatttgtgaagccttcaccttagtgcggagtgttctgatagaatatgtttggattgctttctcagacttttgatcactacatntctgttgagtattcagtgc

SEQ ID NO: 315328 - DNA, 659 bp, Homo Sapiens
  misc_feature (457)..(457): n is a, c, g, or t
  misc_feature (492)..(492): n is a, c, g, or t
  misc_feature (591)..(591): n is a, c, g, or t
  misc_feature (642)..(642): n is a, c, g, or t
gggctgcaggaattcggcacttgtaggctgctactctccagggccacagggagcccagaacgccacctcctggtgtcagcagcagcaaatccatataagtctgcagcaacttagcttttgcctcctcagaggaaataattcatccagggggcacaaggcagggtcagagactgaggtaagtttcagagcaagagtgaaagtttattaagtgggcatgttgagagagcaagtacacggttttgacctttgacttggggtttatatcttggcatgcttctgggggctgcgtcccttctcccctgattcttcccttggggtgggctgtccgcatgcgcagtggcctgccgacacttgggagggccgcgtgcacagtgtgcttactggagttgtgcggtgccctcttgaggcagtcttcccttaccagttcctaggggaaggtcacacgctggttaaactntgccactttgcctcgtagtgtgcatgcttgacctnactcaccaactcctgagatttttttaaatttttaatttagttctagggtacatgtacaccgtgcaggttgttacataggtatgcatgtgccatgtggtnttgctgcatccattaactcgtcatttacatttaggtatttctcttgctatncttcccaccccacgacg

SEQ ID NO: 315329 - DNA, 367 bp, Homo Sapiens
aaaaaaaatagaaatgtttgtcttcttaaaacatctgaaagtggcacaccaagttcctctactcctcaagaaaacaccatatctggatatagccttttaacctgcaaaagaactttacctggtaatgtgatttgataataatattacattgtaacctatttcatgacttttaacagcaacagtgatgaaacaatcctcaaggtaacagaaacttgtgtaaatgtcgttcattgcttttcccatctgatatctttttgtgtttataattgacacagaaccctgccattctaaaggagtgaatgtttgccaagagacttgcacgatgattcgctgtcagtttttcactttatctttactcccaggctgt

SEQ ID NO: 315330 - DNA, 1864 bp, Homo Sapiens
ttgatctttcaccattttatttcacaacacacagtcatggagatctcagttgcgacctcgcattgtcagcccctggttacggcgtgctgaaagcgggcttcagccagacattgtcctcagcagctctgagtgcactgtgtctttcgtccttaggatgcaaagaagatgccactctccatgctttgcagatgaggaccccccaggctcagaatttgacttgaactcaggttgtaaaaattgcctagactctggactgcttctcatgctggtgactgcatctgagcttttccatcactgctctgtgttttctctaaaatccagtccatgtactcagcgactttggtgtagacaccaggttgctccctgcgggcacagccttcaccccagctggtgatgcccaccaaacgccacattccgttgtgtttgcaaactaagggaccacctgaatctcccttacaagcatcttttcccccttctttatagccagcacagaccatccgttgggttattttataatcttgatatcttttctggcattcttcatttgttaccaaaggaatatttaccttttgtagaatattttggatttcacctttctccttcgagaagccccatccggttacccaacagttggtataaattgtgcttgtgtcacctttggaaggtaggcatattggtttttggaattcagtgtaattcaaaggagcctggagttttatcaaggcgatatcatgattcccttctgagactttatagttttggtgaataataatctcttttatttgtgagaaaggtgtatcttttgtaatgtctgacagatttaaaatgccactatagatgcgccaaacatcctgcaggggaagcccatcaaagcagtgggcagcagtgaggacccactggtgtcctatgagtgaccctccacacaggtgcctctgagctgtcagcttcacctgcaggctcacctgccagggccactctccccaagaagagtttgttcctccaacaatgcgtgtgcttgtttttgttgtgcagacagagttgtccccagtgttacacaatctcaaagagtaaccagagctcccttgtgtcccatacgcaatcctagttggagaaccatccatagataatcttaagaaacacttacacttctcttccttacagtcttctgggagtaaagaataagtgaaaaactgacagcgaatcatctttgtgcaagtctcttggcaaacattcactcctttaacaaaagtcacattcaattcttctcctccaaagtcaactcccgggtaaattttagaatggcagggttcaggtaaagttcttttgcaggttaaaaggctatatccagatatggtgttttcttgaggagtagaggaacttggtgtgccactttcagatgttttaagaagacaaacatttctttgtgactcgattttccatacatttgtatagaatgtaaagaagaggcagttggggtgataggtgcagatggtccgacacacaaaagcatctggagtgagaaccctggcaacatccacatctgagaacgcaagatgctggaagatgttcatgtggcaaccaatttctgaaagggcacagggcttcagtgagaatccagattccacgttactcagcacctttatagcggtaggtgttcctccgggactgtactttaataggcaattgttccggtactctgccttgtgaaatgtttgcgtggcatatgaaaaaaactggcagcgaatgttattggtgcaccttttttggcattcttcaacactgctaaccttagacacattaaaattgactcctctcatatcaactcctttataaatgtctcgatggcaagcacttatttgatgac

SEQ ID NO: 315331 - DNA, 1011 bp, Homo Sapiens
  misc_feature (349)..(359): n is a, c, g, or t
ccgtcgcgggcgcctgcccaccctgccgttttcgtcgtccttgagttcccggctgccctccagttctcgcgcggcctcttcttccgggccctgcgggtgttgaccagcgcgtcttgccgtgtgatccgctggcagggccggacccggccgcccaacaccggtgttgagcggcgtgacgctcccctaattcagttggggcaacctccgggacctgtaggtcgctaaacttcgccaattttcctatttctttaaggtttggcaccacttaaccccttattaggacatgtccagcagtcatttagaatatactgctgcacaggcctttccctctgggacatctttttaatgnnnnnnnnnnntttttactttgttcttcaaaagtcttctactaactagtctatttatgattaaaacagcaaaaacagatcctggtttgagtgcaggtacattctttgggggagggcacctcaggaacatgcatttatacccttcctgtgactccgtgtagagggaagactaactcacagtccgtaagaatccaaaagtgagcggcgacttcactcagcaacccatcctgcctccaagctgacttggctatagagtatcttgcgtccttttgttctcttctgactacctgtcactcatgttttaaataatcttcttttgaaataataagccttagctggctttgcaggcaactaggcacttccagcaggacatgagaatgtaagatggccactacccgaacttacaggtgccaaaagaagaaagggtataaacggagaccacctatcactcatcagaacctaggatcatcacattcctttaaatggaaaagcccaccctacaactttcttcttaatgttctaaaaagtgacacctaggtttcctcaacagaaagctgtgcttcaatcccaaatccccttgagaccaacatgccttaaagggggtttgggtttaaagacccggacgcgtggtcgacgatatcccggtaattccggaccgataccc

SEQ ID NO: 315332 - DNA, 670 bp, Homo Sapiens
ggaatatgtttcctgggggaaggagcatatctgactggtcccagggaagaaatgaagtagaactggtattgaagagatatctttgtatgggaatccagcaaaaatactgggttccaagaacttgcttgcctggggaactcccagattctttaaaaaccttacatgtgaaatagcttaacataaatatataggtttagacatactgattgatgtttcagtgcctatttttatatgcatttatatcgctcaggtcatctattttccacttgttctattaagtcatggttttgcaaatggtcaccatttaaatataagggacctattttgcttctttcatattcttcgacatttcctcaatgaaagaataaggaaagtttaggagtgagttacttagggtgtattctactctgaggatttcagttttactatagctgtatttaatcttatattaattgggcacttatattaatttagtgcctgtataatgttggcactgaaatggttctttagtgtgttgtgagaaaatttcaatgaagtcatttatagaaaactgtttttctcaagggaatttccctttccccttttcagaagtcagaggaaaaactggaattagagtatagagttagagataaagcgcgatggcagtatgctgagacatttgctcggggtt

SEQ ID NO: 315333 - DNA, 192 bp, Homo Sapiens
aactcccaccaaaaaattttgaaccttcttttataaatagatctcaaatagaaaaataaaaatattattgaaaatgtatctcttgacagatgtatgggatttcctttccccaattattcactaacacatgaatgaatatgttttattgcaagaaggaggcagggttaagtggcaattaaaaaaagaaaaggc

SEQ ID NO: 315334 - DNA, 786 bp, Homo Sapiens
  misc_feature (415)..(447): n is a, c, g, or t
agttttttccaaacagagcccatattagtggaacaaaagtttgatgttcatgcccaacaagctctgatattttatggatacatttgtataaagcaagacttcttgctctgaaccctgggtgaccacaaataaattgaggggccatgattattggatgctgagagaaagtagcatacttaaacccacagtacagataatcaggaggcaagcaaaaacaaagctataacttagcagtggtattcacccaccacttattccaaaaacatattttgcttattaaataagggaaatatggtccagttttgcaatgttaatagctgccagtctctcatattttttataaatatcatttcctgactagcaatgagctaggaaactggcctcaaattctgaccaaatctctcagtattagttnnnnnnnnnnnnnnnnnnnnnnnnnnnnnnnnncagccaacaggggttaaaagttgcacaattaaacttgaatgtaaattatactatatacagattggtataaacatcactgaaatggttttgaaaggatgaaacacttctattttaacacaatttcttctatattatcccaattttcattaaaggacaactgatatgtaatttttttctttacagatatgaaaaagcaagaaggcaaagctgagagaaacagatgctacccacagggcagcggtggcatttgggttgttttggtctttgtaccagcaattcccactcccgaggcagataatccacttcctgccagactacacagtttttcttgcagtcaag

SEQ ID NO: 315335 - DNA, 587 bp, Homo Sapiens
  misc_feature (501)..(533): n is a, c, g, or t
gaaagtagcatttcattcagaggctgcccagagtttaaattacaccatagttttctttctttctgcaaatcattctttctgatttgcagttttttccaaacagagccatattagtggaacaaaagtttgatgttcatgcccaacaagctctgatattttatggatacatttgtataaagcaagacttcttgctctgaaccctgggtgaccacaaataaattgaggggccatgattattggatgctgagagaaagtagcatacttaaacccacagtacagataatcaggaggcaagcaaaaacaaagctataacttagcagtggtattcacccaccacttattccaaaaacatattttgcttattaaataagggaaatatggtccagttttgcaatgttaatagctgccagtctctcatattttttataaatatcatttcctgactagcaatgagctaggaaactggcctcaaattctgaccaaatctctcagtattagttnnnnnnnnnnnnnnnnnnnnnnnnnnnnnnnnncagccaacaggggttaaaagttgcacaattaaacttgaatgtaaattatactat

SEQ ID NO: 315336 - DNA, 2267 bp, Homo Sapiens
  misc_feature (77)..(168): n is a, c, g, or t
  misc_feature (170)..(171): n is a, c, g, or t
  misc_feature (173)..(176): n is a, c, g, or t
  misc_feature (224)..(250): n is a, c, g, or t
  misc_feature (1169)..(1201): n is a, c, g, or t
  misc_feature (2236)..(2236): n is a, c, g, or t
aaaattattattagggtatgatgaagaggggagtgggatgagggaattaaagagatattagggtggaaggggaggannnnnnnnnnnnnnnnnnnnnnnnnnnnnnnnnnnnnnnnnnnnnnnnnnnnnnnnnnnnnnnnnnnnnnnnnnnnnnnnnnnnnnnnnnnngnngnnnnggtttatcaaacactgacattttattttctgaagttttatcatttttnnnnnnnnnnnnnnnnnnnnnnnnnnngcagatatcaaaaacagcaaagagtttatagaatttctgcaccagtttgcacataagtcagtgattacaaaactggcatccaatgtaaatactaagcacaagctcacttccctcttggtcaggtggtttgttttagagctactcgatatttataactttttataagcaccggtcattttttgagaactgatttggtttgtccaacaaagtaaacaattttttgctgtgtggcagtttctttttttagaaaacactgagctaaaacacagaatgtgtatttgtttggatctgaaccaaatcttttgagatcccaactaccctgaagaacactgaagacatttacggggcatattaaatggtatcttaaatactagttgtatacctcataatgtctaaggcagctattatatttctaaagaaagtagcatttcattcagaggctgcccagagtttaaattacaccatagtttttctttctttctgcaaatcattctttctgatttgcagttttttccaaacagagccatattagtggaacaaaagtttgatgttcatgcccaacaagctctgatattttatggatacatttgtataaagcaagacttcttgctctgaaccctgggtgaccacaaataaattgaggggccatgattattggatgctgagagaaagtagcatacttaaacccacagtacagataatcaggaggcaagcaaaaacaaagctataacttagcagtggtattcacccaccacttattccaaaaacatattttgcttattaaataagggaaatatggtccagttttgcaatgttaatagctgccagtctctcatattttttataaatatcatttcctgactagcaatgagctaggacactggcctcaaattctgaccaaatctctcagtattagttnnnnnnnnnnnnnnnnnnnnnnnnnnnnnnnnncagcccacaggggttaaaagtgcacaattaaacttgaatgtaaattatactatatacagattggtatacacatccctgaaatggttttgaaaaggatgaaacacttctattttaacacaatttcttctatattatcccaattttcattaaaggacaactgatatgtaatttttttctttccagatatgaaaaagcaagaaggcaaagctgagagaaacagatgctacccacagggcagcggtggcatttggttgttttggtctttgtaccagcaattcccactcccgaggcagataatccacttcctgccagactacacagtttttcttgcagtcaagacacgaacaatggaccctactcctccagcagcaagtgccttttcatgccattgcagtaacatagcactgctattgtcagacgggctctcaaatcctttataaatatacttcattaggagatccacaccattcttgtccagagattgaactgccttttctatatcattagctttaaaagagatgagcaccttcaagacaatgctgcctgcccggtccttcactgcctgactcttggtgttgataggggggttcttcagagctgcctgtagggcagctgtcatgtttccttgccgcaggcaggagtccacctcgccctcgtcgggcccggcctggccgtcgcccccatcttcttcgtccacgaacttgttctcgtcatattcatccacgtccaccttccggaagcgggccgacgacactgtgttcttcgacatcccaatcccgaccagcggcaaaggcctcttcttggcgctgcctctacctcagcaagcccagcccagcaacccactacccggcgcctgattcacttccctcttccgctctggggcgtcgccgactgccgcggctcggaccgttctgggcctgcgcgctagccccgtttcttcctcctcaggttcgcgctcccttggcgcctcccacgctgcccccggacgcgtgggtcgacgatatcccacattcgcgaccggtaccagcctgcttntacaccgggtttcattatccctatttgcaca

SEQ ID NO: 315337 - DNA, 398 bp, Homo Sapiens
  misc_feature (388)..(388): n is a, c, g, or t
tgacagactgttcagtctttaataatgtgagaataaacagaataaattaaaagcacaccatattcttctcagcttcctcaggggctttgtccaaacagcttgaacaactgcaaaataatattcaggaaccatgatagtgtttggtacatagaggacactggaaatggttttcttaactgaacaagtgactagaataaaggaattaatgaacgacatcagagctgaaatcccaaaccataaatcataaaaggatcagacagcaaagagtactcgctgatttattgagatcctgatgagtttgaagtaactagaaacttgatcaaacagtgacaagacccaagatttgttttactctaaagtgagaaattatcctccctagatatttttntttttctttt

SEQ ID NO: 315338 - DNA, 1753 bp, Homo Sapiens
  misc_feature (1120)..(1120): n is a, c, g, or t
tcaagtttgagaaatgtagttttattaatagaagggcatgtcttaccatacacactgtccccagataaataaaatcccaacatctttgaaagcacacaaacacacagttttacagggtacaatacaaagtgaactttgatgatgttcttacttgcatttactaaaaatctgagaaagactgtaatcagtctctaaataattatcttgcgtaaagagaaaagtagagcacaatatatatatatcacaaaccaaatcacactctctgtaacattacaacatggaatttacttaatcaaaaataaaagcaaactggctgaagaaggctgtatcatttttttctcaatattacgctaatttctatttttggcatgaattattaaccttttccattagtaggcaaatgtgctctgcaaattctcggatggcaccacggccaccattacatttgcaaatgtatccaacagccttctgggcagtagaacaggcatcagcaggagcgccacttaggcccactctcttcaagcactcttcatcagacacttcatttccaagatatgccacttctttccagcacaggcccatttcttttctccattcatctacaactgctagcttgtctgatacactgacttccattttgcaatccagttttaaagaagacagcgtctgctttgaacaggccctttctgagattagcctcacctcaataccacttttctttaataaacttatcccaatagcatcttttacatcataagatattatttctttttggtctcctgatacataaatgtggccattggtgagacatccatcaatattgcaaaccaaaagttttatttccttaagcttctctttgccaaaatagccatatcttaatactctttgctctgcaataggccaatcaatatccacatctatatccacactatgttcagctcgcatttcgtagtatgccatttttccaccctgcaagtaacccatctctatcaaatgtcttttagcaaaataaaatgagccattttcatataattctccatcccagtcttgtcgacgaggtccgtttagctggatttaaattcagaggttcggtcacttcacgaactcctttctgaatttnactccatcgaaactgatggcgtctcacaacagagaaaacagaatcatatccttcttctcgaatcatttctgcaactttttgaagatcagtaggatgtaaacatggagaagtagcttgaatatttcctacaatgtcaacctcattatgataattaagaaattctatgatggcatctagtgaggtagagctgtcttttgaaacttcagaacttcttcgatgaacttgtgcaccaaattgtttggccacattctcaatttcatcatggtctgtcgaaacccatacactctggaaggcccctgaatccagggccgcacgcaggacccagccaatgagcgggacccccgccaggtgcttaatgttcttcagggggatgcctttgctgcctccccgggccagaattagggctgccaggtgcgggggcttctccacacctcggccctggccgccgcgagagttgcgctgcagcttcggcggccggccccgggacggtcgcccccgcgggttggagacggaggtggcggcccccttctccaccgagtccatcttcctcccacgccttctccccagcttctccacatccgggagctagtccctcaccacctcagctcggcgccgcccgatccccgcctggca

SEQ ID NO: 315339 - DNA, 343 bp, Homo Sapiens
aaaaaatggataccagccctccctccagcccagtttgccttttaatttttggattaagtaaattcccctgttgtaattgttaccagagagtgtgatttggtttgtgatatatatatattgtgcctcctacttttcctctttacgcaagataattatttagagactgattacagtctttctcagatttttagtaaatgcaagtaagaacatcatcaaagttcactttgtattgtaccctgtaaaactgtgtgtttgtgtgctttcaaagatgttgggattttatttatctggggacagtgtgtatggtaagacatgcccttctattaataaaactacatttctc

SEQ ID NO: 315340 - DNA, 725 bp, Homo Sapiens
  misc_feature (417)..(417): n is a, c, g, or t
  misc_feature (516)..(516): n is a, c, g, or t
cctcaattatactgtaaaatatttttgttccatctaatctttagtattcttatatgcagtgcccctaggtcttactgaagttgccagagttacctgttggttgctgtctgcattatttagctagaatattctttgtctctttaaatgtttgctcagtatttattttacttgataggaaatgaagtgtctgattgaagagtgcttgaagagagtgggcctaagtggcgctcctgctgatgcctgttctactgcccagaaggctgttggatacatttgcaaatgtaatggtggccgtggtgccatccgagaatttgcagagcacatttgcctactaatggaaaaggttaataattcatgccaaaaatagaaattagcgtaatattgagaaaaaaatgatacagcgttcttcagccagtntgcttgtatttttgattaagtagatccgatgtgtaatgtacagagagtgtgatttggttgtgataatatatatgtgctcacatttctcttcgcagatantattagagctgatcagcctccagatttagaatcagtagcacacaagctctgatgactgactggtgtggcgcagagtggatatctggcagggtgacagcgtcttataaagattcctttaaaaaataaagcgcccctgtttccggcctggggccaatgaaccggggaggcccccgaacgcgcgtgggaccactccttcgcgaggcggccta

SEQ ID NO: 315341 - DNA, 558 bp, Homo Sapiens
  misc_feature (148)..(413): n is a, c, g, or t
ggcacgagggtaattgtgtaagacacactgtggttgtatcagaaggacccacaggggccctgctgtcacagatggggcaagcgagagtgaacaagaacaaggagcccctgagttagatgtgttaaaaatccaaggctggctggatgcnnnnnnnnnnnnnnnnnnnnnnnnnnnnnnnnnnnnnnnnnnnnnnnnnnnnnnnnnnnnnnnnnnnnnnnnnnnnnnnnnnnnnnnnnnnnnnnnnnnnnnnnnnnnnnnnnnnnnnnnnnnnnnnnnnnnnnnnnnnnnnnnnnnnnnnnnnnnnnnnnnnnnnnnnnnnnnnnnnnnnnnnnnnnnnnnnnnnnnnnnnnnnnnnnnnnnnnnnnnnnnnnnnnnnnnnnnnnnnnnnnnnnnnnnnnnnnnnnnnnnnnnnntgtgtctcacaaaaagaaaaacccaagggtttaagctggctgtggttatacgcacctgccatcctagctgttccggaggccaaggccataggattgcctgagctcagagttggagtctagcctgagcaatgtagcaggacccccc

SEQ ID NO: 315342 - DNA, 342 bp, Homo Sapiens
  misc_feature (95)..(109): n is a, c, g, or t
  misc_feature (178)..(202): n is a, c, g, or t
gagccacctcgtctgggccagagcatacattttagatttcagattgtgtggcgggcagggatagaatatccttgttagttatataaaaataaacnnnnnnnnnnnnnnngcagatttgaaatttaattaagctattaacttcttaatcatcacattctccaactctgtgtttaacttnnnnnnnnnnnnnnnnnnnnnnnnnaaggaataaagggattcattcctcattttaactgatgttacagtgaagatgggttcttgaactcttggaagcctggatgagccacctaatctgcaagataccaaagacctgcgtattggggagggtttttcctcatcttc

SEQ ID NO: 315343 - DNA, 1874 bp, Homo Sapiens
ttttggcattctctctccaagtccttcctttaatgtcaggtagtgcttcaacccaaacacaagcagtatacataccatagagaaagggacctgagggcatctgagtcatgcatggtgtggtacatacaaaccttggcccagcccaaaggagcagtcaagggcctggaagaaagatggtttgctctttccccctcctcctctctctttcctaccgggcttaaagtccgtggaagagaaagtttttaatcagtggaactgataaggcctcagggccgtggagggtagatttggttgttcagtaatataaaatgtgtttaagaaaaaaaacagcccaggcttcccagcagtagcccatgtgttggctggttcagcagcctgacctctacatctagacaaggaagtgaggagggtgattgctgggcattggtgtaggtttatgacggagcagcataagattttccgtgccctgtgaacacgtatacaaacattcatagccccttcccctcagccctgctctgctgcaaggaagctgctgagagtgagtgacagctgggcacaaagtgtcttgtgagaccagctatagggtctaatgcagtgaagtcagtcatttaggacctattttcacacaggggcaaggaaaaaccagaaacaacttctctcttaccctttaaactaagatacttcattctacacgattacctgaaacaaatgtctcaggtcaaatcacaagccttagcttctgctagggtttgaagtctgggaaatatataatccagctcttctctttcagtccaagctctagcttgtcagcaagactgttgcagaagatctatccttaagaggcagaaacatctgcggtgaggaaggcagctattgaaggtattccaggagcatgagactgagtttgcagagctgagggttgtcaatttccttttctactgatatcttcttcctttagagcaacttcctccttaggacctcagagataagcacagcagggtcttcctccttcaataaactccggttcagatcttgactctgtttcattcggtgaaagtccttcaggatacccatcatgtctgcaaagctgctggccttggacaaagagacgcagtcatcctcttcagacgaactgcaggcagctttgtgttctggtttgcaacattcagggctggcagaacaaagcagggggactgatggaagctcagggacctccacctctgtctcctcggtgatgtcactaatgacaaaggaagttgtagagtggaatgaggatccaaaacaaggtaagggagaagagacatttgaacttcctggagataagaaatctggcgttaatgaagccgaagctgcatcagctgccactatctttgcaatctggctgcgcaagtggctcagctcgtcctgcagctcagtagtgcggcttagggctggcagagctggcttcttcagggccagaagcctctcctcggacccacgcaggttgggaacagaggcattgcgctgcatgacaatcagagggctgggtttccaggtgtgcctcagggggcgcgtatcactcctgacccgggcatatgtctcctcttcatccgcagcaatccaggcgatgtcagccagggtagggactgggggcacatctctcaaacacaggtcagagatgttgggcagggtctcaaaggacgcccgggcacacggcttcaagggtaggttggtcccaattcttcttactacacttcgagcagccccatgtggcttgttttgccagattgggatggtcacagtggcttccattcctgacatttgaaccagctcctgcacttgaaggacaaggcagccactgggcagctccgggaggcgggaggcgtgactccatc

SEQ ID NO: 315344 - DNA, 420 bp, Homo Sapiens
gccggagccgtcccctcatccaccagagccaggtccaataaagaccctggggtagaggtcctccagctgtggcccacagttcccccactgaaggcctcccttggctaacaagcttgaagggagagatgcttgaagaaaacccacaggaagtccatagtgaggtccagcccagcccgggtgaggttgcccagggaaccaggcacaactcatcctcccggcttgcagcagcaccagtcagggctgggtttctggcctccccgagggtgctttgcttaccctggcaaacggaaatcaggcagttcttcctgccaattctggtcccaggaatctttggacactgtccccaccaccccctgcccacatgttcaatgattgctactacagagactggcccagcaggtgctctacactccacactcc

SEQ ID NO: 315345 - DNA, 367 bp, Homo Sapiens
caaaagaaggatctgcaccatacaagttgcacaaccatggatagatggccttgtcttgtggcccagtgcaatggagttgaattcaggtcccctccaagttgatccacaatagcacctttcgaaatatagtattctttgtccggttgccgtacatcataacctgcttccaccaattctcgacagcgttcatatattccatattgtgtagccttgactatgtcccatgtgctgtaatcatcaatatgagccgtccaagaggttcaccatatccatggttataatggctttggggtttgatttcctctgggtggagaaggggcacacagcccgcttcggtatcgtactcatccgggccgtccgccatctt

SEQ ID NO: 315346 - DNA, 366 bp, Homo Sapiens
acactgcaataaaagtcgctgagctcgggggtagggtcggggagagcaaaaggacaagtagatagcacctctgctcccagagagcttaatgaccaaaagaagacagaacagagatcagtatgtgtaagaccaaatgctgttctggtaacacaataaatgtccaagaaggctggagtccttgaggcaacagatctcaatcttcgggatgcctgagccctgtgcaggtcccctccacctcggtgaagagcttctgcttcaccgtgttgagcaagttggggccgaagtagcgcgggtgcagcaggatttcgtgctctagggagatatggtagaacatcttcccagaccaggtaggcaggcagagtccac

SEQ ID NO: 315347 - DNA, 1091 bp, Homo Sapiens
  misc_feature (83)..(97): n is a, c, g, or t
  misc_feature (111)..(112): n is a, c, g, or t
  misc_feature (162)..(217): n is a, c, g, or t
  misc_feature (226)..(227): n is a, c, g, or t
  misc_feature (231)..(231): n is a, c, g, or t
  misc_feature (233)..(236): n is a, c, g, or t
  misc_feature (238)..(238): n is a, c, g, or t
  misc_feature (240)..(242): n is a, c, g, or t
gaggaaaaaggttttggccccttgtccccttgcctaaaggggggccccgcgccccaaaaaaagtttttaagaaatttttttannnnnnnnnnnnnnnccccacaatttttnnatttgtttttttaatggggggtgtccgaaagatagtggggggtaagatannnnnnnnnnnnnnnnnnnnnnnnnnnnnnnnnnnnnnnnnnnnnnnnnnnnnnnntttgggggnnattntnnnngntnnnttttccatgagaaccaaggactttttatacttagaacacatactgaaaaatgaggaggcagtagttaagctacaagaagcaccagatgccttctgggatgagttgccttccttgcctccacaacagcagccagactggacctctggacaacatgataagtgtgacaatcacacttcctagagtaggaccaagggtaggaggccaccaggctcagcttacaagccccaagtaatcgtccatcagggagccaatagcaaaaatgtcattcttgtccacacgggtccccacaatctttaagcggatctcatcgtcctgctgaatcacaatatcctcatccattgtcttgtaacatggtgggttggagttaggatcaaactccatctctgaagggatggaatgtcgagagatgaagcaagacatgggcccaatttctgtgaagagtccaaccttgttgacctgagtgacaacagcatccacgacctcccctttaaatggccggaaaacaatggccttgtacttaactggataaaggacaaagcctcggcctggctggatcacaccagcaccaatattgtcaatggtggtgacagcaattacaaagccatacttccctgtgcaggtcccctccacctcggtgaagagcttctgcttcaccgtgttgagcaagttggggccgaagtagcgcgggtgcagcaggatttcgtgctctagggagatatggtagaacatcttcccagaccaggtaggcaggcagagtccacacctccgacagtccctgggaatccaccggaaacacttagacgccgcaaccccagcctcgtccgaattgccacccaggcctcgctcctt

SEQ ID NO: 315348 - DNA, 750 bp, Homo Sapiens
cagcctggagatggcacccatgttgtattctggaaactcagtaaatctaatccgttgaaagctacctgaaagaagccttctgggctctttccagaatgcagctcacagcccgctttcacctgtacttcaaagggatatttcgagtaatcttgacttgcatggtcttgaatctcccgagttaatccaaagaggtagaaacgaaataacaactctaggtctgacaactcttcattgctgaagttgcccttggaccagttatgcaggaaaattattgtgcctgattcactgtcccagccatgagtctgcaactcgtccagccatcctgagccctgacctcgtgcccaggattggttgacaaatgagaagatctggatgacatggaaggagacgtgttcctgggatgcgtctgcattgtcaccacctgggagaagaagagctagcagcagaaactgcagaaacagcatgtcatttgcagatgtttctttctctcagaaaagctgtttgctgatctctgttcttagcaaacttatccctctgtacctatattctgacttccttctaccaacaatcttccccatcagccgctgacagcaactaagaagatctgcttccctcaaccttggtcctcctactcaatctctcatttccccacctgctctgaactaaagttattctcttctctcaggattccagctgctctgccactaagctccattatatctacttcccttcctcaactgccctcgtgcc

SEQ ID NO: 315349 - DNA, 604 bp, Homo Sapiens
aaattaaaatctgcttacaaagtttatttttaaagtaatttaaaacacagtgtaactataccttaaaaatattgtggcaatttagattaggaataaacatgaggttatttacatgttggcatatgtatgtgtgtatatatacccaaagtgcagataaataccgaacacttccaaataaacacaaaaattcaatgataatttatggacaatcacttttatatttattacttaatttgtcatgttaatgactgcaaagaagcttctagtactgaaatataatattttaacatccgacttttatataaactacagtaccttaaattttaaccgtatataaatagggttctgaattaaaaacccaggtgtgttccctgccaaattccctatttgttaaggtttcagctcagaaatcaagaaggactctgaaaatcccaacctttgatatgtggtggtatattggattttaagcatcaatcatgtgcagacagtgttcttagaccagttcctgtggggatcgttctctgcaaaaaggaggcagttgagggtacacgggcagatataaagcctcaaaaatgctgccatatagagattaaaagtgtgcatt

SEQ ID NO: 315350 - DNA, 643 bp, Homo Sapiens
  misc_feature (14)..(14): n is a, c, g, or t
  misc_feature (65)..(65): n is a, c, g, or t
  misc_feature (70)..(70): n is a, c, g, or t
aatagcttggcganatgtcctctcacagcacctcaaccaaaaagacaccctgatgcagcgcttgnaaatngggcttcagaattgtgccacacacacccagcccttctggggatcactgaccaacaggacacggccaccatctgtgcaagtagccaaaaccactccttttaacacgagggagcctgtgatgctggcctgctatgtgtggggcttctatccagcagaagtgactatcacgtggaggaagaacgggaagcttgtcatgcctcacagcagtgcgcacaagactgcccagcccaattggagacttggacataccagaccctctcccatttagccttaaccccctcttacggggacacttacacctgtgtggtagagcacattggggctcctgagcccatccttcgggactggacacctgggctgtcccccatgcagaccctgaaggtttctgtgtctgcagtgactctgggcctgggcctcatcatcttctctcttggtgtgatcagctggcggagagctggccactctagttacactcctcttcctgggtccaattattcagaaggatggcacatttcctagaggcagaatcctacaacttccactccaagtgagaaggagattcaaactcaatgat

SEQ ID NO: 315351 - DNA, 456 bp, Homo Sapiens
  misc_feature (326)..(393): n is a, c, g, or t
  misc_feature (405)..(405): n is a, c, g, or t
atccaaagcgctggaattacaggcatgagccaccgcacccggccttatcagttgattaagtgaaccttcagtgggcaaagttgttttgtgggcccagccagtggttcagttttgcctgtcttcgagtgattggaatgtacagccaagagagtgtaattatggtgctggcagaagtattaacctatctggatgtcactgtcttcactttctgactaggctgcttccagggaatctttccacctcaatatttatgagatatctataattttataacaaacttttaaaggagcctcgggttccttcacaattgatgacaccagtttttnnnnnnnnnnnnnnnnnnnnnnnnnnnnnnnnnnnnnnnnnnnnnnnnnnnnnnnnnnnnnnnnnnnntgctcagggatnctccacctcagcacctgagtagctgggactatagtgcacaccactgtgctg

SEQ ID NO: 315352 - DNA, 781 bp, Homo Sapiens
  misc_feature (158)..(195): n is a, c, g, or t
  misc_feature (413)..(722): n is a, c, g, or t
ctttcccaccttcaagccatgagctttttcatccagccacctctttcatggagatcccaacatttcccagtgggcatggtggccacattttctgaaccaaaagttgggatatatgttatgacaaaaatttttcattaacctataaattcatttacatnnnnnnnnnnnnnnnnnnnnnnnnnnnnnnnnnnnnnncagttacatgaaatgtaggaaccactgagggaaatcaagaccctaaaggttggtgcaactctccagcccctttgggacatattcactttgaagatttatacttccgcagccttcctcaccagcccttagcttgagaccccaaaccagaacattgcattctgccacactgggtcgctgccaaggcaaagaaggccccagggccagcaagtcctcgtgcnnnnnnnnnnnnnnnnnnnnnnnnnnnnnnnnnnnnnnnnnnnnnnnnnnnnnnnnnnnnnnnnnnnnnnnnnnnnnnnnnnnnnnnnnnnnnnnnnnnnnnnnnnnnnnnnnnnnnnnnnnnnnnnnnnnnnnnnnnnnnnnnnnnnnnnnnnnnnnnnnnnnnnnnnnnnnnnnnnnnnnnnnnnnnnnnnnnnnnnnnnnnnnnnnnnnnnnnnnnnnnnnnnnnnnnnnnnnnnnnnnnnnnnnnnnnnnnnnnnnnnnnnnnnnnnnnnnnnnnnnnnnnnnnnnnnnnnnnnnnnnnnnnnnnncggttgcgatttgggggcttttccgcttcttggtaataactcgttggctcgggcgttgg

SEQ ID NO: 315353 - DNA, 355 bp, Homo Sapiens
agcaccaaggaggaaataagtggaaggagagaggcagccagttagatggttccactagtgtctactggtaattggcaaaactatgagtgttgctaatctgggctgagggcacctctgcctgtgcaggcagctgaccaggcttggagaatgagaaagggttccctgggaagcagggatggggagtgggcatgagaccgggttgttgggaccactctggggtcaggccctgggtgaggcacaggaggctgcacacaggcacttggtgggttctgccgggtcagggtgggaaggcaggagaagtgtctgtggcaggacgggaagaagcttcagtacatccctctcttgcacctctgcc

SEQ ID NO: 315354 - DNA, 1020 bp, Homo Sapiens
  misc_feature (362)..(392): n is a, c, g, or t
  misc_feature (854)..(854): n is a, c, g, or t
  misc_feature (857)..(857): n is a, c, g, or t
tttttgttacagatttaatgctttattgctcttgatggcaaatcaaaatatgctttagaaataaagttaatttactggaaaataggagtttttgcaccaaaccataaaattgcatttcattacatcaagagaaccccctcattgtctacaatcatgcccgcttcctttcccctcagcgcccgggacacgtgaccgagatcataccctaaattcctgatccttttgcagttgccacatactgtggcttttagtacatcataaaaaagtgctttcctgtggcctcagctgggaggccctggcgctggggctaaggggcccaaggcaccatccaaaggctgggaggaaagaacccaaacccaggnnnnnnnnnnnnnnnnnnnnnnnnnnnnnnnaactcatttggcatgatctgttttggtgtgtttaaaacatacatttgcatgtgtctagtgtaaagcaacaagtttgaggaaataagtggaaggagagaggaagttccagttagatggttccactagtgtctactggtaattggcaaaactatgagtgttgctaacctgggctgagggcacctctgcctgtgcaggcagctgaccaggcttggagaatgagaaagggttcccaaggacaggatgccagcgggattctttgttgcaaactgcacacagtgcaatttttgggaagcagggatggggagtgggcatgagaccgggttgttgggaccactctggggtcaggccctgggtgaggcacaggaggctgcacacaggcacttggtgggttctgccgggtcagggtgggaaggcaggagtagtgtctgtggcaggacgggaagaagcttcagtacatccctnctncttgcacctctgcccactccacctgaggcgtgggctccctccccctcatcctctcaccacatgcctgaggcgtaggctcccctcatcctctcaccgcatggggcatttgctcccagcctctcgacgcgtgggtcgacgatatcccggaattccggaccgtacc

SEQ ID NO: 315355 - DNA, 435 bp, Homo Sapiens
  misc_feature (17)..(17): n is a, c, g, or t
  misc_feature (40)..(40): n is a, c, g, or t
  misc_feature (85)..(85): n is a, c, g, or t
  misc_feature (132)..(132): n is a, c, g, or t
  misc_feature (135)..(135): n is a, c, g, or t
  misc_feature (219)..(219): n is a, c, g, or t
  misc_feature (221)..(221): n is a, c, g, or t
  misc_feature (224)..(224): n is a, c, g, or t
aaaccaaacaatttgangaaaataaatggaaaggaacaanaggaaattcccagttaagatggttcccactagtgtcctactggtnaattggccaaaactatgagtgttgcctaacctgggctgagggcaacnctncgcctgtgcaggcagctgacccaggcttggagaatgagaaagggttcccaaggacaggatgccagcgggattctttgttgcaananctnacacagtgcaatttttgggaagcagggatggggagtgggcatgagaccgggttgttgggaccactctggggtcaggccctgggtgaggcacaggaggctgcacacaggcacttggtgggttctgccgggtcagggtgggaaggcaggagtagtgtctgtggcaggacgggaagaagcttcagtacatccctctcttgcacctctgctccac

SEQ ID NO: 315356 - DNA, 621 bp, Homo Sapiens
  misc_feature (459)..(578): n is a, c, g, or t
tgggtgcatttgaaactcatgcaataattatcctcagtagtatttcttacagtgagacaacaggcgatgtcagtgagggcgatcatagggcataagcctaagccataccatgcagcctttgtgccagcaaccaaatcccatgtttcctactgtgttaagtttaaaaatgcatttattatagaattgtctacatttctgaggatgtcatggagaatgcttaattttctttctctgaacttcaaaatattaaatattttcttatttatttttttgattaaagtataaattaagacaccctattgacttccgggtaaggggagtcaattgattacccagcagcacagtatttgctttttataattccctttttaaatacttgttcttaattcactggttttccttttctgtcatttttcagagtttagattgtgagtccatgttttgtctgttgtgcctatnnnnnnnnnnnnnnnnnnnnnnnnnnnnnnnnnnnnnnnnnnnnnnnnnnnnnnnnnnnnnnnnnnnnnnnnnnnnnnnnnnnnnnnnnnnnnnnnnnnnnnnnnnnnnnnnnnnnnnnngttcatattcttcacaaggacatggatgaagcttggccatcat

SEQ ID NO: 315357 - DNA, 593 bp, Homo Sapiens
ttaacaataaaatattaatttataaaaaagaaattttaaaaagtaaccaagaaagaactcgtttgaaaccatgtttcatcatcctgtagctacatctggtcttccttgtgtgctgggggactgcagataggtcaggggtatcagcctcagccactcagacaaggaaagggggcaccacatgagctcagggacccccacccccatccctggcctgggtgatggtacagcgtctggccctgccaggtccttggcctgcacaaagtcagtgacagcaggtgaaatgcccagctgggtgcctgcctggagcgggtgtggggcagtgagcccctgtgggtgtgggcttgggagtggctgtgacagggtggtgagcagggcaggggcaatcagacagccctcagaaggcctcatggcccccggtgagctgcaggaagaggtcttcatccagctcctccccacgggcccgctcccgcgtcgacaggaaaatgtagcccccgatatactcgtgtacaattcggcagctggcagacacgcagctgaaggccacattgatgtgttcatcaaactcgatggccactgccggatgtcccagttga

SEQ ID NO: 315358 - DNA, 774 bp, Homo Sapiens
  misc_feature (39)..(39): n is a, c, g, or t
tacaaatcatatttgagccccgggatattttttaatgancttcttaatgtctttgagaactactaactggtagagcacagtttgagaaatgctagttggaaacatgaccaggattccttagatctagtacatgaagaaaaatggaaacaaccattcttctctgcttcctcgtatactaaacattttaaatagcacaggagatcacagaactcaattttgaatgtaaaagtagtttacattctagattgagaaacttacctgcattgaaataagaatgaaatcaattaggctcccaattccacaaaaccctacagtgcaaaactttaacaaacccaaagcagggtatccaaggtaaaatcgatctgctcccaaccatccaagaaaaagagacaatgcgactgccactttgtaggaatagccatttacatttcggcaagatatgggcttgaaaaaaccaacttcgttcccagtaaaatgtgtttcattgccactggaatccttacaagttatgttgggtgctggaaaacaggaaacatgagctgtgtagtttgtacagttaactggttcttgcgtagcgtcatttatttttggatctttacaaatatattgtcccactttgaggtcctcgcacttaagcgactcctcgcccccggcggaggtggcaacagccccccagggtcctgtagtgactgagacgaaccacaggacaccaacgagtctggccgtcacggcctccggagcagacggaccagacggccaggcggccgccatcat

SEQ ID NO: 315359 - DNA, 504 bp, Homo Sapiens
gtaatctataatgtaactacttccatctgaaggtccaacaatctgcattgaaataagaatgaaatcaattaggctcccaattccacaaaaccctacagtgcaaaactttaacaaacccaaagcagggtatccaaggtaaaatcgatctgctcccaaccatccaagaaaaagagacaatgcgactgccactttgtaggaatagccatttacatttcggcaagatatgggcttgaaaaaaccaacttcgttcccagtaaaatgtgtttcattgccactggaatccttacaagttatgttgggtgctggaaaacaggaaactggatctttacaaatatattgtcccactttgaggtcctcgcacttaagcgactcctcgcccccggcggaggtggcaacagccccccagggtcctgtagtgactgagacgaaccacaggacaccaacgagtctggccgtcacggcctccggagcagacggaccagacggccaggcggccgccatctt

SEQ ID NO: 315360 - DNA, 491 bp, Homo Sapiens
ttcactgtgaaaaaaaataaatctattttcttgccttccagggcagccaaccagtcagaatgcctctcatttaggcctgcaagtcccatccaagggaaatgtgtggagatgcaagaaggcaacaccaaggggaccttatcaatagccctgtcccctgcccgcctccaaagtcccccaacaaagtatgaaggaagccccacctgggggtctccaggaagtcgaggctggcctctgaggttccacagaaaagcaagatgggggagtgaaggggccggctggaacttgatgctccaacctccagagtttcgaggcacagcaagacaggttcagtaatgtccttccctccagagagcgggccttaatttatggactggtactctgagtacttcttgtggtgcagcagcagaaccaagccgccccctagcagcatgagccctggggcacccagcactctgccatgattgcccaggactagtggggacaagccgtcc

SEQ ID NO: 315361 - DNA, 436 bp, Homo Sapiens
ggccgggttctggggcttgcagaggtggcgcccgtggactacctgtcacaatatgggtacctacagaagcctgtagaaggatctaataacttcaagccagaagatatcaccgaggctctgagagcttttcaggaagcatctgaacttccagtctcaggtcagctggatgatgccacaagggcccgcatgaggcagcctcgttgtggcctagaggatcccttcaaccagaagacccttaaatactctgttgctgggccgctggagaaagacgcacctgacttttcgcatcttgaacctgccctccaccctttcacgccacacagcccgggcagccctgcgttaagccttccaggactgtagcaatgtggctcccttgaccttccgaggtgcaggctggtgcggctgacatccgcctctccttcctggccgtcgctcg

SEQ ID NO: 315362 - DNA, 442 bp, Homo Sapiens
cccagccccagtatcatgctattccaaacaatgctacctcaaaatattttgcacttatatgtaaatatatacaatcatataattacacgtgggttcatatctctgtagaatatggacttcagtgtggaatttctgggtcaaatgggatgcatactaaatatttttctagatcatagcaaattatcttctcaaaaggctgtatcattttatattcccaccaacatacttgtttactctttcttgccaacattggatattatctctaatattttacaagtctgtaaagtgatgttagtataccaaatgagcaaaattaacaacatttgaagttatttttagcttatccaatcttgctcatactcacttgctcaagaaggttatgtgcaagccattctgcaactactacctccccttttaattaagatgtcttcccttttgcctt

SEQ ID NO: 315363 - DNA, 647 bp, Homo Sapiens
  misc_feature (16)..(16): n is a, c, g, or t
  misc_feature (53)..(53): n is a, c, g, or t
  misc_feature (87)..(87): n is a, c, g, or t
tgaggcctcggccagnccggaaccaaaggccgatccatggccgaaccacaagnagccccatggcccagtgccatcccatgaagaaanccaatggcccagtgagaaccccagatgaggacgagcatgacagacagagagaatgacagcaactcagcagcagtgaaacgtccacagcaaccaaaggaaatcttgttctgaggtgagcagggtcttgttaaatactggcacatcgggaggagaagaaaagcaaaagctatcgttgcaagaactgctgtacatattgtaaaaactacttgaactgagtcaaagaagaagaacattactaaaagagagacagatgctccaattggaaggaacagagcctgggtagagtcaattgtttggatgctattattggtgctgtcaaagtccatattaagggacctgaaactaccatagactataagaagaatggaaatcagaaatgtagacacttgactggaatccaccagggaataggcccacgagtaggtctgctccgccatggcgctgcctctcgtgggctccgctgcaggctgtggccgggcccggcggcggcgggctcgctcgggccgtagctgaaggcgcggccggggtccggtgcttgcttgcttgctcgctcgctggct

SEQ ID NO: 315364 - DNA, 1828 bp, Homo Sapiens
  misc_feature (129)..(129): n is a, c, g, or t
  misc_feature (491)..(516): n is a, c, g, or t
ttggcgctacgtggtggtcggtagcgcggcgtagtatctctcctggtcctggctatccttcttttctcggcgcggttctcacgcgcctgtccaggtcctgggtggccgcagcagttgtcacactgtatngcatgcccgccattagaaagtttttcccggcccatttcgttccccccgccacccctccccgtaatttttggttcccagcccctgtaccgattgctccttaggttatcgctaaggttggacccgtggcctttatcctgataatggctcagaattgcctccagcacagctgtatgtaccactgataaattccttgtggctccattcactgatgctatgaactaccggctagaaacagaggacttaacagggcttgagactagcatttctctagactcagcatccttagctcaaggttcaaagagaaattggtaccactaaccactcagagcattcctcagcattacccccaaaattctcctaannnnnnnnnnnnnnnnnnnnnnnnnnggacaacagaaataaatcctagaggacaaaattaaactcaatagagtgtagtctagttaaaaactcgaaaaatgagcaagtctggtgggagtggaggaagggctatactataaatccaagtgggcctcctgatcttaacaagccatgctcattatacacatctctgaactggacataccacctttacgcaggaaacagggcttggaacttctaagggaaattaacatgcaccacccacatctaacctacctgccgggtaggtaccatccctgcttctctgaagaagtgaaagagcactgatttcagcagctaagaaatgggctcttttaaggcgatttagacattgcagattgttccacagagaaggtaccttagcatttcctgttaataaggtacctaattaagactaaagtccccagaaatggtaaagaaagaatcacctttctgggctgggagagtaaaatccttctttagtgactagagtgaggaaccctgaacttctatttcatctaaagagccatgaagcaagttccctgtgtggtctgcagaacttggataatgagatgaaaaaacaagaatgaaattataggaaaaaaatcaagaggaaaggagtaagaagaaaataaaagttatcttaaaaaatatttctttagagtgtgtggttcaggtggactggtccttggtagtatggtccattagtatctgtaataattaggtttgaatggcccatttttgttgagtcccagatattttgcttggtcatctgtcagctctgtaaggtgggcatcaaatgatggcagatgcaagctggcaacgtattcatccattttcttaggaagcaagtacacatcctgcttgtatcgcccctcgggtgcattatagagttctatcagtgccaaagcctgtgttgtggctgtgatggacagaacaaaggtgggaactgtggagcagctcaaattgagtagacgaccctctgccaggaggacaactcgtttgccatctggccagatgacatggtccacctgagaacgtactcgctcccacgtcagctccggagtgcggaggctggtcacatcgatttctgtgttggagtggcccatattgcatacgatacaactgtttttcatgcgatccaagtgctcccgtgtcactacattcttatttcctgtgcaagttattacgacatcgacttgccggatgacttcatttagctttaccaccctgaacccatccatgcaggcctgcagagcacagatggggtcgatttcggtaatgtagacaattgctccaagagcttgagagcagcacagca

SEQ ID NO: 315365 - DNA, 803 bp, Homo Sapiens
  misc_feature (139)..(139): n is a, c, g, or t
  misc_feature (233)..(290): n is a, c, g, or t
tttagacattgcagattgttcccacagagaaggtacctttagcatttcctgttaataaggtacctaattaagactaaagtccccagaaatggtaaagaaagaatcacctttctgggctgggagagtaaaatcccttctntagtgactagagtgaggaaccctgaacttctatttcatctaaagagccatgaagcaagttcctgtgtggtctgcagaacttggataatgagatnnnnnnnnnnnnnnnnnnnnnnnnnnnnnnnnnnnnnnnnnnnnnnnnnnnnnnnnnntaaaagttatcttaaaaaatatttctttagagtgtgtggttcaggtggactggtccttggtagtatggtccattagtatctgtaataattaggtttgaatggcccatttttgttgagtcccagatattttgcttggtcatctgtcagctctgtaaggtgggcatcaaatgatggcagatgcaagctggcaacgtattcatccattttcttaggaagcaagtacacatcctgcttgtatcgcccctcgggtgcattatagagttctatcagtgccaaagcctgtgttgtggctgtgatggacagaacaaaggtgggaactgtggagcagctcaaattgagtagacgaccctctgccaggaggacaactctgttttccatctggccagatgacatggtccacctgagaacgtactcgctcccacgtcagctccggagtgcggaggctggtcacatcgatttctgtgttggagtggcccatattgcatacgatacaactgtttttcatgcgatccc

SEQ ID NO: 315366 - DNA, 1019 bp, Homo Sapiens
taggatctgtaaactacatttattgaatacttactggacacatcatatacaaaaaaggatgggggcaggtaagaacttgaagaaattaaatatacacattaagtttcttcactaattctagccactaaagaagtacaaaatttgtacaagtaatactttataatgaaattttgatgcctgtcaaaagggtaataagctatacatatactacaataaacatttttaaaaactgtgcttaatatcatagaattttcttaaaatgggttggtaaaatacctatatagcatccattcttacacacatattttccattaaagattgcttaaatagtacaaattcctattgctaagaaattcatggtcaacagctgtatatgaagttcctctaagaaacatcacagcatttgcagtaagtccatttctccagtgaagcccaccttattttcagtttagcttactaccaagttctcatgagaactgtttatatgtcttttgcttggtcatcttcttcaagttttctgatttcattttttaaacaatttatagtttcacgacttgcttttaatctctccttaagctctgcaatctcaaagcttgtttttttcttagcagcttctaatttttctctggttttcacttcaagctctgcaaattctgtttcatgcttataggctcctaatgttagctgacgagatgttgtcaataattgttgcatcattgctgttgggtcttgaaatatcatttcatcatagaactctgaaaccactgtctttttccccagcattgcattggtgtctgattgaaacagctttagcaaatgatacagggttacaggtctttcattagggtcaatgaaaaatattttgatgattatttcgaattcaccccatcctgtttcagtaatttcatatggaggtttagtaacaactcttaaaggattgccatagctttcatgtaatttaaactggattttcttcacatatgctgacatatcctcatttctatatggtttcacatacc

SEQ ID NO: 315367 - DNA, 1380 bp, Homo Sapiens
  misc_feature (920)..(952): n is a, c, g, or t
tttttcatctatgaaaattagaggaagaagattaatgttctagagaacgttaagaaatcttcctcctcaatgaaatacattatatattatctttatgtactcttaagaaaaacgagcaaggaagagtatcttcattattctcattttctctgagttggaaacaaaaacatgaaggactccaactagaagacagatatttacatttaaatagattagtgggaaaactttaagagtttccacatattagttttcattttttgagtcaagagactgctccttgtactgggagacactagtagtatatgtttgtaatgttactttaaaattatctttttattttataaggcccataaatactggttaaactctgttaaaagtgggccttctatcttggatggtttcactgccatcagccatgctgatatattagaaatggcatccctatctacttactttaatgcttaaaattatacataaaatgctttatttagaaaacctacatgatacagtggtgtcagccttgccatgtatcagtttcacttgaaatttgagaccaattaaatttcaactgtttagggtggagaaagaggtactggaaaacatgcagatgaggatatcttttatgtgcaacagtatcctttgcatgggaggagagttactcttgaaaggcaggcagcttaagtggacaatgttttgtatatagttgagaattttacgacacttttaaaaattgtgtaattgttaaatgtccagttttgctctgttttgcctgaagttttagtatttgttttctaggtggacctctgaaaaccaaaccagtacctggggaggttagatgtgtgtttcaggcttggagtgtatgagtggttttgcttgtattttcctccagagattttgaactttaataattgcgtgtgtgnnnnnnnnnnnnnnnnnnnnnnnnnnnnnnnnnctcaagtaaaattgtgaacatatttcctttataggggcagggcatgagttagggagactgaagagtattgtagactgtacatgtgccttcttaatgtgtttctcgacacattttttttcagtaacttgaaaattcaaaagggacatttggttaggttactgtacatcaatctatgcataaatggcagcttgttttcttgagccactgtctaaattttgtttttatagaaattttttatactgattggttcatagatggtcagttttgtacacagactgaacaatacagcactttgccaaaaatgagtgtagcattgtttaaacattgtgtgttaacacctgttctttgtaattgggttgtggtgcattttgcactacctggagttacagttttcaatctgtcagtaaataaagtgtcctttaacttca

SEQ ID NO: 315368 - DNA, 1324 bp, Homo Sapiens
  misc_feature (208)..(208): n is a, c, g, or t
  misc_feature (506)..(506): n is a, c, g, or t
  misc_feature (698)..(698): n is a, c, g, or t
accacaggtgatccaggtcgactcgattatgatcggcactagattccggtgtgaaccgccttgcaagcttcgtatcgccggcgagcacaggctcgctatttcgcggcggagacgtatctgcgagcgcacgaaaagagaaggcggggtgcaaaccaaaaaagatcgaccaagagaggggtatccaaaagtgaagcgagggttggtgcantcgtaggggagggcgcaacgcggttgcacacagtggggaagggagcgactagtgatgagctttgtcgccattccgccgtgaaactttcaacaaattgccccgtgcgtttatgtggctgtgtccgcctccggcgctgtatctatgatcatcgcgcagagagaatgcggttattcgatgatggttcttgcgcatccgctccccccaataatactggtgccgggggcgtgagaggaggcatactttctttctctgcggggtgggacatagtgtactttcgcagcgcgcagattatcttacncattgtatacccgcctctctcggggccgctcgcgccacccgcatctacaatgtcgacacggggcgtgtggcaccgagtgttttccgcgctgggcacatagacgctccttctattactccgcaccaacttgtgtcgcggcgggtgtggatgaacagccctggatgcgccagctttggaggggcagtgacacangtggggtgtatcgatgtctgcgtgcgagagaaataggtatttggcctggggcgctgcagtggggcaggacgccagaccgaagtggggatgccctccatagaggtgggacacattgggggacacatttcgtaagggtatggggcgcctctaaggtccgggtaagggaagacgttccaccccaggggtgggagctcacccgttcagatgcagggccgtggatgcagggggggaccggtcgtgtccaaggggaggggattgaccgttggcccgcgtaggacagccaagagcttcacacgctcgatgttgcccgggggcgcggggatcgcagagcgggttgctgcggtcgatgttgcgagcatccacgtgggccccagccgccagcagcaggtgcacacaccgcgcctggccttgcagactggctgcgtgcaggggcgtgatggagtccacggtgacctggttcacgcaggcgccgctctcgatcagctgttgcagctgcaggctctcaccccgctgggctgcctcgtgcacaggggtccgctccacccagaaacccacgtcgcccaggaagcagccgtccgccgcccggggctccatgcggctcaccggcggccgcgcggcgactctcc

SEQ ID NO: 315369 - DNA, 803 bp, Homo Sapiens
  misc_feature (17)..(17): n is a, c, g, or t
  misc_feature (28)..(28): n is a, c, g, or t
  misc_feature (36)..(36): n is a, c, g, or t
  misc_feature (70)..(70): n is a, c, g, or t
  misc_feature (79)..(79): n is a, c, g, or t
  misc_feature (120)..(120): n is a, c, g, or t
aacctgacattcttggnacttgtttggnccctaaangcctcaggccaccttcccatcccatctttcctgncccttcctncataaagaccccttgagcacccttgtggaaaagactcaggnctcagtgcccatttttgcttagctcccagatactttcggtacagctgaaaggtctgtgcgggcatcgtcaatcctgtcatgggtttcccgttgaatcttcaggtccagaaagtacgaagcaaggaatcgcagggtaatcattcgttttcggggcatatggaacgggtagtcagtgtcaaggacttggtaccttgggcaccatcaggttgatgacccgtaagtccttctgcaggccatgaccctcatcgttgactccaatgtcaatgagataacgaagctttaagtaggtagacttgagagttgttaggtgcttggaggaaaggcatcgaggtcaccaggctttatactcgagtattgagtcaagtaatcctcctcctgctcgtgggtagagatgtagtcatcaatgaaggggataccctcattgggtccctggcccctaacacaggtaatcctggctactgacatctggcttggtttaatggtagacttggtaccatcattgcgtaactctgcttcctcctcattaagggtgacaaactcagcatccagaccctccaggtccacaatctgtggcatctcattcagcatcagtggaataaaggtagtatgtgttatccgctgcttccgtgccagcgaggcttcagccagcaagacacttgcctcgatagggttcttgatgttcg

SEQ ID NO: 315370 - DNA, 604 bp, Homo Sapiens
gagcccagataccggtacagctgaaggactgtgcgggcatcctcaatactgtcatgggtttccccttgacggggcatatggaacaggtagtcagtgtcaaggccttggtccttgggcaccatccggttgatgatccggcaagtccttctgcaggccatgtcccacatgcttgactccaatgtcaatgagaatatgaagctttcagtaggtagacttgagagttgttaggtgcttgtagtaaaggcatcgaggtcaccaggctttatacccgagtattgagtcaagtaatccaccacctgctcgtgggtatagatgtagtcatcaatgcaggggataccctcattgggtctctggctccgaacacaggtaatcctggctactgacatctggcttggtttaatggtagacttggtaccatcactgcgtaactctgcttcctcctcattaagggtgactaactcagcatccagtccctccaggtccccaatctgtggcatctcattcagcatcagtggaataaaggtagtatgtgttttccgctgcttccgtgccagcgaggcttcagccagcaagacacttgcgtcaatagggttcttgatgttca

SEQ ID NO: 315371 - DNA, 633 bp, Homo Sapiens
  misc_feature (487)..(487): n is a, c, g, or t
  misc_feature (500)..(500): n is a, c, g, or t
  misc_feature (543)..(543): n is a, c, g, or t
  misc_feature (551)..(551): n is a, c, g, or t
  misc_feature (568)..(568): n is a, c, g, or t
  misc_feature (612)..(612): n is a, c, g, or t
tctaatgagataaataacaaacgatattttatttttattttataaaacatgcagtttacaacaaatttttaaaaaatggaacaaaacttgggacaggcaagtgggatggaagacagatgcttctcagccatcagcaggaataaatgaagccggcagccaagctttgtccagggatccaaaggcccttttggcaatgggtattggcaacactggtttgcttgggccaccaacactctacttgctggcccctccagggtatccctgaaggcagttgggtgacttgtgctaagtcttgaactactgtgggtatcctctgtcacctgtccaggacttcaatccctagccagctaggaacttacagttatggttccaggagcttctctgcctggatattagtcacccaggatattaagaataccaattactttccatctgggtcaattctagactccatgtctgtaccactgttttgcaaagaatgaagaanggatgaatctggntcctaagaacctttggcacaattctgctgtgttccagttcaanttatagcncattctgtgacccagancctgagcacgtccagtactggaagtggacaaggtataggcaacntaggaagccatttcccagttc

SEQ ID NO: 315372 - DNA, 432 bp, Homo Sapiens
  misc_feature (406)..(406): n is a, c, g, or t
  misc_feature (415)..(415): n is a, c, g, or t
attcggcacaggtaaaatacattttatcgaaactctccattaactataacttcctcttgcccaagtctaaaatgttcagggaaggtccatgcccttttttctcttgcatttttccttcataggaagtatgagaagatgctttttctccactcagcttgaatcatgcttttggttttgtctctgacagatgcagctgtcttctcctcagtgctggcgctctgactacccttcccaaagaaccacggccctctccctttactgttctatagccccagaactgggagatggcttcctaagttgggctataccttgtccacttccagtactggacgtgctcaggggtctaggggtcacagatgggtgctaattaattgaactggggacacagcagaatttgtttgcaaangtttcttanggaggccagatttcatt

SEQ ID NO: 315373 - DNA, 881 bp, Homo Sapiens
  misc_feature (40)..(40): n is a, c, g, or t
  misc_feature (65)..(65): n is a, c, g, or t
  misc_feature (166)..(166): n is a, c, g, or t
  misc_feature (241)..(241): n is a, c, g, or t
gccccccgggctgggtcagtggccctgtcccagggcctgnaggccctgcagggtctgtttgctcntgatcctcagggtgggccatgggacaggtgtgtgccagtgccagctgtgtgccagtgggcaggtcacagcttcttcttggggcagtgctgcagggccgccntcagggcctccgtcacgcggtccacattctcgcgggtggcattgcagcccagcaggccgatccgcagcaccttcnccgtgaagggcccaaggccacccatgatctcaatgtcgaagtggtctatgacgtagctgacgatgtctctccagtcatagccagcgggtacagccacagtggtgactgtgggaagccggagcgccgggtccttcacgaagagctgcagccccagtgcctgcaggcgcccatgcagatacgccgcggcctcgcggtgctggcgccagctgttctccaggccctgttccgcaatgagggccaggctctctctcaggctgtacaggctgatgacggggattgtgtgatggtacatcctgggctggtcgtcacagccccagaagggccagccacttggccttgtcactgaaggagatgagcgaggtccctggaggggcgttcagggccttctgggagcccgagtacaggatgtcgatgcctgtagatgggtgggctcgggacgggtgagtcccacctcagggcaggccagtccagcgggatgcctgcctagctaatgggctggtaggctacgaccctaccacgaatccgtacacgatagcaggggagatgtggaagggagtcctgggttcaaatctgggcactgctgcgtggcagccatgacctcaggcctgagcgagcgcagcttctccctctgctgtgctgg

SEQ ID NO: 315374 - DNA, 1019 bp, Homo Sapiens
  misc_feature (967)..(967): n is a, c, g, or t
  misc_feature (987)..(987): n is a, c, g, or t
  misc_feature (1003)..(1003): n is a, c, g, or t
  misc_feature (1006)..(1006): n is a, c, g, or t
tctcacctctgtgtccgccctgctgggaaatattccaggctttggccaaggccagtgcagccccaggttcccgagcggcaggttgggtgcggaccatggcctctcacaagctgctggtgaccccccccaaggccctgctcaagcccctctccatccccaaccagctcctgctggggcctggtccttccaacctgcctcctcgcatcatggcagccggggggctgcagatgatcgggtccatgagcaaggatatgtaccagatcatggacgagatcaaggaaggcatccagtacgtgttccagaccaggaacccactcacactggtcatctctggctcgggacactgtgccctggaggccgccctggtcaatgtgctggagcctggggactccttcctggttggggccaatggcatttgggggcagcgagccgtggacatcggggagcgcataggagcccgagtgcacccgatgaccaaggaccctggaggccactacacactgcaggaggtggaggagggcctggcccagcacaagccagtgctgctgttcttaacccacggggagtcgtccaccggcgtgctgcagccccttgatggcttcggggaactctgccacaggtacaagtgcctgctcctggtggattcggtggcatccctgggcgggacccccctttacatggaccggcaaggcatcgacatcctgtactcgggctcccagaaggccctgaacgcccctccagggacctcgctcatctccttcagtgacaaggccaaaaagaagatgtactcccgcaagacgaagcccttctccttctacctggacatcaagtggctggccaacttctggggctgtgacgaccagcccaggatgtaccatcacacaatccccgtcatcagcctgtacagcctgagagagagcctggccctcattgcggacaggggctggagacagctggcgcacaccgnaggcgcgcgtatctcatggngctgcaggactgggcncancctcgtgaagacc

SEQ ID NO: 315375 - DNA, 1505 bp, Homo Sapiens
  misc_feature (1118)..(1118): n is a, c, g, or t
tattgaggagaggtggccaggccctttattaaacattcccgggaggctcatggcctggggactgcagctcatttggaaggcactgggttttgcgcccaagtggactgtttccaggaggtgccactggagggaaaagggctgcctggggccagggaggctgcctggttctgcctcccgggctgggtcagtggctttcctgtccccaggcctggaggaccttgcagggtctgtttgctcctgatccctcagggtgggcatgggacaggtgtgtgccagtgccagctgtgtgccagtgggcaggtcacagcttcttcttggggcagtgctgcagggccgccctcagggcctccgtcacgcggtccacattctcgcgggtggcattgcagcccagcaggccgatccgcagcaccttccccgtggagggcccaaggccacccatgatctcaatgtcgaagtggtctatgacgtagctgacgatgtctctccagtcatagccagcgggtacagccacagtggtgactgtgggaagccggagcgccgggtccttcacgaagagctgcagccccagtgcctgcaggcgcccatgcagatacgccgcggcctcgcggtgctggcgccagctgttctccaggccctgttccgcaatgagggccaggctctctctcaggctgtacaggctgatgacggggattgtgtgatggtacatcctgggctggtcgtcacagccccagaagttggccagccacttgatgtccaggtagaaggagaagggcttcgtcttgcgggagtacatcttctttttggccttgtcactgaaggagatgagcgaggtccctggaggggcgttcagggccttctgggagcccgagtacaggatgtcgatgccttgccggtccatgtaaaaggggggtcccgcccagggatgccaccgaatccaccaggagcaggcacttgtacctgtggcagagttcccgaagccatcaaggggctgcagcacgccggtggacgactccccgtgggttaagaacagcagcactggcttgtgctgggccaggccctcctccacctcctgcagtgtgtagtggcctccagggtccttggtcatcgggtgcactcgngctcctatgcgctccccgatgtccacggctcgctgcccccaaatgccattggccccaaccaggaaggagtccccaggctccagcacattgaccagggcggcctccagggcacagtgtcccgagccagagatgaccagtgtgagtgggttcctggtctggaacacgtactggatgccttccttgatctcgtccatgatctggtacatatccttgctcatggacccgatcatcatgcagccccccggctgccatgatgcgaggaggcaggttggaaggaccaggccccagcaggagctggttggggatggagaggggcttgagcagggccttggggggggtcaccagcagcttgtgagaggccatggtccgcacccaacctgccgctcg

SEQ ID NO: 315376 - DNA, 916 bp, Homo Sapiens
ttatcatttattatttttatttggacaacatatatacatatgtacaaaatacctactgtcagaatcctcttttataatttcatttgatttacaaaaacgggacagcaaaataacttaggtcactaatactgtacaaaaataaaactgattaaacagttgtaaagatcagtatcttacagtgttacagatcatctgatgtgaaagaacatctcaatctatccgagtgatgagtactgtgctaaatctatctgcaaactgacaaactaatcagtttctgtaattgtaactaccaaatagaattctcaagagaagcatgatgtggagctaaaccttaaagccagggcatcattccacaatggtgaagggctttcttcttccctaaccaaagagaggagatatcttaactctaaaactattaaattttccagaatatgacaactacttacagtattagataaaacaacttttctttctttttaaacacctgcaatagtctttcaaaaattcagtttggttaaaaaagtaaacaaaaattactatcctgcatttggattttcataagttaaatccatggtctttttaatataaaaagtaattgtttcatagttttagtgttcaatgaactctagtagtcctatttgaaccatatcttgatatagtaaatctaattagaatgctggttcctgttttgtgacattttaaaacaggatttaatcacaaagaataaaaaggcttgagtttatacgttacattactataacatataagagaatatcaaatgtgtgtttgtccaaccaacttggaaagggcaaggtaaccacttttttgggggaggtaaattgtggcatttttttaaaccaggttgctggcctttatatccctctaggtgcttggaccaaaggccccctttgggttt

SEQ ID NO: 315377 - DNA, 1286 bp, Homo Sapiens
  misc_feature (39)..(39): n is a, c, g, or t
  misc_feature (49)..(49): n is a, c, g, or t
  misc_feature (77)..(77): n is a, c, g, or t
atctcgtgcttcatgtgagtcgacgcgtaatatacactngacaccgcgngcaatacgggcgtctcagccgcgcacgntgtagtgatgtgtatatattctccgtcctgtctgtggtgtatctctagtgtctcgctcacgtcattcgtgatgtgcactcgtggattctcaccttacacctctaatgcggtgcgctctaagtgtgctcttcccggcggttgccctctcatagactgcggtaccataggatcttgatactccaaaactcccgttctacgtcgaaatccgcttcgtcaacgtatgatgcgtacaatacgattagataatgcgggtcgtcacgtttaagccggtgcgcatagctgctgggcgtcacatgctacggagtcatgcacacctatgagggcggatgattgcggcacttcacttctccggctcctagaatgctaatctcctggaccgcgcatctatctctacagctcgccccaattcttcttgcgataattgttttgagatgattccttcctaccaccggtctcggcctgggcagcttctcacccgcagtggctcttagacttttcgccttctccgacgccctcttctatgggtgtccccgttccacgcggtcccgcgttcactgcacctgcgcctaggcccatcttagaagttcagctcaggagcccgtattaggtttacccccgggccgtttgtttatgtggggaaggatacccagcccgctcgtcccaggccccggaattggcctaggagaacccgcctatggcccatattccctttgaccttccgtggcccgcggcgcccagcggaagggtctagaaaaacttattcgagggccgaaggcggcccgacatgctttttcttatctttttcgatcgattataagattttgagttaagtttaatggcagttgtttgacactctgaagttgctcattcatgttgtttcttggggagagggagctggacaggcaaattttgctccttggacttttagagtatgttacatattggctccaatgatttgcttctcatctggatatcccatatgtctttttgaagtctcttgctctcattctcgaatccctccttgagaaggcgttcctgttcctgaagtttaagagcgagggtcttctcttgctctgccattaactgggccctgtccctctccatcttctcagtcaattgtttcacatgttcctgataactcttctctttctgttccatcatctcctcattcttcttttgtatttcctccaacattttaattgcagcttc

SEQ ID NO: 315378 - DNA, 395 bp, Homo Sapiens
  misc_feature (305)..(327): n is a, c, g, or t
gattcaaacctttctcttctttttgattagaaaataatatcctcagaatggtctaatctctaaaaccaatcatcctcttcagacttccttctgttatctaaatgcaggtggtattgcctaaggtcctggcttgaccctttaccctactctaatccttggcaatcttggcctttcctaaagcttgaactctaataaaacattcttaaatctcaactagctttaatttctataccaacctgcaagtctgcagcctcagctgcaccccaaatacaccttgactttgtaccagcttatcaactcatccnnnnnnnnnnnnnnnnnnnnnnnctcatcactactttctccttcccaaactaattctttcactaatactttctaacagtaccagcattccc

SEQ ID NO: 315379 - DNA, 555 bp, Homo Sapiens
cctttcctgaaaccagtagaccctaatgatgcaccagattattatggtgttattaagaaacctatgaaccttgccaccgggaagaacgagtacaaagacgatattatgaaaagctgacggaatttgtggcagatatgaccaaaatttttgatactgtcgttactacaatccaagtgactccccattttaccagtgtgcagaagttctcgaatcattctttgtacagaaattgaaaggcttcaaagctagcaggtctcataacaacaaactgcagtctacagcttcttaaagttcagcgtgttaacctaacataaaacacagcaagaatctggttgtctgaactattttaaattaaggagccagatgtttttagtcaggctatcctgacaagacttgacctaaacttcgtttttattggtcataacagtccaattatattcttggccaattctttccaaacggacaagaaaaaagccaagtcaacgacaccattatcttgtcaagatcagaatggttttactattgtggcagaagcgagaaaactttgtttattgg

SEQ ID NO: 315380 - DNA, 904 bp, Homo Sapiens
  misc_feature (712)..(744): n is a, c, g, or t
  misc_feature (767)..(767): n is a, c, g, or t
  misc_feature (777)..(777): n is a, c, g, or t
  misc_feature (784)..(784): n is a, c, g, or t
  misc_feature (796)..(796): n is a, c, g, or t
  misc_feature (823)..(823): n is a, c, g, or t
  misc_feature (834)..(834): n is a, c, g, or t
  misc_feature (843)..(843): n is a, c, g, or t
  misc_feature (849)..(849): n is a, c, g, or t
  misc_feature (858)..(858): n is a, c, g, or t
  misc_feature (889)..(889): n is a, c, g, or t
atcacactgagagatttttaacatatcagtggggaaatggggttcttgaacctctggaaaacttgaagctgagattgttcaggggtccatgagtctgatgttggtaaacattcctcatgtacaagccaaagattatttgtataaattttggaatggtgatgtgaaccttaggtatgaaaaggcagtaacatataacaagaaaataattttctagatctggggcaacagtgtgcaaataatgtccccagtagagaagcaaatccttttcatggactctagggcttgctactctgagatacaatgcctctaatttcatgctatgtggctgctttgtctttgatcagatttagtgtcttaggtaattaaatcagaaagtctatttagctattctagaagtgtatgtgtaggtattgggtggttggggttctttgagcgaacttgtcagaaactccattcttaacatcagaatcagggcaggattgaaaacattgtggctggatcttgaaattgctataacatctattgcagaaaatgataggtcagatggatagcaataataattatatatcagatcttagtaacaaaattaccaagctttatctagtggatatatgtaaaagaatatttttaaatgtccagcattgatgtattttctttaagaattattacagtatataagcattctttgggaatacagtataaaaacataaannnnnnnnnnnnnnnnnnnnnnnnnnnnnnnnnggtcaaggatgaatcctcccctntaaaatattnattttcncctaaatttcgnggtttccctggcacataatagcactgnccccaacttcngagatggcngatgcnggtaaaaanccaaaaggatggatggggatccggaaatacntggtggaatggaagc

SEQ ID NO: 315381 - DNA, 1505 bp, Homo Sapiens
gtattcttccatactttattataccataagaagcaaacttctgaaggagatacaattaaagataccacaggtgtcctagcttgtcaatattctgttttatcattttcattaacaaagcagattacaatgtagccctaatttgcattataattagttgttacaagacactgcacattctcctgaagacacacaatgatttccaagatgccaggtcactcttccaatcagtgaatggcgagctcactggcaggtgcagggctacttcctgtattccaatgatgtgcctgaaatagcgctttgcaagatgagcgtggattatgtggacacaattttgaggcaatctccattacacatttggtagaagactgcctaacttaatcttactattagtgtattagtgttgttatattatgaagacatattatattccattattctgcttagctcaaggaagaataaagaatttggaccaaaattataaccagattatgagcaatttcctaagcaaaagaaacaaagtaaatgctgaggttaataaagatgtaataattctcttcacatggcctttactgtttgtgaactgtgtaatttaaaatcctgagcttaacaaaaatctttataaatcaactcatcaaaacaggcatttggccaataagaatttaatttcacatcaataaaactttagactttagatttatttagggctgtttgcatatgtttatagaatagtttactctaaaagatgacaagacagctccccctcagtgagaccctggcctaaatatatttgctttatttatatagcaagaggataacattaaacatggaagctttcaatttgtggcactgaataatctacacagggcatccttcaaaggctacaattaaggatccacctaacttttcagcaatacaagcccgattgagatcttctggtccatttgcttgacattcatgttttatgccttgaaatttctttttaattgcatccttggagcttgcatagatcattttacttttcagaggtgctagttctggtgcccacaaaaaaaacatcaactcttcttttctggattcttttgtttcaaagcttgcatcatacaaagcatagcgacaatctttttcaggaagcattcccacaaaatgcttgaaaggatcagttatggttacaccaacatctccaaccaagatctctttgccttcttctacaatgatgcactttttgtctgcactgagacaaaaaatgacagccttctttcttttcttgatttcttctggtgtggagcatttacgaactttcatgtcataaaaaatgcgacatacttcatcagctacttgcactcctgaggccatcttcgccgcggcggtcgcagggacgcgggggagggagccggcgggcagcgagtatgcagaccgtcctcctcacggctgcgggaccgagagacccagcgctgagctgacgcggcggcgcgagcttaccccggggcgggcgcgcctcaggacgg

SEQ ID NO: 315382 - DNA, 661 bp, Homo Sapiens
  misc_feature (573)..(573): n is a, c, g, or t
  misc_feature (633)..(633): n is a, c, g, or t
ggaatgtgaagaaacatgagacagtagccagacacccaggaacaccttctgtcccatgctctgaaattcttttacggctctactttcccttcagtgatctttcttcaagatgacagtgacagccaaaggctttttcatagcttggaacagaccgtatgatctgattgttcttccattgctttggggacacaggaatatctgtgtatttttgagaaactgtttgttaagctattttttaagttccctttttgcattatgtctaaggcgtgtaagagcagtgggatttggctcagaatcccaggaacaccagaacagatgttacatgttttctgctttgtgatttcccattctatagaggttttaaatgtcattctatagaaatttatactcagtaattttataagaacactagacatctccctaaatgtaagaaactgttattttttattaaacatttattggtttagtataaacagagactggtaatttaaactctgccccaaattctcaactgtagtgtggtttagtggatctgttcacttctggattagtcaagtttcacactggttacanagacgtacctgagactgggaagagaggttaactggacctaactattttcacaatgcttgngaggccctaacaagcagagtgaggagcc

SEQ ID NO: 315383 - DNA, 675 bp, Homo Sapiens
tgggccttctgaagacttctatttagagctgcctgttacaacgataccactttgatcagctaaaccctgaaaacaaacatgcacaaaaagagaagtccaataactgactgcacagcagggctctctggaagaaaccagctcttggctgagttgaggatgtgagggaaaagcctggcagagaggagctatcagagcagggtgtggcagacagcagtggcagagtggactgaaggagaggggcctgcacagtgaagggcccagcttatcattcaaggcaccccaggccaccatcctggccctgcttttcatgaccttcacggatatgggaaagtcacttgacccgttagacctcggttgcctctttgatcaaacgggtatcagaaatccaaaattccaaaatccacagatccaaagagctccaaagtcaagccatccccaagctcattgggcaggaaaacctgacctgtgttggtgggagatgacttacagacatgactgacacgcttggtgtgaacgttcacatacttccctgcagaaaagttaaccaggctgctgcacactgctgtgctgagcactgagggtgccgtgtgccctgtggagtagagatcatattgcctttgcaactgaaaaatcctgaatctcaacacacacctggctccgaggggatcgagttgg

SEQ ID NO: 315384 - DNA, 463 bp, Homo Sapiens
  misc_feature (52)..(52): n is a, c, g, or t
tcgcggcttccctagattaggcttgggaggcaaggggaggcctcctgacttntctcactgccttcgttaatataaagatgaaggcacactccacaacttccttctggccaggcccagacatgtctgtccttgtgagttaaaagcttccatgggagccttccttcctaatcaagatgcaaatagtacggtattccgaacagacactaaaaatagctgtcatctcaaagaatccagtgcttgtgtcacagtatgaggaattagatgctggggaacagcgtttaatgaatgaagccttccagccagccagtgatctctttggacccattaccttgcattctccatcagattggatcacctcccaccctgaggctccccaagactttgaacagttcttcagtgatccttacagaaagacaccctctccaaacaaacgcagcatttatatacagtccattggctctct

SEQ ID NO: 315385 - DNA, 1966 bp, Homo Sapiens
  misc_feature (1634)..(1642): n is a, c, g, or t
  misc_feature (1750)..(1750): n is a, c, g, or t
  misc_feature (1764)..(1782): n is a, c, g, or t
gtgggcatggctattctcattgcagtggtcttccaaatatttatgtcaatttcaccccaagctgtacctttgagggagaaaacactgtcatgatgctccagacggctaggttcctgatgaaaagttatgatcaggtgcactcaggaaagttggtgtgtggcatggtgtcctatttgaacgacctgcccagtcagcgcatccagccacagcaggtagcagtctggccaaccatggtggatatcaacagccccgaaagcctaaccgaagcatataaactccgtgcagccagattagtagaaattgctgcaaaaaaccttcaaaaagaagtgattcacagaaaaagcaaggaggtagcttggaacctaacttctgttgaccttgttcgagcaagtgaggcacattgccactatgtggtagttaagctcttttcagaaaaactcctcaaaattcaagataaagccattcaagctgtcttaaggagtttatgtctgctgtattctctgtatggaatcagtcagaacgcgggggatttccttcaggggagcatcatgacagagcctcagattacacaagtaaaccagcgtgtaaaggagttactcactctgattcgctcagatgctgttgctttggttgatgcatttgattttcaggatgtgacacttggctctgtgcttggccgctatgatgggaatgtgtatgaaaacttgtttgagtgggctaagaactccccactgaacaaagcagaggtccacgaatcttacaagcacctgaagtcactgcagtccaagctctgaagtgtcacaaggacaagtttaatctgcttcagaaagcgcctgtgtgcaactcaaattttgtggaatctttttcgaattcaaatagctatagagcaaatgataaattgacccctttttataaatggagggaaaaaatgaacagatttcagagattaaatgaaaaaaagcagatgttttaagtgcaattaacactgaaagagacctgttaaaccattcagaaaaagcttaagaaatgcgatatgacttccttttgtaatgctgctgatcccagtagactatgacttttgataattagcagaatttaactactgagtagttgattattttcacattttaattgctaatcactggctatataagtgtttttaagcaaaggtatttttgaagtggtgtagaacccttccaagctttcctgctcagtgttctaccagacttaccctggggcctggcttaaaagcaggattgaagaaaagggactgggggaaggaaacttattggaaaacttgatgcgaatgagtttctgcttggcacagtctctgcctgcttgctctcctttgctgatggattgcatttatcaaactattcatgctagcatttttccaacgagggaacttattccgcacgggcctactgtaggaccattgtctcgtgtaattaggaattttccatttgaaggattgctaaattgtcacagtagtaggaagtatagggaaacctctcagctgtggcactgttgtagctttggagtgcagagtgtaactctgggacaatcagatttcacatattctgtcatcttggcataagccattaaaagcttggagattactgtatttggcattnnnnnnnnntgtcacttaggtcagcactcccagacgtagcacagaaaaaccctttgacacaaaccatgtgttctgatttttggttcagaaaatattgaaactgtgagttgttttttntttaacaactgggnnnnnnnnnnnnnnnnnnnctatagttagaaaaatggaagttccataggttctatttcttactctatgtatggctttgttttcagtctatttctaggagctttctctgaatcgctaattgtcctttcagttgaaatctaatttatacaatcattctatacttaaaggttaaatacatcttaattaattttttctcggcacgag

SEQ ID NO: 315386 - DNA, 1357 bp, Homo Sapiens
  misc_feature (501)..(501): n is a, c, g, or t
cccccgactgtagtcaagatatagggtcatgtgtgtctcctcacccaagaacaatgaaaatatcttggattacctggataatgactgccacactgaaaactcaattatactggtatagtgagaggttaatttcaaaagggaaagagttctgtatctttatagctagtaaagatccctcaggctctattttttcaatataacatagctggattgaggattttaatttttgtttaagggacaatttttgttgatgggtttgccttctgccatgaagctccaatttgaaatacttatgaaaatacttaacacatgttactaattaccctacagattattaaattcaagaccagtcacaattcaagattacatcactataatttacttcctacttcctacatgttacatagtttccttgctttgacttccttgttttccactttcttcattaaaattttttttaactggagtctttaatcaaagggcaaaagtattcgtaagacntgaatgaaacacaacacaaaaacccacaagtgcttgcctttgtcaaaagtgcacattttaagtggcttaatacagctctatcgactgccctcagtggaaggggaacactccaaatgtcaggcaggttgacttactcttcacatagcactttgttctcttagagaaatgtcctgtgggaagggcccgaagcacaggtgacacgcagagcagagagggccctgggaggaaggcaggagatgatggcattgccatatgggtgaagaagatgaggttagatgtaaaaaccaaacacaagttgtgaatgcttgttttcctcaagcagtgctgggcttggccctaggaaggtactgacatgtgagggagcactgatggggcagcaatcctctggggtcaaccctggtgcacaccgaattcccttgggctctgcccatggacccaccatgtttttgtgatcagtgggggaaccaaggtagttcaccccaaaggaccacggctctgatcaggactgcactcaaagggcccaaggagcatctcctcgctcagcggctgcacagggggaacagtgcatgcatcaagacattggtcacagaggaggactgctggctttgaacaaacacataggattggactatggacaatattccaaacaagacacagatgtgcacagtgttttcaggtaacacaagacattttcatttcctgcttggtgcacagtttacatgaaagctttggtcctgagagtccttttgcgggaccatggagacagtcgtggacacacatgatgatggatgagacagagaatgatgagcagaacgtggaggatgtggaggtgctcaggatgagggctgggtctcac

SEQ ID NO: 315387 - DNA, 637 bp, Homo Sapiens
  misc_feature (333)..(333): n is a, c, g, or t
  misc_feature (395)..(395): n is a, c, g, or t
  misc_feature (551)..(551): n is a, c, g, or t
  misc_feature (612)..(612): n is a, c, g, or t
cttggatgtacctgcccccaatccatgaaccaagaccattgaattcttggttgaggaaacaaacatgaccctaaatcttgactacagtcaggaaaggaatcatttctatttctcctccatgggagaaaatagataagagtagaaactgcagggaaaattatttgcataacaattcctctactaacaatcagctccttcctggagactgcccagctaaagcaatatgcatttaaatacagtcttccatttgcaaggggtccacgagctgtttactagggatccctcatctgtcccttcgggacctggtgctgcctctacctgacactcccttgngctccctgtaacctcttcagaggccctcgctgccagctctgtatcaggacccagaggaaggngccagaggctcgttgactggctgtgagttgggattgagtctgtgccacgtgtttgtgctgtggtgtgtccccctttgtccaggcactgagataccagcgaggaggcttcagagggcactctgcttgtattagagattacctactgagaaataaggnttcgcttcgagcagaagggcctgataagctaaagtttgcaccttcccccacccttagatgntctaaaggctttccattggaatcta

SEQ ID NO: 315388 - DNA, 705 bp, Homo Sapiens
tcagtggggcagtcattatccaggtaatccaagatattttaaaatctgtcacgtagaacttggatgtacctgcccccaatccatgaaccaagaccattgaattcttggttgaggaaacaaacatgaccctaaatcttgactacagtcaggaaaggaatcatttctatttctcctccatgggagaaaatagataagagtagaaactgcagggaaaattatttgcataacaattcctctactaacaatcagctccttcctggagactgcccagctaaagcaatatgcatttaaatacagtcttccatttgcaagggaaaagtctcttgtaatccgaatctctttttgctttcgaactgctagtcaagtgcgtccacgagctgtttactagggatccctcatctgtccctccgggacctgggtgctgcctctacctgacactcccttgggctccctgtaacctcttcagaggccctcgctgccagctctgtatcaggacccagaggaaggggccagaggctcgttgactgggctgtgtgttgggattgagtctgtgccacgtgtttgtgctgtggtgtgtccccctctgtccaggcactgagataccagcgaggaggctccagagggcgctctgcttggttattagagattacctcctgagaaaaaaggttccgctttgagcagagggggctgaatagcagaagggtt

SEQ ID NO: 315389 - DNA, 407 bp, Homo Sapiens
gtaatcttgaattgtaactgttcttgaatttaataatctgtagggtaattagtaacatgtgttaagtattttcataagtatttcaaattggagcttcatggcagaaggcaaacccatcaacaaaaattgtcccttaaacaaaaattaaaatcctcaatccagctatgttatattgaaaaaatagagcctgagggatctttactagttataaagatacagaactctttcaaaaccttttgaaattaacctctcactataccagtataattgagttttcagtggggcagtcattatccaggtaatccaagatattttaaaatctgtcacgtagaacttgggatgtacctggcccccaatccaatgaacccaagaccattgaattccttggtttgagggaaccaaccttg

SEQ ID NO: 315390 - DNA, 355 bp, Homo Sapiens
cttactttaaaacactcacatttcttagctgcaggtgatggcctcagtcattttaatacagcctggaatgagtttgcttattacccagtcactttcgtagtgaatgttcaaaccccaaagcaaatgtttgcatctccttgtccataaaggagaaagccaggttataggagaaagagagagaaaggcgcatgtctgtttgcacagagagaggcaattttgtctacctttcgagaatcagttataaacagaagggcctcttaggattttgagctctcctgacaatgaaggatcacccactacaatttgttgaaggaagggagtgtcagagatatgctttaggtgtactttggctgtt

SEQ ID NO: 315391 - DNA, 1163 bp, Homo Sapiens
  misc_feature (1007)..(1035): n is a, c, g, or t
atgctgacatactcgcagtggaaggagtagatgctgggcccctgtgacctggaaagcattgaagtaggcgacggagccattgctgtggacttcgaggcgctccatggtaaaccagtgccgggcagacactgggtagaggcggttggccagaatgaacttgaatgtcactgtggtaccaaagagtcgttcataggtcagtgagagcctggcaaaggagtcattccagaaggagccagtcaggttgagttcctgcaccccaaaggtgaggggagtcaggtcctcccactggtccttgtacgccacagagaagttttgggcccagaacaggatcccggggaagcggtttcattgtaactcccaggaggatggatcacaggtgatactggctgtttttgtagcagctggcgacctagccctccggccaccacggctacatcacgggccaccctggaagggcggaccgctgtgagggccgctgtgtatgggacatcttcggacttgagtgtgctcaggacctgcccgatgacctcatcgttgcctgtgaggacttccctgggtgccatcagaccagagctggctgtgtagggcaggcgaatgagcagcagagcagggaggctggcattgagcttcagctcccgcagggtggccaggtccacatgcaaggggctggccccgagcttctcctgcaggtaagtggtcagagtgctgactgcataccagtcgacggcaggaagcaccagtgaggagggggccaggtccagggcattctctaggttagaaaaggcgctgtcctgcttgtttccaaacacaccgccatatgctgtgaaatcctcaatgctcagcttgtcctgcaggaacagcagcacattcctgggacccagctccagggcgggatctaagtaggtagagagctgcaagtcgctggtgatgtggccttcatgagtgtcggccgcaggagcccacaagtcccggtcactcgaccacagcaccagcgggacctgctgctnnnnnnnnnnnnnnnnnnnnnnnnnnnnnaacgacaaaaacaccggcagccacggcatgcgccagagcgcctgggcgcaccgcggccccatccgcactcgagccgtcgccatggccgccatcatagcctcagcctccactgcctcagcggcctcgac

SEQ ID NO: 315392 - DNA, 1959 bp, Homo Sapiens
  misc_feature (684)..(699): n is a, c, g, or t
  misc_feature (712)..(712): n is a, c, g, or t
gccacccgcaggtgttcgcgaattgtttacaaggcgcggtgggcccagaatatagtggagagcggaattgtgtgtgtttggcggcccgcccggtttttttgccaccccaagtgggggccgaaaatgtattttatttagctgccgaagggcgtgacccaaagggttcgcttggaatgccccgccgtcgggggggttttcgaggggtttccatcgcaatgggccgggttgttggaaaggggggttttcccaaatgttcggcgcacggagatagtcttgtaaagggaaaatttggcacaaccaagtgacgtgtgggatataaaggtgggcacaggggcacgggggcggcggttacatttttagatttattcggaagcctcgacgccttgggggactttcccttgggttggattaggagtgcgcaagtgaaaagggcccttcagaggaatctctcccatttctgggagattatgttttcagagaaccggcttcgggtttgaccccccggggcggttttttttatatggggtgaggaatcccaaggcatctaggtcataggacccacgaatcttccctagggaacccagggtattggcccatgttccaacttaccttactgggccgcggcgcgcccaaaacgaatgggtttagaaaggtttttcgaggggccgaggcgggccgacaggnnnnnnnnnnnnnnnngtttgttggttcntacgacccgcgtttattttattaggaaggaaacaaccaagcaccccatgctcctgcccggcactcccggtgggaacatgccaaacagccggcgatcgcacccagcccacctgtcgtggaggtcccttccttctcaggccacagaaataaacccgtgtacttcttattgttagcacaacatcaccagaaaacgataacgacagccaagcaggacagacagttaagtagtacttccacactcccaaactcagggagccctataaccttaaggagggagcatttgctacacaaaagcactatccacagccagggatgatgtagccacaagaataaataaggagaaaggagaccctagaattcatgtcccttacgcctcacagcgacgaaccctgggaagctggttggtctagcatctacgcagaatatgtacaccttgttgggagagatgggggcagcccaagaaagctcctcagcgggctgaagagggagcaagatgggctgaggggagcttgcagttcatgctgcagtaggaagaggggaagctcttcagtccagtgcgctgcagggtgggaaagcaacaacacggacaccgtcccaccctcaaacccccccactggcacagggtcacacaatctgggtcaaagaaatagtggggcccttgtggtcatcaaagcgatccatggtcttgaggctgaggatcatgtgcaggccataggtgaagatgaagagcatgaacagggaggtgagcagccccatccagatgccgggggagaagaagctggcacagtcgctggcgtaggagaactgctcccccattacgttgaaagcctggatctggaagtcctgaagcatcatctgccagggagagggctgcgtgcgggccacgaggagactacccttcttgctcaggctgctgacatactcgcagtggaaggagtagatgctgggccctgtgacctgggaagcattgaagtaggcgacggagccattgctgtggacttcgaggcgctccatggtaaaccagtgccgggcagacactgggtagaggcggttggccagaatgaacttgaatgtcactgtggtaccaaagagtcgttcataggtcagtgagagcctggcaaaggagtcattccagaaggagccagtcaggttgagttcctgcaccccaaaggtgaggggagtcaggcctcgtgccgaattcgccacccaggcctcggtgcttttgatggttgtaccccgacgctccac

SEQ ID NO: 315393 - DNA, 854 bp, Homo Sapiens
  misc_feature (486)..(548): n is a, c, g, or t
gcctctgaattccctaatactttgtattcctctgaagtgacttttagaaaattaaacctagaattacatttatatacttcccttctaaaattgaaaactcctggagggtagtggtctagttttattaatctgtaaacctccccaaatacccaacctggtacccagctggaactaaatgacgaacaaaggggtagtccctcctccaggaagtataatggaagaatgaaaaagaaaagatcgtgcagaaaatccatcaacagaatacccctatggggtctttctttgtggtctgtttataccccaacatatattcaccaagacttcctgaaaataattttgaagaaacaaagaccatgaaaaattagctgccagatttggaatggtgtgtttctgtggaggaggggcaggaactaaaggaatggccacatagagcgaccagatttcctaaggagggtaattcattttactccaaaaatggggtaaacnnnnnnnnnnnnnnnnnnnnnnnnnnnnnnnnnnnnnnnnnnnnnnnnnnnnnnnnnnnnnnncaagccaactaaatccaactccagggaagggtccagccaagtgtgttttctgaggtaagaagagctgaagtgaaggaacctgcattggaattctgactccactaattactaataacgtgaccttgggcaagatactcccccccatgcatcctttttcttcagcccagaacaatcccttactagctatgtgaccttgcagctcagtttcctttcgtgtaaaatggaaatcataatagtacttaaccctcttaggtttattttaagctctaaataaggatacatcagagttcttagcacagggcacag

SEQ ID NO: 315394 - DNA, 1248 bp, Homo Sapiens
  misc_feature (183)..(217): n is a, c, g, or t
  misc_feature (320)..(320): n is a, c, g, or t
  misc_feature (473)..(521): n is a, c, g, or t
  misc_feature (961)..(961): n is a, c, g, or t
  misc_feature (1036)..(1036): n is a, c, g, or t
  misc_feature (1070)..(1070): n is a, c, g, or t
gatagaggacgtttattcattatggtaacacataatctgctgaaattcattttgaacgtgcttttacatagcagtggctaacataaaatctgcacagaaatgttacaagtggctccccagcccccacagccgggaagtgccagtcaagatttaagcatccccaaaacaaagcctttattcctnnnnnnnnnnnnnnnnnnnnnnnnnnnnnnnnnnntgactgaagtcagctggctgggaggggagaagggagagaagcacaggaaggactcactggcaggaatagggtgggggatggggtgagacaggccaggggcagnactgtgaaagctgttacctgttgggaatagctaggcacgttatcttaaacaagtgaaggaaaatcgccaaaggagtgaaacttatttatgggggaaaaaaaagcttgggaaattaaaacaatccagtggtcactggaaaatgtctcccttttnnnnnnnnnnnnnnnnnnnnnnnnnnnnnnnnnnnnnnnnnnnnnnnnnggaaagtattctcaaggtaatatttttttcctttggaaaaagaaatctttttccccccctaacctaagcaagtggagctgccactacctaatttatctattgttttgctaagaggtagataaaacaaaagtgaaatggggcttctatgaggaggtccattagagggtgggtggggaggggctgggatcgcccagtggaactcccccaactacaaagacggcctgaatgagtccaaggaccgcgccctcagactcccccagggcaaaggatcctgcttcacctcttctccttctagagccaactgggcccccattgaagactgaaaaagggcccaatggaggtgtaggatctcaaagaaaccctgttgaagaggtctcagctctggtttccccaggcttcctgactttggggctgtgtggtgggttccccaggccaagccnccaggtctcactcccagccagccccctctagaagggaagaggcctttcctttcctcaccatctggtccaacaaanctatagaaagtgagagagggacaagctggaggcnaaaggggtgacacatgggcaaggaaagcagaaagtggggactcacggccagccctcccagcccaatcgatatgggggggatcctgcaggcctgcctgttccccaaggacaaaccttttgtggcacaagcctcaactcacttgtcctggctgggattcatacccttatgcatgagtccc

SEQ ID NO: 315395 - DNA, 460 bp, Homo Sapiens
  misc_feature (422)..(422): n is a, c, g, or t
  misc_feature (435)..(435): n is a, c, g, or t
  misc_feature (444)..(444): n is a, c, g, or t
ataatattttaaattttattttttggaaagtattctcaaggtaatatttttttcctttggaaaaagaaatctttttccccccctaacctaagcaagtggagctgccactacctaatttatctattgttttgctaagaggtagataaaacaaaagtgaaatggggcttctatgaggaggtccattagagggtgggtggggaggggctgggatcgcccagtggaactcccccaactacaaagacggcctgaatgagtccaaggaccgcgccctcaggactcccccagggcaaaggatcctgcttcacctcttctccttctagagccaactggggcccccattggaaggacttgaaaaaggggcccaatgggagggtttaggggttcttcaaaggaaaccctgtttgaaggaggttttcaggttntgggttttccccngggtttccngattttgggggctttt

SEQ ID NO: 315396 - DNA, 524 bp, Homo Sapiens
  misc_feature (116)..(116): n is a, c, g, or t
  misc_feature (173)..(236): n is a, c, g, or t
caagacccatacacaccacagggatggcacaggatgttggggcagggagatgagcaggtggggctcaggaagaggagaggcaaaggaataagaaaggaaaaggaggaaaaagaganaaaggcaagatggggcaggggcaagggagagatggggaggtataggagacagacagnnnnnnnnnnnnnnnnnnnnnnnnnnnnnnnnnnnnnnnnnnnnnnnnnnnnnnnnnnnnnnnntgagggagaaaagggagaaagacaccctgacacagccctttctttcagctgccccatccctgtggtccaaggtagaaatgagaaacaaatccttgctgtggtgagtgggcacttgctgttggccaggtctctgtctgctacctgggtcccgatctgaactgggcgtgggaagcaaagcagccatgggggcaggagacctccctcagaaggtgtgagggttcaggcccctgtaggattgtgggggtgagggtccatgccccacctctgttgcccccaagttctctcctg

SEQ ID NO: 315397 - DNA, 491 bp, Homo Sapiens
  misc_feature (271)..(271): n is a, c, g, or t
ttttaaagaacaacatcactctttatattaaaaagtgcagaacacgaaatacaacatcactctttatattaaaaagtaaggaggtcctggggttaagtacacaaagcacctaagtccttcgggtagtttagtgtcagttctacaaagtaagctttggcttcctggcaccagtgaggctcaatcttctgaagtcttccagaaggcaggcgaggagagggatcaggcagccctccctccctcggtcacagtcacggggcggcctcgggccagnacaggaggagatgacagacgacaaccagacggtaatatccaaggactatttacaggggggactgcttctgaggcatgactacgatcacttcatggaatgccacttctgggatctcgcccttgaccaggagatgagtgaagcagtgggcagatactggcgtagtcccagaggttgtcatgcaggcacgtgagggacatgtgtagggggaggcctgtgtccc

SEQ ID NO: 315398 - DNA, 835 bp, Homo Sapiens
tttgcgatgctactattttattgcaggaggtgggggtgtatgcaccgcacaccggggctatgagaagcaagaaggaaggagggagggcagagccccttgctgagcaacaaaggccgcctgctgccttctctgtctgtctcctggtgcaggcacatggggagaccttccccaaggcaggggccaccagtccaggggtgggaatacagggggtgggaggtgtgcataagaggtgataggcacaggccagcccggtacagacccctaggcgtcctgacaggtggatttcgacaaggtcattgtgccctgccaaggcacagcgtagatctggaaagagcagaatgctttccttttcagatgtggctggtcatggaaggggcagttgtccaagttgggctgggtcttggtacacgtggttcggcccagctccacgtccaagaagtagttcaccccagctacgatctgcttgcgggcgcgcaccacctgcagcgcgcggctgtggtacatgtcgttgctggctttgttgtactcgccgacggcaaagtccagtgcacgccgcacaccctcctcctccacgctggcgtccatggggcctcccaccaggcgcggcggcttgccgggactggagccggccgcggggctcacggccagggccacggccaggatggccagcaggagcagcggggcgcgcaggggcccggccatggtcggctaggacgcgggacgcggggagtggggcgcaggcgagaggctggagctagatagagaggacccgctgcgcctcgtgccgaattcgccacccaggcctcgctaccttaaaccgggagagttactgcag

SEQ ID NO: 315399 - DNA, 842 bp, Homo Sapiens
  misc_feature (211)..(219): n is a, c, g, or t
acccgaagctcagtaactttaatgccaggaaggtggggggtatatcacccgccccccgggggctaggagaaccaagaaagaaggaaggagggcagagccccttgtggagcaacaaaggcgccctgcgcccttctctgtctgtctcctggtgcaggcacatggggagaccttccccaaggcaggggccaccagtccaggggtgggaatacannnnnnnnnaggtgtgcataagaggtgataggcacaggccagcccggtacagacccctaggcgtcctgacaggtggatttcgacaaggtcattgtgccctgccaaggcacagcgtagatctggaaagagcagaatgctttccttttcagatgtggctggtcatggaaggggcagttgtccaagttgggctgggtcttggtacacgtggttcggcccagctccacgtccaagaagtagttcaccccagctacgatctgcttgcgggcgcgcaccacctgcagcgcgcggctgtggtacatgtcgttgctggctttgttgtactcgccgacggcaaagtccagtgcacgccgcacaccctcctcctccacgctggcgtccatggggcctcccaccaggcgcggcggcttgccgggactggagccggccgcggggctcacggccagggccacggccaggatggccagcaggagcagcggggcgcgcaggggcccggccatggtcggctaggacgcgggacgcggggagtggggcgcaggcgagaggctggagctagatagagaggacccgctgccctcgtgccgaattcgccacccaggcctcgctaccaagagggatgggatggggggtgagag

SEQ ID NO: 315400 - DNA, 1560 bp, Homo Sapiens
ctaacaattttacattgacttttatttaataaaaccacctatttacaattcaaaaaagtcctactttgatacactttactaaataaaattaaaggttaactgtacaagcaattaaaacatgatatgtagcaagtgttatcaggagttttcagcaaactatttaaaatagtcaaaaactgagcagttaaaaagtaccttctgaagtgaatgccgtttctaaatgggatcccaatgcctggcgggagaggcagcctcactctactgtgcaggctggacaaaggtcccggccctgaagtcttagactgtgagagtcaacggcatgtgaagtggagtgtgcagacctctggaggagcagcacgtcaatgtctcatttccagtttacttaaaccacacacagaggcagcctctacacttgccaacagcctctgtgccgaggtgttaagggaccctggccggggactcagaacttagaactttctggcctctgaagaggacccaggaaactggcgagacctcatgtgacccctgaacaggtcatacaagccacttctgaactaagattgggaaggtgttccacactggcatgggatcctgttcagaagcggaatacatcgtagtgctatctggagagactgatgtgaaactgcttcaccaggaacacgcagggctgggcgctgaagacacagaagatccccaggggcaatctgaacacactgcacgaggccctttgccgcgccaccttctgtacgacttaaggaacatctttatgtacagtaagaaaatatatacatctttaaggaacggaacgcccgtatcatgaacaaaaataagtacatctgcgaggacaacagcgcacaggcctcaggcggcccctcccacaggcccagctcagaccagattacattcaacatcttgatgtcaggaaatggctacgtctggaggccaccgggacccccccgtgaagacaggacgcctcctccgagaggaggtgagtcagcatttaaaggccgaggcagaaagtggtctccacgatgctctgcagcctccctggagattcagctgagatgtaggggcagagtccgggaaacgtgacacatgatagtgctgggaaggagggcacggggcagccactggctcagcaacctgctcctgcacctcgaggagcattagcgggtatggcaggcataaaaagtccagagaacgaatgccagctcggctttccttccccagcccctagcccaaggctcctgttacaagctatacagacagagccaaacagccctcaacatcagaaatgagatcagcctgggggcaccccctggggtgggaagtgtggctgagaagggccgtggagtgcagagcaccccaaggcacacatgtacgcatgactaaccaagcccgtgaccgggtccgcagaatgctccccaggaccagcctgccagcggaccgccacgtgggccctgcttccagacactggcctgccctttagactgcgcagctgcaaaacggttcatttctgtgattttggataaccaaagtcctcacacaaagttctacaat

SEQ ID NO: 315401 - DNA, 1234 bp, Homo Sapiens
aagccgggtataagcaggcggtcggccggaatcctgggatatcgtcgaccacgcgtccggtttttacctatgaaattcccttttattaaaataacatatgaagaaatccctttacctatcagaaacaaaacactctctggtttataaaacaccttaattctactgctcttttttctccaatcaccagcatctgtttttcagggggtgattttacttttgtgaattccttagcctttcttccttggtgcataaagttaaaatgcacatcagcagaattgctgcatattaacatctcaggactcttctcttgtaaagaagctgaaattcgtactatattggccaaagtgagcgagttaggtgatcttggtttcaatttccgagcctttgttaatatggagaattatggttcatatcagttatgtaggacctttggacccaggtcctacagatagatatggtgtgcccagattttaaaaataccttcaaaaataaaaaatacattcagtgacattttcatggtgggagctcttctttctgatatggcagttacactttttcacttaagtgctttagtttagactaactttacaacttctataacttttggaaccaagtttagtatagtctgattacattccattcacctaactttagacattcgtttagacaccataactggagtgattgtgcttctagatgtggcaaatccagtgttaacacattatttctggctgagattttggaactagcctagtaactggcttgtgttctttaagcatactaacatcactaaatcttaggatttaggattgctgtaaagatgtaagttgtgtatgtttggcaggtcacattgaatggcagtgataatgattaatcaaagaacaaatgtcatccttgatcttgcctaatgtagtttatgtgccaaactttccagggttttgtagtcacctagattttaagctgatagcatagtgcttcagcggttcttctaaccggggtatgcaggaacatggctgcagacacgtttgggtaaacaggcaccttctgacttcttcattgtttcctgtagttctccctcttcccacgctgtcagcgcagtggaagaggttgcacttctccgagagaggacaggtttctgttaagatcaccaagtagctgtgctttaattagagccagacaagctttcaaggtcctttaagtatttgatgatcaactgaacacgtttctattcggg

SEQ ID NO: 315402 - DNA, 770 bp, Homo Sapiens
  misc_feature (705)..(705): n is a, c, g, or t
  misc_feature (739)..(739): n is a, c, g, or t
gggagaagctcttccgtttattgggctgttgagcgggggccgaccgacggccaggagtttcttttctgcgcttgtgcgttttctgttcggtttccttcccgctagcggggccacgagggttgctaggcaacagcccctgggtgacttggtcttagggtcctgtccggcttggggctgatgaaaggagctgtccgcgcccgggctcttccgagaagtggttgctgacagccacaaagtgaaagggagtgaggcggcgtggacgagtaaggagtgacagtgaggattcacatttgggttatttcaagatgagcttcctactgcccaagctgactagcaaaaaggaagtagaccaggcgataaaaagtactgctgagaaggtgttggttctcaggtttgggagagatgaagatcctgtctgtctgcagctagatgatattctttctaagacctcttctgacttaagtaaaatggctgctatatacctggtagatgtggaccaaactgcagtttatacacagtattttgacatcagttatattccatctactgtctttttcttcaatgggcagcatatgaaagtggattatgggagagagggaaggctgccaggcactgcttgtatccctgctgataagaggagggagtcactccagggaataagacaaaagggagaggagggaggccatcaccctctgggcctcttcncatcggtacactttccctggtctctgggtttaantcatggatggcatgggaagctaccaacaggc

SEQ ID NO: 315403 - DNA, 585 bp, Homo Sapiens
ggaaggcctggccaggacgtgaaggaacatgagcgagagcacaatcgcgatatgcgctgacgccaatgatccagtacaggagagtgggcttagcttacaataccgtggacaatattccaacatggtgcgaagagtacagatcacagctctagctcattctggaccaaggccatgcacagcatcttcctcctgaggacttactgctcagtcatatttttgtagacgaactgtgagacttaagtaactccagtgaaggcagccttagatatgcttaacactaatgaggacaatattgttgcatacttctacaaaaaagaaaccaacaggaacattcctgatggagccaacgtgtaactagatgacttagctaatgatctgcatatgtaattgagtggctatcattgaaccaaggcctctacctagtgtgtgcgcagggcacggctataaagtccaactatgtataaacaattgtgacggttgatgttacgtgttcactaaccatcaagttgttacaactcttttacagagttagtgttaccagctgaacaccaaggtatcgtgtaactacactccgtttgctttttc

SEQ ID NO: 315404 - DNA, 763 bp, Homo Sapiens
  misc_feature (43)..(43): n is a, c, g, or t
ttctccactatgaattaggccctcggccaggtagcagatatanagcttaataagatatatggctttccgcccaggtgctcatggtctagtggaaggtcaaaaaaggtgggaaagggaagatagaactttaaaagggctgtgaaagaggtaaccgcacagttataggagcacatgagagagttccccagactgacgacataagtagggcctcctggaagacctgaaccctgagttaagtcttgaacttgaaaatcaggggcgagtcgagcagaaaatgggcaagaaaacaccatatgcaaaggcacaaaggtgttggggaaggcagaagtttgtcgtggagctggatacaacaggagagggtgagacagatgggctggaacagtgtgtgctctgaaaaggatctctgcagcagggcttgagagcacctgaaggaatttccagaaatgccatcatcgtatgtgacacagaatttagaaaaatgactttgtgaagaatggccggaagagggaagctaatggtagagaaacctctctggtgatgggatcatcttaagtctatgagtgaagactataacaacgggactcttgatgggattatggattagggtttatggacccaagatgcaatataattgattgggtcagggtgtggactctagggtcaggcctgtgttcaaactccaactccaccactacgaccaccttgggaaagtcattgagcctctttgagcttcagtttcctctcgtgccgaatcctgcagccc

SEQ ID NO: 315405 - DNA, 1110 bp, Homo Sapiens
acatttaactttttattactttttaaaaatccaaattcagataaattaacacactaggttagaacctcaattgtatttgatacattatatacttgatttctattactaaaaagccagttggaatatggcctatacgaaccaaagagtgtatacaaaatggaagtggtcatcaggcaataattgtttccttggaactctgcaccgactgtccatgctctgtggggacttacacattcaagtttgacagctgaaaaaccaactggagctgcttttccaagaatgttctgttgtccttcaaatagaattccatgttatttctttcttgccttaagctcttatatctttcaaatgacctaagctgatgaactggagtaaacacaaactgctgcagttatcaattagcaagcctagttcaccaatacttcaaaataaacagacttcacaagtttatttccattcctaacagtggaataataacttaattttgtttacttttgtctttgtagatttctgtctgcagctccagtaagaatgccaaatcagatggcttttaggaaatgctcataggagagaactagagttattcctcacactgaatttaagtcttaccagatttctgcaggttcatatgttaacgttctgatctagcctacctgtaagtctagtttatttctgtacacacttccaaatactcttcataaattttcacttctgactgaaatataacaccttgattgataaaatagtttcataactatagaattttagtgaagatataaaacattaatgaatacttgtgttttaatacatcactactcctatttattacatgttccaataaaccaatagaatgaagcactaagacacggtgaaatctaaacttaaaacccagatggaactgccatatagattacaaatgggtctccccaccacagaattcatatacaaaagcccttcggtatgtagcttttcctgaacaaatacattaatacactttttgttttttacatttgtaaaaattcaaggttttaataacatttctttgcaagacatttggtataaggtggttaataaatattaggaaacaaacactgtaccaaaatggatacc

SEQ ID NO: 315406 - DNA, 345 bp, Homo Sapiens
tagcttctctgagggatttattggttcctgtgaaatctgtgaaggccacaaacactccatagccagagaatgacaacatacgattttcttttcagtcttgtagtatccacagtagtgatgtctgtccatgtacaagtgtctgtccagaacacccattaaattccatgcctgctctgtgtgtcacggggaaagggacagagacagaagacagattcactggtggtactttcaaacaacgcggtaggccttccctttggggtctgccatgacaacgataccccaggtggcaatgccttgattctcactgaggccgatgaccatctgcgtaatggtccatggactcgg

SEQ ID NO: 315407 - DNA, 774 bp, Homo Sapiens
  misc_feature (121)..(125): n is a, c, g, or t
  misc_feature (127)..(143): n is a, c, g, or t
gtctaggaaaaccaggctatggacccatgttcccccttaccctactgggggcccgcggcgcccaaaaggaaatggtcctagaaaggcttctcgaggggccggaggcggccgaccatgtttnnnnntnnnnnnnnnnnnnnnnntttttacttctctgagggatttattggttcctgtgaaatctgtgaaggccacaaacactccatagccagagaatgacaacatacgattttcttttcagtcttgtagtatccacagtagtgatgtctgtccatgtacaagtgtctgtccagaacacccattaaattccatgcctgctctgtgtgtcacggggaaagggacagagacagaagacagattcactggtggtactttcaaacaacgcggtaggccttccctttggggtctgccatgacaacgataccccaggtggcaatgctgaggccgatgaccatctgcgtaatggtccatggactcggggggtatcccatcttcatgggcttccgtgccacccagtacacgtacccgcccgcccccatcagccccaacccagaaagcacgcgacagctccagcaggtcttcaacaggcggtgttctgctggggaggtcggcgctccgggtgtagctgggggcgcaggtttggcgggcgcggcggcggtaccgggaggcgcagtgatataggactcaaaaggctgggacaaccgagaccccatgctctggaactcggcctcaaccttgggcgtctttggttcaaactggcgtaaacgacgcccc

SEQ ID NO: 315408 - DNA, 1028 bp, Homo Sapiens
  misc_feature (131)..(148): n is a, c, g, or t
  misc_feature (245)..(245): n is a, c, g, or t
  misc_feature (254)..(254): n is a, c, g, or t
  misc_feature (266)..(266): n is a, c, g, or t
  misc_feature (270)..(271): n is a, c, g, or t
  misc_feature (273)..(273): n is a, c, g, or t
  misc_feature (275)..(278): n is a, c, g, or t
  misc_feature (282)..(282): n is a, c, g, or t
  misc_feature (284)..(284): n is a, c, g, or t
ggtttttttattggggggagggtccacgcaccagggtgtgggggggatttttcctggagaagaaaatatttccccctttctccctcctttttgggcccccccgccacaaagaatgttttaaaaattttttnnnnnnnnnnnnnnnnnnccaagccaaaggaattttgaaggagtagaaagccgtcccggacctggacaatagatttgtaccttttttcagtgaattggacaagatccacattgcntgggggggntttgaggagttncagnntntnnnnattntnataactttccaagacctttctttatttcctgagatgaataaataagtggcaatggggtgtggggatgtggtgaacacagaacaggaactggcagcatgcagctggcaggagggagctgtgatggccccacccctgtgaggaccacctaatcctaagcaggggccaaagctctagcagccaccattaaggaaaaacttttgaaattcacacattgtgaagcctgccagtccccgccaggtgaagagctcatggtatccaccttcagggctactttttaccccaggggccttgtctgcccgggcctgggtacctgggctgctctgtaaggcaggtaggggtgcttaccccactctcaaaaataaaccaagctgtcctgagtgtccagcaggagggcagcccaagctctgggggcagcgtgggtgggaggaggtcctacaggtggtggccgcgattatctgcccttgatgaagccctccagcacacggtcactgcgctctgacaaccagtagccagtcatggccgccacagccccaatgaagatggcggtgaacaccaagtcgcccttagcagccagcgtggccagtgcacagatgatgatgccaaagaacatctgctgcagcaccaccaactcgtcttctgtcatctctgagaagaagcctgctgactctgggatctgctccttcacacagatgccttccatctgcttgtagcctcggcacagatgcagcgataaccgccctcggt

SEQ ID NO: 315409 - DNA, 124 bp, Homo Sapiens
cagcctaaacatttttatcttaccaagaattcctcaaagacccttggtgctgccacaatgcaaatgtggtcacatttataagaagggagtttatatttacaaggactgttatcacatttatttt

SEQ ID NO: 315410 - DNA, 381 bp, Homo Sapiens
aaaaaaaggcaagagcaaggaatctggggcagagcaagagcgagaccaaagccctgtgtggggatgaagcttgatgtggaagcttgacggggaggacaaatatgtggcaagagggacagggaagccagttcctgcagctgcttgcaagacaagcagggatgtgtccttccagccatagagcagcaagcgttcactgaaagtatttaatcaggtgacacccaaatggctggctttctacttcaggtcagacttaccttttacaagatttcattccaatgtattaatgagcagttatctcctttcctcccatgcttaatgagaaataaaatactgactttgggcccaggtggtgactgagttggagggtgtccatgattgaag

SEQ ID NO: 315411 - DNA, 307 bp, Homo Sapiens
aagtaaactatccgcctaaattgttaagcccttttggggcagcaaacacagcccttattacccatcaacaaccagtttgaacggtaattcaagtgttctttgggaaaatgtgtttttacaaaggagcagtaattaggcccccactgcttaacagatgaaccaaaccaaaaaaggaacgaaaatgtaacctattggtccaatgaattccctgaatttaaatgcaagacaacttatgaggccacttgaagaccaacctttacccatgacatctggtaacttttcttctttgagatggggtcacccagtc

SEQ ID NO: 315412 - DNA, 610 bp, Homo Sapiens
  misc_feature (451)..(451): n is a, c, g, or t
cgggcctctgctgtccttgacccactggtgttctgtgcaaggcttcttcccattcaccaagtgcacaccttgcatctgccgctcggcatgcaccagttccacacaccatcccattttacagacaaggacgctgaggcctgcagcagcagtgtgacttgctcaaggtccagtgagtgacctcattccccagaaaaggcttcttccacaccagagtacagcctgggtagggggtcagttctttcagctaccacccatccaacctttgggcctatgtgaggcaaagagggctgtgccagctgttctgtcctaggggagggggacatagccctagcaggagctcccagaccctcttggcactctgacacacaagtacacccatctggggcccgctttgccacgaagagctgggcaggcctgcagggtgtggggaaggaggacacaacctcaaganaggaagcgtgaaccccagggaacagcgggtccctttccttctcagacacaagccacctcagcttgtggctctttgcccccagccccaccaacccacctgttcatttattcaacagacaatgacagctgatatttattggacatatgcaccatgccgctt

SEQ ID NO: 315413 - DNA, 632 bp, Homo Sapiens
  misc_feature (22)..(22): n is a, c, g, or t
  misc_feature (491)..(491): n is a, c, g, or t
  misc_feature (563)..(563): n is a, c, g, or t
  misc_feature (568)..(568): n is a, c, g, or t
  misc_feature (585)..(585): n is a, c, g, or t
  misc_feature (613)..(613): n is a, c, g, or t
gctgaggcctgcagcagcagtngtgacttgctcaaggtccagtgagtgacctcattccccagaaaaggctcctcccacaccagagtacagcctgggtagggggaaaatcagttctttcagctaccacccatccaacctttgggcctatgtgaaaagaaaggaactaagctgggtgtgttctgtctggacctggggaggcccctgaaggcaaagagggaaactgtcccagctgttctgtcctaggggagggggacatagccctagcaggagctcccagcccctcttggcactctgacacacaagtacacccatctggggcccgctttgccacgaagagctgggcaggccttcagggtgtgggggaaggaggacacaacctcaagaaagggaagcttgaaccccagggaacagcgggttcctttccttccttcagacacaagccacttcagtttgttggtttttggcccccagccccaccaacccacctgttncatttatttcaacagacaatgacagctgatatttattgggacattttgcaccatggccaagctttcggcttnggttnttcccttttgttttttnacagccggtatttatttgtctggttccnctgtggccaggtgcttgtt

SEQ ID NO: 315414 - DNA, 457 bp, Homo Sapiens
  misc_feature (276)..(276): n is a, c, g, or t
  misc_feature (396)..(396): n is a, c, g, or t
  misc_feature (403)..(403): n is a, c, g, or t
  misc_feature (432)..(432): n is a, c, g, or t
ttcaaagtaggagaatagaacatattttatttaacagttgttagcttgattgataacttttaaatatttagacatatggtatgaggcccctgtgtgtactcttgccctggccctgttggcaatggggtgggcttgggtcagcctcacccatcagaccacaagctccaccagggcaggcagcccatgcagtgcccctgcccagagcacagcacctggcacagaggagcagacaataaataccggctgtgagaaacaaatgggataatccaagccgantgcttggcatgggtgcaaatgtccaattaaatatcagctgtcattgtctgttggaattaaatgaacaggtggggttggtgggggctggggggccaagagccacaagcttgaggtggcttntgtcttnaggaggggaagggaccccctttttccctnggggtttcacgctttccttttcttt

SEQ ID NO: 315415 - DNA, 1823 bp, Homo Sapiens
  misc_feature (1608)..(1608): n is a, c, g, or t
gattcttaggttttacaggtaggcagttttattgtctacaaataatgacaattataattcttccttatgttcctcatctggcttgttgcaggggttagtagtgccgggacactgctgaataatagcttgcccttggctagtttctgactttaatgggaatgcctgtgggtctgactctttagaatgccatcactgttggtttctgaaacagacctttatctagattagggtgtttctttccagacttaatttactaagagttttaataagggatggattttaaatcttacgaaataccttttcagcatctatagagctatcataaattcttccctattaattgaagctgaaatgaaggctcctgcacagccatactgcctcctcatatactctacatgcccctagtcccctgtgccaggaactgaatacctctgcagatagactaaaggtgaggcttcaaggtctgcctgctaggcgtggtgctgaacgccttctcaagctgcccaagcacatggagtcttggaggctttcctttccagagaaagaaagtaggaccaatccccactccctgccataataagaaagagctcttggggacagcagcatacagagcacagaagccaaagagaattcaggcagggtgaaggaccccacacccctgccaccatcccacaaatcagtacataggccaagtgcccagtttgccaggggtcttgctacctgaagtgacctatgatctctggccatgacaatctctagcgagtccttcctgccattctgcagcctgttagccaatgcatgcaggccaggcggcacttactgcaaagccatcacagaaagcagcgaggccttcagactcctaggagaaacagtgattccttctactgctccatccccactgctaactctgggtccccacccctgtcctcccagagtcactctgatcctgctcatcacaccaggacatggagtctctacataaccacaggattcccctagagcctgctgttgccacagtgaccctgatgctgggctgttacccacttagcctcccttacctcttctgtctgcttccaccacttctatatccctgtttggaaaaaggatgggtgcctgagcctgtgcccagttgggtgtccactcacaacccaaagcagagcctggcactgcccactctgaccaagggccttctctccctgatctcactggcgtctgccctatttacccatcactgggtttgtgggttgcgccgaaaacacagcagcagcaataaacagaaaatgagggcagagcccagtgtgtcacagttctgggaggcagatcgggatgggatacccgtgtggcttgtccaatgatcttcatgttaagaggcagtctctgtgaatgaactttctcttcaggccacaagaagccctaacccaagcggaggcgaaaggtagcaatctccatgggctccaaatagacgtcagtgctgttggacggggaggccagagggtacagtaacgtcaaggaggttggctgaaggaataccacatccaggccatggaaaaggctgcccagggctaccttgccttggcttgtggtgcagttgaagcccaagttcttggncctccagccgcagtcaaaacccttgcggtgtaagatgagtgcggtctccgccgagggtagggtgtcctcctcagcctggagcgtacgtaggttgagcaggtgggagtcacagggcagtgaggaagccagaggatgaaatgagcgcagaccagggcctgggagctgcattctgtctacaggcagagcgagcgcccgggcgttccagtacatggagg

SEQ ID NO: 315416 - DNA, 987 bp, Homo Sapiens
  misc_feature (62)..(62): n is a, c, g, or t
  misc_feature (181)..(189): n is a, c, g, or t
ggcgcggtgcgattaatcctcccgcggtgcccgcgcggcctctcctcatccaactggcgggngcggtccccgtttctaggccacttctcgccagctcgtctccctcgctgccctacgggcagcctcgcctcaccgccgccgcctccggtccaattccccgtgccccttgcctctttttcannnnnnnnngccatgagtccctcgggttttgtgtgtgtttttttcccttaggaaagccaacacttttctttttatttatttataaaggctaaccatatccatttgtcaatattttcggctttaaggaaaatagtttaaaaaacataaaaaggtaaatacactcaagagtaactgctattaaacagttctgaacaggcagaaaatgtagactttcctttaacagaaaatgttaaatctgtaatagcagcataatttatatatagaaaaaagctggttttgaaaacccagatttatacccaaaacattttttttctgtacaactgcgtttacactgggaaataagtttcttcacattatgttcattcccatcaggtacaggtgtgagcttgagtttgatcagccagccctgagcgcaagctcagcgctcagcacaatcttcaatccaacaccatggcagaaagcgcatttagatctttcatgtatgggtgggccaccaagatctggtctattttcagtctttgctctgagtcagggaagatcttcagaagggcttccctcagctcgttggtttctgcagaagatctctgagctggcatgggcaggttctgctggagactggggagggctggcagcagtgggaagtggggctgctgagggagccagtggcttgaaggggctccctgaatccgggtcggaggctggtggctggtgctggctgcctgggtgccagggactctgaagctggggtcaaacatgcccacatttggcagcctcgtgccgaattcgccacccaggcctcgctaccta

SEQ ID NO: 315417 - DNA, 732 bp, Homo Sapiens
  misc_feature (610)..(610): n is a, c, g, or t
  misc_feature (627)..(627): n is a, c, g, or t
aagctgaacatccaggtctggggcatgaacctggcatacaatgtagatttctgtgttcgttaggcaacagctacattgtctgctgggtttcaggctacctggaaacatgttctccattggctgtctcaccaatgctactcctataatgtttctgaataactgttttccaggaggtataaaccagtggagtttatcattgaatagagtgcagagaaaggaccgcaagaaagctgatcacctcagcaatgaatgatttcaatacgatttcacccaaatggtctcacacaccagcctagtaaaccagagataaggtgtaatgtcatccttccttccttctccctgcctcaactgtcaaagattgacaacttacatgttgtttactttttggcttctatttctgttcataattattatcagaaggcatagcacccacaagcctaatcatactggcttacaaccttattcctcttcattttgtcttctcacttacctgcagaaacccagtttatttttgttctccctttaccacaccagccttgtaactgttatgaatgaccctcaatctcactggaatctgaatcactcaggaattcaagcaaactggatgttntaaccactgttcagctntcttatggaatgacagagaacttgtaaagatcaccagtttgcaggaagaaaggaagagaatggaaattgcttctggctatcattttttaagaactagccattgct

SEQ ID NO: 315418 - DNA, 381 bp, Homo Sapiens
cagcaggtaatccctctgcttccgctgtgtcccctgtggaggtgtgaactcaagggcctagccccacgttggcagtttgatgtttctgtttcggcataacgtaatccatttcactgtagcctaaactccagtccgaggttggatattgttctgagcagggcccgagctggaagcgcaaggcagccgccgccgtgccgctcctcccttgccctcaggccaggtccctgctggaagcggctgcatcttcctgtcagccctggtttccatggtgactggcgtgacgcagccacctgagtatggctgaccttcctgcagagagaggagccgcagtcttttgcttgtggggagacgctgtgctgtgccgtgcggagggtgatgagg

SEQ ID NO: 315419 - DNA, 381 bp, Homo Sapiens
agatgatcctgaagatggaggcacgcactgtgtggtgatcgtggcaggttcaaatggctggtataattataggcaccagcttttagacactgtctgcagctgttggctcatggccccttcttccatcctcaatgccaacaaggacgcgtgccatgcctaccagatcattcaccgcaatgggattcctgacgaacagatcgttgtgatgatgtacgatgacattgcttactctgaagacaatcccactccaggaattgtgatcaacaggcccaatggcacagatgtctatcagggagtcccgaaggactacactggagaggatgttaccccacccggcgtcctggagtggcccccaggatcacgtgttcatttacttcactg

SEQ ID NO: 315420 - DNA, 1916 bp, Homo Sapiens
  misc_feature (7)..(7): n is a, c, g, or t
  misc_feature (18)..(18): n is a, c, g, or t
  misc_feature (52)..(52): n is a, c, g, or t
  misc_feature (59)..(59): n is a, c, g, or t
  misc_feature (80)..(80): n is a, c, g, or t
  misc_feature (82)..(82): n is a, c, g, or t
  misc_feature (88)..(88): n is a, c, g, or t
  misc_feature (90)..(90): n is a, c, g, or t
  misc_feature (96)..(96): n is a, c, g, or t
  misc_feature (98)..(100): n is a, c, g, or t
  misc_feature (103)..(103): n is a, c, g, or t
  misc_feature (105)..(106): n is a, c, g, or t
  misc_feature (111)..(112): n is a, c, g, or t
  misc_feature (127)..(127): n is a, c, g, or t
  misc_feature (130)..(133): n is a, c, g, or t
  misc_feature (136)..(136): n is a, c, g, or t
  misc_feature (138)..(138): n is a, c, g, or t
  misc_feature (140)..(140): n is a, c, g, or t
  misc_feature (143)..(143): n is a, c, g, or t
  misc_feature (157)..(157): n is a, c, g, or t
  misc_feature (160)..(160): n is a, c, g, or t
  misc_feature (163)..(163): n is a, c, g, or t
  misc_feature (166)..(166): n is a, c, g, or t
  misc_feature (169)..(169): n is a, c, g, or t
  misc_feature (179)..(179): n is a, c, g, or t
  misc_feature (256)..(256): n is a, c, g, or t
  misc_feature (328)..(328): n is a, c, g, or t
acaaaancaatcaaaaancatcatattttctaaaaacaggtttccatggggngctggcngccctcgtcaataaaagcatncngaagantnaaagangnnncancnncaaanncgcagaagaaagacnccnnnnganangngcnacagaagcccccanganctnccngcnccgcaaaacnaacaggcaaaacaacaaacctcctagaaagcaaatatgacccttctcaatacagagcttttcccaccctaatttgtngtttttcagaaaagactggggaagcaggtaccagcgagcaagtcatcttgtgaggaaggtcctggagcgagnccctggagcgggggctcccccaggagggcccgagcagcggagacttctcactccacctctccagtctctgatcagcacacagtcggtggggcgctcacacttggaaaagcttccaggaggcagctcttcagtagtgaccaaggcacacgtggtccatggacaattttatcctgtgaagcggatacggcttctcacaaaggttgaccagcacgtacaaatgtctcaacgcatactcgtacgtgggggagtgccagttgaagcagtgggtccggaagtgcagcagggcctctgggtagcagctgtgccccgtgagcggggctctctcggacaggagctgctccacctcagcctcggacgctgccagcaaggagacgatcttacgcactgacttctcaatgaggtgcctggcatccagatgccgctggatctcctccgtgagctgcctggactcctccagatcattggtgttcatcagtttccttttcatgatggtgagaggcacatcagggctgggggtgaggtcaaggtgtgtgactggaggtagggggacgggagaactggctttgcgtttcataccctgaaactgcatcactttcatggtggagattgttttgtttccatactgcatgacgtggctggtgttggtgtgcgattttaccaggtggtactgcttgtgcagggtctctttagtcagatcttccacgtccgagtcttccatccagttgacgctgtaccagtcccccaggtacgtggacctcttctcatcatagtaacaggcgtaggacgactctctggggttggcagcagtagttgcataaacattgatgttatccggcaggtggttcatcatggacccagactcacaggcttcaatgtagaacaccatctttcggtacattttgtgtttgtacatgtaatggatggtctcattcaggtcctttacatgaagatcttcattgggaaaaaccagtattccagtagatccatggtcagtgaagtaaatgaacacgtgatcctgggggccactcttcaggactttgccggatcctatgcccttcactgcttctgcatcgcctctcaacacagcaaggaaattttgtggggtaacatcctctccagtgtagtccttcgggactccctgatagacatctgtgccattgggcctgttgatcacaattcctggagtgggattgtcttcagagtaagcaatgtcatcgtacatcatcacaacgatctgttcgtcaggaatcccattgcggtgaatgatctggtaggcatggcacgcgtctgcctggtgcctataattataccagccatttgaacctgccacgatcaccacccagtgcttgcctccatcttcaggatcatctataggaacggcaccaatgcccagggccacactgaggaatacagctactttccaaaccattctgcaccttggagttcaattgcagacacctgtggcaggcgaccgtggtggcagtggtggcggcggcggcggtgagtgaccgcggtggtggcgccggcgggaccgtgagaactcgcggcggctcgcagcctcacaccaaacatcccgggaattccggac

SEQ ID NO: 315421 - DNA, 2032 bp, Homo Sapiens
ttttttttgggttctgttataaatctttattttttaagacttgaacacctgcagaattaaatacaaaagcaatcaaaaatcatcatattttctaaaaacagttttccatttggggcttgcggccctcttcaataaaatcattctgaagatttaaagaggtttcagcttcaaattctcagaataaagactccttttgagaggggctacagaagcccccatgagcttcctgctcctcaaaactaacaggcaaaacaacaaacctcctagaaagcaaatatgacccttctcaatacagagcttttcccaccctaatttgtagtttttcagaaaagactggggaagcaggtaacagcgagcaagtcatcttgtgaagaaggtcctggagcgagccctggagcgggggctccccaggagggcccgagcagcggagacttctcactccacctctccagtctctgatcagcacacagtcggtggggcgctcacacttggaaaagcttccaggaggcagctcttcagtagtgaccaaggcacacgtggtccatggacaattttatcctgtgaagcggatacggcttctcacaaaggttgaccagcacgtacaaatgtctcaacgcatactcgtacgtgggggagtgcccagttgaagcagtgggtccggaagtgcagcagggcctctgggtagcagctgtgccccgtgagcggggctctctcggacaggagctgctccacctcagcctcggacgctgccagcaaggagacgatcttacgcactgacttctcaatgaggtgcctggcatccagatgccgctggatctccatgatggtgagaggcacatcagggctgggggtgaggtcaaggtgtgtgactggaggtagggggacgggagaactggctttgcgtttcataccctgaaactgcatcactttcatggtggagattgttttgtttccatactgcatgacgtggctggtgttggtgtgcgattttaccaggtggtactgcttgtgcagggtctctttagtcagatcttccacgtccgagtcttccatccagttgacgctgtaccagtcccccaggtacgtggacctcttctcatcatagtagcaggcgtaggacgactctctggggttggcagcagtagttgcataaaggagaatgctcagttccatgtcagcggtgtctgagcaacctgttgccagcccaggtcgaggccggcgccccaaccacctaccattgatgttatccggcaggtggttcatcatggacccagactcacaggcttcaatgtagaacaccatctttcggtacattttgtgtttgtacatgtaatggatggtctcattcaggtcctttacatgaagatcttcattgggaaaaaccagtattccagtagatccatggtcagtgaagtaaatgaacacgtgatcctgggggccactcttcaggactttgccggatcctatgcccttcactgcttctgcatcgcctctcaacacagcaaggaaattttgtggggtaacatcctctccagtgtagtcttcgggactccctgatagacatctgtgccattgggcctgttgatcacaattcttggagtgggattgttttcagagtaagcaatgtcatcgtacatcatcgcaacgatctgttcgtcaggaatcccattgcggtgaatgatctggtaggcatggcacgcgtctgcctggtgcctataattataccagccatttgaacctgccacgatcaccacccagtgcttgcctccatcttcaggatcatctataggaacggcaccaatgcccagggccacactgaggaatacagctactttccaaaccattctgcaccttggagttcaattgcagacacctgtggcaggcgaccgtggtggcagtggtggcggcggcggcggtgagtgaccgcggtggtggcgccggcgggaccgtgagaactcgcggcggctcgcagcctcacaccaaacacccacgacgtcggatcccgggaattccggaccggtaccagcctgct

SEQ ID NO: 315422 - DNA, 994 bp, Homo Sapiens
  misc_feature (76)..(85): n is a, c, g, or t
tcccccaaaccacatattaaaaatggcaggctttttataacaatagttaaagtaataaaaacatacaaaactttgnnnnnnnnnnaatatatatacacagtacaaggctgaagcacctttgacttttctctcaaaatttacgtctgtatgaaaacccaacccactgtagtaacaatctggtgggtgtgaagctgtgtatacacagagctctgtacatgctccccacggagtaataaaaagctaccttcagtttgtgaattggttttatctttaggtaagaaagagcttttcccagggaaaagcctttgggttgctttgtgtgctcctaggacttgttgctttgaagaaaattttgcaggaaagtaaaatgaaacaaataagccctttttactgacaatgcacccaaccttttcagctgaagcaagtttcactcctggggaggaatgagactggccccattgctgcggcaaaagcaaactgggcttgaggcatagtaacatggcaacacaagaaagaacagaaccggtttgatccactcatatgcacagggggctgttaatgatcaagttttagtgttgctaatggagccttcatgttcagattaagaaataatgtgggagaggaagggcgaaaaccacctttaaaaagaaaaaactgtgggcaatcctacattggttgctcgctgaatgacaacggtgattcaattgcattgacgtcaaggtgagttcattcattttttctggagcctggaatcctttgcttcatgcatggcacattctcattttgtaagcttcaaacctcccagtgaaaaatattaaatattcaaggtaataaaatagataatatttctatactataggttcggcctagtgcaagggaaaccgtcacctgggatatcccttcaggtagcccctaggccagtgcattgcaggcaaggcaaggcactttcgtaagtggtccagttctgcctggagccgctcccgttctgagacca

SEQ ID NO: 315423 - DNA, 893 bp, Homo Sapiens
tgctctgaggaacgtcagcacagtggcagacaccggggcggctcctgtcaccatcagccggactcttccgcccaggctcgactgtactttgtggaagatcagccggtcccacaggctgttgtttctgatgatgccgctgcgaagctctgcttctttcctcttggaggcgaagtccaagagccatcgcttcagcgtggtgtttgcttgtccgaaaattcggtcaaacatccggttcagcagtcttggaaccacggggaagacagtgggttgaagagctccatgacacagcattacacactctacaactctctcaaacatatgggcgagaggcaagaaagatatcaaagtatcatctgggcaaggattgactgtattctctgttgctttcacaaaagatgaacagtcgctcactatgtttcggtgagtgaccattgctcctttggggttgcctgtagttccacttgtgaaacaaattactgcaagatcttcaggtgctggaggcttgggcttccgtctgttggctcttcccaggtcctccatcgccttcatgctggtgacttccaccccacacctctggcctcgttccaccagttcactgccgtaggcatccatgacaactatgattttaaggcctggtattaacttattttctacaccctctaataagagtttggccttctctggcttgtcaacaaaaaccagagagagttcagctttgttgactatgtacgtgatggcttcatttccaagggtatcataaagtggaacgatcaccatcgaataagcaaagcatccttgttcaataatcacccactcaggtctattttgagcaaagatgccaatgaactgatctggggcagtcttgaagcccttctggatcagtgctgagccta

SEQ ID NO: 315424 - DNA, 827 bp, Homo Sapiens
aacaaacagaatataatcaggatgcaaagaggagaaagtcgcagtccagaatacaccaaaccacctaaacctaataccgccatcacaaagctaaacaaatgatagctttgtgtgtgtgtctccccatgtactaaaggctgcactgaaaatatggttctttggcttctctaaaatcactgacactctttctccctctccttgatatgatacagtattactatgaagtatcttagtgagtattttgtcagtcactgttgctgggcattcaatgaattttattcatccctaggaaatcctcttccacatgatagcatttccttctccattttcttctttctagattcctaatagtctgaattggttctctatgtcttctatctctttttgtattggggaagttttctttttggactttaatcctcctattgaacatttttatttcagcaacaatatttgtaatctgtttattcattcttgtcctggctcctttctgctacatagtaattataattttataaaagaggtctagtctctttactaaattgtcctccatgttgattttggaacttaatcttgaattttgtctctcacgttgctggctaccctcatatgtgtgatgactgttagttgtacaattacatttaagaaagaggattacattgctagctggaatttcttctactattataaaaatagaactgttttaccaacaagtctcttctccgagtgggacttgatggtaactataactgggatagggcaaatcaacgtcatgggtccacaggttttgctttaaacatgtggatgttgggccgagcatggtgact

SEQ ID NO: 315425 - DNA, 798 bp, Homo Sapiens
  misc_feature (153)..(153): n is a, c, g, or t
gactgcatagggctcggcgtgggagggctgggctccatgctgactccagttccattggtccctgcagagtgagtctggcctctttcaatggtgtttcctggtgcctgagatggagcactctgatacctggaaccagatgaataccacgagctngtttctgtaacgacccatactgtcatgccgcccttggttcatggggtcattggacttttggccttgtggctatagccctgtcctcctcgtctgttccctggcaatacctcccgaagtggctggtagggctggccactggagtttgctatggctgcaggagtctctcccggtgcaaagtttttcttgttagcacttgtaaggctgggaggagaggcacaggtggaagaggaagcagcagaggcatcacttggggctactcaaggacacagatgtaactgagctccatcgggatctggtcgaatagctgttctttggatgagacacttgtccaaatgaatcaatgctcttctttagggtctctacatcacaggtgaaccgggctactcgtcccagatcctcatcatatttacgttcactaacaaagtgcttgatatcagctctgagctcaaccaattgctgctgtcggctgagcaaaatttccattgcttcagctttcactttgtccatttcagcaagcaacgccacttctcgatccattaaacagctctccaattcagcaaaggcttgtttcattttcttaatggaggcatccatctcttctttaactacaactcgataccgtgcaagagacactgtgcagcgctg

SEQ ID NO: 315426 - DNA, 240 bp, Homo Sapiens
caaaaggaccttagaacacatcttccagctggaagtcttcaaacttaagcatcagaacatactcattaaccaaaatctcaatgagaccccctgaaatataaagcagataaaaagagggtttagcttgtaactactttgcctttcctggccctcccagtggtactgaaatgggctcaagtgtcgcatagaattaatatttacttttaaaaataaatatggtcgggcgtggtggctcatgct

SEQ ID NO: 315427 - DNA, 571 bp, Homo Sapiens
gatgacctgccttcttcatgactcaacccatgatttcaaaatgaaattggggaaatagtaggttaatgctttatcaaagaaaaatcaatttggtctgataggggactcaacggattagagatcacagactgaggttctagtcccagctttaccacaagcagccttgacctcgccctcaacctgggtcccagtgcctcaatgaccctaggcttccatccctgatataggctttcagaagtcagtggaaagattattcatagtgcctaagaaatgcctgtttccaatatttgaccttgtggatctcaggctttggagagcctaataccaacacaccagcctgcagattttgtctttcccaaactgtgttccaggaatgggctcaaaacttcagggctgacgctgtcctcaccccagactattagagtcctgtgtgctcacagagaacatgaagaagagcaatgtgtagaagacttaactttctcataactgcagcagggactgaaaattgacctccatccaaatgaaaaataatgttgaggatgattctaaagctaaacctaggcttggtggg

SEQ ID NO: 315428 - DNA, 798 bp, Homo Sapiens
ataggaatagatgataattttcctgtattgtttcaaataagtgactgttcagctgggatccattggattataatttacaatgtcacataatattatgcttttcaatattgatgagtgatgtaaacaatataaagttggcagtttgtagtagttcagtatcctagaaatacattgaacttcataagtatcagttcatttttaagcatacagaattgaagattctgactgaaatcataaactcagaggaaacaagcccatctttatcactaattacttagcttgaatacttttctatttttaaataatcctaattattgccttttcaattatagtctactgtatttatttatatgggatcaacaggtatttatcaaacatctactgtgtgcccagcactacctagtactgttggggaacatcaatttgcagttgtggtctctgcccttgaaggtatcttctccaggagattagcagtattattttcacttctaagcaaacatgagcaaaagaggacctgttcattaaaaaacatgctgacttttttagtttcaactgagatatgccactgtagaagtgaaagtaatttcacaattaaagaaatgcttcaacttggttattaataatggtcatacagggactttgggtgtagcatgcaagggaagcagaagacctggggcttttgtccgaagttctggccatttaggtatccagctgtgttaaccttggaataagtccacttaactctttgctcttagttttcctcatttgttaaatttggggattaaagtgttttattat

SEQ ID NO: 315429 - DNA, 415 bp, Homo Sapiens
cacagggctctgcctctcgaaaggcatttacttgtttaacactgtgtccagctacagtggggtacagtagctggctattcacaggcttcatcatagcccactagtctcatattattttccttttgagaaatgtggaacctctttctgttgctattatattaataaagttggtgtttattttctggtagtcaccttccccatttacctttaactctaggaatttattttagtcacccaggaatttgtgattcaaaccagaggtatgtggaattggttaagtactttgtcctcttattacctgtggaaggaattcaaacccacccatacctttcattatagatagatcaaagtcatctttagacacgtactattttctccctcgtgtacaactttaattgtgctctaaagagatagc

SEQ ID NO: 315430 - DNA, 670 bp, Homo Sapiens
ggttatttcaaatacatctttattttggcagttgtgggggtggggtgggggcgggaatcaagagaaaactaggtttagatacttttattttctgatccggggtcttaggccaacttgtgactgagcaggctaatcaatctggaataaactagaaaacttcccatccatgagatattctctattcatctcaacccaaatcaataaactctggaacaaccacagactcttttctttatattcctcaagaaatggatactctgggtgatgagaaaggatagacatttactaatggcgtatattcttgttcaagccatctgtggttttcatgtcctctggtgtcagctagaagtcaaaaccctggagagttttctttgattctcttctcactgaagctcttcaccaggaccaccaccccacgctgcagctggtagcacaaggcaacctgggctggagttcgcctgggcttttcagcaatggcattgagtattggatcctcctggagaactgggtttccttttttcacccagtctttgtctgagtcagaccccaaggcagaatatgcagtcatgacaatgtcctttgacttacagtacttcaggagtttgctttgggttgaggtaagggtgatattccaccctctaagggatgtctcgtggcggatttcttgcgc

SEQ ID NO: 315431 - DNA, 551 bp, Homo Sapiens
tttctgctttcatgctttgatttcgtgtgctcacttgcctgtacttcatttaaaaggtctccacaaagggaagactcaaacaattccctgccattctggatagttttggttatttttagtttaatttcaggtgagccagtcttctttggaatcacagtttgtggtaccgaggaggaggtggtggctgtggaggggaaggtttttccagaatttcatgtggtcttgtgtttggaatttctgaatgataatagtcagtggggcaacaggagactccagcttctgcaggcggcgcgggcggaactctgctgcatcgggctctccatcctcaggcatctcctctgtgcccactgactcaggagctggaggcctttccatttcaggggctggtggggaggctcctggggttggggtcgtggcctctgagctagggatgctggtggaggaggcagcagcaacaactgtagtggcagtctcctcagtggagttgactgaagtggcaggccgggggggcctgggaagagaagggacgagaggcgggcctggcctcgtgc

SEQ ID NO: 315432 - DNA, 576 bp, Homo Sapiens
gacagaactatgttcatgatagatggtgtgcagtcctgggcatcatccacaaagatggcgtcaaaagaggccagcgaaggctagctcagctgccagagtttcaagtagccgtcatgagtcatctggtgcgcctcttctgtgcactcccccagcttccgcatgttatcccagaggcggctcgcttcaaggacaccattcagtttttcactctgctcaaccatgactctctgtccttggctgttcttacaccaaataggcacgtgatcaatggtcagctcttcgtcagccgaggcaaagaagttttctagagtcttacacacaagcttggctcttatgaatccacccttcccttcagcaaggacggagttgaccatgaagggtgttaacttgaagagattcaacttcttctttgactggtacttccgccctatgtgcccgtaggccatggagtggaaggttttgcagatgacgttgctggggaagacgcgttcggcctgctttgcgatgctcttgttgaatgtcacatacagaaacctgctctgagaccacttctctgcatacttgaccagcgttgag

SEQ ID NO: 315433 - DNA, 845 bp, Homo Sapiens
  misc_feature (357)..(357): n is a, c, g, or t
  misc_feature (423)..(423): n is a, c, g, or t
  misc_feature (428)..(428): n is a, c, g, or t
  misc_feature (433)..(433): n is a, c, g, or t
  misc_feature (452)..(453): n is a, c, g, or t
ttggaaagaacagtttgtgctgtgctttattaaaatgtgcatcattcttttattttaaaatgtgcatcattgtctcgtgctcggcgcatgcgccctcagcgtggtggcccgctgggggcctggttcccgcccagcctcccgcggagccgcagggagcaggcgcactcacgtggcgcgggccggggggctcccgccccatggcgaggtagacgtcgatgggcacgtgcagcagcgtcaggcagtggcatccagggcagcgacgaagcggcctggggaaattgacgcgcgacaggggccgctgaggcaggggcttggcccatcctgtggggcgcacccaggggagtgcacctggggtcnccgggggtccggacgtggatgcggggtcctgactgctgggggcgccaagtgggacgaagggcgggnccgcnggacnggcgaagcgggggtgggcnncggcccctacctgaccgggttgtgctccgtcgctaccgcctccgggctgtcctgggactcgggggcggcggcaaggccacgggagtctccggcctcaatggggaatctccgaccctgcgggggctcctgggcgctcatgtccaagccccggggcgctctgcgcggggagtggcggtcaggcctctcccgggtcgccgggcgccgccgcctcgcgcccgccccctgggccgtcgctcacctcccggcggttgagaccggtcccaggctagaagcagctgccggagccctggccgcgggagaacgctccggtccaggcggagccgggcaggtctctgtggcgtgcccgggcccgggcgtcgaggagggcagcattgtgacccgggccgcggcgc

SEQ ID NO: 315434 - DNA, 348 bp, Homo Sapiens
cagagccggtgatatgatctgtgctgaatgtggcttggttgtaggtgaccgggttattgatgtgggatctgaatggcgaactttcagcaatgacaaagcaactttgtctaccatgattggcaagggcacaggagctgcaagttttgacgaatttggcaattctaagtaccagaatcggagaacaatgagcagttctgatcgggcaatgatgaatgcattcaaagaaatcactaccatggcagacagaatcaatctacctcgaaatatagttgatcgaactaatttattcaagcaagtatatgaacagaagagcctgaagggaagagcttgatgctatgcttctgcttg

SEQ ID NO: 315435 - DNA, 1300 bp, Homo Sapiens
gagttttgaaaaatgttttattcaagaattacataatttcaaatatcttccaaaatacagtttcctagattgctacaaaagaaatttgataagaaatttaaatcattaaatatgtttcactagtatatacatacagaatgccaagcaatagtattcagccctggaatgcgtaccatgtcttttgtttttcctcatgaaaggctcaacccagcattttgtataggctatgtacaacaggcaaagttttgtattcaagaatttgacgttagctgcctcaatttatagctgtggtagtttgtccactggggtgtcaaatttgaagtctgtaggaaacagatctggggctcgaggatagatcagtctataggactgtctgattgtaacatcagcaacaccagcaatatctccaatttctttttgggtcctcttttcagctgatgcctgtgaggccatgtaaatagctgccgctgccacagagatggggctcctcccaggaaccaagtccaattccacagctttacgggctatatgtgtagctgccatctgtacttgtttaggaagacaaaggttggaacagaacctggacatgaagtccccagttgtaatcaaatccacactggtttctagcgctttcaaaataagtttaaaacaccgaccaatttctttcttagaaattcgtgatacggcacatatttctttaaatgtcctaggaaccccttcttgtctacaggcaatatagagacaagcagaagctatagcatcattagctcttcccttcaggctcttctgttcatatacttgcttgaataaattatttgttcgatcaactatatttcgaggtagattgattctgtctgccatggtagtgatttctttgaatgcattcatcattgcccgatcagaactgctcattgttctccgattctggtacttagaattgccaaattcgtcaaaacttgcagctcctgtgcccttgccaatcatggtagacaaatctccatcactcagaagaggattctgagaatctccaactcgagatggatcttttgttgctttgtcattgctgaaagttcgccattcagatcccacatcaataacccggtcacctacaaccaagccacattcaggacagatcatatcaccggctctgtagtcctccactaaaatcgcatctggatggtttggacatgtgactcttggaagagcatccaaacggctggtagacgccatcttcacggcgactgcggtgcccgcaacaagacacaacagacacaccgaaagcaggaagcgaatgtggccc

SEQ ID NO: 315436 - DNA, 343 bp, Homo Sapiens
  misc_feature (181)..(181): n is a, c, g, or t
aaaatgttttattcaagaattacataatttcaaatatcttccaaaatacagtttcctagattgctacaaaagaaatttgataagaaatttaaatcattaaatatgtttcactagtatatacatacagaatgccaagcaatagtattcagccctgggaatgcgtaccatgtcttttgttttncctcatgaaaggctcaacccaggcattttgtatagggctatgtacaacagggcaaagttttgtattcaaggaatttgacggttaggctggcctcaatttataggctgtgggtaggtttgtcccctggggggtgtcaaatttggaaggtctgtaggggaacag

SEQ ID NO: 315437 - DNA, 673 bp, Homo Sapiens
atttttttaaagtaaaattatgcatcaattgtaaattaaaaacttaatttaaaaaagtcatttgtctttctcttgttctcagtacacagtgttgttttccagaagttaaatgacaccgtgtcatttggacaccgtgtccatcaccttaatagctaatggaatgtgtgctcatgtatcttgtgttttaaatttttctccattttactttccaatatggtaaatggtaaatatctatatgatatatctatcttaaaaccagtggtgtgctagggcagggattgcaccagcttccccagagctggattgtggcacatctattcccaactctgtgtttagaggtgtcatgcagatagctcaaactcagccatggttaagtatttacaccatgaaaagcagcaaaatcagggctttttctcaaatagctggttgttcaacaattactggcccatgtaagcaaaaacccattgaagtctttgagatacatatatatagtgagatagggtctctggctgaactcaaacttgtggactcaagggatcctcctacctcagcctccaatgtggctaggactacaggcgcatgctactgcgcctggctcagtccctaatttttaaccgcaaaaggattctcaaaccaagctgtctaagaactactaggttcagtgattccttat

SEQ ID NO: 315438 - DNA, 899 bp, Homo Sapiens
  misc_feature (793)..(836): n is a, c, g, or t
ccacaattgagcagtactttgataaagcacaaaatacaaattccctctggcacagtggggatgtgtggaaaaaaaatgaagtcaaagacctcctgcgtcgtctaactggtcaggctgaaggcaagctaatctctgtagaatatggaacagaggaaaaaatataccagtaatatctgtttattcaggtccactcagaagtggtaggaacatagaaagagtgtctttctacctaggattttccattgaaggccctctggcatatgatatagaagtaatttaagacaatacatcacctgtagttcaaatacgtttatttatatctttatgattttattctctctctctattctcatggcactttcataacattatggctaacctctaattacagattttgcttttgcctccctgaatgaattacaagcctttttaagatatgaaatatgcctacccgcagagcttggcacaaagtggagtcaatcttttaatgttttaaatatgcattttcagactcaaataattaagaagtttcattgatatccactgttcacatcataactgtctatagggcaataaaatctgtgttaaactcaattgcttttataagttttctaaattatttcttcactgtgacagcaaagatttaaataagatgaatgtaaaagagaaagcttattggactcaaacccacagatccacaccagagttctatttacctcatcttggtatcaataaaaacttatgtggaaggtaaatatattgttccccatccaccacataacactctccccannnnnnnnnnnnnnnnnnnnnnnnnnnnnnnnnnnnnnnnnnnntcccttgtacccccttgccctttctcccaagctcattggctcccgggagagaagaaagagttc

SEQ ID NO: 315439 - DNA, 573 bp, Homo Sapiens
cacctccctcgctctcccacaccactggcaccaggccccggacacccgctctgctgcaggagaatggctactcatcacacgctgtggatgggactggccctgctgggggtgctgggcgacctgcaggcagcaccggaggcccaggtctccgtgcagcccaacttccagcaggacaagttcctggggcgctggttcagcgcgggcctcgcctccaactcgagctggctccgggagaagaaggcggcgttgtccatgtgcaagtctgtggtggcccctgccacggatggtggcctcaacctgacctccaccttcctcaggacctacagctaccggagtccccactggggcagcacctactccgtgtcagtggtggagaccgactacgaccagtacgcgctgctgtacagccagggcagcaagggccctggcgaggacttccgcatggccaccctctacagacgaacccagacccccagggctgagttaaaggagaaattcaccgccttctgcaaggcccagggcttcacagaggataccattgtcttcctgcccccgataagtgcatgacgggct

SEQ ID NO: 315440 - DNA, 798 bp, Homo Sapiens
actgacttgcttccggagtttattgtgcaggatgaagcctgagtgggcagggttgctttggcggggagcggggcaggggctcggggaaggaacagagcagagacatccagagcgtgggggtcacctggctggccgggatcccagcttcagccctggggagtcctattgttccgtcatgcacttatcggtttggggcaggaagacaatggtatcctctgtgaagccctgggccttgcagaaggcggtgaatttctcctttaactcagccctgggggtctgggttcggctgtagagggtggccatgcggaagtcctcgccagggcccttgctgccctggctgtacagcagcgcgtactggtcgtagtcggtctccaccactgacacggagtaggtgctgccccagtggggactccggtagctgtaggagccgagggaccccgcgggctgcagcagcatggttcgggtctcacacttgtttttcctgaggaaaggtgaaggtcaggttgagccaccatccgtggcaggggccaccacagacttgcacatggacaacgccgccttcttctcccggagccagctcgagttggaggcgaggcccgcgttgaaccagcgccccaggaacttgtcctgctggaagttgggctgcacggagacctgggcctccggtgctgcctgcaggtcgcccagcacccccagcagggccagtcccatccacagtgtgtgatgagtagccattctcctgcagcagagcgggtgtccggggcctggtgccagtggtgtgggagagcgagggaggtg

SEQ ID NO: 315441 - DNA, 1495 bp, Homo Sapiens
  misc_feature (73)..(73): n is a, c, g, or t
  misc_feature (887)..(887): n is a, c, g, or t
tggccccatccacctccaaagaggctgctgtcctccagctggccctctgacaccacatagttctgaataaaanacatctttggcttccctgctagataagggcatgaatctcccatgaacatcctcctgatgtgatgcagggggagccctgagtgagtctgatccacaccatacacactctgggagcctcctcggctcaccaggacacacacaaagctgtcgtagtctcggtgctcgggcatacaggcaaattggccaagaatctgggatataccatgcatactgagatgcaagaatttctggacttcatagcccagggaagtgaaggtgtctcgaagaagctctgtctcattgccaatgcaatcgattatcaggcagattcctaggggcttgctcttcatcttgtatctctcttcaggtatgctctgaggcaaaaaagcttctgattcctgaatggatttcttcactggttcttgttgagcgccaagctgttccttaagtctttgttctttacttctcccattatggagcctgaagttatttgaaggatccttgagactcttttggattgctgcttggagaacattcctgtaacttgtccctgctccttgaacagactgcttgtacttctggatttttgtcttcaggtctattctgtggatgttctttaggcatttttctaataaatccagttgatctggggcaaccagatttagtttctccaactcaaccacaggtccaagaaactcttctccttgcttatcttgcctcggcccatgtaatccttcatgaggaaaattaatgaggacacatcagatttatccaaatcctcaccattctctgccatcagcactctgtccatcttcaagatacgtttgagcaggtcnaatcgcctcactctgtagaagcagttcagcccaagtccccgacagacagcttacctctttcccgtaaaatatccagaaggtccctgacattaggtggaaccacatctatagcaacatcccggcacaaaaagagcagcatctccttctcatctgtatcaagtgcttcttcaacctgatggatgacttcagcagacatcctactcttagactagggaagctcacaagggtcttgcagtacagctccgggccagtcaacagaaagccagcaggcagtcaacttcatttctgagggctgacttcatttctttcagaatcctttccagtgggggagttcgtcctgtcgcggccggactctcctgccgctgccacctcagccttcgctcccctagacgccgggaaggcgcacccaagatggaggcaaagaaaccgaaagcctggaagcggacttggtgctgggcgatcgctgttcgcggcgcttctctcctacacctcctcccgtggtccttgttgtctcagctgtcactggacaaaagtccaatagccggcactcactgtgtgaggccgagtccccacccctagctccgggagtcccttttagttgagactcg

SEQ ID NO: 315442 - DNA, 1368 bp, Homo Sapiens
ctggtcccttttataaggaagaaatcgaatgtgctcttttcataaggaggttttgtgaaacttgggacacatgcaaggaaggtatgagacccaagtgacatcacccgaagttggacagtggttgtgaggccaaatactagagcaaggcagtagggttcagcatacatgcaaaacccctgaatgtccatagctctgccagcctgtgcagatcccagattctttcttgaagactgaaatgttaagaacttgcttggcagcattttgcagagatcatgaatatacagggcaaatggagttggcagatctgggatatgaagaatataaagggacgcgatttctagccacaagctaaaggaggctttggtcatccaggttccattccatccaccagactgcttgtacttctggatttttgtcttcaggtctattctgtggatgttctttaggcatttttctaataaatccagttgatctggggcaaccagatttagtttctccaactcaaccacaaggtccaagaaactcttctccttgcttatcttgcctcggcccatgtaatccttcatgaggaaaattaatgaggacacatcagatttatccaaatcctcaccaatctctgccatcagcactctatagtccgaaacaaggtgagggttcctgagcaggtgggtctccacagcttttctgtccatcttcaagatacgtttgagcaggtcaaatcgcctcactctgtagagcagttcagccaagtccccgacagacagcttacctctttcccgtaaaatatccagaaggtccctgacattaggtggaaccacatctatagcaacatcccggcacaaaaagagcagcatctccttctcatctgtatcaagtgcttcttcaacctgatggatgacttcagcagacatcctactcttagactagggaagctcacaagggtcttgcagtacagctccgggccagtcaacagaaagccagcaggcagtcaacttcatttctgagggctgacttcatttctttcagaatcctttccagtgggggagttctgtggttaaaagggaatttttctgaaaatcttatcaagctaacttatgcctaagattgaaagtatgggctctttccttctgggtggtctccctgacttaagtagattaagttctatagaaagggatctatagaagtctaaagaaagggatccttggtagacagaaccaaaaacagactaatccaaaagacagagaagaaaacctacattgtaaaggaaatgaaaccacagatgaactcatctgcaaggaaaccccacattctttcgacgccgtgggtcgacgatatcccgggaattccggagccgtaccagccccttgc

SEQ ID NO: 315443 - DNA, 539 bp, Homo Sapiens
gcctcactctgtagagcagttcagccaagtccccgacagacagcttacctctttcccgtaaaatatccagaaggtccctgacattaggtggaaccacatctatagcaacatcccggcacaagaagagcagcatctccttctcatctgtatcaagtgcttcttcaacctgatggatgacttcagcagacatcctactcttagactagggaagctcacaagggtcttgcagtacagctccgggccagtcaacagaaagccagcaggcagtcaacttcatttctgagggctgacttcatttctttcagaatcctttccagtgggggagttgcccgggcagccgccggctcttcccactggatctccgccgggaccaactcccaccctcgccggacaagctcagacctgctgctccgcaaaaccagaattggaaatgctccagatgggacgaggaacaaggacagaaagtcaaaagcatcaacaggtggcttcgccggagggcgtccgagaacctctgcctgttgaaccgcttcacgcctaat

SEQ ID NO: 315444 - DNA, 1028 bp, Homo Sapiens
ggatatttatttatagcattattagtagtaccaaaagatggaaaagcatctaaacatccagcaccaagaaagggctaaaccacattataccccattagaaaatgaaacgatttatccattcagaatgattaagtagaggcagttccatgtaaatcacatgggaccaatttccaagaattttcagatcaggacaatgggcatagggtgttatcatcctgaagttatttgaaggatccttgagactcttttggattgctgcttggagaacattcctgtaacttgtccctgctccttgaacagactgcttgtacttctggatttttgtcttcaggtctattctgtggatgttctttaggcatttttctaataaatccagttgatctggggcaaccagatttagtttctccaactcaaccacaaggtccaagaaactcttctccttgcttatcttgcctcggcccatgtaatccttcatgaggaaaattaatgaggacacatcagatttatccaaatcctcaccaatctctgccatcagcactctatagtccgaaacaaggtgagggttcctgagcaggtgggtctccacagcttttctgtccatcttcaagatacgtttgagcaggtcaaatcgcctcactctgtagagcagttcagccaagtccccgacagacagcttacctctttcccgtaaaatatccagaaggtccctgacattaggtggaaccacatctatagcaacatcccggcacaaaaagagcagcatctccttctcatctgtatcaagtgcttcttcaacctgatggatgacttcagcagacatcctactcttagactagggaagctcacaagggtcttgcagtacagctccgggccagtcaacagaaagccagcaggcagtcaacttcatttctgagggctgacttcatttctttcagaatcctttccagtgggggagttcgtcctgtcgcggccggactctcctgccgctgccacctcagccttccttcgtgccgaattcgccacccagc

SEQ ID NO: 315445 - DNA, 1171 bp, Homo Sapiens
ttcaaatcaataacattcttatttatttatttaattcccttgaaagtctcatatacaccactaagtagtcacattcacaaacttaatttttataaattcagcagcagtcttaggaatcctaggagaagaagaactccataaaaatgcaactgtaatagtcagtgagagaggtgaatttctgctccattcaatagtccaggtcttcatcaaggtatcttaaaggctgaactcactgggttataaattcccattttccttttcagtgtggctcagaatggcctcctgaggaattcattaggtccagatcatctgcattcaggcaagaattcatctcccggtattgaatttggtggactaagttctctcctcttgaggaaactgcaagccgctgtctctgtcttcgctttttagtcaagaagaataatgcgacgaaaatggccaacagaacaaccccaaggatcccgactgcaataaaggatgactgacgggatgagcgacctgttgtggctttttgtggggttttctgcactgaaatatctgtgcaattcactgcagcgtcttccttgtgcccacactcactatggccccagcgtctggcaggacaatcccacaaggaagactcattccctttgcacttcacttcattgagccatatcggtccagtcccctgaccaaactctgcttctttgaatgctttcaaagctggaccacagccaagttgttgacacaccacctgagcatcgtccaagtcccaagagtcatcacacactgtcccccaggaacctccatgccagatctccacacgtccagaacaggaagtgggtccttcctgaagtcttatcttgttgtcacatgtgatccaggtctcctccgaggggctggccagtttctttctcccatggagatgatggcactgccacagcgtgtcaggtccttttggacactgaacattgtccacccacatgggaatggacatggccttgtctaaagatgcagggttgattttccctttgtctgcacagcccagctgcctgcacaccacacccacagtggtttcagacatgctactcttgccaacagtgccccaagctccattgtaaaaaacttccagacgccctgcacaggcctctctgctggcttcactggtcagtctcagagacatgaattctga

SEQ ID NO: 315446 - DNA, 532 bp, Homo Sapiens
  misc_feature (31)..(31): n is a, c, g, or t
  misc_feature (77)..(77): n is a, c, g, or t
  misc_feature (371)..(371): n is a, c, g, or t
  misc_feature (485)..(485): n is a, c, g, or t
cagtgaaccccgaagatcttcccccattgcnactcccagcctgggcgaacagggcgagactcctgcatccccagaantccctatagttgtaaacagttcctttccaattggatctgttctcctcgtacaacagaatatggtatattcatttcccaggaagacatctttgaacacctttgccttgacagtatcagcaacacatataccagtgtttgaaatgccaacgccttgaatttcccagggtggttagagaatcaggtagggcaaactgcaactgttttcttctgggaacaagatgaacttcccacaaccagctttctggaaaataactccgaatttctggcttgcttactggtaacagggtcttcaangtgtagccttcccaattgcatgtctttatgagagatattagcacggagctggcttgcgacgacacaacattcagtgaaagctttgatgcatcttggccctaaactaatccggtnagctcgctgctcacaggtttcatcattattaacgcaggctccatcgt

SEQ ID NO: 315447 - DNA, 912 bp, Homo Sapiens
tgggtggcgaattcggcacgagggaacaacacgaccaacagatactataaggaaattccgctgtcagaaatcctcacggtggagtccgcccagaacttcagccttgtgccgccgggcaccaacccacactgctttgagatcgtcactgccaatgccacctacttcgtgggcgagatgcctggcgggactccgggtgggccaagtgggcagggggctgaggccgcccggggctgggagacagccatccgccaggccctgatgcccgtcatccttcaggacgcacccagcgccccaggccacgcgccccacagacaagcttctctgagcatctctgtgtccaacagtcagatccaagagaatgtggacattgccactgtctaccagatcttccctgacgaagtgctgggctcagggcagtttggagtggtctatggaggaaaacaccggaagacaggccgggacgtggcagttaaggtcattgacaaactgcgcttccctaccaagcaggagagccagctccggaatgaagtggccattctgcagagcctgcggcatcccgggatcgtgaacctggagtgcatgttcgagacgcctgagaaagtgtttgtggtgatggagaagctgcatggggacatgttggagatgatcctgtccagtgagaagggccggctgcctgagcgcctcaccaagttcctcatcacccagatcctggtggctttgagacaccttcacttcaagaacattgtccactgtgacttgaaaccagaaaaacgtgttgctggcatcagcagacccatttcctcaaggtgaagcttgtgtgacctttggctttgctcgcatcatcgggcgaagaagtcgttccgcccgcctcaggggtggggcacgcccggcctacctgggcaacccgaggtt

SEQ ID NO: 315448 - DNA, 386 bp, Homo Sapiens
gcccaactgtcacgccattccaggaaaaaggctctatgaatataagctacactggtggcatcaccaaatcaaaagcatacccgcgaatataagaggccaccaaagtatcagtttatcaaagaccctttataacctacccccacttttagtgggcaccataaaggaatgcaccctcaagataagcttgacctggaataaacccacccattctctagacccgcacccggtctgtgtatcccctcaggagttcaaggacgccttacactttgagcttagattgcggtagtcacaaatactccgtgtccataggcatgtgacagaaaaaaatttgaaatctctctataagaaagaatccctcatcataggttttgattaatcccctcgtc

SEQ ID NO: 315449 - DNA, 847 bp, Homo Sapiens
ggggtatttaaaaagtgtttggagacttttcacctgtcctataaaattttgaattgtgtatgtgatctacatagaaagaatattaaagagtaggttgaactctttatagccaaatacagccttaaatatgcttgtatagcatccactggcagaagtaatagttgtgcctcagacttgggggttgcatgtggccctgggggagttactacccttggtatgcatgagcggttcctattagcatcagtgggaactcagtactctgtatgtatccacaaaagggaacttgagacccacagttattcttaatttctgatattaacaaccgtacatactgctgaatttaactcaaaatatttcaggtaagtgaaagtggtgcttaatgtagactatagaatgactttcaggtgttttcaactgaaagtatatatccagaactgcatccttatagaaatacaagtaagacttaggataatttgccttcaaaacagttttcctaatctcagcagtatccagtgagtgaagaacacttgactgactcttgggccacctctgttacttactgtactatggaagctcctggtgaatgtttacaattatgggatgtagtatttctatttgtactttaagtcaaatgcttatatgaaatatgtgacaacaaatagagaagactggctctgttagtaattatgcagtatgtactctatttaaggatctgtggtagtataacatgagtgaatgtcattaattttgaagtaataactgccacatgtgggaagtaggggagtagggagaatgaattccaatctgtgattaaaagtgtaaactatagactctactgtagtacatt

SEQ ID NO: 315450 - DNA, 994 bp, Homo Sapiens
  misc_feature (24)..(24): n is a, c, g, or t
  misc_feature (43)..(43): n is a, c, g, or t
cgcggggggccgcccgcgctcatntccctctctcctcctcgtncgccgcctgggtggcgaattcggcacgaggcgtcctcgctgcggaaagttggggcaacctgttgctagtctggtcgttggtgacagcgaggcttccgcgctcgctgctggtgagcagccccggcgtgccccgcgggctggaagaggcggcggcgtgatgcggcccgtggacgcggacgaggcgcgggagccccgcgaggagccgggcagcccgctgagccccgcgccccgcgccggccgcgagaacctggcctccctggagcgcgagcgcgcccgggcgcactggcgggcccgcaggaagctgctggagatccagagcctgctcgacgccatcaagagtgaggtggaggcagaggagcggggcgcccgggccccagcaccccgcccgcgtgcggaggctgaggagcgggtggctcggctgtgcgccgaagcagagaggaaggctgcggaggcggcgcggatgggcaggcggatcgtggagctgcaccagcggatcgccggctgcgagtgctgctgagccggcgaggccgcgcgggtctggagcggagcgcggcggggagtgtcccgcgtggaaggcgctgggtaggcagggaggggagcgcagagccgtgccacgctctccgcggagttggtttcattcttttttcataggtggccaactgacgaactgtgttcacctgataaggagtcgtggctgcttggacaggctcaaaccaagagagcctttcgttttggctcccctgtttttctgcctgcgttttctccacattagccactcaatttcccgtaccatcctgggcggatgacttcagcattagatgggccaggggaatttttttattaataaggggcattccgtgtgggaaaagacagcttttccattaaggccccccctaaagggatatgggcctatacagtaacctcccctgctgcgaggggcaatattttgttc

SEQ ID NO: 315451 - DNA, 981 bp, Homo Sapiens
ggttctccccagatttcccgggaaggcgaaagatcaaaccgacaaaagcccccacagaggaatatttccaggcctttgaaaattccaattaagggtccgcggggaacaaaaaagggccccccacagcagcgtacggtactgtatagggcaaaatcctttaccggggaccattaaagaaaagcggtcttttccaaactgaaatgcgcctattaataaaaaaatacacctgcccatctaatgctgaagtcatccccgccagggatgggtactggaaattgagtggctaatgtggagaaaacgcagggcagaaaaacagggggagacaaaacgaaaggctctcttggtttgagcctgtccaagcagccacgactccttatcaggtgaacacagttcgtcagttggccacccagcgccttccacgcgggacactccccgccgcgctccgctccagacccgcgcggcctcgccggctcagcagcactcgcagccggcgatccgctggtgcagctccacgatccgcctgcccatccgcgccgcctccgcagccttcctctctgcttcggcgcacagccgagccacccgctcctcagcctccgcacgcgggcggggtgctggggcccgggcgccccgctcctctgcctccacctcactcttgatggcgtcgagcaggctctggatctccagcagcttcctgcgggcccgccagtgcgcccgggcgcgctcgcgctccagggaggccaggttctcgcggccggcgcggggcgcggggctcagcgggctgcccggctcctcgcggggctcccgcgcctcgtccgcgtccacgggccgcatcacgccgccgcctcttccagcccgcggggcacgccggggctgctcaccagcagggagcgcggaagcctcgctgtcaccaacgaccagactagcaacaggttgccccaactttccgcagcgaggaccctcgtgccgaattcgccacccagc

SEQ ID NO: 315452 - DNA, 1317 bp, Homo Sapiens
  misc_feature (431)..(477): n is a, c, g, or t
cattttgaaaaatgtttatttaccttaccttttcttggccaagtcaattgctttggtcatctgcacaaagattctaaacactggctttcagcatttctttttccaagcaaatgaaatttatcataacaagacagagctctgattttagtctctgtggagtctgggctctgatgacctaggctagtcatcatctaagcctggaatgactgtttgggacccccatggccagcttgaagctttccttcctcagccactctgggcccctgaagaggtcacatgcatctgtggcagagactgtattataacaaagttgtttaccccaaagtcagcaaacacatgtacctagaactcatcccaattgtaggttgctcaccagacaggttacacgatgtgcaccagttaacatgccataggaaaattacattccaagnnnnnnnnnnnnnnnnnnnnnnnnnnnnnnnnnnnnnnnnnnnnnnngctctccctcctttgatctgatggtctgcagaggtcctcaaatccacacactgccactcttcaagaccaaccgtccactgggccttcttaatctcatccaaagtcgcattcacaactttgacaggagcttgggttcttcatgtggcagctgcaaccatgtagtgtcttctcacttgcagaactctaacctcaagtctctcatgagtccccaaattccaggaagcataaaaaaacagcaaagcacacgagtatacttccaaactttgaaaatacaataagatcacaggaacaaatatgaccacgcagcagcgtacgtactgtataggccatattcctttacgtgggacattaatgaaaagctgtcttttccaaactgaatgcgcctattaataaaaaaatacacctgaccatctaatgctgaagtcatccgccaggatggtactggaaattgagtggctaatgtggagaaaacgcaggcagaaaaacaggggagacaaaacgaaaggctctcttggtttgagcctgtccaagcagccacgactccttatcaggtgaacacagttcgtcagttggccacctatgaaaaaagaatgaaaccaactccgcggagagcgtggcacggctctgcgctcccctccctgcctacccagcgccttccacgcgggacactccccgccgcgctccgctccagacccgcgcggcctcgccggctcagcagcactcgcagccggcgatccgctggtgcagctccacgatccgcctgcccatccgcgccgcctccgcagccttcctctctgcttcggcctcgtgccgaattcgccacccaggcctcgctaccta

SEQ ID NO: 315453 - DNA, 362 bp, Homo Sapiens
cagggcatcccatacgtcggagagacagtgcaggactatagttactaatgagaaaatcactcctgtactgactagggactagaccttcctggccaaagatcggagaacagagacaatcgttcaggtaattctatttacccttggccatggagacttgccatggattcaactgcatgaaacagctaagatgtctctcaagtccttagaggcctgtagactgcaggatggaaacgataatcacggttttctccctctcagagaagtccagagtccagttcacaggacctagccaccctcacctccattccgatgcttcagcgccaggcacacttcgataatttggacacctagttcgtaataga

SEQ ID NO: 315454 - DNA, 541 bp, Homo Sapiens
  misc_feature (303)..(311): n is a, c, g, or t
gcaaacatacagatttcttttgctcgcctatgcatgatgagtaggaaagagggagatccatctgaattttaacgacctctttctgtcctccagagggattggaagacacgacctactgactgacatcctgggcgaacttgccccttcccttcaacacctgttgatgtagttcctccaaagttatcagacctgtttggagacagggaacagaaatcagaaaaggagattacccactttaaataagttgacagtcattacaattccagtggcctacaagtagcaaataacattctagttcctaannnnnnnnnaacactctccttatgaaataactgaccataatatgagaaatggattctgagaccttgctaggcctgtcaacagagagctacgaaaatctaaaaacaaaagcagtatcatctttgaaaaactataaatgtccttttgacatcaaggccgtgtctatttatagttgatgatgatttgtaaatggttttaagttttttttctgtaacttcaattcacaccatttaacgtgctt

SEQ ID NO: 315455 - DNA, 833 bp, Homo Sapiens
  misc_feature (527)..(585): n is a, c, g, or t
ggggggagccggcggcggagtccgggacgtggagacccggggtcccggcagccgggcggcccgcgggcccagggtggggatgcaccggcgcggggtgggagctggcgccattgccaagaagaaacttgcagaggccaagtataaggagcgagggactgtcttggctgaggaccagctggcccagatgtcaaagcagttggacatgttcaagaccaacctggaggaatttgccagcaagcacaagcaggagatccggaagaatcctgagttccgtgtgcagttcccggacatgtgtgcaaccattggggtggatccgctggcctctggaaaaggcttttggtctgagatgctgggcgctcgggacttcctcctatgaaactgggtggcccagattatttgaagtgtgccttgggccctccaaaccttcggtaatgggtaggccttcttaccccccctgggaagcatctccccttcatttccggtggtttaccccgtcaacggggccatatttctccctccggggacgnnnnnnnnnnnnnnnnnnnnnnnnnnnnnnnnnnnnnnnnnnnnnnnnnnnnnnnnnnnaccacggttcccttcgcggcccattgggacctccccgaaaaattgcgtgcactccgcgcgcggcgtaatgccttctccccacccccgtctccttgtgttccccctcgttttttccccctccgtattccctttctagtccccccgtgcgcgtccctcttacatcggcgttctgacagcatccgctctgcattttattgcctctcttccttttttaattttcccggcccggtccttttgttcccctcacc

SEQ ID NO: 315456 - DNA, 317 bp, Homo Sapiens
gggatgctcagcccttatattatttcagctagtgaccaggtcaaaacttcgttatcttactctgtttataacctagccaggcctttataattttttctctaccttccttttttcttctggtttgacatttttagttcagattattagtttttattggacattagcagagtgatgaaaaacagattttttaaaactattcttcagaaattgagtagcggtctgttggcactgtttatgactgagaactgtgcatacattttactcactgtggttaatattgagcttccccagacatagatttcactttggtttttctg

SEQ ID NO: 315457 - DNA, 362 bp, Homo Sapiens
cctgcaggcaacagacgaggcctccccaatgtgaaaaagaagaggaaataggtatgattcaactctttcgaacatctgtaagccagttatgtgctggggatgctccaggcttagagacggaggcatcagagagaggaaagttccctccttgatataggaggggaagaagtcggatgataaacaaatcaccaggatctgtatcagagcactcagccgcaggctctatgacagcagaggaaagaatcatctagtgtgggtggggagaggtggagaaggtggcagcagggtgggaaggagggggccctcagcagcctgggccgggcagtggggcagaggcagtgtgtggggtagaccgggcagcc

SEQ ID NO: 315458 - DNA, 847 bp, Homo Sapiens
  misc_feature (161)..(161): n is a, c, g, or t
  misc_feature (163)..(164): n is a, c, g, or t
  misc_feature (166)..(167): n is a, c, g, or t
  misc_feature (384)..(392): n is a, c, g, or t
  misc_feature (625)..(625): n is a, c, g, or t
tcagattccaagtgctctcttaaatggcaaattaagttaaagaatactactgctccattcccctcacttattctccagttaattgcttgtcagttccatttcaagaaagcagtgatgttccaggtttgattcagttttcctgtgcacactattgccaaatntnncnntagcaaagattctgcactggaacgtagacagttggaaacagtactacctacctagaggttatgtgttttctctttctccccgctttcacctctttctttcccaattcaaaacagccaagtgagccctgttctggtattttgaatcattagagaaaagaaagggagtggctgttttgagttgtcctttctttgcagaaaggagaaaatgtgattgtgnnnnnnnnnaccagcctacttctaagtgtcactgcctggtttttctctttttcaaggattagaactaagaggacacaccagcatcggagtgtattaagcccctgaaacacatggtagctagggactgaacacaggaaccgtatgacagcagcacaaacccccaaaggatgttcctgccttgtgggcccctgagccccttgggagactgaggatatgaccagatttatcacaactgttggagngttaagtgaaaatactctgtagttgttctgcagaggaaccctccttccataagaaaattcttggtaatacagaaggtgcacatcacccacagtggccttgtggagatgctgtgaaataaaaaactccttgtcctggagaatcttgattcacctcagagggctgaagggtggaacttttggaatagcaacctttaggatttctaattaccacctccggggttt

SEQ ID NO: 315459 - DNA, 376 bp, Homo Sapiens
gtacatgcagatttaataaagcagcttgccttgtttttatttcttgtgaggtcagatgacagtggatgatattgacttgggaagatggccagaagccactatttaccatgtacatatatcagagagccatttattaagtttgaggagattggatcttaagtacttaattagaatgacattaataattttaataaaatgttttgcattgagagaactattcactcagaaatagcaggggtgaactcatctccaaagaaatcatttaacatgaagttagtctaggattaccaaccaagagcatggcattctcccatgtatctgactttcttcgtggctgccaggattcccggtatagaggcaaatacacctgtggctc

SEQ ID NO: 315460 - DNA, 888 bp, Homo Sapiens
  misc_feature (210)..(210): n is a, c, g, or t
  misc_feature (214)..(214): n is a, c, g, or t
ttccaaggattggctaatcattctaggagggccttttaccttacccaattagccaatttaaccatgaaaatcaaatgaatgcaattcactgttttccaagtagaaatgtgacccaatggacctcaatgcctagaagggcaacatctatacctttttgctgactggagcccctgacatatgcaggtgtagttaggaaacagaaatcaaacnccanccttccctttggctagtcactgtgaaaagcgtgcgtaaggcaattgaatcgagggttaagggttcatcttgctaatgtcaaaagtgacactaacaagattcttagcctcatccgccagatgacggggcctctgcgtccaggtctccaggagcaagctccgcctccttcaccagacaacgggttataacctcctccccgcaaaggctttctgtccgatttccgtttcaggacagatgaagtggaaggcccaggactgtcttcctcctggggcttctttgcatttcctttgtaactttttccttcttgcatgctgtcccacatttcaatcttctgtctccttttttcttcttcaagttgtttcagtttttccttatgcttttcaacttgcgcatttagttcttcttgcattttcagtcgagcagctgctaaagcttcttgtcgtttaacaacaacatcaggttccacagcagccgcagctcggtccagctgcctctgcctcaaggctcttagccgggcggaaagcttctgaaagaccacgtagagaaggatgcagctgaagacgatgtaccagccataggtggccagcagggagcccaccgtggtgtgcaggaagcgcagcccctcggtctccagggccggccgcgcggacagagactcctcttggcgttccatga

SEQ ID NO: 315461 - DNA, 395 bp, Homo Sapiens
ccaatgcaacctccaccaagaactctggccagtaagaaaattgttagtgaaccaaatatccaaatggttataatccatgagaccaccctaaactgtccatataatgatatcatggaaaagaaaagaccaccagccagaggaccccaaaagtcaggattgtctctcacgtagtaaatatcctttagatcaatgtccaattcttccaagagtggcttgttatcttcaggatcatcatcttcaacttccagaagccagccataacctctttgtctcagaaatgtagtagctgtagattctttgataaaatctccaccaagatttaatttgacatctggggatgctattgaaccactgagatcttccgcgtctgctgaggagacaaaggtgaagtcccc

SEQ ID NO: 315462 - DNA, 1417 bp, Homo Sapiens
  misc_feature (435)..(435): n is a, c, g, or t
  misc_feature (460)..(460): n is a, c, g, or t
  misc_feature (933)..(941): n is a, c, g, or t
tcgtggtgcttgggtggtcgccaccaagaagactttggtggggtagtctcggggcagctcagcggcccgctgtgcccgtttctggcctcgctcgcagcttgcacgtcgagactcgtaggccgcaccgtagggcgagcgtgcgggtcgccgccgcggccgcctcggggtctgggcccagccgcagcctcttctaccgcggccggttgggagtcgccgcgagatgcagcctccgggcccgcccccggcctatgcccccactaacggggacttcacctttgtctcctcagcagacgcggaagatctcagtggttcaatagcatccccagatgtcaaattaaatcttggtggagattttatcaaagaatctacagctactacatttctgagacaaagaggttatggctggcttctggaagttgaagatgatgatcctgnaggttacccagccacatcttgtgtntcctcatggattatacccatttggatatttggttcactaacaattttcttactggccagagttcttggtggagaagttgcatatggccaagtccttggagttataggatattcattacttcctctcattgtaatagcccctgtacttttggtggttggatcatttgaagtggtgtctacacttataaaactgtttggtgtgttttgggctgcctacagtgctgcttcattgttagtgggtgaagaattcaagaccaaaaagcctcttctgatttatccaatctttttattatacatttattttttgtcgttatatactggtgtgtgatccaagttatacatgaatagaaaaagatggtgttaaatttgtgtgtaggctgggaattcttgctgaaggaattggagaaaacctgttgctgcaaaattttacatgttccagatggaaagggaagtctaagcgctttttaaaacaannnnnnnnngtatttaattaagcaattgcagttatctgggatttttgggtcagaattttacattctgtttgattctccatattccagtgaataaaatacaaaaagcattgtggttttcaagattgtgtcgatattcacctaaaaacttgtgccaaaagcacctggattggtaattatatttcacttaagggtaacttctgccaatatcttgataatcacaagtgcaattttttcttcaaaatgttttctccagcatcacagaatcctgcagatatattattatattttatacctatatattttgtgaccataattcttactccacaaaatatatttctgattaaccattaggatcttttaatctgatgcacaaaccttaattgggccattaatcttttattttaaaacttaccttggtttacacacggcatataggtttaaatctcacatgcttgaaatcctggtacgatctccatacccgtaaa

SEQ ID NO: 315463 - DNA, 804 bp, Homo Sapiens
  misc_feature (37)..(37): n is a, c, g, or t
  misc_feature (58)..(58): n is a, c, g, or t
  misc_feature (79)..(79): n is a, c, g, or t
gttctaagagccatgattatgaagcccagcagtgttntaacaatgtacactgtaaatngtaaccagaacgcagcggctntaaaggagtgcttatttgcctaaatggctgttgacatacttaatagttttgtatctgattctagtatgtaaagcatttcagtattatgagaatacaatttacacactggatccccttgtacttattctttcagttgtcaaaatgttaccattattgctgggattctaagaaatctctacaaatgcctctgatgacatcagaaacaattgattctaatcctgtgaactctcttgtgaagaaagcatgagactgcttcggtttagaagccatatctttcaggtcatccagaggtgcccaagccacaccaacagagaagatagtgattcctgcatcatgtgcagcagctgcagggccggacatcatcataggactgcccatctgtgacaattactaggaagttcttgttggggctctcccttatagggccaaacacactaacagtgaaggaaatggcatcaccagtagctgttccaccactcatatagcggatgtttctgatgacagctaggacattctctttggtgctatagtcagtgaaactgaactccgtgcgctgatcataagtaaactgtacagcagctatcttggcaccaatgtccgagatttcaaaagtcttggctatgttggaaacaaattcaagcatgaggcggaaattgctatctccaacactgctggagccatcaattagaaaggcaatgttcactgagttataacaggtcttgctg

SEQ ID NO: 315464 - DNA, 481 bp, Homo Sapiens
caagacagtgcttaatggtgtcccgtaatcttggttcagtgggatatgatcctaatgaaaaaacttttgataaaattcttgttgctaatagaggagaaattgcatgtcgggttattagaacttgcaagaagatgggcattaagacagttgccatccacagtgatgttgatgctagttctgttcatgtgaaaatggcggatgaggctgtctgtgttggcccagctcccaccagtaaaagctacctcaacatggatgccatcatggaagccattaagccagggcccaagctgtacatccaggttatggattcctttcagctgacacacatgctattcaagccatgggcgacaagattgaaagcaaattattagctaagaaagcagaggttaatacaatccctggctttgatggagtagtcaaggatgcagaagaagctgtcagaattgcaagggttggctaccctgtcatgatcggcctcagc

SEQ ID NO: 315465 - DNA, 487 bp, Homo Sapiens
aatcattccagaagatgcagtatttttcctaaggcaggagaaaaccctagttcatagacagccaggataaaaaccctggaagaccatgagccaaggtgaacgaagaggaattttctaaatcttggggacagagaattatgttacatcaaggcagccatgcaataaaatggaaggctatgaaagcaagcaaggcacaagaaaacccccattccacagagagacacaagtgttctatttggtgaagagtttggtgcacagacagactgcatcctgtgaagaggtggcccttgtcaaggctactgcgcacaggaggatctttgcatctttaggatgtgtcactagctcatcgaaactatttctgtaactctctgcaagagcccaatttaagctggcgtctcagttccctctgcacttcaaaagagacccaatttcccaattcctcctcagagtccgtgaggccagatgcttcagcaaatgttccagagaa

SEQ ID NO: 315466 - DNA, 1019 bp, Homo Sapiens
  misc_feature (986)..(986): n is a, c, g, or t
ggaggacattcacatcggttgggtgagtcgccaggtccatttgcgcctagaagaagctggattgggccatcaaacagagtcccgtgggattctaccaagagggtgtggaagatcctccagaagtgccacggtctctccatcgatggttatgtcctcccatcctcgacgactcgagagatgaccccgcatgagatcaagtttgctgtccatgtcgaatcggtgctgaaccgcgtgccgcagcccgagtaccggcagctgctggtggaagccatcatggtgctgacgctgctctcggacacggagatgaccagcatcgggggcatcatccacgtggaccagatcgtgcagatggccagtcagctgttcttgcaggaccaggtgtcaattggtgccatggacaccctggagaaagaccaagccacaggaatctgccacttcttttatgacagcgctccgagtggggcttatgggacgatgacctacctaacaagagcagtggcttcttatttgcaggaattgttgcccaattcgggctgccagatgcaatagggtctcacctggaaacatgatcacactctcaatctgtcacgtgccccctagccttactgggaaccttctgtcccccaagatcccctgtgctatcaggaaagcatgtcccatcagaaacactctcggggggcaatggtagcactcaccctgaaactgatgtatgttaaagccacagagatagagctgaggagtcctgtgttcccccgcaagagcaccccgggatcattttctaggttcatttctctggaacatttgctgtagcatctggtctcacggactctgaggaggaattggaaattggtctcttttgagtgcagagggaactgagacgccagcttaaattggctcttgcagagagttacagaaatagtttcgatggagcttagtgacacatccttaaagatgcaaagatcctcctgggcggcagttagctttgnacaaggggccacctctttcacaggatgcatttt

SEQ ID NO: 315467 - DNA, 861 bp, Homo Sapiens
  misc_feature (37)..(37): n is a, c, g, or t
  misc_feature (41)..(41): n is a, c, g, or t
ccaacctgtacctcttgtggaagcgaaccgggtgtgnaaanggaacttagcttaggattctgatatcgacgtgtgaaatggactgaatgtgcatttttggaagtagaggttcatttttgcttcttttgtgccttttttttggcattttttacccttccgagcttttcgcatgatccatgttcttactctgaagaacttttttagtacttaactgagcttttgatgtatttgcctgagcagaaacttttactactctgcctctgctgtgagcaatatttgaaaccttaaccacagcatttcttttctggctttcattttggtttttcccatccactttatggtcagttttcagttttttgttcacagtagttacactttcatttctccgttttttatcttcatatttagaagagtcagttgcactactaccttttctaatttcctttttttcagcaacaacactgtttttacatttatcacacagaacttgcctgggtcgtagtttaatagcattcattattgaagtgggttcttccctgtacatttttcgtttgggtcgcttaattttccgaggaggtggctgaggtattgattggttatatgtgtccctgataaacaaagggggaggataaggtgctccttcatggaagagaggtgggtgggtttgggaagtccacaggctttcagccaagctcagctcggggatgcggggacagggagaaggggtcatcggggaacagcacccatttgcttcacaccttgacttctgtcccttcttggaatgtattactttggagcggcatggcttctggtttatccttatattcccttttgggaaatactgtcacagggataccatgg

SEQ ID NO: 315468 - DNA, 1387 bp, Homo Sapiens
gcagagctgcctgactgctagaaatagctgtatatcacatgaggttaggccactaaagcatcgcttgtagacggctgtataatagaactgcatgcgagagctaccgaaagtcaacatgaactgggagtgagaccgggagaactatctgtggctccacgatgggctgcaggacagagacgtgagcgccaccttacctgtaccaggtggcactcatgagggcgatttggtccgttcctatgaattgcacacgtgtcctgtgcgttacgggtaaagcccggggatggggcatcgggcttctccctctggtccactgatgggggagtcctcacaggaaaacactgcctgagctgccgtagggtggggcagggacccctgtgctgatgccggggtgcaaagctgtaagcaacctgttggtcccccagcggccgaggtggaggctgcaagggccaaggctggctttttcccaccacgcacaggccctgggataacttagcaggcttgaaggggaagatggcagggcgaggggttgggggagcgcagttagatttctcttacccccagcccccgttaggagatggggctggagacgctctgtgcaggtgcctggcaagaccaggaagggatgctccatgtggcaaacacacccctgaatgcctggctgcgtgtacttgggtgtgtatacgcacctctaggctgtaggaacgtttgcagtatctgtaggcacggtcctgccaggcctgggtctcagtcccgagaaaccaagtatgtgtctctgtgtggcctgagcgtggttcacagcaaacgccgccacccacacggtcatgcgtgcacacgtggtccctctgtgtgtgtgtgaacgtggtgtgtacataaggacccacttagctgcatctccaggtggatgcagatattttggaacatctggtcaaccccaggggaaaccgtattactgacctttgtcaaacctgcctagagcctccactctgagctgcctctgcctgggctccgagccagggtttgcccaaggtcacggtgggaggtgaggagaggggtttccaaaccttcataatactgtgtctttggccttggtgacatcttcggccagcagcttagaggtgtgtgtgtgttggtgttggtgggcagcgggagaaggatcccgttcccctgccctccgcccccgccaacaccttgaacctgggggcctcgctgggcaggcaggctggctgaggggagcttgtactactgtttgaagaaggttcagaaggtggggacaagaagcctggcgactgccttggcctggaagtggcttcggaaaaggggcccccacttggctcttaaagactgcgacgcgtgggtcgacgatatcccgtaattccggaccgtacca

SEQ ID NO: 315469 - DNA, 1609 bp, Homo Sapiens
  misc_feature (492)..(567): n is a, c, g, or t
tcggcgcggatccctgggcgtccgtacgtcggagtccttcgtcctccagggtccctgttctttgcgccagcgggaaccactatctctgcactcctggggttttgttacatggctgctttcctcaaaatgagtgttagtgtcaatttcttcagacctttcaccaggtttttggtgccatttacccttcataggaagagaaataacttaacaattttgcagagatacatgtcttccaaaataccagctgttacttatcctaaaaatgagagtacacccccttctgaagagctagagttggataagtggaaaactaccatgaaatctagtgtgcaagaagaatgtgtttcaacaatctcaagcagtaaggatgaagatcctctagctgccaccagagagttcattgagatgtggagattgcttggcagagaagtaccagaacacatcactgaagaagagctcaaaacccttatggaatgtgtttctaacacagcnnnnnnnnnnnnnnnnnnnnnnnnnnnnnnnnnnnnnnnnnnnnnnnnnnnnnnnnnnnnnnnnnnnnnnnnnnnngcagcagcaagggaagaagcaaaaaatatcaagctgctagaaaccactgaggaagataaacagaaaaactttctatttttacgactttgggataggaatatggacatagcaatgggctggaagggtgcccaggccatgcagtttggacaacctttggtttttgacatggcttacgaaaattatatgaaacgaaaagaattgcagaatactgtttcccagcttttagaaagtgaaggatggaacagaagaaatgttgatcctttccatatttatttctgcaatctaaaaatagatggtgctttgcacagagagttagttaaacggtatcaagaaaaatgggacaaattgcttttaacatcaacagaaaagtctcatgtagatttatttccaaaggacagtattatctatttaactgcagattctcccaatgttatgactactttcaggcatgacaaagtttatgtaattgggtcttttgttgataagagtatgcagccaggcacatccctagccaaggcaaaacggctgaacctggcaactgaatgccttccattagataaatatttacaatgggaaattggtaacaaaaatctcaccttagatcaaatgatacgtattttgttatgtctgaaaaacaatggtaattggcaagaggctctgcaattcgttccccaagagaaaacatactgggttttctggagatttcctcagcattctcaagagtttatcaacagactaaagaaggcaaagacttaattcattttcaaaaggttctctgaatgtgcacagaacacgtggctcaaatgagaacatttgatggcttaaaaagtaaatgcgttagaaatacagttctgttaatgtatttcttcccaaacaattcatttttctcttctaaaggtagtctttcccaactgactgtagggttgtgtcttttcccaattaaatatctgcagaactttgggattatactttgtttactgtagaaagataataaaaagagttgtccaagattgttgaacagaataatctttatcccagttct

SEQ ID NO: 315470 - DNA, 1430 bp, Homo Sapiens
  misc_feature (82)..(91): n is a, c, g, or t
  misc_feature (230)..(238): n is a, c, g, or t
  misc_feature (250)..(258): n is a, c, g, or t
  misc_feature (390)..(392): n is a, c, g, or t
  misc_feature (396)..(396): n is a, c, g, or t
  misc_feature (421)..(547): n is a, c, g, or t
aggggctttccgttgtccggcgggaaaaatatttccgggaatagtagtctccccgcgtttttgtaaatatgcgggcccggannnnnnnnnnccaaatgctttcacttaagaggttttttcgtggaggtccccccttttgttcgggcccccagaggttgttcgcttcggggaggcccccttttgggagtttttgtttgcaaccccgttgtttgtttcccggggggacggcnnnnnnnnngggtgggaaatnnnnnnnnntttgtttctggcccacggcattctcttggatacaaggcattttttctgtgggggagatctccggcgccccgggcgccaaacaaagatggtttttgaaaattttttgggggcagggcggcgccccccacgggnnnaaantattaataaaattctcatttattcnnnnnnnnnnnnnnnnnnnnnnnnnnnnnnnnnnnnnnnnnnnnnnnnnnnnnnnnnnnnnnnnnnnnnnnnnnnnnnnnnnnnnnnnnnnnnnnnnnnnnnnnnnnnnnnnnnnnnnnnnnnnnnngcaaagaccacagtgctttactttttgtcttagcagaggagataacttgagggacagcccccaaggcgccaggtagccttcaggggcgggcagggttgggggaggtaggagactcggaccggcagccctggctccagcttcatcatctgtgtcttccctctctggccaggctcttcgaggggatgcaggaggctgggcacggtgagctggcagggggcttggtcttcgggtgcccagcaggttgtcagctcctgtttctgatggactcacctgcaatgattccggcataaccgggacagctgcctgcacttgccactggtgaggatgatgatgcctgtgatgaacagcacagctgcgaccaacagcccccgtttccggagggtgtgttcatcatagaagaaggggtcatcctcatgaaaaccagatggcttgagggtctgggggtctgtctggacgtctgtgcttggggatggtctctcagagagcgtcgtggtgtcatcagtgggatgagctgctttggtgctcttgtgtgtctctggatctgtcactagaggcccatccgttccttccagttgctgggtctgggtctggggttgtggtgtttcatcagcaggccaggttggggttggagaggtgggctggagttctgtgtagactgcatctggggctcgtgtcgggacctgaatgtccatgatagttgagtctgctgaagaactggacgtggtatctttcaacgtctgtcctctggtggggagaatcaggccaacgatggtgagaagacacaggcgaccagagggcgacatgtcggagctgggggtcctaagccggcagcctcgtggagagagggacgcggcggtggctgctgcgtccaggcggagggtgt

SEQ ID NO: 315471 - DNA, 992 bp, Homo Sapiens
ttccttccccgccccccgcgggtgggcttctggaagtggatctccaggacgtcatgcagctccgggccatccaagatatcaggaatgttgagcaccagtaccgagcggggaactggctgcgacctgatctcagccttctggatctccccattcacatacggagagactctcagagggacttgctgcccacccagtggcactgtgaactggccgatttggcacagacgctgagccactccatccctagcaaaccccagcatgacactccctggcagtagctcccgaacgtccacatcgccacctccgttcctagtcttgccaaagaagatctctagcttgtccagcagctcctcctcactcagcctgaggctggcaggaaatccagtgaccaacaccctccggccactcaactggctggacaccatcacctggatggtggtgaccatgggcagctccaagggctggacctgcacccgcagccggcactcctccatgttgatcgtgtgctccttttgttgcagcacctgctcagccactttggggtcatcaaaggtgatcagagcagagcccgcaagcagagggcagtggatccgcaaattggaaactaaagacttaggcacttccgggtcctgctgggtgtgtcctcggaataccagggggatcttgggcactgaaaatgggaccttgtctttgggggagtccccgagctcctttctcagctgctgcaggtcccacagcctcatcttgagtctggcctgctcctcctgaagggcgtggagggcggcatccagtggggctgacatgggtctcgggtctgtttggcaagagctgaggcttcagagctgggcacagtggcagaattcacagcaactgaactcttgtttgtaccccccaaagggctgtggtctctctcagccccagcaagacccgaaatacacctcaggaggctctgctcgcaggctgtttgcttccactttcatttccgtgaaatc

SEQ ID NO: 315472 - DNA, 685 bp, Homo Sapiens
ttcggtgccaaaactttactggaggtcacatgggactaggggccttctgtccctgccagcgcctccattcccaggcgatgccccgctgcctgcccacctatcctccgggccccacatgaacaagctgtgtccccaccgaggtcacagctctgccctctggggatgggcgagggaggggccacagagcccggagaggcctcccgcaccgtcactcctgccgggtctccaagcagtccagcaccagtgcagcctgggtcttggcttcctgcaggaggctggaaacacgatggtggatctggtccttaaatgcctcgtctgtgatgtccctcaggttgatgagcacgttgaaatatgcgccaaacacgcccatctccagggctttggccgccacctggaggtctgaccggcaggccaggttcccacaccgggccagttcctgcagggccggccacagcgaggccaccgtctccgccagcgtcagcggcacagagactgcccgcctcagaccctcctgtagggccgccgtgcgcctgtccttttcctcaggtgtgttcttggggagcctcattgcttccaggtaggcggtgaaggcctcggcgtcggcatccaccagcgtggttagcttggccgaagcctcgcggaagggcgggatcaggcgccgcatcgtcgttccagctcctggtat

SEQ ID NO: 315473 - DNA, 1791 bp, Homo Sapiens
  misc_feature (276)..(276): n is a, c, g, or t
  misc_feature (511)..(511): n is a, c, g, or t
ttttttttggtgccaaaactttactggaggtcacatgggactaggggccttctgtccctgccagcgcctccattcccaggcgatgcccgctgcctgcccacctaccctccggccccacatgaacaagctgtgtccccaccgaggtcacagctctgccctctggggatgggcgagggaggggccacagagccggagaggctcccgcaccgtcactcctgccgggtctcccagcagtccagcaccagtgcagcctgggtcttggcttcctgcaggagngctggtccttaaatgcctcgtctgtgatgtccctcaggttgatgaagcacgttgaaatatgcgccaaacacacccatctccagggctttggccgccacctggaggtctgaccggcaggccaggtttccacacggggccagttcctgcagggccggccacagcgaggccaccgtctccgccagcgtcagcggcacctcaggtgtgttcttggggagcctcattgcttccaggtagncggtgaaggcctcggcgtcggcatccaccagcgtggttagcttggccgaagcctcgcggaagggcgggatcaggcgccgcatcgtcgtgtccagggactggaattggcgccgcccgtaggtcatgaggcccaccatggagcccagcgccgcacccatggccgcagcggccgcggccaccgagccgcccccgggggccgcagagcgggcacccacctcccccacgaaggcgcgcagggacttgctgcccaggcctcgctcaggcccgcgctcagggaccaggtactcgatgatccgctccttagggctgaaggggcacagggagtccaggcccagccggctcaccaccagcctgatccgctgctcctcctccaggatgaagaggttctccttctcgcagtagaaggcggccgcatccagcagagccttcaggggcaccaggcccaccagctgtgagcccaccactgggaggctcagctcctgtgcttctcggcaggtctcctcgtagaccgtgtgcagtgccgtgacctcaaagtccagaagattggtggacacctgagccaggttcttctcatccaggtaccagccaatgccctgaactttcttcagacgtcctggctggtccttcccgcggccctgctcccgcaggttgagcgcgatgcggtgggcttgctcctttgtgccgagcaggttgatgttaaaagcaatgaggaacttcctcgcccccgtggccgtggccccccaactggggacaaaggagctgggaccaaagtcgggcgcccagtcggcctgctggagcttcttagggagggcctcgtactccccggcccggatggccggcagggtccggcgactgtccatcctggctgcctcgccgtacaggtaaactggcacgtccagctcctctgccagcctctggccaaaggcctgggcgcagagcacacactcatccacgctgacgcccctcacggggatgaaggggcagacgtctagggcccccatgcgggggtgctctccttggtgcctgctcatgtcgataagtcgggaagctacccgggcagcgttgagggccccctccaccacgcactccggcggccccacgaaggtgtacacggtgcggttggtggaagggcatgcgtccacatccagcagcacgcagcccggggtctgtgtgatggctccagagatggcgtcgatcacctcctggttcttcccctccgaaaagttggggacgcattccaccagctgggacatggccagcaccttgatccagatgctccat

SEQ ID NO: 315474 - DNA, 422 bp, Homo Sapiens
  misc_feature (88)..(88): n is a, c, g, or t
aaagaagtccaagcaccaagtgcagcctgggtcttggcttcctgcaggaggctggttccttaaaatgcctcgtctgtgatgttccctncaggttgatgagcacgttgaaatatgcgccaaacacacccatctccagggctttggccgccacctggaggtctgaccggcaggccaggttcccacaccgggccagttcctgcagggccggccacagcgaggccaccgtctccgccagcgtcagcggcacagagactgcccgcctcagaccctcctgtagggccgccgtgcgcctgtccttttcctcaggtgtgttcttggggagcctcattgcttccaggtaggcggtgaaggcctcggcgtcggcatccaccagcgtggttagcttgccgaagctcgcggaagggcgggatcaggcgccgcat

SEQ ID NO: 315475 - DNA, 521 bp, Homo Sapiens
  misc_feature (260)..(260): n is a, c, g, or t
acaggcccagagccactcctgcctacaggttctgagggctcaggggacctcctgggcctcaggctctttagctgagaataagggccctgagggaactacctgcttctcacatccccgggtctctgaccatctgctgtgtgccccgaccccccctaccctgctcctccaccaagcctgatgccaagggctataaaccactgggcccaacagaagcttggttcccagagaactgggtccctgcctggggacatgctccttgnttacagccccttgttgggagctcagagggcatgggctgcttcccctacggttcctcggcccagtggttctgtctctttatgggcaggaaggaatgagggttcccaagaacacaccctgaggaaaaggacaggcgcacggggcccttacaggagggtctgaggcgggcagtctctgtgccgctgacgctggcggagacggtgggctcgctgtgggcggcctgaggaactggccggtgtgggaactgggctgcggtcaagact

SEQ ID NO: 315476 - DNA, 313 bp, Homo Sapiens
  misc_feature (55)..(55): n is a, c, g, or t
  misc_feature (95)..(95): n is a, c, g, or t
  misc_feature (115)..(115): n is a, c, g, or t
acaggaggctggctgggcagggagctgaggcagggaggaaaagtctcccaggagncactggttgaagggtggacgggaactgaggacagggccantaccgtgctctgtggaactntccagacctgccgggagctgcacctgggaagcgaggctatccttccagcgtcgaaggtcctgctgtccctggggtttcgtcactcctgccgggtctccaagcagtccagcaccagtgcagcctggggttttggtttcctgcaggaggctgggaaacacgatggtggatctggtccttaaatgcctcgtctgtgatgtc

SEQ ID NO: 315477 - DNA, 717 bp, Homo Sapiens
aaatggttataatcatatattttacatgtactgtcaaaaagcttaaataaaagctgaaataaatgctaattgaaagaaaatgtatatgtgcaacaaaaaagtcagcgagaggtagagcagctgagcagctctgcggtgtactgacttcatgtccccatggaactccagtctcacagcaaggatgaggtgagcccaacatatctgggaatgtcactgccctgggtggcccctctgggctctacaggggatgccagcccctgccatgcccctcccaggccatggaccccccagtgctctaagggacaagggccctgttgtggcccatgtggccatctggcccttctcctgccctggtccatggtgtctatgactgctctgtgacccctgccccccaccagctctgcctgccgcagagggacagcagcccttgtgcaagctggcttcagccgtttcaggtgtggtctctaggctgggagattttgcgacctgccctggccactgctgatgcgtccagcctcctctccaaggtggaaggcagggaggacagcaggctctcttagacccatacactccacgttaggaaacacggagtttgaaaaataaaaacacgttaatctactggcaaaagcagctggcagaagctaaaatcactggcctaggaagcacttcaaaatcaacaacagggcttaggtgaaggagttattgggtatcacagag

SEQ ID NO: 315478 - DNA, 634 bp, Homo Sapiens
agccaagaggagacatagcttgggtaaggcaccacctaccaactggccgcctgtacctgaggtctgaactctaactggatggcaaactgcagccctagttaatcacgttaatcaacagaaggacccgatacagcttggggcccacacgtactgttacgtatattggaaaggcctaggtctctgcacctatgtatcgactgcgctctagttgttctcgttcttgaaatctgaactccatttaagtaacttctgtttctcttcttcttttgctgctttgtaggcaatataggaatgaacaattgctaaagttccaggccatggaattgcttcttccttcttcagcatctgaaaagatttttagaattttaccttgagaaggaggtttaaacacacatcctctatgtaacagctagcagtggtatctgtggctactggcagataaaatccaggaaggatttatggtagcagtgttgcaaaaccctggtctatagtttctggactaaaaagttccaaatatcagcttaggagaatcaagttcaaggcaggaagagccaggacacttgagcccaggcttagaaggagctgggacttggctgagcattcctatcttttctcgtgccgaatcctgcagccc

SEQ ID NO: 315479 - DNA, 985 bp, Homo Sapiens
gtccgtgtcgtcaatgggcagactgcaaccatagccaaaacgttccccatggcccagctcaccagcattgtgatagctactccagggaccagactcgctggacctcaaactgtacagcttagcaagccaagtcttgaaaaacagacagttaaatctcacacagaaacagatgagaaacaaacagagagccgcaccatcaccccacctgctgcacccaaaccaaaacgggaggagaaccctcagaaacttgccttcatggtgtctctagggttggtaacacatgaccatctagaagaaatccaaagcaagacggcaagagcgaaaaagaagaacaacagcaaatccggtctacagtggagcagtctttgagccagagcgtaagaagagtgcagtgacatacctaaacagcacaatgcaccctgggacccggaagagagggtgatattcatgaggatttttgcagcgtttgcagaaaaagtggccagttactgatgtgcgacacatgttcccgtgtatatcatttggactgcttagacccccctctgaaaacaattcccaagggcatgtggatctgtccccagatgtcaggaccagatgctgaagaaggaagaagcaattccatggcctggaactttagcaattgttcattcctatattgcctacaaagcagcaaaagaagaagagaaacagaagttacttaaatggagttcagatttaaaacaagaacgagaacaactagagcaaaaggtgaaacagctcagcaattccataagtaaatgcatggaaatgaagaacaccatcctggcccggcagaaggagatgcacagctccctggagaaggtaaaacagctgattcgcctcatccacggcatcgacctctccaaacctgtagactctgaggccactgtggggccatctccaatggcccggactgcaccccccctgccaatgccgccacctccacgccgagccctatgcagtctca

SEQ ID NO: 315480 - DNA, 393 bp, Homo Sapiens
  misc_feature (330)..(343): n is a, c, g, or t
gccaagtcaagaagctctcatagagatttatttagtgtgagaaatatgagaacaatagttgtaaagaacaaatcaataacccgcagtgtgcattttggaaaaaccaaataacttcttcaaatttctgagtacacagagggtacctgccttgaaatttaaatgtctaaggaaaatgggagatgattaagagttggtgtggcctagtcacaccaaaatgtatttattacatcctgctcctttctagttgacaggaaagaaagctgctgtggggaaaggagggataaatactgaagggatttactaaacaaatgtccatcacagagttttccnnnnnnnnnnnnnngagacagagtcctgctctgtccacccaggccggaatgaagtggtatgatc

SEQ ID NO: 315481 - DNA, 459 bp, Homo Sapiens
tggggtatatctttattagcagcatgagaacagactaatacaacactatttattgattcattcgctatgtcactggcttacccagtcacaggtgctgtactagcttgtgaggctacaaagaaaacacataatccctgtgatgggcagcatcgtggtcctccaaaagatacccaggtcctagcccctggaacctgtgaatgctatcttatatgccaaaaaaagatgttatcttatactgcagatgtgatgaagttaaggatcttgaggtggggagatcattctggatgatctgggtgggccctaaacgccatcctcagtgtcattctaagagagaggcagagggagattccagacagaagagcagaaggccacgtgacagcagcagggggaagcggagtcagagagaagatgctacacactagcactgaagatagaggaaggtgctgtgagccaaggaat

SEQ ID NO: 315482 - DNA, 377 bp, Homo Sapiens
atattagggaggaagcctgaagtagggagatgtaaggagccatcaaaggcagaatgaaacttaggcagatttcaagtgattttcattaggagcttatttctcacactgaccaaagcttttgaagtaagtactctttacaccactatataaataaaccttacaaaggattctgctttgaggcatgagagagttaagtcatttgcccaaagtcacagagttagaaagtaatagagctaagatttgaacctaggcagtttggctccagagtctgtgctcttacgctatattaccaccaagaggtcaaataaataccgaatgtattttcgaatttaacaatgaggaacttaatcatacaggcagaagtttccagagcctgg

SEQ ID NO: 315483 - DNA, 376 bp, Homo Sapiens
gttgaaacttccttccccaacctcattcccctcgctcaccagaggtaacaacaatctaatctaatttggtgtttataattctcagatctgttttataataatgctatatatggatgaaaccataactatcccaagagatcttagaatttacattttccttttgacttatttcgacataatttcaggaagttttaagaataagaatacccacctgcccttcacccacattcctcaaatgttaactgttcccacacttactttttcgtgtctttctctctctcctcctctttcccccaccccactgtctttatcccctgaatacttcagaaatgtttcctaccaaggacatttacgtatataaccactctttatcagg

SEQ ID NO: 315484 - DNA, 626 bp, Homo Sapiens
  misc_feature (572)..(572): n is a, c, g, or t
  misc_feature (577)..(577): n is a, c, g, or t
ggtgctacagtagcaggctgttttccccttttccatagaggggaatattctgcatcacccctttgtttgccatttcctacaggtgaaacgccatcattaggattcactgtaacgttagtgctattaaactcactagcatttttattaatggccgttatctacactaagctatactgcaacttggaaaaagaggacctctcagaaaactcacaatctagcatgattaagcatgtcgcttggctaatcttcaccaattgcatctttttctgccctgtggcgtttttttcatttgcaccattgatcactgcaatctctatcagccccgaaataatgaagtctgttactctgatattttttccattgcctgcttgcctgaatccagtcctgtatgttttcttcaacccaaagtttaaagaagactggaagttactgaagcgacgtgttaccaaggatttctactacgactgtggcatgtactcacatttgcagggcaacctgactgtttgcgactgctgcgaatcgtttcttttaacaaagccaagatcatgcatacacttgatataatcacacanctgtnctgcatttgcgtgcttcttgccgaccttgaggctacttgttcgctgtgg

SEQ ID NO: 315485 - DNA, 394 bp, Homo Sapiens
aaataaagacattgcctcctggatttctaacccatagctccaagagcctcagtgtcagaacataggtaagggacttgatttactgagagaccctaccctacaacatcctgtggacattagagctctgtgctcctgtcacgtgtattcagagctctgattttaaaacactgaaatctggaagattccagtagctgcactctgtctaaagcatatgaggaatgactgtagaatttgcatgtcctctatagcttttgttcacatgtatgcaggcagggataatgttattgattgttcaacctatttaccttgcccaggggttgttagtaatgcccaatatgaatcaagttggcacaagtgtgatctcgtgcgatactcgtgcagcccggggtctaca

SEQ ID NO: 315486 - DNA, 829 bp, Homo Sapiens
  misc_feature (297)..(297): n is a, c, g, or t
  misc_feature (819)..(819): n is a, c, g, or t
atctttattggaaggaaatgtgttaaagacagactcactacagtgttgagacagtagtgagtagcacagtaaggagactgcccaggacttgaggtccttggtccctctatagaagtatcaagtgtttgtaaaaggtttagcacccatgtgacagaaagaagccatcatcctcttaatttctctgggttttacttaatatatagaagggcaaactagtgggcctctgagtgcaagatgaggacttcattagaataaagacatattgcctcctgggatttctaacccatagctccaagncgcctcagtgtcaggacataggtaagggacttgatttactgagagaccctaccctacaacatcctgtggacattagagctctgtgctccctgtcactgagtatcactgtgagcttaaaatatgtcagctgctccatttctctttccttttgtgtattcagagctctgattttaaaacactgaaatctggaagattccagtagctgcactctgtctaaagcatatgaggaatgactgtagaatttgcatgtcctctatagcttttgttcacatgtatgcaggcagggataatgttattgattgttcaacctatttaccttgaccaggggttgttagtaatgcccaatatgaatcaagttggcacaagtgtgatcagatgatcaggtcttgtctctttacactgcaccaccaatgcttcagcactgcctccctttgccttaaggactgggagtgcgatgctgtgaatgggatggaaggggttattcacatgtgcttcattactctcgtgccgaaaactgggccncgagggccaa

SEQ ID NO: 315487 - DNA, 578 bp, Homo Sapiens
  misc_feature (28)..(28): n is a, c, g, or t
  misc_feature (52)..(52): n is a, c, g, or t
  misc_feature (75)..(75): n is a, c, g, or t
  misc_feature (97)..(97): n is a, c, g, or t
  misc_feature (131)..(131): n is a, c, g, or t
  misc_feature (226)..(226): n is a, c, g, or t
  misc_feature (238)..(238): n is a, c, g, or t
aagatgaaaagatgaagaatagggttanctctaataaaacactgaattttgnttgacggggaaaacggttaaacncacagtagttcagtctttaacncttggtaaattgtaagcatagcgcacccaagggnattcctctacttctggtagaagcaggcttcgtccacaggcctgcaccctggtcagaactgtctgagacaaaggaatctttcttcatctgcataantcagaggtgggngcactgtgtgccacagtcggaccagtagccctcaggtctttggcaagaagccactgccaatgcaggacagctgtgtgattttatcaagtgtttgcatgatactggctttgttaaaggaaacggattcgcagcagtcgccaaacagtcaggttgccctgcaaatgtgagtacatgccacagtcgtagtagaaatcctgttccagacaaccaccttggctactgatggaaactgaaactgatccacttttcttggtaacacgtcgcttcagtaacttccagtcttctttaaactttgggttgaagaaaacatacaggactggattcaggcaagcaggcaatg

SEQ ID NO: 315488 - DNA, 1828 bp, Homo Sapiens
  misc_feature (1143)..(1143): n is a, c, g, or t
  misc_feature (1159)..(1159): n is a, c, g, or t
  misc_feature (1172)..(1173): n is a, c, g, or t
  misc_feature (1177)..(1177): n is a, c, g, or t
  misc_feature (1186)..(1186): n is a, c, g, or t
  misc_feature (1189)..(1189): n is a, c, g, or t
  misc_feature (1195)..(1195): n is a, c, g, or t
  misc_feature (1200)..(1200): n is a, c, g, or t
  misc_feature (1203)..(1203): n is a, c, g, or t
  misc_feature (1218)..(1218): n is a, c, g, or t
  misc_feature (1229)..(1229): n is a, c, g, or t
  misc_feature (1246)..(1246): n is a, c, g, or t
  misc_feature (1307)..(1307): n is a, c, g, or t
  misc_feature (1340)..(1340): n is a, c, g, or t
  misc_feature (1417)..(1417): n is a, c, g, or t
  misc_feature (1643)..(1643): n is a, c, g, or t
tcagaactgcaccccctttcttctcttcctggcatcccattctgtcccagcacagcagccaagagcacaaagcacagcacctgtggggctggtgggcacaggagaccgtgctggcacaggccagactgcctgcagccctaggtggggcctgctccctgccctggaagctagacagagggagacacaaagcagaagtggggcaatgggatgtgcagcccctgcagcaggaggaggagcacacgaaccctgaccctgctactcggtgcaggccactccaggccttgcttctctaacagcccctgtggctggctccagagctgcctggtccccataaagggggctgaaaggaggatgggtgatccttgaggaggggaagggtctgcagagaatcactcagacaccaggtattacccagctcttcccccaagacctagagggtccaaaactcctggccccaaaccaccctgcatcttgggtgaggaagaaggggcctcttttgctgttctttcccctcagagatccaagaacccattccagtgaaatgcaggtacccatgcctaccacctgcccctggagacagcaggggagctgagggacgaggtagggagacatggctgactgggccttgggctgctgcaggctgccctccagctgagacacttcgagctgaagtcgtagctgagccatgtctctcatgagcctgttccgacgagcttcctcctgtgccattcggaactgtgcctgggcctgctgcagcaggctctcctgctcagactgggcaatgctgacgaagatgccaacctctgggttgaactgcaggatgctgccttgcaggcgggcgatgaaatgaccaaagctgcggatgcagcagatgcgcaccactgactcctctaaggtgctgagcaggggccgatccgtgtcaaagttaaagcgtctgtgggcagctcggagcgggggcaggttacgaagagccatgtcctctgggagcagaaggctagaggggaggtcaggcagttcacaaccttcaagaagatcttggacctcaggacacaaggccaggccagactcctggagttcaccagcagcaggcaacagattcagcaacacagacaggcggttccacagactttgagagctctgcgnacacacgatgatgagntcggggttggtcnnaagnaagtaaagnaanactttnacagnagnaagcagacttcggcnataaggacctnaagcttctcctggaatntgcgctcattccgacaggagcgtccactggactcactcccctccgactcagagccctcctnagaggctggctctgaaggcttgtctacatcccnattgacgcaaggcctgtggctggccgaggtatgagggttggtggtgggctggaggagcaggttgctaaaggtggggnccagtcggaagcagcgcttagtctggaacaatctgggtggacatggcttgtagattgctggcaatgctagcctcactgggcccagtgggccattgagggaatcgggagcctctgatctgccccgagggggctccagggttggtgaccgtgtcccctcctcttcctccatatcttccaagtctgatcgggactcctggctattcatttccgagtctgtttcagcatnaaaggccgttcccccaccttcaagactcttgtcagagccactgtctgagccctcactggcccgggctgagtcatggcttgagtccgattcaaagccttcactcaggtcactgtcatcaccaactttgggtgggtggcggcgacggcggagacaggagaggcgagagaacttacggctctttctgc

SEQ ID NO: 315489 - DNA, 669 bp, Homo Sapiens
ccctgtcatccgccaactggccaccagtggccgcttcattgtcatcatcccaaggacagtgatcgatggcctggatttgctgaagaaggaacacccagggcccgggatgggattcggtacctggaggcagagtttaaaaaaggaaacaggtacattcgctgccagaaagaggtgggaaagagctttgagcggcataagctgaagaggcaggatgcagatgcctggactctctataagatcctagacagctgcaaacagctgactctggcccagggggcaggtgaggaggatccgagtggcatggtgaccatcatcacaggccttccactggacaaccccagcgtgctttcaggccccatgcaggcagccctgcaggccgctgcccacgccagtgtggacatcaagaatgttctggacttctacaagcagtggaaggaaattggttgatactgacccccaggccctgcagtggggctgactccagatctctcctgccctccctggcagccaggaccagcacctgtagtcaccccaccacacgcagactcatgcacgcacacaggagggaggcctagctgctcagaagctgcagggagggcccaggagccggctgggagggtggggtccctttgttgccaagacgttaggaaagcgaggaaagtgcttgga

SEQ ID NO: 315490 - DNA, 1418 bp, Homo Sapiens
  misc_feature (123)..(123): n is a, c, g, or t
  misc_feature (293)..(515): n is a, c, g, or t
cggaggagaacggggagcagagggggcatgtagcggagatcagggcgtgcgcgggagctgcgcaatatcgcagggtgcgggagctggcagcgcaatctcgtggggcgggaggggcgcgaggtnaggcgagtatacggcggacccgacggggcgggaggacgttacgcgggtcgagggaggcatagctgacggccgagggcgcgaacatgggaacgggccaggaagaggcgggcacgcgaacggcgggcgggcgcggcggaagcaaggacgttcgcgtagcgctaggggaggannnnnnnnnnnnnnnnnnnnnnnnnnnnnnnnnnnnnnnnnnnnnnnnnnnnnnnnnnnnnnnnnnnnnnnnnnnnnnnnnnnnnnnnnnnnnnnnnnnnnnnnnnnnnnnnnnnnnnnnnnnnnnnnnnnnnnnnnnnnnnnnnnnnnnnnnnnnnnnnnnnnnnnnnnnnnnnnnnnnnnnnnnnnnnnnnnnnnnnnnnnnnnnnnnnnnnnnnnnnnnngcgaacgggcgcgagtgagggatgtataaggtcgcgttgtttgggcttggggggtttattaagtgatgctttagtctcagtctctgccagcaactgggagtggggtgactccactcaccccaggatttcccagacttgctattttagaggagagaggcaggaagccaactatcctctaagccacagcttgggaagctaggctagtactggggtgggggcagcagagctgagaccctccaccccgagcccctagcctgtgctatcctcccagcctgagggggaggagctgaggcaatcctggctgcagcctcccacacacagccctgctcttggtgcgccattcactgccctgagctattcatgatctctgctcccagatattcacctcaacactccaaaagccagccccttcaggtcttcagtcctgcggaaggcaaaaggagggacgggggcctctgactgagcagcttcaaggggcctctcctttctgctgcccactgaatgccggccccttgtcttcagccctcccttagataggaaggggggtggtggcctcagactgcaccccctttcttctcttcctggcatcccattctgtcccagcacagcagccaagagcacaaagcacagcacctgtggggctggtgggcacaggagaccgtgctggcacaggccagactgcctgcagccctaggtggggcctgctccctgccctggaagctagacagagggagacacaaagcagaagtggggcaatgggatgtgcagcccctgcagcaggaggaggagcacacgaaccctgaccctgctactcggtgcagcctctgagcagctaggcctccctcctgtgtgcgtgcatgagtctgcctcgtgccgaattcgccacccaggcctcgctacctt

SEQ ID NO: 315491 - DNA, 694 bp, Homo Sapiens
attggcatttaaagttctccatgacaagcagcgaggaccactggtttttatgcgcatttactcaggcactataaaaccccagttggccattcataatattaatggaaactgcacggagagaataagtcgtctgcttttgccgtttgctgaccaacatgtagaaatcccttcattgactgctggtaacattgctttgactgttgggcttaaacatactgccactggagacaccattgtctcatccaagtccagtgcattagctgcagctcgtagagccgaacgggagggagaaaagaagcacagacaaaacaatgaagcagagagacttttattggctggagtggagattccagaacctgttttcttctgtaccatagaacccccatcactgtctaagcagccagatttggaacatgcgttgaaatgtcttcagcgtgaagatcccagtttgaaagtgaggctagatcctgactctggacaaactgttctgtgtggtatgggggagttacatatagagattattcatgatcgaatcaagagggaatatggactggagacctatctcgggcctctccaggtggcatatcgagagaccatcctaaactcagttcgtgccacagataccttaggataggaactttagggagacaaaaggcatcttgttgacttgttaggaagtgggaaggcaaggcca

SEQ ID NO: 315492 - DNA, 1685 bp, Homo Sapiens
  misc_feature (91)..(91): n is a, c, g, or t
  misc_feature (96)..(96): n is a, c, g, or t
  misc_feature (411)..(419): n is a, c, g, or t
  misc_feature (871)..(1153): n is a, c, g, or t
ttcttcagatttatccttataatgatatttttaggtttatacataagattttcggcacctttataaacagcgcagacggcgctatggacanaaaangaaaaagatccactaaaaagaaagatttagatggcttcttgccagtttgagcctaatctgattcttacagttttaccttgttgaaccaatgtgaaaggtgttgtaatgttaaatgattaaattctcagtgaggctatcttccttttccccagtaacattcctgaatttactgttatcttattgtagtacttgcatgacatggattcctgatatctgatgagaggttcattcttgtgtattcagttaatgacaccaaaaggctcagcccaccccaaccctatctcatgttcagtctgtctaatacatgccagagannnnnnnnncaaaaagtgctttatccctacaatgtactgacagttcttacagttgagatttgttcttttcagctattgcttgtgaaaaaaagcaagactatgtcactctatagaaggctgttaaagtgactcaggcaggaattaattattctgtacctaaggggttacttgtttaatgggatggcattgactttttgaaaatcaagtggactgagtcattgataaaacatttctaagagtggggctagagaacatactttacatctgacatcctttggcctaacaacatctattattatagtgctcagcagtgtgggcattgaagaggcgcagaatgctttgaaagaaactaatcagaatcttggaacatcatgatcatgccattcttaagtaaatcaactattttcaacactgaagaaaaatgaaacattatttagaaaacaatgagattacaagttccnnnnnnnnnnnnnnnnnnnnnnnnnnnnnnnnnnnnnnnnnnnnnnnnnnnnnnnnnnnnnnnnnnnnnnnnnnnnnnnnnnnnnnnnnnnnnnnnnnnnnnnnnnnnnnnnnnnnnnnnnnnnnnnnnnnnnnnnnnnnnnnnnnnnnnnnnnnnnnnnnnnnnnnnnnnnnnnnnnnnnnnnnnnnnnnnnnnnnnnnnnnnnnnnnnnnnnnnnnnnnnnnnnnnnnnnnnnnnnnnnnnnnnnnnnnnnnnnnnnnnnnnnnnnnnnnnnnnnnnnnnnacttgttctagtgagtggtgggactgtacatttttgaatagacctcaaaaatacttcattctgctgctgttcagttggctttttaaacctgtctgcagtaggacactgaaaacagcaagaacttcggggtgaacacccgctgatcctttaacaaggatttctggcaggaaactcacaaaaaggagaactgaaaatttagacatacagttggccattgtaaaaaacatcagtttcctctcatacattccaagtaaaccaagtaaaataagtgttggagtaacacttgcataaaagaatttaaggagtgatagctctttctggttctgccattccccacattcctggggggaaggagactcaatgagttaatactattttcctgagcccaagatggaaaacttggtttgacctaaaacatctgattaatatagggtagctgatttccttaaaaattcgtgccattgaaaggatattttgcatgtctgtaacaccggtcaaaacttgggttgaattggaattctgataatcctgg

SEQ ID NO: 315493 - DNA, 1254 bp, Homo Sapiens
  misc_feature (875)..(911): n is a, c, g, or t
  misc_feature (918)..(1176): n is a, c, g, or t
ttaatttaaatgttttaatagaaatacacaatctttcactttctcagacagcaataaaggggtttgtaacaatcactaagaatacagaattttgccacgaggatgcagcataatctactgcaaagctgatctgcccaattacacgtagtcagctgcaagaatatcagaaatcaatacaaacaagtattgacaggtgttacagacatgcaaaatatccttcaatgcaacgaatttttaagaaatcagctagcctatattaatcagatgttttaggtcaaaccaagtttccatcttgggctcagtgaaatagtattaactcattgagtctcctttcccccaggaatgttggggatgggcagaccagaaagagctatcactccttaaattcttttatgcaagtgttactccaacactttattttacttggtttacttggaatgtatgagaggaaactgatgttttttccaatggccaactgtatgtctaaattttcagttctcctttttgtgagtttcctgccagaaatccttgttaaaggatcagcgggtgttcaccccgaagttcttgctgttttcagtgtcctactgcagacaggtttaaaaagccaactgaacagcagcagaatgaagtatttttgaggtctattcaaaaatgtacagtcccaccactcactagaacaagtacacaagtaaatggactcagccagtgcaggagatggaaggctgccattttttatgtttgtgcacagccttacagtttggaggtgtgtttggcctactctaatatttctagtttgtcaaaggctgtacactgttactgccagtttgacctacatactgtgttccctttggatccctgctaccatttggacctcnnnnnnnnnnnnnnnnnnnnnnnnnnnnnnnnnnnnngtttggnnnnnnnnnnnnnnnnnnnnnnnnnnnnnnnnnnnnnnnnnnnnnnnnnnnnnnnnnnnnnnnnnnnnnnnnnnnnnnnnnnnnnnnnnnnnnnnnnnnnnnnnnnnnnnnnnnnnnnnnnnnnnnnnnnnnnnnnnnnnnnnnnnnnnnnnnnnnnnnnnnnnnnnnnnnnnnnnnnnnnnnnnnnnnnnnnnnnnnnnnnnnnnnnnnnnnnnnnnnnnnnnnnnnnnnnnnnnnnnnnnnnnnnnnnnnnnnnnnnacgcgtggtcgacgatatcccgggaattccggccggtacagcctgctttttaaacaacggtctatatactaaattgcc

SEQ ID NO: 315494 - DNA, 628 bp, Homo Sapiens
  misc_feature (525)..(525): n is a, c, g, or t
  misc_feature (536)..(536): n is a, c, g, or t
  misc_feature (581)..(581): n is a, c, g, or t
  misc_feature (592)..(592): n is a, c, g, or t
  misc_feature (616)..(616): n is a, c, g, or t
gtttattcaccatagccgctgataagaatcttcaaaaaaattctatatgcgcactataaatgtttctctgtttgccatttctggtaactatcatgaacacagacagttaactctttcataactgaattggatagctttattttacagaagtatggcaagtttacaaagcaatatctaaatctaattatcattagttgcatttggactaaatgtgatgatatacttttgcaattgattctgtaaataaaaggattacactaaaatatttgtattaaaagaagaaaagataacattttacctttagataactgcacttgtacctcactagagttaatcccacccaatcagattgagaaataaattggggaatgtggaaagagtccaaaagaggtcagaatttggagaggtactggccttctggacaacatttagaccctctacaattattttcattaaagctgattcctacatcctgaaatattcatgttttctcatctacagatatttgtcttcccccaaactganctttgaatatnatggtgatgtggggattttgtcctgactgccactgtacaagacangagagtacagngttcagttggtcaggacctctggntttgaggtagag

SEQ ID NO: 315495 - DNA, 561 bp, Homo Sapiens
  misc_feature (157)..(157): n is a, c, g, or t
tccctctgcctgtgggtggctgaggcttctcagcccatctccagttctctgcagcaaaggccctctgtttctgtcctgcagtggtggccctttcgtggttaaacatgtccctcccctcctcacagaactgagtacctattgcggctgggcccgcccnaaccctgtgtccctgcacccatgggttttaccacctgattcggctgcagctgtcactgtcccgtgtctgctctctgtcaggcctctgagtgctgcagacgtattaacatatcaccgctagttgatggaaagtcttgtttcttattagaatattttgtgtaggcacagggttgccccagcactgtctatagcaaccccagtgtcctcacagtgcacgtgagccgtgacgcagccaccgtggagtcggcgctgacgcggtgtggccacgtgccatgagctcgccaacgcagtgcggctatatggcgtgagcttactgtgaagtggagacaggcagggacacaggaaactacaaacgagaaatccagaaggaggagctggaactgatgggcatagccggccgcgagc

SEQ ID NO: 315496 - DNA, 445 bp, Homo Sapiens
ccgacctctgccctctaaatcagcatctatcacagtagatcaacctggataaagccaggattaaacatcattgggaaaacttagagcaacatccaaccaatgtttttcaatacatggaaggaaagatgtgtgtgcttggttttgttttttgctgagacccaaacattgttagtgcaagcccccgccaggggtgcaggtggagtcaaagctgaatgaagagctcgtcttcaatgtagctctccaagctttcagagcaagacaaccatggaccatcctcttcttcagactggcctgtcttcttcttgaacaatgtcactttgctcctcactgctgtcatcttgaagatcctggaatccatttcccatctgttctatgttcccattcaccaaggcggtcactctgtgaatgtggtcctgcttaggtatttcttttggcaactcctccc

SEQ ID NO: 315497 - DNA, 713 bp, Homo Sapiens
  misc_feature (46)..(78): n is a, c, g, or t
  misc_feature (270)..(300): n is a, c, g, or t
  misc_feature (338)..(391): n is a, c, g, or t
gaggttaggtgccccaggaattggcttggggcatcagacaagggannnnnnnnnnnnnnnnnnnnnnnnnnnnnnnnnatcagaagcaaccagggctaggagtggacgattctattcccacaggggaaggcctcctccatcccggttcctccaaaaccactttcaggggataaattcagccactgcttccgaacaggacccctccctgggacaaaagagccaggtaggagaggatgaagtgagaaatcttgggatgaaaacagggcacannnnnnnnnnnnnnnnnnnnnnnnnnnnnnnggagcccagtgtgatagaaaatgggcatgaaacctaannnnnnnnnnnnnnnnnnnnnnnnnnnnnnnnnnnnnnnnnnnnnnnnnnnnnngagggagtaagatcactcaaaggtgaaggggtcctgggtgctgaaaaagaagtgtccatccatgtggtcctccagggcatccttgtcactctcagcaggaaagcgctccttacagataggacactccttccatgtgggggtggcagggcccccagtgctggtttctgacagggtacccactgtaaagccactggccatgtcatagaaggcactgcccagttcaggaagcagtaagttggcctcctcacccccactctgcacagctgccatcaggaccggacgcgtgggtcgacgatatcccaaagattccggaccggtacca

SEQ ID NO: 315498 - DNA, 751 bp, Homo Sapiens
  misc_feature (30)..(30): n is a, c, g, or t
  misc_feature (649)..(669): n is a, c, g, or t
  misc_feature (726)..(726): n is a, c, g, or t
  misc_feature (734)..(734): n is a, c, g, or t
ccacagggaagagagatttgatccatctantccccggttttgccctggatgtgagatgggctcagggcagggagggggtgatgctgtcatccttctcggctggagcaggaagatgaaggacgatgtcagactcattttcagcctcattaggcagcagacggagatggagggaggagagcaggaggctgggggatgggctctgcactgcagagaccagcagggactaaagaagagaggacatggggaactggaaaaataagccttccaggattgtggggagaaagacgctgtgggagaggccaggatgctgcattaggcacaggataacctgggaacccaggcacatgggtcctgctctccgaagtctgcaagtcaagaagggaacagagcacgccgaccctctccctttcccctctgtctctcttagtggctttacagtgggtaccctgtcagaaaccagcactgggggccctgccacccccacatggaaggagtgtcctatctgtaaggagcgctttcctgctgagagtgacaaggatgccctggaggaccacatggatggacactttttttttcagcacccgggacccctttcacctttgagtgatcttactccctcgttacatggcacaaataacacattcatggnnnnnnnnnnnnnnnnnnnnntggcataacatttagggttttcatggcccttttttctattcacattgggggttcccnggatattnttgtttcccttaaggaa

SEQ ID NO: 315499 - DNA, 1097 bp, Homo Sapiens
cccttttacccccaaagtgaaaatttgcaaaaggccctccaaccccgttccaaactctatttccaccagagccaccaaaatgtttaaatgggagcccaaggttaggactgagcattgaactttccagctatgcaactcgcagggcacaatttccaagtgtggaaaccatctgtaggcaagctcttttaaaaacatgaattttagacaccgtaaattctaatgcagacacttttgcattactgtttgaatttcagaagggcaccacaaggcaccagagtctttcaaagtcactcacagcaacaattgcatttttttcccagccttggtagcccctttcagttgtctagcctctgcactgtggcacaccactgacattaaatccagtcatggcctaagtggcatgaggcagctatttccagggcacctcccacctccttggcatgggaggcttcccagtcactcctccttcgtgtcccctctttcaagaacctccagagctcttggcatcaggggcccccattgctgggccccacacgggagaccacatctggaagcactattcctacagctccctctgctggagacgaaagtgacagtttgttgcaaagacctgtagaaacattacttacacgttcatttctgtacacatttagttaatttagaacctgggacttttacaatcgattccccaaacccctttatggcagcaacactgaaggagcacagtttctctctctaggaagaagaggattagcagacataattgtgtgcgtcaagagaaatttgtaatcaaaaaatgaaagtaagacgaatggcccagaaacccgcattttattgacagtcattttcccacagagaatcttagaaagatgtcgcgttttcttttaatgaatgagagaagcccatttgtatccctgaatcattgagaaaagcaacagatacaactgacagtcacactttttaaaatcaaacagtcactacctttagcccacacctccacacccgcatctgtcttcccaaggcttggcagttcgggtaaaggccaccctttcttttactctgggatttaccccgagaattgaaattttttaagcacg

SEQ ID NO: 315500 - DNA, 2272 bp, Homo Sapiens
  misc_feature (55)..(55): n is a, c, g, or t
  misc_feature (77)..(77): n is a, c, g, or t
  misc_feature (84)..(85): n is a, c, g, or t
  misc_feature (91)..(109): n is a, c, g, or t
  misc_feature (115)..(115): n is a, c, g, or t
  misc_feature (117)..(119): n is a, c, g, or t
  misc_feature (123)..(128): n is a, c, g, or t
  misc_feature (131)..(216): n is a, c, g, or t
  misc_feature (1686)..(1694): n is a, c, g, or t
aaataagagtctcagggaattttttttgagaaacaggtattgggcccaggaacanttttttttgtggggccgggggnccaaaanngaatgnnnnnnnnnnnnnnnnnnngggttntnnntgtnnnnnnaannnnnnnnnnnnnnnnnnnnnnnnnnnnnnnnnnnnnnnnnnnnnnnnnnnnnnnnnnnnnnnnnnnnnnnnnnnnnnnnnnnnnntagccaggtgttagccactttaatagaaaatatgatcaaaactcgattacaagagttcaaaaagacatagaaaaccagtgagtttcaattttattacaagttttcaaatctgggactagtttctttttttcttttaactgaaatgccaacttcagcccagggttttttcacaaccaaactaaaaatgacttactacatgggaacatcaatgcaacaagtagaatttgtaaactcaagccacaaacttagttaataatcatggttaagggacattgccaaagagcaactgatgcctcagtgaagtttgaaagaaactctgctttctgtgacggcagagaagaaatatgcaagcaattctgcttcaaagaaatttgcatagaaatggaaaaatgccagagcctttaacacaagtgaaattgcaaagcctcaacacgttcaactcaatccacagagcaccaaatgtttaatgggagccaaggtaggactgagcattgaacttccagctatgcaactcgcagggcacaatttcaagtgtggaaaccatctgtaggcaagctcttttaaaaacatgaattttagacaccgtaaattctaatgcagacacttttgcattactgtttgaatttcagaagggcaccacaaggcaccagagtctttcaaagtcactcacagcaacaattgcatttttttcccagccttggtagcccctttcagttgtctagcctctgcactgtggcacaccactgacattaaatccagtcatggcctaagtggcatgaggcagctatttccagggcacctcccacctccttggcatgggaggcttcccagtcactcctccttcgtgtcccctctttcaagaacctccagagctcttggcatcaggggcccccattgctgggccccacacggggagaccacatctggaagcactattcctacagctccctctgctggagacgaaagtgacagtttgttgcaaagacctgtagaaacattacttacacgttcatttctgtacacatttagttaatttagaacctgggacttttacaatcgattccccaaacccctttatggcagcaacactgaaggagcacagtttctctctctaggaagaagaggattagcagacataattgtgtgcgtcaagagaaatttgtaatcaaaaaatgaaagtaagacgaatggcccagaaacccgcattttattgacagtcattttcccacagagaatcttagaaagatgtcgcgttttcttttaatgaatgagagaagcccatttgtatccctgaatcattgagaaaagcaacagatacaactgacagtcacactttttaaaatcaaacagtcactaccttcagcccacacctccacacccgcatctgcctccccaatggctgtcagttcggtaaagtcaccctctccttctactctggtattaccacgagaattgaaatttttaagcagnnnnnnnnngaagtcaagttacaaataaatgagtggcgaaccaagggaagccctttgactatgatttccaattttctgttcaatccacactgcagagatacaaggataaaccaccattttggttcccaagttttattcaagaactcatacaaaattttccagataaatgaaatttaatcctcgtcttcctcctcttcttcgtcctggttaatctggaagtaacgtaattcgtaactctctttgctgttagcaactacgcgcaaccagtcacgtagattattcttcttcaaatattttttggtgagatatttcaaataccttttggagaaaggcacctcggatgtcacggtgatcttgctcttgctcctttcgatggtcaccacccctccaccaaggttcccagcttttccgttcactttgatcctttcttgcaaaaactgctcaaaattggcagcatccatgattccatcttctacagggtgggtgcaatcaagagtgaacttcagaacttgcttcttttttttgccccccttcaccacaagctttttcacaggagccatggcggcagcggagttagaaagggaggt

SEQ ID NO: 315501 - DNA, 811 bp, Homo Sapiens
ggccccaggaaacccggcattttattgacagtcattttcccacagagaatcttagaaagatgtcgcgtttctttttaatgaatgagagaagcccatttgtatccctgaatcattgagaaaagcaacagatacaactgacagtcacactttttaaaatcaaacagtcactaccttcagcccacacctccacacccgcatctgcctccccaatggctgtcagttcggtaaagtcaccctctccttctactctggtattaccacgagaattgaaatttttaagcaggaaaaaaaagaagtcaagttacaaataaatgagtggcgaaccaagggaagccctttgactatgatttccaattttctgttcaatccacactgcagagatacaaggataaaccaccattttggttcccaagttttattcaagaactcatacaaaattttccagataaatgaaatttaatcctcgtcttcctcctcttcttcgtcctggttaatctggaagtaacgtaattcgtaactctctttgctgttagcaactacgcgcaaccagtcacgtagattattcttcttcaaatattttttggtgagatatttcaaataccttttggagaaaggcacctcggatgtcacggtgatcttgctcttgctcctttcgatggtcaccacccctccaccaaggttcccagcttttccgttcactttgatcctttcttgcaaaaactgctcaaaattggcagcatccatgattccatcttctacagggtgggtgcaatcaagcctcgtgccgaattcgccacccaggcctcgctac

SEQ ID NO: 315502 - DNA, 471 bp, Homo Sapiens
tttttttcacgttcatttctgtacacatttagttaatttagaacctgggacttttacaatcgattccccaaacccctttatggcagcaacactgaaggagcacagtttctctctctaggaagaagaggattagcagacataattgtgtgcgtcaagagaaatttgtaatcaaaaaatgaaagtaagacgaatggcccagaaacccgcattttattgacagtcattttcccacagagaatcttagaaagatgtcgcgttttcttttaatgaatgagagaagcccatttgtatccctgaatcattgagaaaagcaacagatacaactgacagtcacactttttaaaatcaaacagtcactaccttcagcccacacctccacccccacaccttcaagcttttttgttctagtagtttttatatatattaacttttattgtggtttttggtaccttcacaacttgtttgaaatcc

SEQ ID NO: 315503 - DNA, 750 bp, Homo Sapiens
  misc_feature (55)..(55): n is a, c, g, or t
  misc_feature (128)..(250): n is a, c, g, or t
cccccggggttttctttggggaaaccgcttttgggcccctgttcccttccccccnggggggcgcgcggcgccccaaaaaaaagtgttataaaatttttttaagggcccaagcgcccccccaaattttnnnnnnnnnnnnnnnnnnnnnnnnnnnnnnnnnnnnnnnnnnnnnnnnnnnnnnnnnnnnnnnnnnnnnnnnnnnnnnnnnnnnnnnnnnnnnnnnnnnnnnnnnnnnnnnnnnnnnnnnnnnggttcccaagttttattcaagaactcatacaaaattttccagataaatgaaatttaatcctcgtcttcctcctcttcttcgtcctggttaatctggaagtaacgtaattcgtaactctctttgctgttagcaactacgcgcaaccagtcacgtagattattcttcttcaaatattttttggtgagatatttcaaataccttttggagaaaggcacctcggatgtcacggtgatcttgctcttgctcctttcgatggtcaccacccctccaccaaggttcccagcttttccgttcactttgatcctttcttgcaaaaactgctcaaaattggcagcatccatgattccatcttctacagggtgggtgcaatcaagagtgaacttcagaacttgcttcttttttttgccccccttcaccacaagctttttcacaggagccatggcggcagcggagttagaaagggaggtgagcgaactacgcagacgcaaagagcccgcccc

SEQ ID NO: 315504 - DNA, 1104 bp, Homo Sapiens
  misc_feature (205)..(217): n is a, c, g, or t
  misc_feature (258)..(306): n is a, c, g, or t
  misc_feature (457)..(457): n is a, c, g, or t
  misc_feature (597)..(647): n is a, c, g, or t
  misc_feature (653)..(653): n is a, c, g, or t
attatttctcctccacagggtgggggggccccaacggggtgcgtgggaagattccctccctttgtgggccgactcccctagtgtttttccacccctggcgccccgaatttttttagtgggggtctccaccgcgtgcgccgcccgggagaagtggattttaacgaatatttcccaccccccggtttctcctcaaaaagacggcccnnnnnnnnnnnnncccacaattttcgggctcgagaagcctctccagtggaactnnnnnnnnnnnnnnnnnnnnnnnnnnnnnnnnnnnnnnnnnnnnnnnnnatttgggatatttgtaacaaaacccctcggggcttcccccccgcggagggttctttttatatgggcggggaagaccacccccctttggtccttgttccagagatctcccctgggagaccgcccgggggggcctattttcccgttacgaatntcgggcgccccggccccaaacaaagatttttctaaaaaatctttctaggggcccgggggcgcccgacccacttgttcccttctctccacaaccaattggtcttagaaaatttttttgagggcccgaggccgccccgacannnnnnnnnnnnnnnnnnnnnnnnnnnnnnnnnnnnnnnnnnnnnnnnnnnctttgnggttcccaagttttattcaagaactcatacaaaattttccagataaatgaaatttaatcctcgtcttcctcctcttcttcgtcctggttaatctggaagtaacgtacattcgtaaccctctttgctgttagcaactacgcgcaaccagtcacgtagattattcttcttcaaatattttttggtgagatatttcaaatacctcggatgtcacggtgatcttgctcttgctcctttcgatggtcaccacccctccaccaaggttcccagcttttccgttcactttgatcctttcttgcaaaaactgctcaaaattggcagcatccatgattccatcttctacagggtgggtgcaatcaagagtgaacttcagaacttgcttcttttttttgccccccttcaccacaagctttttcacaggagccatggcggcagcggagttagaaagggcccc

SEQ ID NO: 315505 - DNA, 962 bp, Homo Sapiens
gttcccccgctggttgcgcgccgccgggtgtccaccctgtcccgcgccgggtctcatccgggggcccgccgcggagttggccctcttgtaccataggaaggttgcgtcaggggaacgcgccgaagacccatgggcccattgcgatacctctttttcccgcgccccgacagggaagcctcgaggcgtgagtgtagagttgagtgttttgtgtccctttttaaatgcttttaatgctcttcagatggtgagaggttgttgcaatggtcataggctgtgctgatggccgggaacaccccacaccccacacctgccccccataccccttcctccaggagatacttgagagggaccatgcccggctgaagccccgtctcgtgtggaagaatgtcatctccagtgtctgctgcctcctccccgcaaagtctcccacaagcacaggacaaggggtgcttccaccatctcctaggagctgatgacatgtccagaccaggtctcatgcttggtgcctggtgccaggtgagtgatgacgacctccacggcctgcagcttctcattcttgggtgggatggagcacattttataggtgacctcgtcgccttccactgggacatactccccttccacatcagagatgtgcaggaagatgtcggggccgccatcagctggggtaatgaagccatggcccttggaccggcagaagcatttgcagactcctttgtagacggggccctgtgaagcccgcaccgtcgccgagaaggtcctcgtccggcgagtgggcagtgggcttgggaccacgttgccgcgcagaggggatggtgagcgctcacggctccgaggggtgtccagcagcccgactgaagcttgatgggtggggggctgtggtggtgggggaggctcagatgacatggctgaccctgcaatccgttctgctccgccagcccctcgtccgaatttccacccag

SEQ ID NO: 315506 - DNA, 627 bp, Homo Sapiens
  misc_feature (457)..(457): n is a, c, g, or t
  misc_feature (483)..(483): n is a, c, g, or t
  misc_feature (492)..(492): n is a, c, g, or t
  misc_feature (496)..(497): n is a, c, g, or t
  misc_feature (549)..(549): n is a, c, g, or t
  misc_feature (551)..(551): n is a, c, g, or t
  misc_feature (553)..(553): n is a, c, g, or t
  misc_feature (556)..(556): n is a, c, g, or t
  misc_feature (561)..(561): n is a, c, g, or t
  misc_feature (567)..(567): n is a, c, g, or t
  misc_feature (589)..(589): n is a, c, g, or t
  misc_feature (596)..(596): n is a, c, g, or t
cctgaacccaagcgggacccagcggagcgagccggctctcgctcctgcggactttgtcgctccactcgcgccactcccaattccttctaacttgttcgtgccaaccccagatgcagaagaaccacagcttccagacgggactggcagggaagggcctgcagcagctaggggcctggccaatccagagcctgccccagagcccaagctttcgcgctgtagttcaatgagttcattatcacgtgaagtgagccagcattttaatcaggctcctggcgacctccctgctgcagggggccctcccagcggggccatgcccttctacaaccctgctcagctggcacaggcctgcgccacctccgggagctcaaggctagggaggattggccagaggaagcacctggtgctgaactaggcttgccctgctgtgaacttgcacttggagccctgacgctgctgntctccccgaagaacccgaccgacctncgcgatctncgtnnccgccccagggagacacagcagtgactcagagctggtcgcacactgtgcctncntnctnaccgnccatcngtatgaattattttgattattncaccatnctttcagtctggatgggactgatctttgctc

SEQ ID NO: 315507 - DNA, 903 bp, Homo Sapiens
  misc_feature (404)..(404): n is a, c, g, or t
  misc_feature (406)..(406): n is a, c, g, or t
  misc_feature (421)..(421): n is a, c, g, or t
  misc_feature (447)..(447): n is a, c, g, or t
  misc_feature (597)..(597): n is a, c, g, or t
tgagaacacagcgccctccactcattcagccaggttcaaacacggcgagggcccagatggtgcagagcaggggttggggtctgcctcagtcaccctctctttgctcccagcaccttaaaggaagcgcgggactcactgggcagtgactcacagctgggcttggagaggccctggttactaccgaccatgtggctctcctgtggcagagacagctccggcttcaatgaatgaacattcttaaatgaccaggcggcaaacaattctgagtcaaagattcagtctttccatccagattctgaaaggatggtggaattaattttcaaaataattcattacgatgggcggttgaggagggaggcacagtgtgcgaccagctctgagtcactgctgtgtctccctggggncnggacggagatcgcgnaggtcggtcgggttcttcggggagancagcagcgtcagggctccaagtgcaagttcacagcagggcaagcctagttcagccccaggtgcttcctctggccaatcctccctagccttgagctcccgaaggtggcgcaggcctgtgccagctgagcagggttgtagaagggcatggcnccgctgggagggccccctgcagcagggaggtcgccaggagcctgattaaaatgctggctcacttcacgtgataatgaactcattgaactacagcgcgaaagcttgggctctggggcaggctctggattggccaggcccctagctgctgcaggcccttccctgccagtcccgtctggaagctgtggttcttctgcatctggggttggcacgaacaagttagaaggaattgggagtggcgcgagtggagcgacaaagtccgcaggagcgagagccggctcgctccgctgggtcccgcttgggttcagg

SEQ ID NO: 315508 - DNA, 1084 bp, Homo Sapiens
gctgggtggcgaattcggcacgaggcccaattccttctaacttgttcgtgccaaccccagatgcagaagaaccacagcttccagacgggactggcagggaagggcctgcagcagctaggggcctggccaatccagagcctgccccagagcccaaggttttaagctctgcagcgtcactccctggctctgaactcccctcctccaggcctgagggttcccagggaggagaggctcctggcgacctccctgctgcagggggccctcccagcggggccatgcccttctacaaccctgctcagctggcacaggcctgcgccacctccgggagctcaaggctagggaggattggccagaggaagcacctggtgctgaactaggcttgccctgctgtgaacttgcacttggagccctgacgctgctgttctccccgaagaacccgaccgacctccgcgatctccgtcccgcccccagggagacacagcagtgactcagagctggtcgcacactgtgcctccctcctcaccgcccatcgtaatgaattattttgaaaattaattccaccatcctttcagattctggatggaaagactgaatctttgactcagaattgtttgccgaaaagaatgatgtgactttcttagtcatttaggatgatttaaggatatagtattcctggtcatttaagaatgttcattcattgaagccggagctgtctctgccacaggagagccacatggtcggtagtaaccagggcctctccaagcccagctgtgagtcactgcccagtgagtcccgcgcttcctttaaggtgctgggagcaaagagagggtgactgaggcagaccccaacccctgctctgcaccatctgggccctcgccgtgtttgaacctggctgaatgagtggagggcgctgtgttctcaatcagcgcctccgaggagccgtggggtttccttcggcattagttcacggttttttagagaggccttagtttacttgcagtgaatttctttcctgttgcaaagacgcttccagcctcactttacttttctgtgggcctgatgaggaccatgggtgattttgtgt

SEQ ID NO: 315509 - DNA, 955 bp, Homo Sapiens
ggagcacaggccccggtgttcctgtgaggacgctggacctgcaggagcggggagctgcagtgccacctgctgggtaccacgggccgggcctggggtccacgcctttgggttgggtgtgtctgatgtcttgccaagcggctgggtcctgtcttcttgagctgcccttgcccagcactgcactttggaggtgggtggtgcaggcagtggagggacacaggccagctcaagccccgctggtggcagggcgttttccccaccgggatacgggaagccacctgtgtcagggctaggccctgggatcgggagttacactaccctgtcccaagccgagggggccggtggaatgatttgagcagctctgggagtggggaaaaaagacgactaatttccaaacccgtttgttctcagataaaaagcagttttataaacccgcaatctgctccagattcaagcagtaatatttcagcaggaggaggtggtcatgggaagccagcacagcagaggctccctgaccgggaggcctgcctgcttttcaggttgtttcccatgttcagcttggactgcagaagtggctcacgctcctgtggtgagggcagggtgctccacagacacctccagacccagccaagaactacagggcggcgggctgcggtcagcacgtgtgctcgggacacagcggagtcagggccagagcccttccctccaggaactgatccttgggaaaacagccatgggccaggctgcagtctggttcccagtggggctgcctcagtcctacccccagcaccctcaaaagctggggtgtctgcatgtcccttcacataattgataatggtaccaccttctataataataatataaaataaaaacatctgatgtctgggttttttcatttccaaatttgtagactcccaggaaaagattttttcctcgtgccgaattcgccacccaggcc

SEQ ID NO: 315510 - DNA, 394 bp, Homo Sapiens
  misc_feature (273)..(273): n is a, c, g, or t
  misc_feature (302)..(302): n is a, c, g, or t
  misc_feature (311)..(311): n is a, c, g, or t
  misc_feature (332)..(332): n is a, c, g, or t
  misc_feature (344)..(344): n is a, c, g, or t
  misc_feature (352)..(352): n is a, c, g, or t
  misc_feature (359)..(359): n is a, c, g, or t
  misc_feature (378)..(378): n is a, c, g, or t
ggggttcaagcaattcttctgcttcagcctcctgaacagctgggattacaggcgtgcgccatcatgaccagctaattttgtatttttagtagagatgggtttatacatttttaaagaatggacaatgatgcagatgatttgtaagcattttgatgagaaagtggtgattagaaggatacagcataaatttaattgtaaacatgcttatctagctaacctaatctgtttctgtagaattactgggcatgggagattgggatagatgcctaaccnatctcaattttaagtaatgtgaggcaagnctttaaggnatacataatggataaaagggngaaacatgaccnggttgatngatgggncaagtaggggaattagganggggtttgtagggggg

SEQ ID NO: 315511 - DNA, 1940 bp, Homo Sapiens
  misc_feature (1173)..(1316): n is a, c, g, or t
  misc_feature (1388)..(1396): n is a, c, g, or t
  misc_feature (1424)..(1435): n is a, c, g, or t
  misc_feature (1530)..(1538): n is a, c, g, or t
  misc_feature (1674)..(1687): n is a, c, g, or t
tgccacagattatcttgtacagccttttatggaccaattagcattccatcaattttatatctagcatatttgcggttagaatcccatggatgtttcttctttgactataacaaaatctggggaggacaaaggtgattttcctgtgtccacatctaacaaagtcaagattcccggctggacttttgcagcttccttccaagtcttcctgaccaccttgcactattggactttggaaggaggtgcctatagaaaacgattttgaacatacttcatcgcagtggactgtgtccctcggtgcagaaactaccagatttgagggacgaggtcaaggagatatgataggcccggaagttgctgtgccccatcagcagcttgacgcgtggtcacaggacgatttcactgacactgcgaactctcaggactaccgttaccaagaggttaggtgaagtggtttaaaccaaacggaactcttcatcttaaactacacgttgaaaatcaacccaataattctgtattaactgaattctgaacttttcaggaggtactgtgaggaagagcaggcaccagcagcagaatggggaatggagaggtgggcaggggttccagcttccctttgattttttgctgcagactcatcctttttaaatgagacttgttttcccctctctttgagtcaagtcaaatatgtagattgcctttggcaattcttcttctcaagcactgacactcattaccgtctgtgattgccatttcttcccaaggccagtctgaacctgaggttgctttatcctaaaagttttaacctcaggttccaaattcagtaaattttggaaacagtacagctatttctcatcaattctctatcatgttgaagtcaaatttggattttccaccaaattctgaatttgtagacatacttgtacgctcacttgccccagatgcctcctctgtcctcattcttctctcccacacaagcagtctttttctacagccagtaaggcagctctgtcgtggtagcagatggtcccattattctagggtcttactctttgtatgatgaaaagaatgtgttatgaatcggtgctgtcagccctgctgtcagaccttcttccacagcaaatgagatgtatgcccaaagacggtagaattaaagaagagtaaaatggctgttgnnnnnnnnnnnnnnnnnnnnnnnnnnnnnnnnnnnnnnnnnnnnnnnnnnnnnnnnnnnnnnnnnnnnnnnnnnnnnnnnnnnnnnnnnnnnnnnnnnnnnnnnnnnnnnnnnnnnnnnnnnnnnnnnnnnnnnnnnnnnnnnncttcgcggcgggcccgccgccccaggaaaagttttaaaaaatttctttttggggcggcggccccgcgccccnnnnnnnnnttttggccaattgttctgttccccacgnnnnnnnnnnnntaaaaaaaaagcgcgcggacttcccccctaataaaacaagcggcgcgggggaccaagcgggcggtggggaatcccccccaaagagaaaaaacccnnnnnnnnnatacccgggagtctttattcgaagagggcgccccgccaggggggcctccaaattaccaaaatataacggcgccccctcctccaacagggacgtctctcccaaaagagcgggggacaataaaaccacatacagccannnnnnnnnnnnnngggctgtttgcatgaaccctctcttaatctctagcggcgggtgtgtctgtacataaccaggaatccgcgccccgcgcgcgtcgcgtgaccacccacccacatggggaagcgcgcggtgggggtggaaaaaatacaattgccacgcccggggagggaataataacaccgcgcgccctacacaaaccacaccccgggtacacaaataaaatgcgccacccccccgctcagaagaaaaacaacaggggtggggaag

SEQ ID NO: 315512 - DNA, 1079 bp, Homo Sapiens
aaaactgtgtgggggcacacagtccccccctcgttttgtgtggtcccgagtctcccttctctctcatggcgcggcccttgtggcttacactgtgtgtgggcagcccccaggtcccccggctgaggtccgacccaccgaggtctccagtccgagtcctggggcatcatgtgcccctggctcagctccatcattcaggcccttcggcaactcgggccagcacaaaggcgtcccgtccacctcggagtggtagtacttcagctgcatctgcgccacctgctgctgtgtccagcgctgcaccgctcctgaagttcgtgctcgggttctttccttgcacagcatgaagccgatctgccgctggggtagtgggatgtcagtaggcataggccaccacggggaacagggactggcagaactgccgcatctccttgatgaggtccaggtgcagccactggcactcgccctggcagcagaggagccccatcttccttgagggctgtcttcatgagcgggtaataggactccttgaagagactttcggcgggggcccatggggtctgaggagtcagtgatgatcacgtcgaaggcatcctgattctgtttcatgaactcaaaaccgtcacccacatgtagggtcagcttcgagctagagtagccaatggccatgcctggcaggaacttcttggagacttggatgacatcctcgtcgatctcacactggaccacggactccacggaggggtgcttcaccacctcccgcaggacacctccatctccgcccccgatgatcagcacctttcgcgggttggggtggctgcagagaggcaggttggcgatcatctcctggtaggagaactcgtctctctccgtgcactggatgacaccgtccaacaccagcacgttgccataggtcttactgcggaagacgaggatgtcctggtagcgcgagcgccggtggtggagcagctgctccacctgcagcgacagggcctggccgggccacaggctgcaggtctcgcggaaccagccctcgcggatggcggcggggccggaggcggcggggccgtcggggccgggctcca

SEQ ID NO: 315513 - DNA, 626 bp, Homo Sapiens
agccaagggatacctccgagaaaagttgaaaatgagcaacctcggggtatacccactatgccttggtgttcgtttgataaaactccctctgtaatggtctataaaaatttggcttgaaaagcagtgccctgcactcacaatatgttgaggccatctggtcattgttagctactgtctcaatcatcatatggagttcattcgttaggtcatctagtagcacttcggctatatcaggattgtcctgcttggtctcttgtttgaccatgtatgcaacagtactgtcgtcattagtcttaagcatttccaagtctgctttcactgggttagttaagtcttacaggttgtctagaaaaaaaagtctgtcgaggaagtcatcaggagaaacttggtcggcaagggcttggtccagaatgagcagcgtgtgaacgtgactcgtcgctaccttcttggagataatgtccactggtgcctggtagagtctcagcaccgacatctcactcgtaacaggcatctgtatcagcgctctagcagttacgacgcacccgagtgtgtggatactcgccactagggtctcactccttcgtcactgtggcagagccttctcctacgtgccggagattgcctgc

SEQ ID NO: 315514 - DNA, 639 bp, Homo Sapiens
  misc_feature (190)..(190): n is a, c, g, or t
aacaggatgcgaggcatgagtctctcctggcagtaggtgcggaaggtgtccctgatgaggatctcatctgtggtcagctgctcctccagcaccagcgggtcctgccagtcaaactcgggacgcgaggctgggaaggggaattcgcctcggtccagtccgcaagatcactgtgccctcccttctcggaccntcatcagccctaccccccaacacccatgtcgccccccggctagtgcgagctgcaagcgagactgatcaggtgacttttctccggcgccgcaggcgcagcgcactcactgccttagtgcctctgaccctggcctcgaccctgccactccgctcgggcagctctcggattctgggacagagtcgacctgcggcagacagacagctgaacaggggcagcagacacacggtgcgaccagaggtccttacacttagccagttggctctgtgttctcccgcctttctcggtctgcgccgccgacgagacccacgtgcgaaggacgtgcaggccgggtccgcggctcagcagccgcacggagacgcctctcagggccatgctctctcagagcgagcggagcaacgacggcgacctggtagtacctcccggttcactgccgaggctacagtgcaact

SEQ ID NO: 315515 - DNA, 635 bp, Homo Sapiens
  misc_feature (73)..(73): n is a, c, g, or t
cttatggaaggagtgtccaactgaggcttgcaacatggccccaggagtggcacccatgttgcagggacaaccnatccccatttggcttctccttaaaacacaattgcagctcattctgcatcgctgaaaactgcaaatataatattaaatctgttggtctatgcatggctgcgtatgtgtttcttggaacctgtgtgacagggatatgtgcctggcacactggccagaagactgggcagccaccatggcagtgctggatgacctcagtaagaatgtgtcatgtattccaggtgctgatctaaaaactgtggctcaaatgtcaccgagcttatatgaagctcccagagagaacatttaaaagctcagagagtaagtgctggggaaagcagagctatcagaggaaatctctcatagaaacgaaaccaaaccaacagaaaatgaagaaggccacatctttaaggccacctctgcctctatcagatgagctgctggtctagatcaggggctggcaaacctgtaaaaggccagacagtaaatatttccgattttgcaggccacatagtgtctgttgcaactattcaactctgccatagatcatgtgtaaaggaatgggtgtggctgttcaataaactata

SEQ ID NO: 315516 - DNA, 1101 bp, Homo Sapiens
  misc_feature (11)..(11): n is a, c, g, or t
ctttatttganccctgtttatgtccacatatgtactgtattatcacagatgcaactgatttatcatagagcactcagaaaacatggaaaagtatttttaaaaatcgaataatcctattcaagtcaaccagtgttaaccccggtgtgcttcctgccagtctgttcctccccatgggggtcacacaaaatgaaaatctcctagaaagagaaattcctctgtcctctgacttcttcacttagtacgctgcgaccttcccatgttgttcaacatcctcaactcggagcgtcactgggctgggagggtgggtctataaatggaattggcttaactatctcttcactgaaaggtggacatttagggagtgtccagttttcagctgtcataaacaactgccttagacggcaaagaattcacaggtcaatcgttcccttcgctttgaacttcttcgcagaccgttcacttgaccgaagctggaatttgctcccgtaaatgtaggaaataaagccatcggtttccacagtgaacacgcagtttagcttggggataactttcaggcggtcttctttggtgataattttgaaaatgtgctttgtttcctgtagaaggattcctgtaatacccacataagaggggcatttggattttgtcactgaaataatagccccgtgaagatctgcctttaagagcttggcctgaatcatctgtggctgcgtgtctggcttgagcccactgcacaggtccctgatgtactgtttccagagttcatggagagggaggaaaaggctgtatctctgctgctctggtttaatgtcaaagagccgcagctccctcctttgcctggcagagaggcctttggctttcttcttcttctccttgcgcttgtggcgggtgaagtactccaggaccaccgccttgcgctgcagctggtcctcgcgggcctgcgggctcatgcggggcgtgctgcgcttcaggaaggccctcacgaaggcctcggcccgctgtgctcctgaaggctggacatcggagtcattcgcctctttctgagacaatgcatggtagatcacactcttcattctcggaccgcttccggcgctctctgat

SEQ ID NO: 315517 - DNA, 1428 bp, Homo Sapiens
actacataaatcattttactgtttataccacagtcgcatttaaattggcagaatggctcccatgacagacaagacaggaacctgtcatgcaaggaaaagtgcaggttttcacaaagtttgagaagtaccatggtaacaagaatggctgcagcaatctcagacaacagcgccaaggtttgcaagtgggtaggaatgaaagctgctccacagtaattggcctgagaccgctaatgcttcctaagaggtatttcctaatatgcttggtaagcagatcacgtgtaacacagatgtaaatggagtatgataacgcttctgcaaagtaaattctgtaaggttcctgggcaggttttacagatctcttttcatccatggataaatgggttgctaaattatgattctgcaaaagtaatcccataaatagacatctaggtaaattttacaaccagtgaaattcttaggccaaaaaatcaatagccacacaaatcaaacctacacactgtgaattaaaatgaagccagtgttagggtttctcaaagaaccagaacaggaaagattattcaaatagaagatcctcgtccttctcttcagccagaagattagcaggctccaacacctctccagctgctctcctttgctccaagtccttctcagatttttcctttagaatctttttcttctcttgtattttctttaacctatagaactcttctcgctctctctcatccagctctgtgatgatataagcaagagtacgttcaatccggggaatgatgacatgttcaatggcatttacacgcctgttggttatcttaatagcttcatccaaagtaacaaaagaagtctgcagagaagctagttccaccagtagttccactgctttggcataattcctctttaatttagccaactgttccccacctctggctaaaccagtcagttcataactgtcagttccttcatggtaatgttcaaatactggcaaagtaacacctgctacattatctttcttcgctcgaatcttcacttgcgctttattgacattttggataactgtagtgctgaagtcacctgctgtgaacttggcttcagctagtgaaaaggcagcttctctcatcacttcgcccatcaacattttagtctctattatcttctttaggatctgtcgaaatcgaagagttaaggcatcagattttttcttcaggaggtttcgacctgtctgtgctccctttaaacgagccttcatgatggtctgtgccattcgcgagggaaagatttcaattcggtctttgcccgacattctgacgataacttttcggctcgggtccccggccgggcaaccgaggctgcaatagctccagaactggcctccacagtgtcttcctctacgggagtcagctggttgtgtcacttgacccctcttgttgcccc

SEQ ID NO: 315518 - DNA, 379 bp, Homo Sapiens
ccaagggaagggctggcggcctccaacaaattaggagagagagagggagaaaatgccaagtcccgatttctctccacctgtgctccacccaccgcggtcctgtccaaaaaataaaagaagatgagaattggaagaagtcggcagaaaggcgagagcccgcggtccccggctgctgcccaggcgacgcgtccggggcgggcccgcacccgttgctcggtccgaggtccgtctgtctgcccgcggcttctcaagggaggggagggcgcttcgggcagggtctccgcagccgctgtcgcctcagagctttatcctcagatcaaaaaagaaaacacaggaagaaaaatatcccaaccccaacactctcatcacagccaccttc

SEQ ID NO: 315519 - DNA, 371 bp, Homo Sapiens
attccaacttgcagctcaggttcagcagcaagcactgcatagtctccttgatgagagatgccttttgcagttctttgcaaacgaatatgattccaagggatattcaatttctctgcaactaatttccttatcatcagacgaccagccatggctgccttagcgtcccgggcaaagacgaactggccaatgcgctccttctcctcgggctgaatcgatcgcactgccagcagccattcggctcggctcggcagccaagtgccgcaggaaaaggcccagcgcacgccctccatggatggcaccaagcagaaccgtttggcagggaaacccatacactgaaagcggacctcgccgctatctcgggcctgatggcg

SEQ ID NO: 315520 - DNA, 1164 bp, Homo Sapiens
ttaattgggaaaagtttctgttctttaaaaaaactttcgtgaaataaaatttgatactaaacaagcatttatttttcagtgaatacggaagatcacaaacagttttcatttccctttgttactcagggaatcatcatgactttgtaccatttcgtattggaatttcttctgtgaagcaaaaacagtcccaaaatgaaggatcttcaggtgtcatgggaacggcagatgacattaaatcattaaagttgagaatagtaaattgcctctgggttggtttggaatcatcctgagatggaacatcctgatgtctagatccatcggggtttcctaagagcaactgcaacaaaatggtgctcatctattttgctttcctcaaatgccccattctttttcttcctctccatccaggaataaacgtgtttcttttataaacttggcctatatcccaagtttaatggggatagatccaaattccaggccgttgcaattcaaatcttagtccaaccaccaatggcttttatgaagctttctttaagtgccccaattcctataaaacatatccagctgagtccactcatccttaaagctttctgattgtttccccattctttgttggtaaactttcttttcataatatgaaagaattctggaattgaaccacgacctggaaaactagtcttcattatatcaattccaacttgcagctcaggttcagcagcaagcactgcatagtctccttgatgagagatgttaaagttgaaattcgggtaaggattcgatgagtcctttgcaagaactggttttccttttgcagttctttgcaaacgaatatgattccaagggatattcaatttctctgcaactaatttccttatcatcagacgaaccagccatggctgccttagcgtcccgggcaaagacgaactggccaatgcgctccttctcctcgggctgaatcgatcgcactgccagacagccattcggctcggctcggcagccaagtgccgcaggaaaaggcccagcgcacgccctccatggatggcaccaagcagaaccgtttggcagggaaaaccatacactgaaagcggacctcgccgctatctcgggcctgatggcgcggacgcaaacgtggccccacccccttcttcccggcgtccgtgcccc

SEQ ID NO: 315521 - DNA, 950 bp, Homo Sapiens
  misc_feature (808)..(808): n is a, c, g, or t
ttttttacatgtaattcttatttatttttcaccctcaacaaggaagaaaggtctctccctcaattctgctcttccaatacttgaggataggcacccctaaccctccttcctccagggaggcctcagcatcagtgtctgtggacgtagtctctgaagagtgcttcagctgatggggaaggagaaactcaagacagagatcctcctagggatggcgtcactttcctgccaactttctcgttgcctctccttgaaagcagaagaagtgccagccctcagcttccgtcagatcttgggctcctagggccttgtacaagtccatggccctctggttccagtccaggacggccaggcggaattgggagcagcccttatccaaggccacctcagccacctttttgattattttggaaccaatcccttgaccccgatattccggcatcacatagatatcctccagataaatggtgcgtcccttccatgtactgtagatgaaatagtatatcccatagcccaccacgcagggccccagtagcttcccgggcgctggaagaatctctgctaccaaacagtgatagaaaggattgtctccaaagccatctgctctcagggcttcttcactgatcttcacctgatccgagagtttttcgaattcggctagctcccgaatcagcctcaggatatctccacagtctccctccttggcctctcggatccgcacggaagccatctggatccccgctgtctgggaccaaaggtcccaggggcctcgcaaacggcaactagaccccttaaagggcctacggacttnggatcctgaagagcctgagagagcggggtggcgggagtcgggggggacggcggggtagccgcggcctggtaagtggagctgggattccggcgccgtacgggaggagagagtaggccagcgaggcgatcctctgtccgggcat

SEQ ID NO: 315522 - DNA, 809 bp, Homo Sapiens
  misc_feature (22)..(23): n is a, c, g, or t
  misc_feature (83)..(83): n is a, c, g, or t
actcaaagaacaggagatcctnncctaggggagtggccgtcacttttccctgccaaactttctcgtggcccctctcccttganagcagaagaaagtgccagcccctcagcttcccgtcagatcttgggctcctagggccttgtacaagtccatggccctctggttccagtccaggacggccaggcggaattgggagcagcccttatccaaggccacctcagccacctttttgattattttggaaccaatcccttgaccccgatattccggcatcacatagatatcctccagataaatggtgcgtcccttccatgtactgtagatgaaatagtatatcccatagcccaccacgcagggccccagtagcttcccgggcgctggaagaatctctgctaccaaacagtgatagaaaggattgtctccaaagccatctgctctcagggcttcttcactgatcttcacctgatccgagagtttttcgaattcggctagctccggcctgcagtcttcacccgaatcagcctcaggatatctccacagtctccctccttggcctctcggatccgcacggaagccatccggatccccgctgtctgggaccaaagtcccagggcctcgcaaacggcaactagaccccttaaagggcctacggacttggatcctgaagagcctgagagagcggggtggcgggagtcgggggggacggcggggtagccgcggcctggtaagtggagctgggattccggcgccgtacgggaggagagagtaggccagcgaggcgatcctctgtccgggcatagccccacccc

SEQ ID NO: 315523 - DNA, 1455 bp, Homo Sapiens
  misc_feature (1034)..(1048): n is a, c, g, or t
  misc_feature (1193)..(1326): n is a, c, g, or t
  misc_feature (1418)..(1418): n is a, c, g, or t
  misc_feature (1442)..(1445): n is a, c, g, or t
cggcggccagcggacggctgcatttacggggtctcccggagggccagagtcgtggcttacagaagagacgaaatgtggtctgagggacgatatgaatatgaaagaattccgagagaacgagcacctcctcgaagtcttcccagtgatgaatctggttatagatggacaagagacgatcattctgcaagcaggcaacctgaatacagggacatgagagatggctttagaagaaaaagtttctactcttcccattatgcgagagagcggtctccttataaaagggacaatacttttttcagagaatcacctgttggccgaaaggattctccacacagcagatctggttccagtgtcagtagcagaagctactctccagaaaggagcaaatcatactctttccatcagtctcaacatagaaagtccgtgcgtcctggtgcctcctacaaacggcagaatgaaggaaatcctgaaagagataaagagaggcctgtccagtctttgaaaacatcaagagatacttcaccctcaagtggttcagcagtttcttcatcaaaggtgttagacaaacccagtaggctaactgaaaaggaacttgctgaggctgcaagcaagtgggctgctgaaaagcttagagaaatcagatgaaagtaacttgccctgaaatttcctgagtatgaggcgggatcccacagcacccattgtttactgaccagccagaggaacctgagtcaaacacaacacatgggatagaattatttgaagatagtcagctaaccactcgctctaaagcaatagcatcaaaaaccaaagagattgaacaggtttaccgacaagactgtgaaactttcgggatggtggtgaaaatgctgattgaaaaagatccttcattagaaaagtctatacagtttgcattgaggcagaatttacatgaaataggtgagcggtgtgttgaagaactcaagcatttcattgcagagtatgatacttccactcaagattttggagagcctttttagatttttctgctcaggctnnnnnnnnnnnnnnncagtttctaaaaattttttttcctggattgtgtaaatccttaatatatggaatttttgtgatgcagagaaatactttatgatagttgacaacatttcagtattaaataaacatctaaaatagtctgtttaaaatgtttgattcannnnnnnnnnnnnnnnnnnnnnnnnnnnnnnnnnnnnnnnnnnnnnnnnnnnnnnnnnnnnnnnnnnnnnnnnnnnnnnnnnnnnnnnnnnnnnnnnnnnnnnnnnnnnnnnnnnnnnnnnnnnnnnnnnnnnnccacacatataccatctgaaaatgttagaattctgagttgtgattttattgacttgttgcttgctttttcttaggctttgtaacttgtaatntgttaaagtgtactatcctaatannnntgaatacttt

SEQ ID NO: 315524 - DNA, 1455 bp, Homo Sapiens
  misc_feature (704)..(706): n is a, c, g, or t
  misc_feature (708)..(813): n is a, c, g, or t
  misc_feature (824)..(824): n is a, c, g, or t
  misc_feature (831)..(831): n is a, c, g, or t
  misc_feature (841)..(843): n is a, c, g, or t
  misc_feature (858)..(932): n is a, c, g, or t
  misc_feature (1072)..(1082): n is a, c, g, or t
  misc_feature (1254)..(1266): n is a, c, g, or t
aaaggactacagattatttttaatgactaaattggagtgatacttcttacactaaaaattatttcttaggcattctgaatctgggatgagaaacaggattgtttcacaatagtaagcacataatttttaaggccaaggcacatttgactcctgagatgaattttttgtggtcataatcaaatacttagttgtttttgatgccccaaaataaagtgagaatggtaatttgccaggaattcttcataacagtatcttacaaaaaacgtgttgctctcttcacagtattatgtgtaaagtcattgtttaaagcacgaatgttccctctggggtacttgttaaagctaaatttattttgcttccctccacttagaagtgctgcacactttacagcagcttcctttctttccatggcactgcctagttaacagaagtcttataaaaatttaaaaagacacatttcttacaaaaaagagttgaatgaggtaaaatggcattagatggctctatattttttaaagctatgtaattgttcagcgtcacttttctaagtacttatacatatctaaacatgtcttcatggtttatattttcacttatatatgctgggctggattaagctttgttgtgattgtgaccaacattcaggccacgtgagcactgtcttatcacatcgccaattagttgtaataaacgttcaacgtacnnnannnnnnnnnnnnnnnnnnnnnnnnnnnnnnnnnnnnnnnnnnnnnnnnnnnnnnnnnnnnnnnnnnnnnnnnnnnnnnnnnnnnnnnnnnnnnnnnnnnnnnnnnngggggccacgnggagganaaaggagaannnaggccagggagcaannnnnnnnnnnnnnnnnnnnnnnnnnnnnnnnnnnnnnnnnnnnnnnnnnnnnnnnnnnnnnnnnnnnnnnnnnnaaaaaacagtaatcccaaaaatcggggtcgggggcggccggcgcgcctgaaaggagggggacgcggcgggtttacccgccttctccccaaaaaacacacacggccccccaaacaagcggggggttcctctctccccgacnnnnnnnnnnnccgggcccgccggggccccacacggcttgtaaaacaaaaacaacccacagcgggggtgtttgttgagcctatttttttccgctctttacaccacgggggcacaccccccgcagtggctctacaaaaaacaataacccccgcccccgcccgccgtcttatctttacctaggcnnnnnnnnnnnnnaaaaccctccacaaaaaaccgccgccgccgccggaggggaggcgcccgcacccaaaacccgggggggccctcgcatttagccgcacactgcgagggagcaagaccccaccccctcttattctcttactctccgcgccgagataataaataatattctcccgcccctcagtgacaaaacaacgggcgccg

SEQ ID NO: 315525 - DNA, 796 bp, Homo Sapiens
tttcgaagggccggaaggcggcccgcacaaggacaccgctcggtggtcgcgaaaagtaaatggggccacgcacagccccctttattggcttggggctagttatgcaggagccacgcgccagggccgctggagtgcccagctccggcccggggcagctgcccgaggaacatggcctacacaaggccctcggcccaggcccgaagcaggagggcagctgggagcaccagggcaccgggcactgccctctcccactgcttgacgcagggtttcagagaaggccattcactgccctttggggctgggcccatggcggtgatgatttgggaagagaggagcaaggcagacggtgaggcaggagcttggaggtcagggcccacagcagcccctccacaggggtgccccgtctgcaaatcagcatgagaaggtcactccttgtgcagacaccacaccagcgtctggcccacccccgtcatgctcagcacacggaagcccctgcgttccagcttgtccaggactatgcggggagggtcatcgacgtagtattcataaaagttgtttcccaaggctcttctctttgaagcccccagatgctgcatcagctctggatccgactgttcatcgcccaccatagtggggcccacctccatgcggatctgggtgctgatgagcaggtagggcatggtgcacgcgtcccggcctggctcccaccgggggctctaggctggacgccgactccagcccttctcgcgtcgggactgcgacgcgcagctgggagtcccgttactccggctctccc

SEQ ID NO: 315526 - DNA, 573 bp, Homo Sapiens
aaagatatttgctgcgacccgcaggcgctatccgctgccgggttctggcgcgccctttcagttctgcttgctgtccgcaccgctgcgttacccggaaccgccgggccgaacagcatgacgtccgctttggagaactacatcaaccgaactgttgccgttattacatcagatgggagaatgattgtgggaacactgaaaggttttgaccagaccattaatttgattttggatgaaagccatgaacgagtattcagctcttcacagggggtagaacaagtggtactaggattatacattgtaagaggtgacaacgttgcagtcattggagaaatcgatgaagaaacagattctgcgcttgatttggggaatattcgagcagaacctttaaattctgtagcacactgaggaaaaactacatacttggacatctgtaaatctttgtacagaaactgattattctgaggatgatatatggagtttttatgagtgtgtcactggattttgactccttattgattcattgtaatatgtaaatttacatatttctacattttattgcattattaaacacta

SEQ ID NO: 315527 - DNA, 474 bp, Homo Sapiens
ccaaaaagaaagaatgtttgggcaagactcagactctctcagagccagacacactcagaggcccccaactctgataactacgatagcacatcccggacccatatctacctcccagacccaccttgctccatgacgctaaaggccactcactccatggtgagaactgaactcctttgaagaaaaagcagtcgcacgaaatgttaacatcacaggcccaatgaggtaaacagcagactcaggggacacagaaggagagggcatggagatggggaggggcagcacactctttccagagagccttgcgacgtcactgaacgatcccggagtccaccgatgtctgcttgcgagttgtctttggagggggaggaggcggagttttgctgggcagtggaggtgcagatgcctctggtgtggagggggaggtggaggtgttggcgagcccagcaagtcctggttttccatcaaattcccgtc

SEQ ID NO: 315528 - DNA, 433 bp, Homo Sapiens
tgaaggcccggtttagcgctgccaaccttcaaaaaaatacctagaacggccagtccatcaggttgctgcacagctttcccaaaattatccacagtatgctctgaaccttgtccatcaagtgaaccccagtgaaagtgaaactgaatcaatctgtaagtgccatccaggggtcctcccttgagcactgctttgtcctgagagtcatcaaactccacgttgaaagcatgaccattgttgaggatcctcagggaagttgcttgatcataggaaacagacaggggcttcagggaagggtcatacttggctgtatgagtgtcgatgtcaacaggggactggcgctctcccttggcaatggggaagtccttatgccagtgctcaggtccgttgtgtttgccgtacccccagtgatgggacatggtcgcgctggcggtcg

SEQ ID NO: 315529 - DNA, 1594 bp, Homo Sapiens
ttagaattctgaattttattagagaatatatctaaaatacaatatttattaagttatgatatattgtctgaatggaaatatactctgtatcacaactctaattataacaatttttacagataatacttcatttatatctctgtaattcaaaagtcattaaattacaacagaattcatatttaagataactttgctataaatatataataatttttaaagtttttctttaatataacatcttgaaatcatgaacatttattttttctggtttacattacatagaatcatgactattttacctgatttgccttaactagctcaatttatcttgtgctatggatttgcactcaaccattctactttcctatgttttaaaagcagcattttagtcaacaattgtgagtgctcatcaccctacatgctgtgaacaaagtcaaggtactttattcttatttcttatcctatattctgtgttacagaaaaactactaccataaacaaagcaccaaccagccacagcagttgtgtcaagcatgacaattggtctagtcttcacattttattagtaagtctatcaagtaagagatgaagggtctagaaaactagacacaaagcaaccagggtccaaatcaccaaggtagatctgtgcttagctaaagggaaacacccgaagattcattatttggatacagactatgggaccatcttatttgaaggaagctttgatttgcctgttcttcagtggctgagctgggcgccagttgtccaccatcagttcttcgggttcaccctccccattgaagttaagtttacggaatttcaacacctgctcgctgctgacgctgatgggttccttgagcacaatccaggtcacacattccagaagaggaggggtggtcagtgagcctgggtaggtccagtaatccagggattcaggaaggaggccacgaggatcgaagttagtgaagtcagcactcttgccctttgttttaatggaatccagcacatcaacaactttctgaaggcccggtttagcgctgccaaccttcaaaaaaatacctagaacggccagtccatcaggttgctgcacagctttcccaaaatccccatatttggtgttccagtgaaccaagtgaagttctgcagcatatttctttttatccacagtatgctctgaaccttgtccatcaagtgaaccccagtgaaagtgaaactgaatcaatctgtaagtgccatccaggggtcctcccttgagcactgctttgtcctgagagtcatcaaactccacgttgaaagcatgaccattgttgaggatcctcagggaagttgcttgatcataggaaacagacaggggcttcagggaagggtcatacttggctgtatgagtgtcgatgtcaacaggggactggcgctctcccttggcaatggggaagtccttatgccagtgctcaggtccgttgtgtttgccgtacccccagtgatgggacatggtcgcgctggcggtcggggcagggcaggaatcggcaccgatctggcggcggcggcttgggcgcctgcactgtgtgtgtaagtcctaataaactcacctactcacc

SEQ ID NO: 315530 - DNA, 864 bp, Homo Sapiens
ttgaagtggtgcaaagtacatttatttttacaatgaaagctcatctatgaatctgataaaggccttccttcaactggagacaatttgggatgttgcaaaacaaggtttgggaagcccttctatggatcggttttgtgtccaagtctgtccctgccaaaagccatcaaaagtctccatcacccctgggctccagtctgctacccccagacttggcagctgggatctctccttcctggttcatagttctcattcccacccctcagcgatggagttagagttccaggcccacgtggtgaacgagattgtgagtgtcaagagggaatacgtagtttatgatctgaagacccaagtcccaccccagcagctggtgccctgcttccaggtgacggtgagtcaagtcgggaggaggccgacagagggctgctggaggcgggtgggagtgaggatgcacggccaaaggccaggcccccttccagctgaggctgaagaacacggcgctcaagtccatcatcgctctcttggtgcctgcagaggcactgctgttggctgacgtgtgcggggggttgctgcccctccgggccattgagcgcataggctacaaggtgacattgctgctgagttacctcgtcctccactcctccctggtgtaggccctgcccagctcctcctcctgcaacccactgctcagtaagccctgctcccttacccagtctgccctgtttctccccggtcacccactggtgctcagctcgctgggcaccagagacacagggactggcccctgagcatctccctgtgccctgcctcccccagtttactacttcaccatcctgctgctgctgcttcttcctcagccaccatagg

SEQ ID NO: 315531 - DNA, 377 bp, Homo Sapiens
aaggctatataaacacacctcgacgctatgtgttactgcccatattagaaaaactcttgacatcacctggaaagaagtcaggacaacagaagatggaccaattcctccaataaggctccagtttgaaagaatttcaaaggccaattgaataataaaggctatggtagctacccttagccaggtatgctcggaccagaccaaccgctataaccagccacccggctgtcatcaccacattgtagatgaccaggtacgccgtggccaggggccccgggcccttcttcttccgcgtgccgctggcgtccccggccgcggccctcccgccgccgcccccattccccttcgctgctgcagtcgccgccactgccgcctgcagc

SEQ ID NO: 315532 - DNA, 360 bp, Homo Sapiens
ggcaccatgaaggggcaggcagcttgacctcctcggaagacactctgaccgtggtcactgcggaccattcccacgtcttcacatttggtggatacaccccccgtggcaactctatctttggtctggcccccatgctgagtgacacagacaagaagcccttcactggcatcctgtatggcaatgggcctggctacaaggtggtgggcggtgaacgagagaatgtctccatggtggactatgctcacaacaactaccaggcgcagtctgctgtgcccctgcgccacgagacccacggcggtgaggacgtggccgtcttctccgggccccatggcgcacctgctgcacggcgtccacgagcgc

SEQ ID NO: 315533 - DNA, 353 bp, Homo Sapiens
gttacaatgtgtatggctacactgggcaaggtgtattcagtaatgttgtacgagccagagataatgcaagagccaaccaagaagtggctgtgaagatcatcagaaacaatgagctcatgcaaaagactggtttaaaagaattagagttcttgaaaaaacttaatgatgctgatcctgatgacaaatttcattgtctgagactcttcaggcacttctatcacaagcagcatctttgtctggtattcgagcctctcagcatgaacttacgagaggtgttaaatatggtaaagatgttggtcttcatattaaagctgtgatcctatagtcagcagttgttcctggcttgctccttg

SEQ ID NO: 315534 - DNA, 1824 bp, Homo Sapiens
  misc_feature (153)..(162): n is a, c, g, or t
  misc_feature (439)..(448): n is a, c, g, or t
  misc_feature (568)..(572): n is a, c, g, or t
  misc_feature (578)..(716): n is a, c, g, or t
  misc_feature (985)..(985): n is a, c, g, or t
ggggggaagtaccgcttccggagaactggggccgcggtctcccgggggaggggggatggcgccgaaggtgtacctgttgtaagctcgccagggagaaaaatggggttcaagcccgccccaaagattcccacctgaaggcgccggcggacaaannnnnnnnnnatttagtcgcggggccggtttgtggtgcggcaccgtgtgcgaagagttgcagtggcccacaccttgtgagcacggttttttatatacccggcttgaagagtgccgcggggcgcgacagatcccccattgcaggaaacggttttcgcgccacggccccggcaatggccatatacaaactcccgcgcgggagaggggccgctcaaggggccgagggtccggcgcgggaagaggggaactcgcggcggcgcggggggatttttcgagtaatagggcgccnnnnnnnnnncccccgggaatttcgttgtgggaatgtcccgggccgggtccgggtggcccccgtgtctgtgtgtgccgggttcccaaccccgccccttagtccattttccggggggcccccgggcccccnnnnntttccnnnnnnnnnnnnnnnnnnnnnnnnnnnnnnnnnnnnnnnnnnnnnnnnnnnnnnnnnnnnnnnnnnnnnnnnnnnnnnnnnnnnnnnnnnnnnnnnnnnnnnnnnnnnnnnnnnnnnnnnnnnnnnnnnnnnnnnnnnngtgtttagaactatctctttattagacaaagtcataaaccaaaaatttccaacttcctgtacatgttgaaagctttaaataaggatccttggatacaaaatatggtccacatggctgaaaattaattctatgacacaatattattctaaagtcatccttattttgaaagcctaaagattttcttttatggctataaaaataccaccaagctagacattttaattctgttgagatatacaaatagaattaccacagcagcttacaccttntatgatttctaaacacttaaacatcaatggttttgggaagatgctgttgtccttcaaagttcattaaaagttcagatgccttttgtgaaagcccaacttttcttctacctgctaaatggtcttttcagaagtctttgccgggatgttttctttggtttgcctctcccatgttgctgcttaatttgatagatttcattttctagctgaacaatagtccgttcaatctcataattcttactgaccagggatacccaatttgactccatttctctcaatttagatccagctgtgagttgcatgttctttctctgccagtttaaatcttgaatatgttttcttaacttctgaagttccttctgtgcgtgttcaatcatatgaactagattttcattgtatactttccaggcattacatccatgctgtgacattagttccagattctcaattctaactgcttgatgctctaactgggccatagaattgtttacacattcttgccatgcagtaatgtcatttttttgaccagaggagggggctggaagctcatatcgtttcatactgagcaattcaattggttgtcgagcagccagtctttcaaattcatttctcattatgtcagtttcaaaggcagaataatccggggctgtcaggtagctcaggtagttcttagtaggtcggtatctgcgagtttcctcctccaccagcgctgcagccgcttcccgcacaccaggggcttcataaccttgatcaaaatacggcagcgcatccaccacaacctctccagccaccaaacctgtgcccgccattctgaggacctcaggtttgcctgcgtttttttt

SEQ ID NO: 315535 - DNA, 855 bp, Homo Sapiens
  misc_feature (779)..(779): n is a, c, g, or t
  misc_feature (804)..(804): n is a, c, g, or t
gattttctgtgtcaaagtataattctcatgctgaagctgtagcctaaaaagccaaaagaaagttgtcttcattgtacaaacatattcatcactttaacaataagggaacaaaatttagtattcaagctgagtgagaatactgtttcaatgagcatgtccctaagataaaccagaattggcagttaatttaggcgtctagaaaatctcagttcccaccagtaaaattatcctgagtagctaatgcaccttgagaaaaatctggcatactgaataaataacattaacttgggagccaagagctgggtaagccttacctttagactactctgtgactacagaaataaagccagcacttttggaactaataagccttcacttgtcagtatcataaagagtattgcccaactgaactttgctcccactggtttaatagttacttatttctgcctaagcactcaccttccgattttacccaagtatatatataggatagaaaaaaatgcattatatttgagagctacttcgcccaaattacaaaatgagtgtttttagattcaagtgacagtaaaaggatttgttcccttcagtgacttgagtgttttagttatgcataagtatttctagcaaaggaagggtagaaaggaattgttaatttacactagttgctacttgggaataaagggctttttgaggggggtatggatattaaatgttttcgttatatacttatccctattgacagacaagtaacatgtcaattacttgatattccctggctncaatacacaagccaactcttgaatnccatggttgcctggataaagttctcatttctatacatacttctttgcagtt

SEQ ID NO: 315536 - DNA, 2770 bp, Homo Sapiens
  misc_feature (337)..(527): n is a, c, g, or t
  misc_feature (552)..(632): n is a, c, g, or t
  misc_feature (2420)..(2462): n is a, c, g, or t
  misc_feature (2498)..(2498): n is a, c, g, or t
  misc_feature (2512)..(2512): n is a, c, g, or t
  misc_feature (2520)..(2522): n is a, c, g, or t
  misc_feature (2524)..(2524): n is a, c, g, or t
  misc_feature (2549)..(2549): n is a, c, g, or t
  misc_feature (2552)..(2552): n is a, c, g, or t
  misc_feature (2559)..(2559): n is a, c, g, or t
  misc_feature (2607)..(2609): n is a, c, g, or t
  misc_feature (2614)..(2614): n is a, c, g, or t
  misc_feature (2623)..(2625): n is a, c, g, or t
  misc_feature (2649)..(2652): n is a, c, g, or t
  misc_feature (2657)..(2657): n is a, c, g, or t
  misc_feature (2696)..(2697): n is a, c, g, or t
ctccagcctcgcaccacccggcacaggccgcgggggcccgcctcgccgttgcgaagacgaccatcttcatccgcccatccctctagtcgcccccccgcgccaccggtctccctcccgcccgtcgctactccccgtaggccctgcacctccctcctccgcctgtctcccccccgtttcccgtccgcctcgttgctcgccacccatgcccccggcgccccccgtgcgccccaggcccctcgcattagagcagtgcgctggctagtcccgatagcactgcctgcgctcgtcccggctccgtcagtcggcgccctaccgtcctctccccacctcgcggctnnnnnnnnnnnnnnnnnnnnnnnnnnnnnnnnnnnnnnnnnnnnnnnnnnnnnnnnnnnnnnnnnnnnnnnnnnnnnnnnnnnnnnnnnnnnnnnnnnnnnnnnnnnnnnnnnnnnnnnnnnnnnnnnnnnnnnnnnnnnnnnnnnnnnnnnnnnnnnnnnnnnnnnnnnnnnnnnnnnnnnnnnnnnnnnatcggccgcgaagcgtctccggggnnnnnnnnnnnnnnnnnnnnnnnnnnnnnnnnnnnnnnnnnnnnnnnnnnnnnnnnnnnnnnnnnnnnnnnnnnnnnnnnncgcaaacctgggtcccaccctctccttttgctcccagcctccctccccagttgtgggaacaggtctggagttagaggcagggagtggctaatgccaccaggaagaaatgaaaactggctcagagagggggaagcctcaacagaaaaagaaataaattaaaagccctcctatcccctccagccagggttcgttcctttccccaactccccagggggcagaagtgagtgcagcacctgatgtctgcttcttccccttgtgtctggtgagatggtgcagcagggctgcagggggctgggtggggtcatgtccactgaagaactgtactatggggacagaaaaccagaaatgtggagactgaactggtatcccagagagtgcacgaccctgggcatctgggcaagggcaggcatgagacctctgaattagaagggtccagcccccactgacaggaggctacactgggagggaaggtgaaggtgctgaggaaagctcccatgatgagcctgggagtgcttcaggtatcagcttccagccagagggcgagaagtcctcctcacaaatggatgagtccattgaatccatggactttggagtgggggggatttgttccaaagaatggatgagtccactggccaatgtggggtagaggggtagagaagaccacataggaagagactccactggggatggaatgttcccctcccttgtgtaggctgagtcactggagatgagggggaggcaactgtcccacagacaagacagtaggaggtgggggtcaagagtggagactgcaccgaggcaagagtccatggatggggccaagagggggcaggagtggcgctgtatccacattcacttcagaagttgaagattccaaagaggagaataaggtggggagaggggagacaaggaagagggtttggccctgcttcagggcccactgggtgggtaggtgtggggaggaagatggggacagatgggaggagagctcagagccagggttcacccaccgcccccaggcttcttcagatagtcaccaccaccccggccatcagtggagatttcccggaaaacagtgagcatggagtgccggactctgtcagccagagctgggacgtcatctggtgtcagcccttccgtgggcactgggggcagcacccgcacctgacattgtcccgaggtgaagcgacgctccttcttgcagtagaagtcttggtaggaggacatgactatggggacaatgggaacctgggcctgcactgcaagatggaaggcgccacgtttgaagggcagcatggagccattgtggtttctcgttccctcaggaaacacccagaccctcacgtcctgggtgagcagggtctgggcgacctcagacatgacactgatggcatcccccgtgcgcttccggtcgatgaagatgactcctgccagccagcaggccagcccggcagagccagcccacagtagctcgcgcttggcaatgggcacacagcggcctggcagtacctccatcatcccaagcagatcgagagagctctggtggttggagacaacaacatagggctgcgagggagggaagtggtgagcccctcgcacctccactcggatcccgtacaggtatttgatgtggagcagcattagacgcaagatcttcatgttctcgacgttgcgtcttcgcacggcacacacagggatggcgagcacagccaggaagaggatccagccattgtagaaggccatcttgaagaagtacttggcactggggctgcagaaccacagggtggnnnnnnnnnnnnnnnnnnnnnnnnnnnnnnnnnnnnnnnnnnnccatgcccctggccaaaaatcaattatggccacctnagaggggtaggggncctggggnnntngccccctccccagccaggctgcggnagnggtggtngcggatggctgtgtatctgtctctgtcggggtgtcggtgccaaggggnnnacggnatttggggnnntcctagccccggccgatggagggnnnntgggngtgggaggttgggcccatagcggtaggaatggtggggcnntgtccccccagcaccctccctccctccctttctgctgtctctctgagggctggggctgtgccgccgctatccc

SEQ ID NO: 315537 - DNA, 423 bp, Homo Sapiens
acacaaaccaccaccccccacactgctatctctacaccacaggtggtcctaagggttagaagttagccccatcttataacataaacagtgtgggacgattgctcagtctctcaccgctcctggccccagtggcttccatggggcatgtgggaacatgggagaaggggctctggcccacgcacgtccttgtgctgccctctggcggctgcatgtgctactgatctcaaatgctcaacttgtatttaataagttggtctctcagcttgatagggcctggtagcctcatgcttgctccgactataagtacagactccctcaatacctgtcacttcctctattgagtccccgagcttagggaacccacctccagctctgccccctgctatgatagatgcatgactggcccactgactcacaggtcag

SEQ ID NO: 315538 - DNA, 984 bp, Homo Sapiens
ttacaactttaaaaaatggtttatttttttctttaacaaaatcgtacagctttctcaatccccaaattaaaaaaacagaaaacaggaagaaagggaagaaggcaaaggccacacgcacaggccggcccgccgcaacgcgcctgctggacggcacttcagggcacaacccacacgcgtctttggacttgcagacattccgcgaggcttctggcctctcgaaggcaaagcttttcagcgatttcattaatatttcattacgctgagatgagatgaaggcagatgctacagaaatatgtcagttaaagccacagaaacagaacagcttaagaagggctgggcgcccagctcgtcacgacacttacagctctggcgtcatcagaagcctctatcatctccctctgcaaagacgcagtctacacccagtgcgagtctcctgagcggggttagtgtttgggagtgggaggcagctgctagtcagagttgggtccttagggcgcagtgcttcacggaaacgcacagacgtctatggcagacgctctcagacacgtgtgcagaagcgacgtggcttctgtctggtaggggtttggactgttgggaggagtatgagggacaaagcaggccgctggctcagcatcagcttgttggaaaagggtcacaggcaggggagcgcctgactccagcggtgtcctttctgccctcacacttcagtgctgcttcccatcagtgacggggctgacgagaaaccgtgaggcccaggtgacaagcaggctcaggacatgcgacaccgtcttcgggatgctgctttccgctaagctgctgtctgggaaagtcaaccgtctatgtcccaaatcaatcaactcagtgacacaggtactattatttctcacaaatgccaattaaatcctttaagttgaatagaaatctgggttggattaagtgggaaaacccttccttagtttacattttctttttctcaggtgtttt

SEQ ID NO: 315539 - DNA, 445 bp, Homo Sapiens
  misc_feature (147)..(147): n is a, c, g, or t
  misc_feature (377)..(377): n is a, c, g, or t
  misc_feature (430)..(430): n is a, c, g, or t
taatatttaagggctacaactttaaaaaatggtttatttttttctttaacaaaatcggtacagctttctcaatccccaaattaaaaaaacagaaaacaggaagaaagggaagaaggcaaaggccacacgcacaggccggcccgcgcnaacgcgcctgctggacggcacttcagggcacaacccacacgcgtctttggacttgcagacattccgcgaggcttctggcctctcgaaggcaaagcttttcagcgatttcattaatatttcattacgctgagatgagatgaaggcagatgctacagaaatatgtcagttaaagccacaggaaacaggaacagcttaaggaaggggctggggcgcccagcttcgttcacggncactttacagcttttgggcgtcattcaggaaggcctcttttccttctcccctnttgcaaagacggagt

SEQ ID NO: 315540 - DNA, 510 bp, Homo Sapiens
  misc_feature (14)..(14): n is a, c, g, or t
  misc_feature (25)..(25): n is a, c, g, or t
  misc_feature (177)..(177): n is a, c, g, or t
gcctttcaacgganaacgccacaanacgtcctaatggcaagacgctcctcaagacacttgtgccagaagcgcacgtggcttcctgtactggtcaggggtttggaactgttgggcaggagttatgaggggacaaaagccaggccgctggctcagcatcagcttgttggaaaagggtcnacaggcaggggagcgcctgactcccagcggtgtcctttctgccctcacacttcagtgctgcttccccatcagtgacggggctgacgagaaaccgtgaggccccaggtgacaagcaggctcaggacatgcgacaccgtcttcgggatgctgctttgcgctaagctgctgtctgggaaagtcaaccgtctatgtcccaaatcaatcaactcagtgacacaggtactattatttctcacaaatgccaattaaatcctttaagttgaatagaaatctgggttggattaagtgggaaaacccttccttagtttacattttctttttctcaggtgtttt

SEQ ID NO: 315541 - DNA, 612 bp, Homo Sapiens
gatggaccctcacagacaaggcagtaataacatcgttcctaacagtatcaatgatacaataaacagcacaaaaactgaacagccagccacaaaagaaacttcaatgaaaaacaaaccagactttaaagcactgacggattctaatgccattttatatccatctttggcatcaaatgcttctaatcataatagtcatgtggtggatatgctaaggaaaaatgaaggtcctcacacttcagcaaatgtaggtgttctaagtagttgcctggatgtaagaacagtaattcctgaaacatctgtatccagtactgtttccagcacacaaactatggtaacccagcagaccattaaaactgaatcatccagtacaaatggggcagttgttaaagatgaaacttcactaacaacattcagtaccaaatctgaagttgatgaaacatatgcactgcctgcaacgaagatcagccgtgtagagacacatgctacagcaacgccgttttctaaagagactccttcaaatccagtggccacagtgaaagcgggagaacgacaatggtgtgatgtgggaatttttaaaaataatacagctttggtgagccagttttatttgct

SEQ ID NO: 315542 - DNA, 746 bp, Homo Sapiens
  misc_feature (605)..(606): n is a, c, g, or t
ctcctccacctctccgccccctccgggcttggctctcccaggaggctacgactggagccactggtcccgcaggatccccgcgttctcggtcgccgcgtgcacgtccctctcgcgtgcccgcccggcgccacgccgcctcctctgggttcggcctccgcgcggtgcagcgcagtctcaggccgcgggacaagcccgacttaaatctctgcaatggctaacgaagcttatccttgtccgtgtgacattggccacagacttgagtatggagggctaggccgtgaagttcaagtcgagcacatcaaggcttatgtcaccaaatcccccgttgatgcaggcaaagctgtgattgtcattcaagatatatttggctggcagttgcccaataccagatatatagctgacatgatctcaggaaatggatacacaaccattgttccagacttctttgtagggcaagagccttgtgacccctctggcgactggtctatcttccctgagtggctgcaagaaatgcccagaagatcgatagagagatcagtgctatcttgaagtatctgaaacagcagtgtcatgcccagatgaaatactcagaattcaaggcaggnngtgtccgtctatggcattgtcaaggattctgaagacatttacaatttatagaaccccactctgttcatctttgctgaaatgatggtgtgattccactcaaggacgtatctttgctgactcagaagttgaaagcctgcgtt

SEQ ID NO: 315543 - DNA, 767 bp, Homo Sapiens
ggttgtggcagcattcagactgaacgggacagtgggagaagtagcttcggagcaaaagtgacagctctgtggtctgtcctcatgctgaccttgatgcgggaggccctggagggttcaggtgtcttagtttccacccaccttgcttaaccttgcaaggaagaatggcatcaaaacgaggcttctccaggatagtctctctctataaataccgtgtatatatacatacagatactcatacatacaccaatactaacccacagacaaagctgggtgcctggagcactggctagcgacatgttaacacaccagaaaaagtagtcattgttcctgctcccagaagatcaagtcatatgtcatgatctttaaacattcagggaaaattcagaagattccattaattaaaggagggaggaagatgctgtcaaaatgatgaagtacagactaagtgaaattgtaaagaaaataaaaaaccggaacaattgaggcccctgttgctatggaaacttgggagtcaagcttcagacgtcaggagttctcacagacaagctaagctgaagaggctgaggagcaggactgagggcaggctgaagcgcagggcccccgccgcgttgcagtccactttggaattcctgcaggagcacacttgtaccctgagatctgtgatattcgtcatgggtggtttccctgaatctgtcaccatgatgggcaggttgtagtttgctttgttcagattttgaagaaggcttaccagggcgtgtgtattgttg

SEQ ID NO: 315544 - DNA, 1707 bp, Homo Sapiens
ttttcccaatttaaaaaagcctttattcatacttaaataacagcatacatgataatttgatgagtaaatcaaactatataattttaaaatttgcatattttaaagttttatcagttacttacagactgtttgcaaaatagagggaggatcactcataatcttacatagcactgtcagcagtctgctgtcctgtgcccagtcgaaatggattgaacactagatatggcatgtctcatgtcattcgtatatttccgtttccccaagtcttcacctgtccccatctacccagatcatttgggaaatgtaaatgtgcagtcctaagcgctgcccgcagggtcgcgatgtctgccaggtactgctggctggctctagacaccagcagcagtgataagaaacaaagcagaggagacagttaaatggtagagaagagaagggggagcagaggtggtaggccgggaacaggggaataagtatggttctccccgcacgtgcccatgtgcgcacacaccgaaggccatttaaagggaagcggttaggtatgaggttgtgtttgctgaattagtggttggtttttgctgtctatctagatagcagctgctgccagctcctcgtctaagaggctttctttgctgccaccttcactggtttgtggaaagcttctggccccatagactgttgagaattccaggagaaaattcctaattagcggatcccgtttgaatgcattcttacaggactgcatatgtacaaaagaagaattggcttcattggccccacatagatgtcacgtgagagtgaaaaaacctggggtataaatatcaaaggaacccctatctgctggtttgctgaggagcccacttccagcagaaccttctctgtccttctgagtctgtagagggcgcttatgtcactggaatcctagtctggcatggggcaggcagaggagcaggagcccccagtgggttcagatcttctgaaaacttgaggttagcggatctgccctttgagggtctcaggctggatttgggcctggagtccgtgtttctccaagggtgttgcttgggtgagcgctggagtgcacttgcatgtgtatgtactctcacgccctcgtggactgggaaggcgccgtagcacaggttagattccctgctttcagggagcctggttcatttttgtcctcgttgtatatagagcttgaacttggtgttccccaggtccagtaccactgccgttgctgcctgccttctgtttcactgctgttttctgagtgcctcgtgtgcagcctgtccttcagccctccctgaagctctgctgaccagctgtgttcccagctccttttcacgtgctctttagccagccttaccctgcattgtacttacttgggtcaggtgcccctgctagactcttaagcccctagggggcagggatctgggggcgtcatccacctctgcagccctagcttctggtatagcatgtgataggacatagcatgtgatggggcttctcggataagaaagggatgagtccatctgttcaccagtaactattagggatggggatttgtgtttaaaggtggggcaaaggagagagtgattcaaagtaatggattacttcagtgaacctataggttccttagtaggagagagagattattctgggcaagaggtcccgcccttggtctgccagcatttccccagaactcacggc

SEQ ID NO: 315545 - DNA, 490 bp, Homo Sapiens
  misc_feature (410)..(410): n is a, c, g, or t
  misc_feature (438)..(438): n is a, c, g, or t
  misc_feature (461)..(461): n is a, c, g, or t
  misc_feature (473)..(473): n is a, c, g, or t
ttttcccaatttaaaaaagcctttattcatacttaaataacagcatacatgataatttgatgagtaaatcaaactatataattttaaaatttgcatattttaaagttttatcagttacttacagactgtttgcaaaatagagggaggatcactcataatcttacataggcactgtcagcagtctgctgtcctgtgcccagtcgaatgggattgacactaggatatgcatgtctcatggtcattcgtatatttccgtttccccaaggtcttcacctggtccccatctacccagatcatttgggggaaatgtaaatgtggcaggtcctaaggggctgcccgcgggtcggcggatgttctgccggggtactgctgggctgggctttaggacaccaggcaggcagtgataaggnaacaaaggcaggagggagacagtttaangggtaggaggaggaggagggggngagcagagggtnggtagggcccgggaact

SEQ ID NO: 315546 - DNA, 1137 bp, Homo Sapiens
  misc_feature (5)..(5): n is a, c, g, or t
  misc_feature (11)..(11): n is a, c, g, or t
  misc_feature (21)..(21): n is a, c, g, or t
  misc_feature (27)..(27): n is a, c, g, or t
  misc_feature (37)..(37): n is a, c, g, or t
  misc_feature (45)..(46): n is a, c, g, or t
  misc_feature (53)..(53): n is a, c, g, or t
  misc_feature (63)..(63): n is a, c, g, or t
  misc_feature (76)..(76): n is a, c, g, or t
  misc_feature (92)..(94): n is a, c, g, or t
  misc_feature (131)..(131): n is a, c, g, or t
tgganaacagnatacttgganaccaanacctctgaantccacgcnnataaganattcatttgntgggtaacctgtntgagagggttctcctnnnccattcagatttaggatatttccacgctggacaccancctccaggaagattccaaccatctggataggacttcaccccaggagcaaagtagtcagcagggtcggagtagagaatgactcctttggcccctgccagctgggcatttttaaccttatttcctctgaaaactttcccatatctggcaattacaattttcccagagcaattgattttcatgtcccgtttccaatttaaaagaagtcttccagtttcgtgcatagttaacataccactagatcgccctctggcattcccttgaggagagaaagcactgaaaaggtggtacaatatccgaaacattttcatatcctggaggaggtggttcaaataatgatgtgttgaaaatctcatttccatcttcattaattattgagatgtagttgggatgagtcttatttgggtaggacaacaggacatcataatgtgctagctcaacagaatccaggccaaattctttccactgggattgaatttgctttgcaagctgaaagttttgttctgttcctgctaaatgtggtatctgtgtaaaattatataagaacttcttgatgttctcagctttcaattcatccaaaaatgctttcatattatgctttggagtaatgttagtagcttcattggaggattttataaaccacccgaagaggaagccgaggagaaagaagccacccgccagcaccagcgccccagcgcacagccagcgcgggcggcgcgcggtggccacagccgagtcggtttcgtgaaggagattccacatctcggcgcgagcagagccggcctcccgggacccgcgcctgtgctgctgctctactgcgcgccctccaaccaccacggcggggtaaagtctctctcaatctcactaatgcctcgcttatcagccctgcaggctggaattcgctccagacctggggtccagtttctccaccacagcagtgtttctagagtgcactgaaccaatccgagcgagagagagaggcaacatctgcctccaggagaaggaaatc

SEQ ID NO: 315547 - DNA, 562 bp, Homo Sapiens
  misc_feature (61)..(61): n is a, c, g, or t
  misc_feature (64)..(64): n is a, c, g, or t
ctactttgtccttttgttgtcaatattcttgtattgggattagtctctctgtggggcaaancancctctgaaactggccttacattttgttaaaattatcctcaggttggcacaaaagagcattatctccaaggccagtaaggtagtaactcctggaagcaataggcggaaagcagaggtttctctccttcatgccaaggtcatggtcactccaaaggtgagggatgaaacagtaaatatataatacagaaatatccctattctctttaaatgaggaaaacaaagaaaagtaagtatccaaagagaacaattttactttaaaaaatgcaaatttctcaaaaatatatgttaagaatttacataaggaagaggagctacaaaatacttttttcctttcattgggaaaaaattataacaaaattaaattaatgcaatggagacactcttgtacaaaattttgtgttcagaaaatactgctcattaaaaatgacatttttagtcaaaaggtagctctgttcaattttgagtacacaagaagctttttcaatttgcttaggagaaa

SEQ ID NO: 315548 - DNA, 255 bp, Homo Sapiens
  misc_feature (173)..(181): n is a, c, g, or t
ttttgtcaaatctcatctctgttctcctagttttcacagaaatatttacaggaataaaggttgaaacaaaagtacctaatgatcatctccatccatcgaaagattgctcagggataagacactcaaacaagggcttgtgatgaggatggaaaagacaaagcaacttgaagagnnnnnnnnnttcttttacactcagtctcatcctgcaaaatgcacataacacgtgcatatagaggtttcactttttaatccccc

SEQ ID NO: 315549 - DNA, 712 bp, Homo Sapiens
caccaaactaacatttatttagctttgttccctcccatccaagactgctgatctctaaacaagcatcaaaacccgaagctcattaacatcagagtgagcttcaataaggtgaacactacaatgatgtacaattacatcctaataattcaatgcccaagagccctgtagaactattgcaaggcccaggattatcacagtatgcaaatgcactaggaaaatcattacctatttagtcccctttattttggtgggtttaacatgagaagaataatccatgctacaagacgagatttcattttacagctgtagtaaccaagtgcataaaagcttgaatctgtcccaatagcttctaaaaaatttttcccatagtgtcagaggcaaaaataatgaaatcttgcaaatgtacagttaataggaccctagtggacactaacttcaaaaatgcatggtctataagatattataaggcttgattctagtttctgcactgttcctgttaataacaatgtctaattaaaacatctgtaaaatactgatagttttaattttacataaaatttccaaaacaacttgttacacagtataaataggtattctgcacatgaataaggtaattaatggaatatattaaatttaaattaaaaatctgttctaaatttttaagcatccctggctaatgaagagagaagtcaccccctgctgggtccacgtc

SEQ ID NO: 315550 - DNA, 1549 bp, Homo Sapiens
  misc_feature (12)..(12): n is a, c, g, or t
  misc_feature (56)..(128): n is a, c, g, or t
aaggcccatttnaatacatgccatgtaagaaaccttgtatccccctaatctatacnnnnnnnnnnnnnnnnnnnnnnnnnnnnnnnnnnnnnnnnnnnnnnnnnnnnnnnnnnnnnnnnnnnnnnnnntgtggcttccaaatcccttatcttttcatttattcataaagatttctggtcccacccatgttccaggacaagttgtatcaatatactccaatcctttctaacgccctgagttctttcttccacatatcttctaattcgtggtctgggagggaaaagggtagtggagttctcaggtggatgacatctccaaaggggagaggacaaaggcctctggcttggcttcctgcttcagcactccagtcagcaggaactcaggcgagaggaggggcagcccaacccgtagtggaatggagcaatgagggaagtcctgagggcatgtgatcacaactctctgaggcttataggaccgaggcatgctgggtaggtatgtgcctccacagcagctaataatctctcccatctgaggtggtggtggctggactccaggggtcacatagatctcatagccctctagcagccttcgctcccgagccctgctcagtgcgtcttgaaggctaaagccaaagttcttctcttgctcagggtcggtcaccacatattcatccgggggtaagaagaaaccagccttgcgggactgatgcagccagtccagggacagaatggggattccccgccccagggcacacaggaacttgactgtccggcggatgcgatcagtgaccaggtgggaagcctctgccgctgaaccagccagacttccccccagtgccagcacagcccgctctccccgagcatccaccactcctgtgaagagcactttgggggctgttgattcttggttaagtttggtccgtcggaggctgcggcttggtattctgttgggctcctcctctgcctggtctctctttctcttgcctggttttggagtcacgacatcctgagattgagaaaaatcttggtgggagtttcagagccctgaagtcatttttcccagctttgtggtcccaaccctctcctcacctcttccttccctggcttctctgcagtatcttcttcctcttccttgataatcactgtcttctgggagacttcccctctttggggctgtttttgatgtggtggtgaatccatggtagctaaagacctcttgcggctttgagaggccttaggctggagctccggggtgaacctagatctacctgctggttccaccttttggatctgggaggcatgaattggtgtctcaagaagctggggagaggcaggctcaggaatggctgtaagggattcagctgctctcactgctccccatctttggttccttgaggcctgggatttaggttccaagggtgcagagcaaggcttatggtcaatgggagctgcgagggagccagggttcccagcggctctctgcctcttgatgcaactgggttgagtaataggctcaggggaaataggctggtctgtggtgacaggagatt

SEQ ID NO: 315551 - DNA, 242 bp, Homo Sapiens
gtaccgaaagagaagccgacacaagaaagatgaaatatttttgcagtagagaagttgtagcagcaatgtgggatgctttgggcttcctggaagccactgagattgggtttctattggaaaaggaagagaaaggaggttgattccccttctctgtgatcatctattcagataagggttatgacctctgacttagatgataataatggcaggaattatctagatgtaacagtggggggcctccc

SEQ ID NO: 315552 - DNA, 514 bp, Homo Sapiens
  misc_feature (15)..(15): n is a, c, g, or t
  misc_feature (87)..(87): n is a, c, g, or t
  misc_feature (122)..(122): n is a, c, g, or t
  misc_feature (129)..(129): n is a, c, g, or t
accccggccggaaancctacccctggcggggagaatggaccccccctaaatggttagaaccggaatccattaagccgggggcccccngggtttccctggcctgagaaccaaatacaaatccngcctccncctttggggttttagtatgtgtcaaacataggactggaagtttgcccctgttcttttttcttttgaaagaacatcagttcatgcctgaggcatgagtgactgtgcatttgagaatagttttccctattctgtggatacagtcccagagttttcagggagtacacaggtagattagtttgaagcattgaccttttatttattccttatttctctttcatcaaaacaaaacagcagctgtgggaggagaaatgagagggcttaaatgaaatttaaaataagctatattatacaaatactatctctgtattgttctgaccctggtgaatatatttcaaaacttcagatgacaaggattagaacactcattaaagatgctattcttcag

SEQ ID NO: 315553 - DNA, 1417 bp, Homo Sapiens
  misc_feature (381)..(381): n is a, c, g, or t
cttagaaatatgcttttattatctgcacacagagatatgactgcctccctctaaagcattactatttgggagagggagtcttggggggtgatgggaggtcctgagtcatagcttccacataccatatgggcaggaaggcgtaaggtgcatcttggtgtacagacacggtgactgggccgccaggctcccaagagaagagatgaacgagcctggggtcatcctggacaaccgtgctctgggcaaagctaaggaaggcggcacagaagttcatgcacacagagggattccagccgtcacggtcattcctgacatattcaaacatcttcatggtaggaaaggtcttgagggaagagacaaaaccgtctgggttacggaagccanccacaacattcgggacccctgggaggaatgactgagcccaccatttcaggagcttgtgtctgtagaaactcctccattggccagggctgtgcatctccttggaggtcttgagctccacatagcaggttgggggctgtgtggatggggcttgggggtctgtgcagtctacctcccctgagaagagcagagggtggcttccccaggcggctgcgtagcacagagcagaaggccacgttggtgttaacctccccagaggggtctggggagcttccaggtttgtctgcacacatgtactgctcaaatttgtatcccatgtacataagctcccggaggagcggtggccgagcaagcctctgggcccgagcgttcggtgtctccacttcactcaggtatagtgttccctggaaccgggaggctgccagctgccagccctcctgccgctcatacggtgtcgtcagcagttttgtcaggtgcccccgccacgtcactatggcctctgccagccagcctggacccccctccaaccggcctcggtgttccaggagccagcacagcaggtggtccagcctttcctggacctcctcgtcccggggctggtatcgatccgggtatccgtctctgaggtcaaagttggggcctggaccgttagtggggggtgggctatagtagcgcagggctcgggcatctccatggtactggcgttgagcatccagggagaagcagcccagttccgaagggcgccggtagaaaggaaagggcccagagtagagggcagggtctgtgggcagagaaggtgctggacgaggtagtttgttccgaggctcagctacctctgtcttctcagctcctctcttggtccccctgggatccatgaggtcctcaaagctccccaacttccacctccgcagagctatgacgtcatggcaggcacgccagaggccgaaggatgcaaaagtggttttctgctttcgatgatgcaatcattcagcgacagtggcgggcaaaccctcccggggcgggggaggtgtgagcttca

SEQ ID NO: 315554 - DNA, 707 bp, Homo Sapiens
  misc_feature (417)..(470): n is a, c, g, or t
  misc_feature (513)..(574): n is a, c, g, or t
gtcccctgtctgaggagggaggaggcctctgtctgaggggggaggatgccgctgtctgagagggtaggaggaggcctctgtctgttgtcagaggaggctcctgccaccacgttgacgcgcggcgatctcgatccccatgacagcaccgcctgagagacaccgccacgccaagcgatcctagctccccaagcacacatccgccatacctatccgtacagcaccagacgccccaccgccatagcgcatccctctcacccagctccccaccgagtcccaacacacccctactcctcatctcccaagcctctccaccccgctaccccactccaccacagcctgacccactccacatctcctgcacctctactactcctcctcatccccatctctcactcttctacttcccccccctacgtnnnnnnnnnnnnnnnnnnnnnnnnnnnnnnnnnnnnnnnnnnnnnnnnnnnnnngcgcctcatccacttcacacttactcaccccacatcaccaatnnnnnnnnnnnnnnnnnnnnnnnnnnnnnnnnnnnnnnnnnnnnnnnnnnnnnnnnnnnnnnttccccaccctctcttactctcctccactcatccgtcccgccacactaccctctcgtcaacctcctcctatcgtcacactctcccctcgcctcctctcctccacacccttcccacggtccgtcaccacttcac

SEQ ID NO: 315555 - DNA, 378 bp, Homo Sapiens
aataataaaaatatcaatttaaagttttattcatgatcgtcttattaaaataaatttaattgcaaaaacaacctgtcttagaatacagtatcagatgttttaagtacatgtgatcaacagtacaaataattatagcagtcaaaccttagtatcacacatacttaatatattagatatacacaataataaaatcactccctaccttgaaaactttacagaagcatttttaattttacaacacaaagctcaaacgaacctacaataagtctagtagtctgtttacgtgccaagggataaggctgaacaataaattaaccctttaaaaatgtctatgaacaagtacaattttctttttgagttctgcagagcaatgaccac

SEQ ID NO: 315556 - DNA, 1555 bp, Homo Sapiens
  misc_feature (1530)..(1530): n is a, c, g, or t
  misc_feature (1539)..(1539): n is a, c, g, or t
gacgccgctcgggtcagtcggcggccggactgggaagatggacgcagctactctgacctacgacactctccggtttgctgagtttgaagattttcctgagacctcagagcccgtttggatactgggtagaaaatacagcattttcacagaaaaggacgagatcttgtctgatgtggcatctagactttggtttacatacaggaaaaactttccagccattggggggacaggccccacctcggacacaggctggggctgcatgctgcggtgtggacagacgatctttgcccaagccctggtgtgccggcacctaggccgagattggaggtggacacaagggaagaggcagccagacagctacttcagcgtcctcaacgcattcatcgacaggaaggacagttactactccattcaccagatagcgcaaatgggagttggcgaaggcaagtccataggccagtggtacgggcccaacactgtcgcccaggtcctgaagaagcttgctgtcttcgatacgtggagctccttggcggtccacattgcaatggacaacactgttgtgatggaggaaatcagaaggttgtgcaggaccagcgttccctgtgcaggcgccactgcgtttcctgcagattccgaccggcactgcaacggattccctgccggagctgaggtcaccaacaggccgtcgccatggagacccctggtacttctcattcccctgcgcctggggctcacggacatcaacgaggcctacgtggagacgctgaagcactgcttcatgatgccccagtccctgggcgtcatcggagggaagcccaacagcgcccactacttcatcggctacgttggtgaggagctcatctacctggacccccacaccacgcagccagccgtggagcccactgatggctgcttcatccccggacgagagcttccactgccagcacccgccgtgccgcatgagcatcgcggagcttgacccgtccatcgctgtggggtttttctgtaagactgaagatgacttcaatgattggtgccagcaagtcaaaaagctgtctctgctcggaggtgccctgcccatgtttgagctggtggagcagcagccttcacatctggcctgccccgacgtcctgaacctgtccctagattcttctgatgtagagcgactggaaagattcttcgactcagaagatgaagactttgaaatcctgtccctttgaaaatcctggggtcgggggtggcacctgtgagagcctggggctcctggtgccgctgcgtttcatccatcccgcccgctcgcctgccgagctgcgccccgtgctgcctccccccagagggccacccgctgtgctcgtggactgaggtgcgctgcccgggaggccttactgcttggtgtcagactgcccagctcagagtgcccgtcagggcctgtgcatccgcacgcggagccgtctgttaggagcttccagagcgttctctcgacactgccagccccgtgttagcacctgggcctcagtcccacttgctccncaggcgccnggttctgtggttggtt

SEQ ID NO: 315557 - DNA, 2364 bp, Homo Sapiens
  misc_feature (17)..(17): n is a, c, g, or t
  misc_feature (26)..(26): n is a, c, g, or t
  misc_feature (35)..(35): n is a, c, g, or t
  misc_feature (43)..(43): n is a, c, g, or t
  misc_feature (191)..(191): n is a, c, g, or t
  misc_feature (212)..(212): n is a, c, g, or t
  misc_feature (248)..(248): n is a, c, g, or t
  misc_feature (577)..(627): n is a, c, g, or t
accaaccacagaaccgngcgcctggngagcaagtnggactgangcccaggtgctaacacggggctggcagtgtcgagagaacgctctggaagctcctaacagacggctccgcgtgcggatgcacaggccctgacgggcactctgagctgggcagtctgacaccaagcagtaaggcctcccgggcagcgcanctcagtccacgagcacagcgngtggccctctggggggaggcagcacggggcgcactncggcaggcgagcgggcgggatggatgaaacgcagcggcaccaggagccccaggctctcacaggtgccacccccgaccccaggattttcaaagggacaggatttcaaagtcttcatcttctgagtcgaagaatctttccagtcgctctacatcagaagaatctagaaggaacaggacatagcgcatcaggcatcttgggtgggccacctgggtgtgagtcaagggcccttggcgtggggcagactgagcagtgcctgctctgcagcccacagacagctgtccccatgcgggtgtgaacaggtccgggggttgtgcagacctgcgaatatnnnnnnnnnnnnnnnnnnnnnnnnnnnnnnnnnnnnnnnnnnnnnnnnnnncggccggcacaatctcaggcctgaggggcctctgtcccgcgtctgaccctcgtggtcatcaggagtggttccattgccattgccttgtttgtagagttttccacagggagacagagatgaggaggacgcgctcacggccactcacttcactgcacgagcccaggccggctcctgcggcacgctgcccatggtccgaggggtctacgccacccatggccagtggtgcccaagtgaaccagtcccccacccaggactgcgtcaccacagagcctgcatgttctgtctgctccagacccctgaggactccatggtagcacgcccagctccacagcgccccggcaggcagcgctggtggggaagacgaggtgggtcctgggctgctgggcgcaagcttggaggaggggacgctccactccatacctggtctcacaggcgaaccactgccaagtgctcacggctcaggctcacacacaccttaatggtcaaaaccaagggggccaggactggggaagcaagggcacagatcgtacctccgagggaccccacctggacttggcagctctcacctagggacaggttcaggacgtcggggcaggccagatgtgaaggctgctgctccaccagctcaaacatgggcagggcacctccaagcagagacagctttttgacttgctggcaccaatcactgaagtcatcttcagtcttacagaaaaaccccacagcgatggacgggtcaagctccgcgatgctcatgcggcacggcgggtgctggcagtggaagctctcgtccgggatgaagcagccatcagtgggctccacggctggctgcgtggtgtgggggtccaggtagatgagctcctcaccaacgtagccgatgaagtagtgggcgctgttgggcttccctccgatgacgcccagggactggggcatcatgaagcagtgcttcagcgtctccacgtaggcctcgttgatgtccgtgagccccaggcgcaggggaatgagaagtaccaggggtctccatggcgacggcctgttggtgacctcagctccggcagggaatccgttgcagtgccggtcggaatctgcaggaaacgcagtggcgcctgcacagggaacgctggtcctgcacaaccttcttcaggacctgggcgacagtgttgggcccgtaccactggcctatggacttgccttcgccaactcccatttgcgctatctggtgaatggagtagtaactgtccttcctgtcgatgaatgcgttgaggacgctgaagtagctgtctggctgcctcttcctttgtgtccacctccaatctcggcctaggtgccggcacaccagggcttgggcaaagatcatctgtccacaccgcagcatgcagccccagcctgtgtccgaggtggggcctgtcccccctcttaggactcagtaacgccaagggccacatttactggagagtgaaatgtcccgacaacctccaatggctggaaagtttttcctgtatgtaaaccaaagtctagatgccacatcagacaagatctcgtccttttctgtgaaaatgctgtattttctacccagtatccaaacgggctctgaggtctcaggaaaatcttcaaactcagcaaaccggagagtgtcgtaggtcagagtagctgcgtccatcttcccagtccggccgccgactgacccgagcggcgtcgctccgacgggccagcaacgcgacgcggcgacgggacgccgcg

SEQ ID NO: 315558 - DNA, 623 bp, Homo Sapiens
aataagaggaatggcaaactcttcaaagggcatgaacaaagtacatgtgaatgatttgttcatgttaggaagtgcaatcatcataaaggtatttctaggccaaatatgcagataattaggttccatggcataatctccgttcttaggtggaatagtcaactccatgtacccatgaggaatgtactgctgactgtaatcaaagcgaggtttcttcatcaggtgagatctgacagttgaataggctccatcacatcctacaatgaggtcacaagtgacatctttgggaactttgtcagatccaagcactgtgatcattccttcctctggattacatttcaacagcctgtggttaaagtgcattttcacattggggtatttctcagcagcagtcaatagatccttgtttagattttctctgcttacagaaagaatatactgagactttgtcccatagggaattgcagacttttttcctgaaagagagtggatcattcttgctctcatgggaataccttgggatacaatcaagccgccaccaatgacagctacttttttcctttgaatgacagatgagtccataactgctgaagtatttttcacaattattgttgcttctgtcactg

SEQ ID NO: 315559 - DNA, 378 bp, Homo Sapiens
tgtaatcaaagcgaggtttcttcatcaggtgagatctgacagttgaataggctccatcacatcctacaatgaggtcacaagtgacatctttgggaactttgtcagatccaagcactgtcacattggggtatttctcagcagcagtcaatagatccttgtttagattttctctgcttacagaaagaatatactgagactttgtcccatagggaattgcagacttttttcctgaaagagagtggatcattcttgctctcatgggaataccttgggatacaatcaagccgccaccaatgacagctacttttttcctttgaatgacagatgagtccataactgctgaagtatttttcacaattattgttgcttctgtcactg

SEQ ID NO: 315560 - DNA, 886 bp, Homo Sapiens
  misc_feature (711)..(711): n is a, c, g, or t
ggggatttattttttcttagagctgagctgattgtactttggccaactaatgggttaatactgtcaagggaaattagccctgactaaacattgccgctggctcatgaatgcactaggcttggggcagtataaaaactcagagaaatcagtgtgtaggagacacagaaatcagtgtcactcagtgacagaagcaacaataattgtgaaaaatacttcagcagttatggactcatctgtcattcaaaggaaaaaagtagctgtcattggtggtggcttggttggttcattacaagcatgctttcttgcaaagaggaatttccagattgatgtatatgaagctagggaagatactcgagtggctaccttcacacgtggaagaagcattaacttagccctttctcatagaggacgacaagccttgaaagctgttggcctggaagatcagattgtatcccaaggtattcccatgagagcaagaatgatccactctctttcaggaaaaaagtctgcaattcccctatgggacaaagtctcagtatattctttctgtaagcagagaaaatctaaacaaggatctattgactgctgctgagaaaataccccaatggtgaaatgcacttttaccacaggcttggttgaaatgtaatcccagaggagggaatgatcccggtgctttggatctgaccaagttccccaaagatgtccacttgnggacctcattgtaggatgtggatgaagcctaattcaactgtcaaatctcaacctgatggagaaaaccctcgctttggataacaggccagcaggcacattcccccctggggaacttggaagatgaactatttccaccctagaacgggagaattatgccctggaaccctaattttct

SEQ ID NO: 315561 - DNA, 1204 bp, Homo Sapiens
cttcgttgcccctcagcccccgacggtctctcttcaaaatgtttgcaactgctgcgttagcatgagttggcacccactgttaacgtggttcatgactttctgtttaagctgtgccacctgttccctgagcatgttggccgtggacgccagctccgagttctgagctttcaaggttttcactttttcctccagccgggcgattctctccagcttcctttttcggcacttggaggcagcgatgcggttcctcatgcgcttcctctccgccttgatccgctcctgggactccatgtcgatgggggacaggggcggtgtctcgccgggcatctcgggcactgtctgaggctcctccttcagggcctgcagccgcgggtgctgcacgggcatctgctggggcaggtggtgcggcggctgctgctgctgctggggttgcgcgggaaaggccaggccggccgcgccgtaggaggggcgccccgccgccgctgctcagcgcggcctgggttgaagttgctgaggtttgcgtagaccggcggctcgctgtgcaggctggcgctgaagccgccgctgccgctgccccctgccaccgaggctaccgcgggagccaccatgcctgccccgttgaccggctgcgccgccgacgtgacgctgggcagcgtgttctggctgtgcagttcggccagggcgcgcacgaagccctcggcgaagccctcctgctcatctgtcacgttcttggggcacaggaactgggtgggggtcggcgtggtggtgatgtgcccgttgctggactggattatcaggcgctccagctcgggcgacgccagcttgagcagccccacgtcgggcgaggtgaggaggtccgagttcttggcgcggaggtgcggcttcaggctccccactgggtcggccaggttcagggtcatgctctgtttcaggatcttggggttactgtagccataaggtccgctctcggacgggaggaacgaggcgttgagggcatcgtcatagaaggtcgtttccatctttgcagtcatagaacagtccgtcacttcacgtgaggttagttttggctgcgcgcacaagtttcggggccgcaacagggctctggcaaagcgggggacacccgcgccccccggagcctttgacagggaaagtttctctaagagcgcacgcaccccgctggctgtcgtccctcctgcgccctcct

SEQ ID NO: 315562 - DNA, 599 bp, Homo Sapiens
  misc_feature (35)..(35): n is a, c, g, or t
  misc_feature (91)..(91): n is a, c, g, or t
  misc_feature (103)..(103): n is a, c, g, or t
aagcgctcgaattccctgcttgaagccgttcaatnctcttcaacctaactgtgcccactttccctttcattctcctgttctttctccttcnatgcgctgcttntccagcccgggctggggaatgaccactctgtttccgtttcctggttctcccttggtcttcctcctcttcctcctgagccagggagctctgactggaatctggagagtgagggctctgggaggtgcttgtgacctctgctggttctggctcctcctcagtcagccaagccagagaagcagggtcaagagtggtgaagatttttgattcttcctcttcatttccaggaggtgaaacataggtacccccattttcatctgaagacaggacctcttgcaggtcctcataccaggcttccagctcccagctggacagtgtcccgaaggagaaaggcaatgactcagctgccatctctgcagttggatcagtctggaaaagcacatctgctttcaggtgtggtgatgtatgaagatacacttccttcttgaacactctctcctcaggttccagctctgattttggctctgtcgctgccacccgctcatctttaacatgatac

SEQ ID NO: 315563 - DNA, 645 bp, Homo Sapiens
  misc_feature (129)..(129): n is a, c, g, or t
acaagcacataaagcaagggtggagaatgtcagaaaattatcctttaaaatcaaagactaaaatataaccttattagttttgaatatttatcccagattacatttcatatgcaagattctcttcaatanagctttcttctttattacaggaaagtatttctatgcataaaatagtaagatttgtctttgaaaagagcatgacaacccaaccaattctgttcctaaaccaatggctagtttgggggcgtaaacagtagacaacataaagtaaatcactgtcaggaaataataattagcatcgtaaaaataacctccactgcctcagctgactaatgcacaatgcctgttcaagcccgtatttcaaatctgaaagtcaccaaatgaaattagcactttcattccgaagccagattctgttggtatttttgcctggaaggaaagggaaaccatttcgtacactctcactaatccaaaatagcaaaaacttgtcatctttgttgcttaaagggaaagctgttcaagggcttgacagacaagaagatcccagttcaattcagcatcattctccttcctgtcctccctatttcactgttctaggtccctccattagagggattaatgactcatattttgttcagagtatac

SEQ ID NO: 315564 - DNA, 687 bp, Homo Sapiens
  misc_feature (601)..(601): n is a, c, g, or t
  misc_feature (672)..(672): n is a, c, g, or t
gcggctacagcacccagacaaccaccccctgctgctctgaggacaccatcccttcccaagtttcagattatgattatttctctgtaagtggtgaccaggaggcagatcagcaggagttcgacaagtcctccaccattccaagaaacagcgacatcagccagtcctaccgacggatgttccaagccaagcgtccagcctcaactgctggcctccccaccaccctgggacctgctatggtcactccaggggttgcaactatccgacggaccccttccaccaagccttctgtccgccggggaaccattggagctggtcccatccccatcaagacacccgtgatccctgtcaagaccccaaccgtcccagacctcccaggggtgttgccagcccctccagatgggccagaagagcggggggagcacagccctgagtcgccatctgtgggtgagggcccccaaggtgtcaccagcatgccctcctcaatgtggagcggccaagcttccgttaacccttcactttcaggcccgaagcccagtatccctgaggagcacagacagggcaattccagaagtgaagcttgagaccaggaactgggaacccncaagtgccactgtcttccccagccagaatccagagagtgaccctgcagacctgagcccggatacttcacanggagaggacatgctg

SEQ ID NO: 315565 - DNA, 1778 bp, Homo Sapiens
  misc_feature (585)..(585): n is a, c, g, or t
  misc_feature (1007)..(1007): n is a, c, g, or t
  misc_feature (1034)..(1034): n is a, c, g, or t
  misc_feature (1054)..(1054): n is a, c, g, or t
  misc_feature (1064)..(1064): n is a, c, g, or t
  misc_feature (1070)..(1070): n is a, c, g, or t
  misc_feature (1072)..(1072): n is a, c, g, or t
  misc_feature (1103)..(1103): n is a, c, g, or t
  misc_feature (1108)..(1108): n is a, c, g, or t
  misc_feature (1164)..(1164): n is a, c, g, or t
acattatcgaaaccactggaagtttattcaaatttttgtgcaaaggatttattagcatcaatgccattcatgaaatatgtctctttactacaacagtgaaggaaggaaaaatatgagttcagcatgtattttaatgttgcaaaggaatgacaactcagcaagctgtagaaaatggcagaggagacggggtaataacagaagcaatgaagactcctggatgtacccaaggacaccctacggccagcagcttggtttctcccagaatcagtttacagacttgctcagcctgcgggagggcccagggatcatgcaggaagaaaacggaatacgcttgattctggaattggtcattttaagacgcttttagtaagatggtttcatgtctacacccaagtcttgccaaccaagaagcatcaacgtgaacagctcagagacattcctgcacaggagagcagggaggaggcagtggaaaggtacctatgagcagcagtgcccgggggcgctggccacctccctgcgcaccggataccctcccccgcacccacaggggttcacttacagtttccccaccttgcagcagcagtnaggctcagagtcacccacactccatacatccctctgctcataccctgcctgttgtgtggctccgtctacctacaaagccccacaaagtgacaacgctgggatgacaaaacctttcctcttagatattatatactttgcaaggcttggaaataagctactgcattggtcttaagctagtccggcatgtgaagaaacaagaatttgcccagaagaggactgtggagaaacctctgaggcctccttccagagtaaggcccgctcacttgaccagattcctcatgatgttcagggaggatcctctgtaccccgatccaaaatgattccagtggttcaagtagtgaaagagctgatacaactgaaggcgcttctcgaatcctggggccttggggattttgccgtggtaggcggagtaaaaggagctntaaagcccccaaacatgccagctattnccagctcatattccgagtgnccctacaaanaagctngntcaaaaatcaccggcccagaggaatcctctnctacntttccaccccaagaggtccccgtggaagtaaggctgggatgatctccaggtcacgngacaggtcagggggatctttaactgcagagcagaccaaaagctggagggcctccctgtccccagactctttctccaccatgtccatttggggctgaatgcgctgccgggcatagaacacgacccagtcctcctgccagtcattcacctgggggaggtatccacagcacgtcaccacgtcaaatccaaaccgggccacaaagggccgttcctcctgcccacctcctcttccccactgtgcccgcctccttcaggcgcatctctccaagctttttgttatcaaggtgtaaatcggccagctgggctccaagctttgcagcatgactgctcagatgcctcatgtccatgtgctccatcaccagcacgctcccgccgcctggggcatccagaaccttgatgggcttgggcactttcaccgtgtttgttttcaggatggcagttaaacttgccatctcaccttcaaacattcttctggcctccgccttggggttcactttcacgaacactcgtccttgatccgtgtcgtagctccggccctggctgatgcacccgccccccgagtggcccgtggccctgacagagctgcagcccagtcgcgcctcagcagctcctccat
